United States Patent Application Publication US 2005/0228172 A9 - sequence listing, part 13

SEQ ID NO: 42147 - DNA, 1606 bp, Homo sapiens
taatataatgtctcactgaaggatagaagcttggccattcaaaacagtttggaagtgtggaaggagatgattggtataagaaaaccgttggagaggaagacaggagccagatcttgtgtgtgtaactgtgcggcaagtgacacacctttttccacctctgttggtgatagcaggggagtccatttcatggagaatagcaaatagcataatgctgccagcaggaacagcagtcccaggacatccaactcactccatggttcagagtatccaaggaagacacaacctgcaggcatggtgtggagcaatgctttgctcacatacagaggcagggccagatcagcttccattgtggctgtgggtcccccatggccagaacaagctccttctacagcctacctttcctcttgtgttgcaggagaaggacttcatagtacacacgtactagtggggttggcgaggtgctatatgacacatacgcttaagtagagcaaaggaacacatattgagatcggtagaaagtaagacattcccgtacatggccgtaargccaacacagactgtgactgctctttctgtcttggtaagaaaatgtctccatctccaggaccattcttgtgcagcccagcatcatcaaaagactgcatgcatatgactgcctttcccaacaagagagattttctaggacatggtaaaataattttattttcttttgcatgtaatgagtcaatactggatgagtttgagctgaagaatgtggtgttttgcttaacattttaaaaaattcctccagattatttaaatatgagagcaatattttagtaaggcggtgacaaagttaagtggctagatttctaatgtccggaacggggcttaggctcctagtaaataattaccgaatgaattaatgaatgtgaaagatcttatggaggaaatcgtgatatttcaatgagagacattaaaaaatatttgtctaacatcatcatttcctaacttaattccttcaaaattgtacaatccactaaccctatcgtcaaaatcttctcccatttctatcactccttaagatttcagcaccagggctactctctctctcgtgacacttttatttgttgatgactcttctaataatttgacttcttaataatttggtctcctctcctcatatccagtcattgacttcaattacccagccctatcacactctaaaacttgtcattacacagaaattcaccttctctataataaaaatttcaaggatttcaatctccaactattacatcttacttctcagttcaattcccctcgttcactgactcctggaattttttacactgctagatgtaatttccattcatactatcttcttatcactgtctctcattgcttcatatccctaatttcatctctgctactttaaattgcacaaataatcatttaataactcccatattcactcttttgctcatttctgcttccatcatattctcctagtgaaatactaactctaattaaatgtatttctccatttactctgttcctgctcgaagtcactgaacttggttagaaataaacacatacgcatggtgattgaattgactttaaatgc

SEQ ID NO: 42148 - DNA, 1606 bp, Homo sapiens
taatataatgtctcactgaaggatagaagcttggccattcaaaacagtttggaagtgtggaaggagatgattggtataagaaaaccgttggagaggaagacaggagccagatcttgtgtgtgtaactgtgcggcaagtgacacacctttttccacctctgttggtgatagcaggggagtccatttcatggagaatagcaaatagcataatgctgccagcaggaacagcagtcccaggacatccaactcactccatggttcagagtatccaaggaagacacaacctgcaggcatggtgtggagcaatgctttgctcacatacagaggcagggccagatcagcttccattgtggctgtgggtcccccatggccagaacaagctccttctacagcctacctttcctcttgtgttgcaggagaaggacttcatagtacacacgtactagtggggttggcgaggtgctatatgacacatacgcttaagtagagcaaaggaacacatattgagatcggtagaaagtaagacattcccgtacatggccgtaaggccaacacagactgtgactgctctttctgtcttggtaagaaaatgtctccatctccaggaccattcttgtgcagcccagcrtcatcaaaagactgcatgcatatgactgcctttcccaacaagagagattttctaggacatggtaaaataattttattttcttttgcatgtaatgagtcaatactggatgagtttgagctgaagaatgtggtgttttgcttaacattttaaaaaattcctccagattatttaaatatgagagcaatattttagtaaggcggtgacaaagttaagtggctagatttctaatgtccggaacggggcttaggctcctagtaaataattaccgaatgaattaatgaatgtgaaagatcttatggaggaaatcgtgatatttcaatgagagacattaaaaaatatttgtctaacatcatcatttcctaacttaattccttcaaaattgtacaatccactaaccctatcgtcaaaatcttctcccatttctatcactccttaagatttcagcaccagggctactctctctctcgtgacacttttatttgttgatgactcttctaataatttgacttcttaataatttggtctcctctcctcatatccagtcattgacttcaattacccagccctatcacactctaaaacttgtcattacacagaaattcaccttctctataataaaaatttcaaggatttcaatctccaactattacatcttacttctcagttcaattcccctcgttcactgactcctggaattttttacactgctagatgtaatttccattcatactatcttcttatcactgtctctcattgcttcatatccctaatttcatctctgctactttaaattgcacaaataatcatttaataactcccatattcactcttttgctcatttctgcttccatcatattctcctagtgaaatactaactctaattaaatgtatttctccatttactctgttcctgctcgaagtcactgaacttggttagaaataaacacatacgcatggtgattgaattgactttaaatgc

SEQ ID NO: 42149 - DNA, 1697 bp, Homo sapiens
aaagaaataatttactgactatcaggtgcatgatagtcgtacttttctctttgccctgctgggatgaagtaccagtcataatggtaccccctaataatttccagtgcaaagaagagggtaagatgtagtatgggggcttctgaagatcgaggggggatctatgttaggtgtatttagctagctggtagggttgattggcttatgaggtagataatttataaataaaagagaaaatgaggttgtgcaaggtagacagagatacatctaaaacaagtaaattaattaaaaattaattgataaaaatgcgaaaaaaaagccaacaaaaagctggctacaaaaatcagccagaaggccaacataccagatatgatacagaacttccagcttatgtgcaaaaatatctctaaaaacctcagttttcatgtggggactgctggtttcctagccaactctacctttgctactcaaaatattaaagacagtttaaactttacacatttattatttattatttcttttggtgataacattcaaaatcctctcttttatctttatatcttgtatatctttaaatatacaatacattgttattagctatagttaccctactgtataagattttttctttaacatatgtggaaagttactggtaaaaataatccagaacatattgtgatttttacctttgggtctatctcttatgggcaagaataattatcctctgtcaaggcaactgcgtcacctgatcattggatccgcacctgttcttcactggcaaagcagttaatagtctcaagttccctagtgaaaacaacayaaaaacattctctggtacaccttttcattattttgcaaaatataaaaaacccaaccaacgaaacaaacaaacaaaacatggtcatacattgctcatctggctctaactatacggcttcctgagggctatttagttttatgggaagactgaattcgtattgctcctgagataaatgcaggcatgtccttttctgaggggaaaatatgctggctgaacaaggaagcgctagctcatctttgatgggcccaagggaagtcaatgagtcattaagatgagcaaagctctcgactgatcttaagagaaatgtgggaaagttctgatgaatctatgtgtaaaggttcagcaagtgtctgatttggaagcatctttttaagcataaatgcagtgtaaagaataatgaaggaaaatggatatagctctgactacctaattgaaaaatattatttggagattaatatcacaaacattcattcattctatacacatttaatgagggctttattttatttgtttcaggtcttgtgtgagggcctggatatacagtgctgagtaaaacacagagagggtccatgcctgcttggaccacagaacatctagagaaaaagacagactttgaaaaatattcaggtggggtattctgggaatatggttacccaaacacaactttcttcccatccccctatttctataatctaaatccaggttacttgtctctactgatacaaatggctccagggtcctataagtagatgtgtaaagttgatgctatgagcgttgtcggcatcctagtggagaaaactggtatcgggatgttttccctaaggcctggaatgcagctggagataaccatgacagcctcagtgtaagatcagagagcagt

SEQ ID NO: 42150 - DNA, 1200 bp, Homo sapiens
agactttgcatttcttttccttgcctacatggatattatgtgtggttaaaaaatcaagataagctgtgtatgtggaaagttatataattttaaccctaatatcattattaaaaataaaatcagattagtactgtttacttgttttcatagaagcatgcagattgcaggtactcaagtctaaaaatgactccttgcatgtgtcttcacattctgcttcttaaaatatrttatatatatttaaaatatattattaatgattttgcagaggttgctaggaatgattatatgaaacaacgctatctgtaaggctctttcagaatctagagattaattctctgaccctgcatacttgaattcagagaagagtagaatttcatgacaaatgctaacttaaatgccagtttctagaggacaccatgtaaggaagctcatgctttagtgtatgggatgtttggctagctctctttctaaacaaatggaatatctgagaaactgcatcaaatgataactgctatgcgtgacctccccgtctctgccctgctcctactcatgactaattccaacctatcccaactttctgtcctgatgtttttcctgcatttgcaccttctttatgtaggaggagaagtaagattctgttgtgtgattatctaagaaagaagaatcctcatagtaaaagaataatttccccagttttttttgacagatactaacattgcattaactagccaagaaagaagagggatcttcctatatattttcaggttcatatagcacacatagctacaaattttatcagattatttacacatctgagcatggcattcaaggagaaaaatggaggggggaggatagaactacagcatttaataaggcttttttttcctcattcaatgatgatgaaacagaaaatatataccaactgaatccatgaaaagatactgcaaaacaaagagaaatataaacaattaaatatctctagaatttgaaatatagttactggatagtcttattcatagactaattcctcagtacctgctcaattcccaaatatgacctatggtcctggatggtttggcccttcactacctctttaatatcatattgtatcatgatcccactggcttttgacagcagagagtcaggaaactgaaatatcagatgcattcacaccctagaatgtgtgcaggatcccaacag

SEQ ID NO: 42151 - DNA, 435 bp, Homo sapiens
  misc_feature (1)...(435): n = A,T,C or G
aataaactgaatatcatttctgtaaccttctggtttgtgaataaggaatcatccagactttatccttagggagaactgtctactttggccaaatactgtgtatgtgagagatcttttatttataatctcatttactcttcacaacaactttgaraaatgttattatagccattgtattagtcagagttctccagagaaacagaaacaataggatgtatatatatgatgtatatatatatatatatatgtgtgtgtgtgtgtgtgtgtatgtgtgtgtatcgtgagcgtatttcttgtaataaaagattattatatactaaaaatgatcataaaannnnnnnnnnnnnnnnnnnnnnnnnnnnnnnnnnnnnnnnnnnnnnnnnnnnnnnnnnnnnnnnnnnnnnnnnnnnnnnnnnnnnnnnnnnnnnnnnnnna

SEQ ID NO: 42152 - DNA, 435 bp, Homo sapiens
  misc_feature (1)...(435): n = A,T,C or G
aataaactgaatatcatttctgtaaccttctggtttgtgaataaggaatcatccagactttatccttagggagaactgtctactttggccaaatactgtgtatgtgagagatcttttatttataatctcatttactcttcacaacaactttgagaaatgttattatagccattgtattagtcagagttctccagagaaacagaaacaataggatgtatatatatgatgtatatatatatatatatatrtgtgtgtgtgtgtgtgtgtatgtgtgtgtatcgtgagcgtatttcttgtaataaaagattattatatactaaaaatgatcataaaannnnnnnnnnnnnnnnnnnnnnnnnnnnnnnnnnnnnnnnnnnnnnnnnnnnnnnnnnnnnnnnnnnnnnnnnnnnnnnnnnnnnnnnnnnnnnnnnnnna

SEQ ID NO: 42153 - DNA, 534 bp, Homo sapiens
ggtttttttattgttgtttktttgagacggcgtcttgctgtgtcgcccaggcttgatgcagtggcgcgatctcggctcactgcatcctccgcctcccggattcaagcgattctcctgcctcagcctcccaagtagctgggattacagacatacaccaccacgcccagataatttttgtatttttagtagagacagggtttcaccatgttggccaggctggtctcgaactcctgacctcaggtgatccagctatcttggcctcccaaagtgctgagattataggcatgagccactgtgcccagccagtaaaacaatgtaatagacatataatacatggaaagatgtatgtgcattcagagagaaagtttatatatgatgccatttttataaataaaagtatgtatatatccattgaagaaactggaaagatgttatatgttctaagacgttttcttcttttggttatctatattttctggttttttatagtgaacatgagcccttttttattagaaggaaaaaatgtattagtgg

SEQ ID NO: 42154 - DNA, 1159 bp, Homo sapiens
cccctcatgatccaaacacctgccacctgaccccayctccatcattggggattacattgtaatgtgagacttagatggaacaaacatccaaactatatcaagagtaatctcttaggatgactgaaggctattttaaaagcctgtcacacacacacacacacacacacacacacaacaaatatggagttttcttctatttcagaacgtattattcaaaacataatttgttttccagactttttataagctcacttgcaaaatatagcttggggtgatgaaaatgttctgaaattagatagaggtgatgattccaccacactgtgatgtactaatatcactgaattgtatactttgaagtggttaaaatggtaaagtttatgttgtgtatattttgccacaacaattttctttaacatcgtttcagtcctaaaaggaaatatattagaattttatcctctacctatgccagatcacaaatttcaagctaatctcttcatttctaggactacatatttaaatcctacctctttggtagtagctctcaaatttatatctccagcagaaacctctctcctgaattcagaccccataacttcctagtcgacacctccacaagaatttctaacagaatcaaaagtgtagcatgcccaattctgagtgcttaatattccctgtataccagctccttctcagcccatattaaatgacagcaactccactcttccagttgttcagggcaaagtcagtatcacccatcccacatcaataaatcctgatggctttatcttaactcagggtttctcaacctgggcactgttgagattctttgggcctgataattctttattgtagaagactgctctgtgcattttagaatgtttatcagcatccctggattttactcaacacacatcagtagcacccccagttttgacaaccagaaatgtctccaggcattgccaaatgtccccagcacggcaaaatcacccttggttgataactgtggccttaaatataatatagccaagattcaactccttctccgcacctccactgccatggccttggttcaagctatcaccatggctcttccctttaattctgcagtagcctcctacctcatctccttgccctgctcttctcagccagccacccacaa

SEQ ID NO: 42155 - DNA, 2002 bp, Homo sapiens
aaatgtgctgcacactggtgaaatatttgacaaaggagaagtagatgtaactatggaaatcataactttaattgacaacaacatgaaaattcagaaggataacaagcatcatggatggagaagacaattatgcaggagtaaaaaatcaaatatgagctgcagaatttaaaaaaaagagtctatttttcctctctggatatttcccactactttagaaagaagaagaagaaggatggaaagaatattcttcctgttaatgaaaataggacaaaggaacagccaggacattcctacctggtttccagatgaactgattatcctttttgccttccaaatgagctgcatgggacagcaagagagaaagcaatagaaagagcttcctcatgctcctccatacccagcaagtgactgttaggttgctctttggaaacatgcttcagatttttcagcctcttgacttgcctattcctaaaagagaaaaagaaaaatcaggtaagtttcttctgtaaagaaaagataacaactcattttgactgctagaacctttattatgatggtattgcaagtttttcattagcatgaagatagtacatataatatcaaccctgtgggaaaagctacaaaaagcaaatccacattctgtttttaccatgttttgtattattttttgtagtgaagtgtattcatgaatgaaatctaccactggatgataaaactacttatttccccaattgctttttattttatacttttggtaaaaaaagatcaatgtaacgtgataatattatcatggattctcacaggatccaaagtagttacttgattcccatagtagctctaaaaagaaaagaaacaaaagcctgaggtggttaactcatgtttatacttttggtaagaaaataagctttaatggtacacattattaaaagaaagtagtaaatatatgttatgttaaatgttaaatgtataccttttatttctctgaaataaaatcaggtaagtttcttctgtacaaaaaatcaagtaagtttcttctgtacagaaatgataaaaactgactttgactgctagaacgtttattatgatggtattgcaaattttctattgccatgaagatagtctttataatattaacatttgaaggtcagcagttaattagccaagttttcaatcctcacccactgaaggcctcatcaattctatggactccacagtcyctgtgtcggtatattttattcttaaaagcagagttggcagataccttgtatattccctcccttctactcagacaaagtccatgaggagctcatgatttggagaaagagatatgcatacacaacaagtccaaagcagggcaagggatgctctaacagtagtattaagaaagtgggatggaaagactgaggacaaggcaactagttcctctgtgctgtgcaaaaaagagaggagagcctcacacaagataatatttgagaagagactagggaaacattaggacttgaaggagttgggaagggcatctcaggcagagaaaacaacaaggcgttgaaatgcgttttgtgtttggggactggtgattaggctggtggttgctgtgaaggacacaaacaagagggaggaatggactaagatgagatttaaaacataggttgggagccagattgtaaagagctgtgaatggcatatgagggatttgggcttcatgctgtaagtagtaacaagaatcatagaagagcaaatgatttttaaataactagaatcagtgtgcataatggattactagtagacaatggtagagaaattgagggcagttagaaaattagtgaaacagtagtccaggcaagtactggtgaatgaaaagatcaaggatcaggagagacttgagaagtcatagaaattgcttctggatttaaacgatctggttaacaactggatgtgctacataagaggaagatgatgaaaaaggacagaaagactgcaaacttagatgcctgaactgatg

SEQ ID NO: 42156 - DNA, 2002 bp, Homo sapiens
aaatgtgctgcacactggtgaaatatttgacaaaggagaagtagatgtaactatggaaatcataactttaattgacaacaacatgaaaattcagaaggataacaagcatcatggatggagaagacaattatgcaggagtaaaaaatcaaatatgagctgcagaatttaaaaaaaagagtctatttttcctctctggatatttcccactactttagaaagaagaagaagaaggatggaaagaatattcttcctgttaatgaaaataggacaaaggaacagccaggacattcctacctggtttccagatgaactgattatcctttttgccttccaaatgagctgcatgggacagcaagagagaaagcaatagaaagagcttcctcatgctcctccatacccagcaagtgactgttaggttgctctttggaaacatgcttcagatttttcagcctcttgacttgcctattcctaaaagagaaaaagaaaaatcaggtaagtttcttctgtaaagaaaagataacaactcattttgactgctagaacctttattatgatggtattgcaagtttttcattagcatgaagatagtacatataatatcaaccctgtgggaaaagctacaaaaagcaaatccacattctgtttttaccatgttttgtattattttttgtagtgaagtgtattcatgaatgaaatctaccactggatgataaaactacttatttccccaattgctttttattttatacttttggtaaaaaaagatcaatgtaacgtgataatattatcatggattctcacaggatccaaagtagttacttgattcccatagtagctctaaaaagaaaagaaacaaaagcctgaggtggttaactcatgtttatacttttggtaagaaaataagctttaatggtacacattattaaaagaaagtagtaaatatatgttatgttaaatgttaaatgtataccttttatttctctgaaataaaatcaggtaagtttcttctgtacaaaaaatcaagtaagtttcttctgtacagaaatgataaaaactgactttgactgctagaacgtttattatgatggtattgcaaattttctattgccatgaagatagtctttataatattaacatttgaaggtcagcagttaattagccaagttttcaatcctcacccactgaaggcctcatcaattctatggactccacagtctctgtgtcggtatattttattcttaaaagcagagttggcagataccttgtatattccctcccttctactcagacaaagtccatgaggagctcatgatttggagaaagagatatgcatacacaacaagtccaaagcagggcaagggatgctctaacagtagtattaagaaagtgggatggaaagactgaggacaaggcaactagttcctctgtgctgtgcaaaaaagagaggaragcctcacacaagataatatttgagaagagactagggaaacattaggacttgaaggagttgggaagggcatctcaggcagagaaaacaacaaggcgttgaaatgcgttttgtgtttggggactggtgattaggctggtggttgctgtgaaggacacaaacaagagggaggaatggactaagatgagatttaaaacataggttgggagccagattgtaaagagctgtgaatggcatatgagggatttgggcttcatgctgtaagtagtaacaagaatcatagaagagcaaatgatttttaaataactagaatcagtgtgcataatggattactagtagacaatggtagagaaattgagggcagttagaaaattagtgaaacagtagtccaggcaagtactggtgaatgaaaagatcaaggatcaggagagacttgagaagtcatagaaattgcttctggatttaaacgatctggttaacaactggatgtgctacataagaggaagatgatgaaaaaggacagaaagactgcaaacttagatgcctgaactgatg

SEQ ID NO: 42157 - DNA, 2002 bp, Homo sapiens
aaatgtgctgcacactggtgaaatatttgacaaaggagaagtagatgtaactatggaaatcataactttaattgacaacaacatgaaaattcagaaggataacaagcatcatggatggagaagacaattatgcaggagtaaaaaatcaaatatgagctgcagaatttaaaaaaaagagtctatttttcctctctggatatttcccactactttagaaagaagaagaagaaggatggaaagaatattcttcctgttaatgaaaataggacaaaggaacagccaggacattcctacctggtttccagatgaactgattatcctttttgccttccaaatgagctgcatgggacagcaagagagaaagcaatagaaagagcttcctcatgctcctccatacccagcaagtgactgttaggttgctctttggaaacatgcttcagatttttcagcctcttgacttgcctattcctaaaagagaaaaagaaaaatcaggtaagtttcttctgtaaagaaaagataacaactcattttgactgctagaacctttattatgatggtattgcaagtttttcattagcatgaagatagtacatataatatcaaccctgtgggaaaagctacaaaaagcaaatccacattctgtttttaccatgttttgtattattttttgtagtgaagtgtattcatgaatgaaatctaccactggatgataaaactacttatttccccaattgctttttattttatacttttggtaaaaaaagatcaatgtaacgtgataatattatcatggattctcacaggatccaaagtagttacttgattcccatagtagctctaaaaagaaaagaaacaaaagcctgaggtggttaactcatgtttatacttttggtaagaaaataagctttaatggtacacattattaaaagaaagtagtaaatatatgttatgttaaatgttaaatgtataccttttatttctctgaaataaaatcaggtaagtttcttctgtacaaaaaatcaagtaagtttcttctgtacagaaatgataaaaactgactttgactgctagaacgtttattatgatggtattgcaaattttctattgccatgaagatagtctttataatattaacatttgaaggtcagcagttaattagccaagttttcaatcctcacccactgaaggcctcatcaattctatggactccacagtctctgtgtcggtatattttattcttaaaagcagagttggcagataccttgtatattccctcccttctactcagacaaagtccatgaggagctcatgatttggagaaagagatatgcatacacaacaagtccaaagcagggcaagggatgctctaacagtagtattaagaaagtgggatggaaagactgaggacaaggcaactagttcctctgtgctgtgcaaaaaagagaggagagcctcacacaagataatatttgagaagagactagggaaacattaggacttgaaggagttgggaagggcatctcaggcagagaaaacaacaaggcgttgaaatgcgttttgtgtttggggactggtgattaggctggtggttgctgtgaaggacacaaacaagagggaggaatggactaagatgagatttaaaacataggttgggagccagattgtaaagagctgtgaatggcatatgagggatttgggcttcatgctgtaagtagtaacaagaatcatagaagagcaaatgatttttaaataactagaatcagtgtgcataatggattactagtagacaatggtagagaaattgagggcagttagaaaattagtgaaacagtagtccaggcaagtaytggtgaatgaaaagatcaaggatcaggagagacttgagaagtcatagaaattgcttctggatttaaacgatctggttaacaactggatgtgctacataagaggaagatgatgaaaaaggacagaaagactgcaaacttagatgcctgaactgatg

SEQ ID NO: 42158 - DNA, 607 bp, Homo sapiens
gcagaaggaaaaaagtaatctttttttcatccgcttccccataagtgatctattcaagcctatctatctaaataatttcctaaaacactcttgtaattttttttgtcagtgatagctgcaagtatgagagaagtagcacttctatagaaaactcttacctaaagggtgttttacaattcttatggattaatatcatgtatagacatgtttgtacctataagtgtgtttttaaagtcaccaaaatgataaactaggactttcataaagacttctgyacaggactaaattaaaacttcaactgtatttttcaatgacttgcttcttcagttagaagagttttatatttttcacagtgaagctgtaaacgcttacgggcacgtggactctgcgaaacatctcagcacccttgtgtgcatccatcaatgcgatgtcctggggcgtggagacaatcacagcacctagccaaagataaacaaaatactattatcttttaattctctatggagaaattacttccagcattatgttgcttacatacgcaaatagtctattacgttaactatttaggtcattcatatacattttacacacatgaatgagaaagaca

SEQ ID NO: 42159 - DNA, 623 bp, Homo sapiens
tgagtcatttggaattgatttggctacactatgtgaggtgtatatcamatttttaccttttcaaataacagtggctcaaacttcatctattttaaaagtccacgtgatggtgttttataaagtctcagtaatatctcactgagtatatgaactgatgaattgagtcattaatacattcctgccttaaatctttgtttaattctgactaaatggaatacataacatataacatataacataaattagaccattcataacatatatataacataaattagacaattcatttggaaaaatattatcccaaaccttcaattaaactggcttttcttaaaaatattttcaggatcttttttttaatgcaagagaattttataaacactttcttatttcttcttcatatgaactctctaattgttactaattgcctcactttacacttatgaagaaactgacttttactgaaacttgtcgtatgtcacattgctctcaagttaggccacttgaactttagcagtgatatcttgcaagtagttggggaagcagtcatttatttatctatctgtcacttttttgatctaacattcgaaagaaccattgctctgaggtctctatctacattg

SEQ ID NO: 42160 - DNA, 623 bp, Homo sapiens
tgagtcatttggaattgatttggctacactatgtgaggtgtatatcaaatttttaccttttcaaataacagtggctcaaacttcatctattttaaaagtccacgtgatggtgttttataaagtctcagtaatatctcactgagtatatgaactgatgaattgagtcattaatacattcctgccttaaatctttgtttaattctgactaaatggaatacataacatataacatataacataaattagaccattcataacatatatataacataaattagacaattcatttggaaaaatattatcccraaccttcaattaaactggcttttcttaaaaatattttcaggatcttttttttaatgcaagagaattttataaacactttcttatttcttcttcatatgaactctctaattgttactaattgcctcactttacacttatgaagaaactgacttttactgaaacttgtcgtatgtcacattgctctcaagttaggccacttgaactttagcagtgatatcttgcaagtagttggggaagcagtcatttatttatctatctgtcacttttttgatctaacattcgaaagaaccattgctctgaggtctctatctacattg

SEQ ID NO: 42161 - DNA, 510 bp, Homo sapiens
acatattattttgttctgtacaaaccaaaactatctccaaacaactaaaactgtgtaacttctaatggtattaatctcttagatccgatatgtaatgtgccacttttattctaaattcaaagatgaggtaacttcaaagttgcttctttttcctctgaaatgaaggactaaaataaatgtctgaaagaatataatgttgctagatattaraaacaggatgtgcagactgattaaagttcaggtctggcatgctgatttttacaatgccaaacatccctctcgggaattaaaaatatttcaatctagtttagtcctttcgtactcttcttttgcgtactgactttatcggcccatctccagatcctgtgctctcatctgcttctttcatctagaaaaaataattatgaaaaggtttcttttagtataacacataactagtagatagtagtaaacaatatatttattattctctaaaatatatgtgctatcaatcaagtgctattatgaagg

SEQ ID NO: 42162 - DNA, 520 bp, Homo sapiens
atgccactgtgcctggctaatttttgtatttttactatagatgaggtttcaccatgttggccaggctggtctcaaactcctgacctcaggtgatctgcccacctcgccctccctaagtgctggattacaggtgtgagccaccgcgccaggcccaggctggataattctatgttgcagggctgtcctgtgcactggagcgggatcagcagcatccctggcttctcacccatcagaggctggcagcatcctctcacgccccggtgctgaaaaactgataagttactcttcaaaaacaagmacatttggaaacaacatcggtttccaggtattgccaaatatttccttaaggcaaaatcatccctagcatcactgtgcccttggaatagtgaagtagaagaattctcatacaatgtttttagtttttttctctttatttcttatggataaaatgcaacatacatattctacttaacaatgaaagctgatggaacagaagaatcaatattagcttttgagatgg

SEQ ID NO: 42163 - DNA, 520 bp, Homo sapiens
atgccactgtgcctggctaatttttgtatttttactatagatgaggtttcaccatgttggccaggctggtctcaaactcctgacctcaggtgatctgcccacctcgccctccctaagtgctggattacaggtgtgagccaccgcgccaggcccaggctggataattctatgttgcagggctgtcctgtgcactggagcgggatcagcagcatccctggcttctcacccatcagaggctggcagcatcctctcacgccccggtgctgaaaaactgataagttactcttcaaaaacaagaacatttggaaacaacatcggtttccaggtattgccaaatatttccttaaggcaaaatcatccctagcatcactgtgcccttggaatagtgaagtagaagaattctcatacaatgtttttagtttttttctctttatttcttatggataaaatgcaacatacatattctacttaacaatgaaagctgatggracagaagaatcaatattagcttttgagatgg

SEQ ID NO: 42164 - DNA, 1366 bp, Homo sapiens
cttctacaatagctttctgcagtttctttatccacttatccatctccagtgtttttttctctttccatgattgctccttcacatgactccaggaaaacttctcatgtcaaaagcactaatggcttctggatagccaaccacatcactaactcaaattctcaataatgttcattattttatgataatgactctctctctctctctctctctctctctctctctctatatatatatatatatatatatgtgatgattatgtgattattaacattgagtgtcaacttgattggattgaaggatgcaaagcattgttcctgggtgtgtctgtgagggtgttgccaaaggagattaacatttgagtcagtgaactgggtgatgcagacccaccctcagtctgggtaggcaccatctaatcagctgccagtgaagccaggataaaagcaggcagaggagcatggaaagactagactgactgagtcttctggcctccatctttctcccatgctggatgcttcctgcccttgaaagcttttggactcctggacctataccagtggtttgccaggagctctagggccctttggccacagactgaaagctgaactgttggcttccctactttgggggttttggtactcggactggcttccttgctcctcagcttgcagacggcctattgtgggacttcaccttgtgatggtgtgagtcaatactctctttcctatgcatctatcctattagtctcctgtcactctagagaaccctaatactatatatatataatatattatatatatactatatatatgtagtagatgtatgtgtatgtagatgtatgtatacatatgtagatgtatatatacatgtgtgtatgtagatgtatgtatrtagagacacatgtgtatatatgtgtgtatatatgtgtctatatgtaattatgtatataatatagatatatgcatacagttaaattgagaatttagctccaggcttgcatatgcaagcttgtttctatcccagagtataaaacaaaataccctcattaaattaaaaaaaaatcaaacctcatactatggcaaacactgacatggaggtcaggagctagagtaatcaccaagatggaaaatcaccctaattgccaagtgaaaccgtgggaatacaaagcagaaataagccccaaatgactcaacagctcagaatacataagcccacagaaaaatcaatctgacggaaaagctagctcacaaagtttcaaatcctaagaagtaatgattcaatgtgaggaggagtaaacaaacacaacagaaaaaatagcattcaaagagcttaaactacagcaatgcgaaaatgccaaaaaaaacacata

SEQ ID NO: 42165 - DNA, 1366 bp, Homo sapiens
cttctacaatagctttctgcagtttctttatccacttatccatctccagtgtttttttctctttccatgattgctccttcacatgactccaggaaaacttctcatgtcaaaagcactaatggcttctggatagccaaccacatcactaactcaaattctcaataatgttcattattttatgataatgactctctctctctctctctctctctctctctctctctatatatatatatatatatatatgtgatgattatgtgattattaacattgagtgtcaacttgattggattgaaggatgcaaagcattgttcctgggtgtgtctgtgagggtgttgccaaaggagattaacatttgagtcagtgaactgggtgatgcagacccaccctcagtctgggtaggcaccatctaatcagctgccagtgaagccaggataaaagcaggcagaggagcatggaaagactagactgactgagtcttctggcctccatctttctcccatgctggatgcttcctgcccttgaaagcttttggactcctggacctataccagtggtttgccaggagctctagggccctttggccacagactgaaagctgaactgttggcttccctactttgggggttttggtactcggactggcttccttgctcctcagcttgcagacggcctattgtgggacttcaccttgtgatggtgtgagtcaatactctctttcctatgcatctatcctattagtctcctgtcactctagagaaccctaatactatatatatataatatattatatatatactatatatatgtagtagatgtatgtgtatgtagatgtatgtatacatatgtagatgtatatatacatgtgtgtatgtagatgtatgtatatagagacacatgtgtatatatgtgtgtatatatgtgtctatatgtaattatgtatataatatagatatatgcatacagttaaattgagaatttagctccaggcttgcatatgcmagcttgtttctatcccagagtataaaacaaaataccctcattaaattaaaaaaaaatcaaacctcatactatggcaaacactgacatggaggtcaggagctagagtaatcaccaagatggaaaatcaccctaattgccaagtgaaaccgtgggaatacaaagcagaaataagccccaaatgactcaacagctcagaatacataagcccacagaaaaatcaatctgacggaaaagctagctcacaaagtttcaaatcctaagaagtaatgattcaatgtgaggaggagtaaacaaacacaacagaaaaaatagcattcaaagagcttaaactacagcaatgcgaaaatgccaaaaaaaacacata

SEQ ID NO: 42166 - DNA, 1366 bp, Homo sapiens
cttctacaatagctttctgcagtttctttatccacttatccatctccagtgtttttttctctttccatgattgctccttcacatgactccaggaaaacttctcatgtcaaaagcactaatggcttctggatagccaaccacatcactaactcaaattctcaataatgttcattattttatgataatgactctctctctctctctctctctctctctctctctctatatatatatatatatatatatgtgatgattatgtgattattaacattgagtgtcaacttgattggattgaaggatgcaaagcattgttcctgggtgtgtctgtgagggtgttgccaaaggagattaacatttgagtcagtgaactgggtgatgcagacccaccctcagtctgggtaggcaccatctaatcagctgccagtgaagccaggataaaagcaggcagaggagcatggaaagactagactgactgagtcttctggcctccatctttctcccatgctggatgcttcctgcccttgaaagcttttggactcctggacctataccagtggtttgccaggagctctagggccctttggccacagactgaaagctgaactgttggcttccctactttgggggttttggtactcggactggcttccttgctcctcagcttgcagacggcctattgtgggacttcaccttgtgatggtgtgagtcaatactctctttcctatgcatctatcctattagtctcctgtcactctagagaaccctaatactatatatatataatatattatatatatactatatatatgtagtagatgtatgtgtatgtagatgtatgtatacatatgtagatgtatatatacatgtgtgtatgtagatgtatgtatatagagacacatgtgtatatatgtgtgtatatatgtgtctatatgtaattatgtatataatatagatatatgcatacagttaaattgagaatttagctccaggcttgcatatgcaagcttgtttctatcccagagtataaaacaaaataccctcattaaattaaaaaaaaatcaaacctcatactatggcaaacactgacatggaggtcaggagctagagtaatcaccaagatggaaaatcaccctaattgccaagtgaaaccgtgggaatacaaagcagaaataagccccaaatgactcaacagctcagaatacataagcccacagaaaaatcaatctgacggaaaagctagctcacaaagtttcaaatcctaagaagtaatgattcaatgtgaggaggagtaaacaaacacarcagaaaaaatagcattcaaagagcttaaactacagcaatgcgaaaatgccaaaaaaaacacata

SEQ ID NO: 42167 - DNA, 1366 bp, Homo sapiens
cttctacaatagctttctgcagtttctttatccacttatccatctccagtgtttttttctctttccatgattgctccttcacatgactccaggaaaacttctcatgtcaaaagcactaatggcttctggatagccaaccacatcactaactcaaattctcaataatgttcattattttatgataatgactctctctctctctctctctctctctctctctctctatatatatatatatatatatatgtgatgattatgtgattattaacattgagtgtcaacttgattggattgaaggatgcaaagcattgttcctgggtgtgtctgtgagggtgttgccaaaggagattaacatttgagtcagtgaactgggtgatgcagacccaccctcagtctgggtaggcaccatctaatcagctgccagtgaagccaggataaaagcaggcagaggagcatggaaagactagactgactgagtcttctggcctccatctttctcccatgctggatgcttcctgcccttgaaagcttttggactcctggacctataccagtggtttgccaggagctctagggccctttggccacagactgaaagctgaactgttggcttccctactttgggggttttggtactcggactggcttccttgctcctcagcttgcagacggcctattgtgggacttcaccttgtgatggtgtgagtcaatactctctttcctatgcatctatcctattagtctcctgtcactctagagaaccctaatactatatatatataatatattatatatatactatatatatgtagtagatgtatgtgtatgtagatgtatgtatacatatgtagatgtatatatacatgtgtgtatgtagatgtatgtatatagagacacatgtgtatatatgtgtgtatatatgtgtctatatgtaattatgtatataatatagatatatgcatacagttaaattgagaatttagctccaggcttgcatatgcaagcttgtttctatcccagagtataaaacaaaataccctcattaaattaaaaaaaaatcaaacctcatactatggcaaacactgacatggaggtcaggagctagagtaatcaccaagatggaaaatcaccctaattgccaagtgaaaccgtgggaatacaaagcagaaataagccccaaatgactcaacagctcagaatacataagcccacagaaaaatcaatctgacggaaaagctagctcacaaagtttcaaatcctaagaagtaatgattcaatgtgaggaggagtaaacaaacacaacagaaaaaatagcattcaaagagcttaaactacagcaatgcgaaaatgccaaaaaaamcacata

SEQ ID NO: 42168 - DNA, 1155 bp, Homo sapiens
aaaaaaaaaaatagaaattttaaaatgctttaaacaatgctgaaagtggtacatctcaaacagttttggtattacaatgttgctaagaacattcttgtatgtctcttgtaggtcatgtacaagtttctctaaaatatatacctaaagattggaattttttggctacaggacatggtcaggttaaacttttaagataatgtcaaattgttttctaagcttgttgtatcagtttatgcttagcagttataaatacaacattatttataatacagttattcccaaattttctgcattataataaagtatttattataaagttctaaattttttgtattatgaaaatcctggattaaatattcttatatacaaatttttaaatcttgtcctttttttatagtgtaatttcctgggactgaaattctggtcccaggtatgcacgcatatttgaaacttcattatgtattatctcatttgcccttcagaaatatccatgagggtccatttttccatatacttgccaatacaaaatagtatcaacgttttctgtctttgccaatcttatagttgaaaaatgacatctcattgttgtttccatatttttcagttggttttaatatcttttcatatatttattattcttttgcatgtttatttggggatttacgttaaattgtgaataatttgaatcagcctaagaatatatatgataatcatgtagaaaatgcccaaacttctcaccattctttagatattccccatacatttatatacatatttagcaataatracttgaggccatcaatactgtggtaataaaaataggttttattaagcttttattgtttaagttttattaagctttaattttttaagtttttattgtcatgtggcatacacttgactaaggactttacatacctggattattaattaatttttctattcatttaacagttgtttactcagacccagggagtgactggttgtgcaatggtgagcaaaacgaagcatctgcctttaactcagtgagaggatgacaataaataatcatcaaacacatcattgcaaaataggaagtgaaataaaaagaagagcatgatgaaatagagaataacatggggttgtgtatggatggaataattaaagaaggcaagg

SEQ ID NO: 42169 - DNA, 1045 bp, Homo sapiens
tgagttactaggctcatctgtacccatragagccacagcataggagaatgtgacctggcttcacccgggttcccactgtcttgtcacatctgttctcttggcctcctcttatggaccctggaaagacctctcctgcttgccaggttggggcatcctgttagctggctaccagttggatttttcacaagtttgccacgttgcagtgacaggactgtgttgaggcccagatgcctcagcataaataaataacacatctgggatgtggaaggggtccaactgcatattatagaagaagctggggtggaaacagagccaaaggatacacatctggaaacagttaagtcaggagtaagtggggaggaggatgtagtagaaaaagagagaagaaaggttgaggggaaagatcaaactaggaattactgttgtctggaaggatctgaattaaaattgctaagaaacagaaccatggtttatataacagctgaattaagagcattcctataaaaatgatagtttataataattgacctcaatgcagagaggctgagcaggaccgagcagctggaatcctggacgtctgattgctttggatgtagctaggaggggtggttccctcctagctatttgaatctataaatggcttcgcagtgagcagggtgaaggagttcagccctgcgcagatgagaaccccagggctccctgcccaggatcaccaggcacttgggaggcttagtgagttcccaggttcctgggcagcctccgcttaacatgcctgttgtgaatatacagagcattaaagaggaggcctgggaagagggggacgtgcagtgacaccgcttcctcccagccagagacccaagcagatgattcacctagatgaatcaggaatggctgcagagggaactgctcacacccatgcccccagccagcaaccgaaagctacagtgacatcactacacagaggacagaagtctaagtaacggggaacttaggacaaaaagaagagagaaaaaaatatccttttctctccctctcaatggaattc

SEQ ID NO: 42170 - DNA, 916 bp, Homo sapiens
cccattgaattttatctcctttatctaataattaattaataaattaataattaaattgtttaagagttataaactaataaattgagtcataaatgttctcttatttgttcatgtgaagtaatatcttctattattataatttagcattttatagtacttaaaaccattattttgcagtgtctataaaaagatactgttttttactttgggaaatggtggtgatacaatttgagttgaaatgtaaccatcatcacagtagcctaggctgtattaccagatttatgtttctcatttacaaattgtaagcactttttccagtgtgtgtatgtgtgtgttcctatttatcaagttgatacatgaatgataaacaaatgattatagtaatacagtcatagaacaatgaaatatctcaggaatttaagtaaaaataatttttttaaactactaaagttgtaaagggcatatagtgaaagactcatataaaaagaattaataaacccaatttttagaaactcggtaactacctttttttcctgcacaaaacaaacattccactcacagatctgggggcttcagttccattattttgctgttatttctttgagagagtgactcatgaaatttctgcttccatcgtactgaaactcagagttttgtgctgtttaatgaagccyacatacttctataacgttttgttttaccttcttgtccctcactgtttaccttggctagtgtgtaaagctttttaacttatggccatgtaatcaagttcattttaaggctgaggcaggtaacaagttgccagaaatattatttttaagtgctttatagcaatgatctaatcattacctttattatggcatttaaaagataacatatagtaagaatccaagcatggaaatatgagagctctgga

SEQ ID NO: 42171 - DNA, 1174 bp, Homo sapiens
aagaaatgaggtctcttgcctccctcctcacatatttgagatgatgctgtaagtggcagaatcaaaatttatgtaactctgtaaatggagtagggaggcaaagcatgctggccaccacaaatgcaaaacaacaccaaggaaaccaagaacaacaacataaactttctctagcagagctcagatgtattggttcaaaggaggcctggttgaagtcgttgtaaagtgttatgatgaggtcacagtagaccaagttcttccacccttaaggttttggttagagaggcataaaagcattcgagttttatagtgatatttgcccaatggaaaactcttccctagtgggggtgatattagttatggtctgtgataagggcccttggaggaaataaaaggaaatgtatgcacaaggtcacgcactgtcatcttttggcattactagtctcttctctttttagaaattttattctaaaaaagaattattctttcagtcacattagatctctttgttattctccaagtcaccttttctcttgtgcttgtccttggtaagcagtatatgttaataagaacacactccttcagctgcacctctaagatgtgtagacttacgggatgcgaggaggggctggaagtacgggaatgaggatggcacttctggatgatgggagatggccagggaaccaagcagaggggagcaagtgtctcattctctactggagcagggaacaaacaggcagctagaggacccgaaacgtgggaggttgtccctagtgttaagaggggtgacttaattatgttttttcttagttcaaaggatgtttcttttaagtttaggctgaaagtatagagtctcctgtattggtaggaagcccaatattgtatcaatttgagatctaggtttgctggcgtcacataccgtacacgcccagggcgtgaaccaggcctttgcggccaagttctagggsgctttggagacccggaacctcccgaatgtcagcgagaggcaggcgccagccgctctgcccaggcctgccccgcgctgcacatgattcagtgggttggggtgaggtagggtgtggaagcaacacaggaatgggtcacgaatagcaaatagtctctttccaaaaggagatcatgtacagacattgtactgggtctttgggaatgccgcagg

SEQ ID NO: 42172 - DNA, 556 bp, Homo sapiens
caggtagttaatgaggagggacagagcttcagtctgtaaaatgaacaaagctctttttttttcacactttaagtttacagttatttgtgaataggtagttagtgaacatttgctgagatggtctggctttgtgcctccacccaaatttcacctttaattgtaatagttcccacatgtcaagggcagggtcaggtgaagataattgaatcacgtgggtgttttccctcatactgttcttgtgatagtgaatgtctcacaggttctgatggttttataaatgggagatcccctgcacaagctcttttgcctgctaccaggtaagaggtgactttgttcctcatttgtcaccatgattgtgaggcctccccagccatgtggaattgtgagttaattaaacctctttcctttgtaaattacccaatcagactaatacatttgccttatgcctyacataaacgtataccatgtatttctctcataaagaaaggtttttatttaagtatgtttaaatacaacttcgcattttcgatgtactgtcaagatcatttgacctgta

SEQ ID NO: 42173 - DNA, 599 bp, Homo sapiens
ttgattaataaaattaattcttaaaattattacttttttcttgagacagggtctcacactgttgcctaggctagagtgcagtggcacgatcacagttccctacagccctgacttcccaggctgaaacgatctcccgcctcagcctcccgagtagctgagacttcaaggcatgcaccaccacacaaggttaattttttcgttttttgtagagacagagtctcactatgttgtccaggctgtctcaaactcctgagctcaagggatcctactacctcagtctcctaaagaactaagattataggtatgagccaccatgctggcctaaaattattatactttaataaatcttaaggtatttcttcacctacacaatacacccacattaaagaagttccaatggaacatttggaaagcactgtcacctattttatgtcctaaatgaatcctcaatttttattttcttaacaggtgactaaaataacttctgatgatataaaattaawaaaccaaaactataatcaatgaatattttttccaaatgtgacactgaaatgtttaatattataatcacttgtgttatagtaataaatatgtattaa

SEQ ID NO: 42174 - DNA, 513 bp, Homo sapiens
cttccattttcagtcttcctctagtgtttcccattgccagaacctaactagawctcagctggcaagaaagtctgggaaaagtagttttcaggcttgttgccctgagatacaaagcaaagagatgaaatggagctgagagccaagaggaaaaacaactgacagaatatatcttttcaagttcagtaaatgctcaagaacaaagtagtcttggatgatgatctcatctctctagtttctcatctccaccgagatcttagcccatagttcctgactacctttttcattctctgacacataaaatgatttttagattttccagctattttagttgtttgaacagagtggatattttagcaaaattacctacttcaccattacccatcccttctactttctgttcagtcttatcaaactaatcttcctaaactcagctctgatcatgtcacttcccttttcaaatatctcacatggttctgtgtctcctgaaaaaatctaacatttttacctgatatt

SEQ ID NO: 42175 - DNA, 566 bp, Homo sapiens
gtatgagcattcctttttctaaagagacttaaaagacctaatcaatcaaccataatatgtggcccttatttggatcctaactcaaaaacttacaaaaattgagactagggatcttaaagactgcctggatttttaacgatatattaactacatataattatatctacatatgacaacttatatataaaaccataaattttcttaagtgtgacaattggaatatttacaagtaaaatgatatggtctctaggatttgcttcaaaatatatctaatgtgggggcaatgtgtgagagtacacaygggttcatttatactattctatgtataaattaccttgaatttttttccaaagaaaataattaaaaaataaaatacaaacacaaaaaccaaagtcagtctattattaatgcctctttcttggctgtaatgcagatatctcacatcttccttacaaacatgctgtaaagataaatgagttatttgaaaagtgcttcgtctgaagtcctgttaatcagcaatgaagacaaaatgttggtgctaaaaacaagctttagactttatatat

SEQ ID NO: 42176 - DNA, 567 bp, Homo sapiens
atgaggctctcttcacagtgggaagggagtcaggggctactggagacagagggacagagaagagggaggaagacaaatggagggacctgcaccaggggatatgggcacagaaaagacacggagacacagagagggaggagagagacagacctctgggaggggaaccctcactcattccaggtgccatggatgggatgataaagagagatgccttctaaactcacaacttctctttctaggaaaccacagaaaaccttccctcctggcccacccagggcccctgctgaaatcaggagagacagtcatcctgcaatgttggtcagatgtcatgtttgagcacttctttctgcacagagakgggatctctgaggacccctcacgcctcgttggacagatccatgatggggtctccaaggccaacttctccatcggtcccttgatgcctgtccttgcaggaacctacagatgttatggttctgttcctcactccccctatcagttgtcagctcccagtgaccccctggacatcgtgatcacaggtgagagtgtccagacattcttctcatt

SEQ ID NO: 42177 - DNA, 849 bp, Homo sapiens
tggggcacagcacagaggttgagtaggtttcctctcaagagacaggatgtgactgtctcttgacttgaagtaacattcagacaagattggaataaagacaaatcactttcatttcaaaatattcatggccaggtgcggtggctcacacctgtaatcccagcactttgggaagccaaggtgggcagatcacttgaggtcaggagtttaagaccagcctggccaacatggtgaaaactgaaaatacaaaaattagccaggcatggtggtgggcgcctgtaatcccagctacttgggaggctgaggcaggagaatcgcttgaacccgggaggcagaggttgcagtgagccgagattgcgccactgcactccagcctgaacaacaagagtgagactcaatctcaaaaaamaaaattcacaaataatttccaaactataatatataaaacatctatcagttatataaaattggaaaagatactcgaagtggcaaatacagaatctgaacaaagacggtctgaaattcataccattaatgtttcccgttacctctgaataaacgtctgggctgccaggagggggacatcaggaatgtccacgttatcgtccgtggacttggagtaggtgatgctcccatgatcaatatttatcagaactaaaccgtcggcttcctagaaaacaaggaatcatctgtaaagattgataaaagaatttcggaatttgtatacctctttgaaaacacataaatatgttttgagttcactaagacagtgtcatcattaattaaatgaccctctttaaaatgcacacataggcggggtgcagtgactcatacctgtaatcccagcacttt

SEQ ID NO: 42178 - DNA, 534 bp, Homo sapiens
tattggagtgatgtgcttcaagaccaataactagggggtggcttgaaacctcaaaagacagacaacaaagagacctcaaagagatcacttggaaagggaaataattattaaataagactatctgaagctaactagggaaaaatcatcaccaattaaacacatagggaatcgaagatcagagcagaaatggatttaaattcagcattataccctagcttatcaataaaatgatatgttaaccttgtatttgtataaggctatcctttgccataatattgtgttctaaaacccaacattcatttttcttcctagctctagatgactataaggtattagatctgtactttcatcagagaaaacctattggttaaaacatcattctggagtcatatggccctggsttaaaacatctgttcaggatattagataatattaaggaattattgtttatttttttaggtgtggtcaaggctttgaggttatatttttaaaaagactccttatctcatagagttggattctaaaatacttata

SEQ ID NO: 42179 - DNA, 927 bp, Homo sapiens
  misc_feature (1)...(927): n = A,T,C or G
ggatccacatacgctgccaagaagcatcagagaggaaggggctgaaacagtcagcagagaagaattaataacacggttacacatgaagcatactggggtggggcaatgcagagaccactttggcaggagccgggggttcatgaggagagacgaagtttgagaggcagagacttgcgccggattgctgagaatcttgaaggccaggcatcttagtcatgaactgagtagaggtgagattatattttttttacacaatgcttgctgaaaatgacatctcaattcaagggctggatgaaaatgcaactcattgctttattcccttatgaattttgatataactcacaaaattaatctaatagaaatgaaattggagaattactaggtaagagtccagcatctgaaacttgtcgggtcctagataataacctattacaggccatggggagccgttgaaggtttgrggccagtggggtagtgtggttaagcaggattttaagactaggctgttaggaaaatatgctttaccgagaaaaaaaaaagataaatttaaagtctcgatgaaggaaatgggagatgatcatgacttgaataaggggggaatatggactgaccatggaaatataaagtattacattaaaaatagctatttgaaatgatttgatgtttaatatctataactccccacatttcatatattgttcaaatctctttacatatattatttaactttctcaacaacactgttgtataggtactgctaagattcattcctgtttttcaaatgaggaagctgagacgcttttagcatttaagcaacctactcagcnnnnnnnnnnnnnnnnnnnnnnnnnnnnnnnnnnnnnnnnnnnnnnnnnnnnnnnnnnnnnnnnnnnnnnnnnnnnnnnnnnnnnnnnnnnnnnnnnnnnt

SEQ ID NO: 42180 - DNA, 927 bp, Homo sapiens
  misc_feature (1)...(927): n = A,T,C or G
ggatccacatacgctgccaagaagcatcagagaggaaggggctgaaacagtcagcagagaagaattaataacacggttacacatgaagcatactggggtggggcaatgcagagaccactttggcaggagccgggggttcatgaggagagacgaagtttgagaggcagagacttgcgccggattgctgagaatcttgaaggccaggcatcttagtcatgaactgagtagaggtgagattatattttttttacacaatgcttgctgaaaatgacatctcaattcaagggctggatgaaaatgcaactcattgctttattcccttatgaattttgatataactcacaaaattaatctaatagaaatgaaattggagaattactaggtaagagtccagcatctgaaacttgtcgggtcctagataataacctattacaggccatggggagccgttgaaggtttgaggccagtggggtagtgtggttaagcaggattttaagactaggctgttaggaaaatatgctttaccgagaaaaaaaaaagataaatttaaagtctcgatgaaggaaatgggagatgatcatgacttgaataagkggggaatatggactgaccatggaaatataaagtattacattaaaaatagctatttgaaatgatttgatgtttaatatctataactccccacatttcatatattgttcaaatctctttacatatattatttaactttctcaacaacactgttgtataggtactgctaagattcattcctgtttttcaaatgaggaagctgagacgcttttagcatttaagcaacctactcagcnnnnnnnnnnnnnnnnnnnnnnnnnnnnnnnnnnnnnnnnnnnnnnnnnnnnnnnnnnnnnnnnnnnnnnnnnnnnnnnnnnnnnnnnnnnnnnnnnnnnt

SEQ ID NO: 42181 - DNA, 927 bp, Homo sapiens
  misc_feature (1)...(927): n = A,T,C or G
ggatccacatacgctgccaagaagcatcagagaggaaggggctgaaacagtcagcagagaagaattaataacacggttacacatgaagcatactggggtggggcaatgcagagaccactttggcaggagccgggggttcatgaggagagacgaagtttgagaggcagagacttgcgccggattgctgagaatcttgaaggccaggcatcttagtcatgaactgagtagaggtgagattatattttttttacacaatgcttgctgaaaatgacatctcaattcaagggctggatgaaaatgcaactcattgctttattcccttatgaattttgatataactcacaaaattaatctaatagaaatgaaattggagaattactaggtaagagtccagcatctgaaacttgtcgggtcctagataataacctattacaggccatggggagccgttgaaggtttgaggccagtggggtagtgtggttaagcaggattttaagactaggctgttaggaaaatatgctttaccgagaaaaaaaaaagataaatttaaagtctcgatgaaggaaatgggagatgatcatgacttgaataaggggggaatatggactraccatggaaatataaagtattacattaaaaatagctatttgaaatgatttgatgtttaatatctataactccccacatttcatatattgttcaaatctctttacatatattatttaactttctcaacaacactgttgtataggtactgctaagattcattcctgtttttcaaatgaggaagctgagacgcttttagcatttaagcaacctactcagcnnnnnnnnnnnnnnnnnnnnnnnnnnnnnnnnnnnnnnnnnnnnnnnnnnnnnnnnnnnnnnnnnnnnnnnnnnnnnnnnnnnnnnnnnnnnnnnnnnnnt

SEQ ID NO: 42182 - DNA, 589 bp, Homo sapiens
aacagtctaagccagtgataggttgcaggagagatggaaggctggaagaatgtagtgggaagaattcaaaggggattggaggcttctgtagggcactagacgtttggaccctcgtttggcagactgaaagactccatggaagaacaggatggaaaagggaaaatayggattttagagaaaaaatttaacttcacaagatagagtaatttatctgtaacaaatacactaatatacacctatagatcaataagctatagtccatctaatgattaaatctcaactcattagctaatgtcttcttgtatcaggcactgttccaggttctggaaatacagaaagaaaaattttaaaaaaaccactctgatcttgtagggtcttccatatcaggatgataaattgtctagatggacacaccgcacacctaaagacccatttaatgtcactgtagagcaaatgtaggtatttagagttgaccacaaaacagagacaaaggcacctgggagccatgcagccttggagaacaggcctctcatgaagcagaaaggaaaaggaagtcaattcgattagttgctgcttaaagggtgtattt

SEQ ID NO: 42183 - DNA, 546 bp, Homo sapiens
atatatatattaaatgggttatgtaaaagaaaatttagacatattatgtattttcacagtagtaactaagactaatggctaaaacttgaaaggaaaacatatttttattaaagttttttttttttttgctaaaaatatacttgaggtctgtgactccttttcagtcactggatagaataaagcaaatccctggggtatactgtggtagagttgctacatcagatggaattttaggttaagagacatccgaccaggtatggtggctcatacctgtaatcccagcacttttggaggctgagtcaggcagattrcctgaggtcaggagttggagactagcctggctaacatggtgaaacccccatctttactaaaaatacaaaaaatagtcaggtgtggtggcacatgcttgcaatcccagctactcgggaggctgaggcagaagaactgcttgaacccaggaggcggaggtggcactgagccgagatcgcaccactgcactccagcctaggtgacagagggagattccatctcacaaaaaaaaaaaaa

SEQ ID NO: 42184 - DNA, 865 bp, Homo sapiens
ctgccttgagaatttacatttggcacaccaagttcttacagacctgcacttcagtaggggaactgcattacctcactgcctgcctggtaacagtgattctcagccccacatggtgcataagaatcacctctagggcttttaaaaggctctgatactcaggtcttacctgtgaaagagatttggtttcaatttgtctgggatggagcccacacgttgccattttttttaaagctccttaggtgattctaagatgtagccagaattaagaaccactgataggttgcaagtgctgctatagtggctgtcacggtgatgctgtgtcactgaagggactgtatatatatatatgtgtgtgtgtgtgtgagtgtatgtgtgtgtgtataaagattgatatatatgtgtgtgtatatatatataatgatcagaakgttacacaagggcgtggaggcgtgcaggaggaggttcagtatttcatactggtctccccatcacatgttctattggcaaaagtttctgaagtcagtagaaatgtcaaatgaaatttatgtcaaccacaaagagcagctgactttagctggccgaagctggctggtaagggcagtgatagtccagaatctagccaggtgcagccgatcacgagtcctcggtagaacagcagtttccagaggctcacttcctcctgttactcccagcttgaggcttgacatcaaatttcaatctacataaatgttggtcaaggaagagaaataaatgaatttttgcttaaagaataatcatcactgtggccaagcctggaaattcatgatgcccagaggaatcatcttggtcgatgcttatgaaaaggccttctaagcagaccccttgt

SEQ ID NO: 42185 - DNA, 1385 bp, Homo sapiens
gcttggacagtacattactggatcccctccccacacccccacattcatcttcatggtttggtccagggccttcagtatagggaatgtgawtaaatctctcatcttttgtacagagtgttccttttttcgttttcttttctttgcttgccatgtctgtgaactctgtagggcctgagtcattgtaagccttacaacgctgtgatcacggatggagagatggaaaacatgcattttacagaagtttcttgagtatatatatatatatatatatatagaaaacaaaacctcctgtgtcgctaaaattcttagagtgttgactccagtatttctaaacttaaatatctgccgcctggataatgtagcttaaatcagtgataacttttgagatgtcatcatgagactttttgggcttcatattttaaaatcactgatttcttaactttattagtgagggcttatgtaataacacatttttagcttaaagagggattaattatagaatattccctatatggaattaaatgtatttgcttttctagcatatggacttcagaaccctaaagttggggaagtggggtggagtctgaatagtttagatggacaaagaaattcctgcaagagagactgtaaccacactgaaactgggcattgtttatagattttttaaaaagttttgtttcattcacatacactcatgactgtcatatagatatagatgatattatggcaaataaaatacaaaattgttttaaaaggatccatggttgcttttgttcatcagatgtttgctaatcaaagactagaaaccaggttactagcacatggaagtgtttgaatattgggagttgttgttacgcagttttaaagtggatttcaaatgagtgctgtgtttaactaatggaatataagtaacattctatccaaagaacataattgtatgtgagcgtaaaccttaaagcaagtatatttaataaaagacaccagcaatttccgaggttgttctaaataatgttcagcacattaaaaaaaaaagtggttccatctgttactttctattcttaacaaaaggggaaaaaggagatcattttgatcaatgcccttttaattcttaggcttggtataaaataaatcacagtgttatggcaattcatttatagaggttaaagtgatatgatgtggcttttcatggcaacatgggtttcacttggtgagcgcctgggactttgatttgccatattacctgctgtggcttaagtgatgcaaaataattattggggcttccttgtcacagtggcctattccacacctgcacccttttgttgggaacccaacagggatgctggatatgcggtctccactgaatagacgatcctccctgactagtc

SEQ ID NO: 42186 - DNA, 886 bp, Homo sapiens
tccttcytcagcctcccaagtagctaggactacaggctcaaatcatcccacctggctaatttttttaaaaacttttcatagagtcagggtatggctctgtagcccaggctgttctccaactcctgtcttcaagtgatcctctggtcttggacttccaaagtgcttgggagtacaggcataaaccacctcgtccagccttaaatgctgctttagtacatttataggatattggaagagaagtccaacaggaaggtaaaacttttttttttgttttctaccactctaagagaaatcactgactaaccaaataactctactaatttgaggtctcttattgaatttacaaaactttgccaatctcgtgggtgaaatacgagttattattttaatgcttttctccacatggtgcatgatgttctgccatgactagaaatgcaatatagtaattaatttggggattataaacaagttttagggacgtaggctaattcacaaatacagaatccaaacgatagggatggattatatttttctttctataacaaatatttttgttgtcatgtgacaatttaaaaaagaaaagagatttcagaagcggctactcaaatatattctgacagaggaattctttgccaatagcccccacaagacttatattcaagagtttcagaacagtgaagacaaatctgtcagccctatgtctgtcgaggttcaaaaagtctgtcaaggttcaaaaatcgaagcagaacccataatatatatgtatacttagggagattcacatatgaattaagtgcaaggaactggtttccacagttgatgggatgcctgagcaagtatgagatccctgttaaagtcagttaggaagaaaaatcctcagctggct

SEQ ID NO: 42187 - DNA, 886 bp, Homo sapiens
tccttcttcagcctcccaagtagctaggactacaggctcaaatcatcccacctggctaatttttttaaaaacttttcatagagtcagggtatggctctgtagcccaggctgttctccaactcctgtcttcaagtgatcctctggtcttggacttccaaagtgcttgggagtacaggcataaaccacctcgtccagccttaaatgctgctttagtacatttataggatattsgaagagaagtccaacaggaaggtaaaacttttttttttgttttctaccactctaagagaaatcactgactaaccaaataactctactaatttgaggtctcttattgaatttacaaaactttgccaatctcgtgggtgaaatacgagttattattttaatgcttttctccacatggtgcatgatgttctgccatgactagaaatgcaatatagtaattaatttggggattataaacaagttttagggacgtaggctaattcacaaatacagaatccaaacgatagggatggattatatttttctttctataacaaatatttttgttgtcatgtgacaatttaaaaaagaaaagagatttcagaagcggctactcaaatatattctgacagaggaattctttgccaatagcccccacaagacttatattcaagagtttcagaacagtgaagacaaatctgtcagccctatgtctgtcgaggttcaaaaagtctgtcaaggttcaaaaatcgaagcagaacccataatatatatgtatacttagggagattcacatatgaattaagtgcaaggaactggtttccacagttgatgggatgcctgagcaagtatgagatccctgttaaagtcagttaggaagaaaaatcctcagctggct

SEQ ID NO: 42188 - DNA, 886 bp, Homo sapiens
tccttcttcagcctcccaagtagctaggactacaggctcaaatcatcccacctggctaatttttttaaaaacttttcatagagtcagggtatggctctgtagcccaggctgttctccaactcctgtcttcaagtgatcctctggtcttggacttccaaagtgcttgggagtacaggcataaaccacctcgtccagccttaaatgctgctttagtacatttataggatattggaagagaagtccaacaggaaggtaaaacttttttttttgttttctaccactctaagagaaatcactgactaaccaaataactctactaatttgaggtctcttattgaatttacaaaactttgccaatctcgtgggtgaaatacgagttattattttaatgcttttctccacatggtgcatgatgttctgccatgactagaaatgcaatatagtaattaatttggggattataaacaagttttagggacgtaggctaattcacaaatacagaatccaaacgatagggatggattatatttttctttctataacaaatatttttgttgtcatgtgacaatttaaaaaagaaaagagatttcagaagcggctactcaaatatattctgacagaggaattctttgccaatagcccccacaagacttatattcaagagtttcagaacagtgaagacaaatctgtcagccctatgtctgtcgaggttcaaaaagtctgtcaaggttcaaaaatcgaagcagaacccataatatatatgtatacttagggagattcacatatgaattaagtgcaaggaactggtttccacagttgatgggmtgcctgagcaagtatgagatccctgttaaagtcagttaggaagaaaaatcctcagctggct

SEQ ID NO: 42189 - DNA, 788 bp, Homo sapiens
catgagagtcgtaatcaactttgacaccttcctaatggtagggacccatgatcgtacttgtagcattaagcccggtatgagagtcaacatcattacaattaactaggtcaggataggagagtcctcccttgcctatgagctgagtttagatgtgggccaccatttcaactctggttgaatgtttatatatgaacacgggcctaacactgaggtgatgtgagtctttggcctagacacttcaagcaggaggcaaagtgacatatctctgggtctatcaactatttgatgtgaccttccttttttacctgagctttccccataaaagagatgtgacatatgtctagacaaagcacctgggtgatgtgactctcctttattgactgagccctgtgtattttgggtattctgacgtatccctggacctaacttctggaagataagaagatccaacatgggccctgcctaaaaagtttcttgtgacaaatttctacatgaatcaccttggagatttgactctcctctcttacccgagttttgcccataagagagattgttacgtacctctgcagcaagcacctaaatgctgtggctcttctttcttgcccgggtcatgcccacagatgaaagagtggcttatcgctgtgtccagcacaccggttatgtgattatgctgcctgatctctgctcacaggagccattgtgacatatccctggggccagaaactatttaacacgactatcttcaatgaccttaacttgktgcctgggataagttgtgacatatctct

SEQ ID NO: 42190 - DNA, 475 bp, Homo sapiens
ttaaaagtattaaatggacaatttaaaatatttttatagaaatgatrgaagatttaaaggttaatcccctcatagattcaaacatcttatgaaacagagcttagaagagaggaaactgatactttttgttccagtaatgattctcatataagatttttaaaacttattttagtttatattatgtacccgtagcataatgaagctattaaagggctatatcaaccactttcagctgttcctaccttaaacaaaagggaaaacaagcttatttctagaagtaggcaaattatcacccaccagatataaaaacagataataaaatacaattaaaacagtattatacagttatgaagatagatcaaccaacagaacaaaatgcaaagttcaaaaacagaccttagtgtatataaatatcaacgtatgacaaaagaagcattttaagatcactgaggaaagaaaaaaattacttaataaa

SEQ ID NO: 42191 - DNA, 475 bp, Homo sapiens
ttaaaagtattaaatggacaatttaaaatatttttatagaaatgatggaagatttaaaggttaatcccctcatagattcaaacatcttatgaaacagagcttagaagagaggaaactgatactttttgttccrgtaatgattctcatataagatttttaaaacttattttagtttatattatgtacccgtagcataatgaagctattaaagggctatatcaaccactttcagctgttcctaccttaaacaaaagggaaaacaagcttatttctagaagtaggcaaattatcacccaccagatataaaaacagataataaaatacaattaaaacagtattatacagttatgaagatagatcaaccaacagaacaaaatgcaaagttcaaaaacagaccttagtgtatataaatatcaacgtatgacaaaagaagcattttaagatcactgaggaaagaaaaaaattacttaataaa

SEQ ID NO: 42192 - DNA, 652 bp, Homo sapiens
tcttttaattctgtcagcttttacttcatgtattctggtcctctgtaattttataaataaataaatatatatatattttaagatgactattttatcattataaaatgttcatgttcatctttttcactagtgacactttattttagtttatcttgtctgatattagcaaagtaattgcaataaatattattttcctttcttttttaactttaaatctatttgtatctttgaatttaaaatgtctcgcctgctggaagaattccccttgaaaactggaacaagacaaggatgccctctctcacctctcctattcaatatagttatggaagttctagctagagcaatcaggcaagagaaacaaataaaaggcattcaaattgaaatagaggaagtaaaactaaccgtgtttgcagatgatatgatrctatgtataggaaactccatagtctttacttcaaagctccttgatctgataaacaacttcagaaaagtttcagtatacaaaattattgtacaaaaatcactagcattccaacagtccaacaacaaccaagccaagaggcgaatcaggaaggcaatcccattcacaattgacatagaaaatatttagtaatacaactaaaaagggaggtaaaagaactctagactgtga

SEQ ID NO: 42193 - DNA, 519 bp, Homo sapiens
ttccaatcagtcttgattcctaagtggcttactggggcttttattcacttatagcaaagctacaccaaaacctaattttaagtacattttagaccctgttcccttctagctgctactggctgctgctagcccaggcctcagcctgacccacagctttgtgctttggctatgattttaatcaatttctgcaatagtctgaatgttggtgttctcttcarattcatacattgaaacttaatgctcaatatgatggtattaaggaatgtgaccttttgggaagttattgttataagggctctgccctcatgaatgagattagttctgtaaaaggggcttgagaaagactgtttgctcctttcaccatgtgaagacacatagaagccatcatctacggggaatgagtcctcaccagacactgaatctgctggcacctttgtcttggatttttcagcctccagactgtgtgatcaaaaaaattatatttgtaatgtacgcagtctaacgtatttttttatggca

SEQ ID NO: 42194 - DNA, 522 bp, Homo sapiens
tttatctaaattatttgtgtaatagtagtttaaatattgtgtctatctctctgcattgtaagatgaatcttcatactttcaaccatacwgtgtttattatagacaaagctccagtttgcaggactatgccccttggaccatttacctcacagtttccattgcatccattcatagattccagtgactgtcacacaccagccattttgatggaacattggaagccaatgtgtcctttgtaatgtctacctttggtgatttatctttgagtgatttggttcaagagcctcttgcaaaggatactttgcctacagttttatttttttcaggtgcatccacttaaatttttaataaagccactgctgatcttaccactttattttcggattcacattccatgataactaatggcaggtcatcacttaagtcccttggagagagataaatctaattctttaatgtataattactggcactccatctcctccttcccacctttaatttaacttaatctttccctttctc

SEQ ID NO: 42195 - DNA, 522 bp, Homo sapiens
tttatctaaattatttgtgtaatagtagtttaaatattgtgtctatctctctgcattgtaagatgaatcttcatactttcaaccatacagtgtttattatagacaaagctccagtttgcaggactatgccccttggaccatttacctcacagtttccattgcatccattcatagattccagtgactgtcacacaccagccattttgatggaacattggaagccaatgtgtcctttgtaatgtctacctttggtgatttatctttgagtgatttggttcaagagcctcttgcaaaggatactttgcctacagttttatttttttcaggtgcatccacttaaatttttaataaagccactgctgatcttaccactttattttcggattcacattccatgataactaatggcaggtcatcacttaagtcccttggagagagataaatctaattctttaatgtmtaattactggcactccatctcctccttcccacctttaatttaacttaatctttccctttctc

SEQ ID NO: 42196 - DNA, 638 bp, Homo sapiens
tcattctcaccatattattgcagatgacactttgggatcataaagtcatatagtatattatgtttgggtaggacttgagagagagccattatttttccaacagaacatttattctaggttcttagttgaattttaggtttagccattttaagggctactatatatatcccaaggaaattgattaggttcaattgattattcttttattcctacwtttaaagttactaaatgtataggacatcaattggagagcgcatctagagtcttccattccaagttcaccttttgcaatatgttactggggattatcatgtcatttgaagatactcaggttgtcagcatcaactcatttaccgtgagttagtgtttctcaatttgtggaggtaccgcccttaggaaacattccttagaattactaggagcttgactgacatttaaaggataagaatgtaggatactaaaagtcctgtaatacatgggccaatcacacaaatgatgaattatttggaacgaaatgctaatagaatcttcattaaatactgagggggcttgatccaatgttgccgggatatagatgtacaaacgtcctgaaaaaggactgtgtatttgttactgattcattgaacatattggttttg

SEQ ID NO: 42197 - DNA, 638 bp, Homo sapiens
tcattctcaccatattattgcagatgacactttgggatcataaagtcatatagtatattatgtttgggtaggacttgagagagagccattatttttccaacagaacatttattctaggttcttagttgaattttaggtttagccattttaagggctactatatatatcccaaggaaattgattaggttcaattgattattcttttattcctacttttaaasttactaaatgtataggacatcaattggagagcgcatctagagtcttccattccaagttcaccttttgcaatatgttactggggattatcatgtcatttgaagatactcaggttgtcagcatcaactcatttaccgtgagttagtgtttctcaatttgtggaggtaccgcccttaggaaacattccttagaattactaggagcttgactgacatttaaaggataagaatgtaggatactaaaagtcctgtaatacatgggccaatcacacaaatgatgaattatttggaacgaaatgctaatagaatcttcattaaatactgagggggcttgatccaatgttgccgggatatagatgtacaaacgtcctgaaaaaggactgtgtatttgttactgattcattgaacatattggttttg

SEQ ID NO: 42198 - DNA, 638 bp, Homo sapiens
tcattctcaccatattattgcagatgacactttgggatcataaagtcatatagtatattatgtttgggtaggacttgagagagagccattatttttccaacagaacatttattctaggttcttagttgaattttaggtttagccattttaagggctactatatatatcccaaggaaattgattaggttcaattgattattcttttattcctacttttaaagttactaaatgtataggacatcaattggagagcgcatctagagtcttccattccaagttcaccttttgcaatatgttactggggattatcatgtcatttgaagatactcaggttgtcagcatcaactcatttaccstgagttagtgtttctcaatttgtggaggtaccgcccttaggaaacattccttagaattactaggagcttgactgacatttaaaggataagaatgtaggatactaaaagtcctgtaatacatgggccaatcacacaaatgatgaattatttggaacgaaatgctaatagaatcttcattaaatactgagggggcttgatccaatgttgccgggatatagatgtacaaacgtcctgaaaaaggactgtgtatttgttactgattcattgaacatattggttttg

SEQ ID NO: 42199 - DNA, 638 bp, Homo sapiens
tcattctcaccatattattgcagatgacactttgggatcataaagtcatatagtatattatgtttgggtaggacttgagagagagccattatttttccaacagaacatttattctaggttcttagttgaattttaggtttagccattttaagggctactatatatatcccaaggaaattgattaggttcaattgattattcttttattcctacttttaaagttactaaatgtataggacatcaattggagagcgcatctagagtcttccattccaagttcaccttttgcaatatgttactggggattatcatgtcatttgaagatactcaggttgtcagcatcaactcatttaccgtgagttagtgtttctcaatttgtggaggtaccgcccttaggaaacattccttaraattactaggagcttgactgacatttaaaggataagaatgtaggatactaaaagtcctgtaatacatgggccaatcacacaaatgatgaattatttggaacgaaatgctaatagaatcttcattaaatactgagggggcttgatccaatgttgccgggatatagatgtacaaacgtcctgaaaaaggactgtgtatttgttactgattcattgaacatattggttttg

SEQ ID NO: 42200 - DNA, 1918 bp, Homo sapiens
acattagtttattgctacaggatccacacctagtccataaatatccatggtccactgcagtttgaacgccattaccccccagtgcaatccttttctggtgctgccaacttcagccaggctctcacctatgcaattctcttctcctactctagcgaagaccagagtgattgtctcaaagccctctctctcacctgacttcccttctgggaagcttacaacattgacactcttcctcaagcaccctgtggtcaatgccaactttagggatggttatgtggagaaacagtagtggcatttaattataggatagagtatgtatgatccggctttagggctcctagcccagagttgaagggcaagtttcattcccagggaaaatatacaaaaaaggaaaaagtgctgtctttgacacatggttctctctctctctctctctctccctttttttgagatggagtcttgatctctcgcccaggctggagtgcaatggtgcaatctctgctcactgaaacctccacctcccgggttcaagtggttctcgtgcctcagcctctcgagtagctgagattatacgtgcccaccaccaccccccaggctaattttttgaatttttagacagggtttcatcgtgttggctgggctggtctcgaactcctgacctcaggtgatccacccatctcggcctcccaaagtgttgggattacaggtatgagccawcacacccggcctggtgctctctttttatagatcagatagatggctaagggtcggaagctctaggttgagtcaaaagagccacttcccaatgtttgtttgtgctattttctgtcttgttaggccagcagaattgcactcaagactctcatttgagtttaactctaggatctaggtgcaagagaccagatacaaatgtcagcacaagccatgagatacaggatttctttgtcaataataaacagaatggaacaccaggagcgcatgctgtttcttcatgaaacaaataggcaaataggcagttgctagtagggattcccaatattcataaacctcaaaaggtaaaactgtggtacttctgcatgaaaatataaaacataatagaaagtccataaagaaaaatatatacaggaatctagcatacaataaggatgtcatcacaagtaagtgagaaaaatgaagcttttaatttttatatggttaaaatgatcagtgttaattttttcatgactaccggattttgtatgacagttagaaaagtctttcccaatctgaagttataaaaaaactagtccagggtttctgtctcatgttcattaaaaaaaaataaatttattactggtgttagaacaattagctagcatctggagtaagttagcattgcacatcttacaccagaataaatcccaaattgattaaaggttgaatttaaaaaataagaccatgtaagtacaagaaaatatcattgaattcttttatgtccttggaatgaggaagacctttcttaataaaatacaaaatctagaagtcactaaagatgaaaaggataattttaactacataaaaatcaagaaattctgcatggaaaaaatactacaagcaaactcaaaagataaacacaaaatcggtggtggtggtagagggttgattgtaattcatgtcaccaacaaaggctaattcccaaatatataaataacttttagtaattgagataaactaacaacctcccccaaaacagttaagatcatccacagataactacataaacaacccacaaacatagcaaaagaagcaacaccttaacagtaatgtgagaaatgcaaatgttacttaaacagaggtatgatattttacatattttattagcaaaaacccagaggttgacatattcttctggcaaaactgtggggaaactagtatcctc

SEQ ID NO: 42201 - DNA, 665 bp, Homo sapiens
attttgtattcaaataacagctgtatctggtttaccccttgtggcgcagtgaggaaaattaggcaatgtgtaaatataatttttgttatttactatgctacatattcaattagcttgaaaacaaaaaacaaacaccaaaccactcattccaccgtatagcccagagctaccatttccctctctaaggggaagagaacctaagcattggctaggagcagctgcaattagaatttctttcatagactttcctgaaaacccaataaaagaagtagaaaggagaggctgggcctattacatttattggaggcccacagcctggtttctattaagtttgacagtatttatttttgaagctagaatcatgtacttacctatgattgcaaacattgttttcaaaatatcaaataacgaatgtgcaaaaactgaataataatgaaatggatggaaagtgacaaaacggaaattcttctcccccacagcaaaggctcaaaaattccagagrgtggacaaacatgaatacttcctgtttcactgtaaaggtttttggtgcttaaattttaagtctccattttcagtctgtgattgtctatcaattatatttaattaatgtttttattacaataatattgtgccatcagttacaaaatattttataaaacaatgca

SEQ ID NO: 42202 - DNA, 1050 bp, Homo sapiens
atttgaaaattgaagctttgtagttattaaactacctattacttctgatgttaccttttggacaaatggtattcatttaattttgggttctgtgaatttttgattttacaagaaccctttggctttagaaagagaatgagaacatctctggattctttcacccctttttaacggtggggctccgtgtactttccactgaaggagtgagcattgtcaactagttaacacaagctattggaaaaatccctgaattttgtatgggaagaataattgcacacaaatgcactcaggaatcctatggaaaatatagtgctgttaactggcatggttacaacacaatttagcaagtatgttagaacaaattaccccctttaaccataagccattctgtttcacgcttcttaatgaaggcctgtgccacacactagaatacttctcacctcattactactcataaaaagcaatgatccattcaaagtctcctcatatctcccatatgagtggtaaagagcttcgcctctcattctggcaggaggacagggaggcttcttcccagcctgcctttgaagtaggtcattagaatgtttactagataaaaggactcaaaaatttatctgtgtaatctcactgttgtcatgtgttaatgttctatccttcctttaaaaacaaaacaaaacaaagcaaacaaaacccaaagacatttctgtccctgtttagagaatacaggagatttgtaacactcagtgcaatttttctcctgcagtattcacaagatattttcaaagaaactctaaaaagcaggaagaatttaatgggccactgaaatacaaagtatggattcaataaaaaggcaggaagagaagcaagctgataggccagttaagaagaaacagtccaattttagaattaaacaactttttctctccacggagtgtcatcaaaaggaaaataaagttgagtatccttggaaataacattrtatcggttactaatgaacacgattttcatctagactgaaatatttttcccctattaatttcagggacaata

SEQ ID NO: 42203 - DNA, 755 bp, Homo sapiens
tgcatatctacttgttctattatgatttgttgaaaatactattaattcaccattgaattaccttaagcttattttatttctgtcctttgctaagtccctgcttttacggtaattcgtcttttatttattacatttcaacttttattttagattcagggtgtatatgggcagatttgttatacgggtatattgtgtgaggcaagtttggggtgggattattctgtcacgcatgtagtgagcatagtacccaataggtccccatcctactttccccccttcagtagcttccagtgtctattgttcccatccttatgtccatgtgtacctaacgtttagctcccacttattcatgagaacatggggtatttggttttctgtttctatattaattcacttaggataatggcctctagctgcatccatgttgctgtgaaaaacataattttgttcttttaaaatgattccatgrtgtatatgtaccatattttctctatttgatccactattgatggatacctaggttaatttcatgttttcgctattgtgaatactgctgtgatgaacatatgagtgcatgtgtcttttggctgaatgatttgttttcttttggctatatacccagtaatgggattgctgggtaaaaaggtagttctatttttagttctttgagaaatctccaaactgctttctatagcggcagaagtaatttagattcccaacagtgtataagcattctcttttctctgcagacttgc

SEQ ID NO: 42204 - DNA, 521 bp, Homo sapiens
atccttgtatatatatgtgatatatatatatgctatatatatatatatgctctctctctctctatatatatatatagccttcacgtggtccctgatatacttcagtatattctattaggatttttatatatatatatatatagccttatatcatatatatatgatatatgtatcagaaattaagttaaatttctaatttcttatttctgctggtggtgactaagtgtgatcattatgtcttgaaggtagaataacttagatgatgtcttacattctgtatcctgtgattccttgatttctataccatattggctgtagatatattttcatgtaactagatgtagctcatatagccattatagrtataaagacattcgtcctaatttcggttcctgggagtaaaggtgggaaaacactttctctagtctcctagtgttgtgctcaaaaactataatggcttatggtaggctaaacgttagttttacattcttcctgattaaagaatacatcattattattat

SEQ ID NO: 42205 - DNA, 526 bp, Homo sapiens
ggtttaaatgaaaaaaaataagttaaatattttgaagaaaaaagtccaatttataatctctaaaataaattatacaggtgtgctctcctgccgggggcttaagaaaagtcttcttcccccaccactagtgacaatttaaattatcagttagctcttctcaatgtatwttgctgttggtgttacaaacttttgccatttatcaaacttctttcattgacttctataatcatcaaaacgaatgatttatctgcaggcattattattcagaggcttgtgttttcagtatttgccttctttgatcatcgtttgtccttgtgtctaagtcatcctttcatttgatactgcaatcccatgtgcttttcttatctgtcctgtttgccctttggttttcttttatcagacttgttctatgcggtattgcatatgttttagttccttaaacacataaccatacacccccataagggaaggtgtgaaatgggggaagaatgatagatggaggctaattatttaatattgtaacttc

SEQ ID NO: 42206 - DNA, 539 bp, Homo sapiens
caatttttcaagaaatggagacaactggtcaagacaagcatagtctcctccaccattcagttgctcaaaacagaaacctggtgtcawccttgatcctaccctgcccctcatattgtgcaatcatgaatttccttaaatatgcttgtactctggggagggagctctaagtttcaactaagctctcaggctgacacttgccaccaatctcctttgaaggctgtgggacaggagccacatcttaccagcaggcactgtcaggcaccaggatatacccatgggagttcttgcaggagttcatgaggatgaactcatataattggggactattttctcttgggataacacagcccatatgcacagagatgagatccacactgcacagatgttgaggcttttctggcttagaagaagtcgcacgcccaacaggagccaaaatctttcccgatgattccgtaaacagctttcaaggagcccacaagggacaagactgttggcagagttatgacacttatgaaatccaaaagcatgaggttcccatc

SEQ ID NO: 42207 - DNA, 539 bp, Homo sapiens
caatttttcaagaaatggagacaactggtcaagacaagcatagtctcctccaccattcagttgctcaaaacagaaacctggtgtcatccttgatcctaccctgcccctcatattgtgcaatcatgaatttccttaaatatgcttgtactctggggagggagctctaagtttcaactaagctctcaggctgacacttgccaccartctcctttgaaggctgtgggacaggagccacatcttaccagcaggcactgtcaggcaccaggatatacccatgggagttcttgcaggagttcatgaggatgaactcatataattggggactattttctcttgggataacacagcccatatgcacagagatgagatccacactgcacagatgttgaggcttttctggcttagaagaagtcgcacgcccaacaggagccaaaatctttcccgatgattccgtaaacagctttcaaggagcccacaagggacaagactgttggcagagttatgacacttatgaaatccaaaagcatgaggttcccatc

SEQ ID NO: 42208 - DNA, 539 bp, Homo sapiens
caatttttcaagaaatggagacaactggtcaagacaagcatagtctcctccaccattcagttgctcaaaacagaaacctggtgtcatccttgatcctaccctgcccctcatattgtgcaatcatgaatttccttaaatatgcttgtactctggggagggagctctaagtttcaactaagctctcaggctgacacttgccaccaatctcctttgaaggctgtgggacaggagccacatcttaccagcaggcactgtcaggcaccaggatatacccaygggagttcttgcaggagttcatgaggatgaactcatataattggggactattttctcttgggataacacagcccatatgcacagagatgagatccacactgcacagatgttgaggcttttctggcttagaagaagtcgcacgcccaacaggagccaaaatctttcccgatgattccgtaaacagctttcaaggagcccacaagggacaagactgttggcagagttatgacacttatgaaatccaaaagcatgaggttcccatc

SEQ ID NO: 42209 - DNA, 1094 bp, Homo sapiens
actgcttctatcacatacttcaccactcagaatctaccagaaaaataaaatggccctttaaaagagcaatgaggcactagcttaaggatgacaccctgtaagaattgaacactatcattcagggagtaacagaccccctaaatcaaataagtaaccattatgtagtgcagtgctgcttccaacagggagaatacatggtttcaggaaagaagaggtgtttgtagaaatggctgtgcttatgaatagtgattgtatagggtagatgtgcttcctgtctgcacaactctgggttctgccagtcaagagacccgggttggcaaatgtattagcaaaaacacttctgacaggtaataaggcaagagttttatcaaactttcatttacagctgtttgggctccttaggtcataagaccagcagtcaagaaaaggatggtgtcaccgtccatcaatggtaattagtaggtctgtgtaataaagatctgtgtaattgctgttaaacaaagggggcagaaagaaaatgttcacacctttctggcccagtcagatgtgtttttgtatttcatttcctaattttgtagataagcagaggaatgaaaagggtatgctgcatactcctgaccccagaaaaaaaagcatggttatcaagtattcagatcatccaggcataaggctctggatcagtggtatgtrtactatagccaagtcagacaggctttcaagctgagaaccatttctgtgaatctcttccaaactcctgttcagtaatatcacactggtagcttgaaattagtgacgatgaaagtatttacattataggaattggcaagtgctagtaatcaggatatttctatttacttatttatggaaatttagtttgtcaacacgtcatgggtctggatcagctaccagacgagcagaattaatcaacctagaatgggttgtagagatggaagaagataagaatcatttgcaacctctaaaccagttgccccaatgggactgcaattcctcccactaagttgtattttttgtttttataataaatcaaccagaattctagagaagttgttcccagaacttatatgaagcaaatg

SEQ ID NO: 42210 - DNA, 552 bp, Homo sapiens
ggccgggcgcggtggctcacgcctgtaatcccagcactttgggaggccaaggtgggtggatcacgaggtcaggagatcgagaccatcctggctaacacggtgaaaccccgtctctactaaaaatacaaaaaattagccgggcatggtggtgggcgcctgtagtcccagctactcaggaggctgaggcaggagaatggcgtgaacccgggaggcagagcttgcagtgagccgagattgtgccactgcactccagcctgggcgacagagcgagactccgtttcaaaaaaaamcaaaaaacaaaaaaacaaaaatggtagagtaggtgaactcactttctaaaactagagtaggacataagcttgaatataaaagcaggccaaaactcagttatggtactgagtgtttaaagtcaaaatggaacacacagtaaaattgattggttttatccaccaaagaatggattccatacatgctttatgtttctcccacctacaaaaggggtttaagaaaagctgtgcgaatttgtagcaatcaaagagaagaattccagga

SEQ ID NO: 42211 - DNA, 1212 bp, Homo sapiens
aatgacatgccacaaactcctatcaggagacgtggtggaagggagctggcaaatatatcaactcacataattggcatttttgcagcacacttctggtgcagaagagctgctggctttcagaaggaagggcaggatggggtctgatcactcactttttcaagtctactcttaggatcttctgtctgggaagccagctttgtcaataactgtttttctctgcctcagggccatgttggatctacctcaacagttttcagatgacagcaccaaacaaccctcccagcttctcccaaaggctgcctccaatttggatgtaatcagaatccaaactggctcctttccatgtctcctagtaggaagtgaccctggaagctgcaaagtcctcatttgcaaactgacagtcactttttcagtttcctaggccaagatgaaaaaggctctttaccttccaagataaagcccccccgcccactagagcaaagagaaatcacacccacacccagctgacattcattttccattttcccagcctgtcactgctgagaaagagacagctgctgctgccaccacaggcagagagagagagagacagagagagagagagagagagagagagagaaaatcctttaacctcttaccatattaagtcacagaaattttcttgcaatgtgtcttcctgtcatttactcaggaaggtccctatgacatagttttgaaagattttacagacagcagaaaaacaagagtgttatcccaaacctcaatcaactaagcaatgtaaagacataattcctgaaattcttgcccacaatagtttttggaaagaaagcactacatttcactggttgtttccaaactgattttgtgtgtgtgtataayactttgctgtggccatctccagaacattaggttgtctcccatagtgtcaatcccttctgtccaaagaattacatccacttcttacccccttacttagtgtaataagctcaactgtgtcctcctcaaaaaaatttatgttgaagtcctaatccacagtacctcagaatgtgaggttgtttggaaacagggtcttaccagaagtaattgagttaaaatgaggttatgatgggcccaaatctgatatgactggtgtccttataaaaagggaacatttggacacagagacagacatgcacagagggaagattatatgaagacactcagagaagatgg

SEQ ID NO: 42212 - DNA, 745 bp, Homo sapiens
ccttattggcaaaacctatctcaaagccaactggaaataaataatacatacacatacatttcatatatgtacatatacatatgtatacacacatataatgtactttacagagttaaagtctagcattacatagaagaatatatttagatccgagagataatagcttaataactatcctagtccatgctttaggcttctcagcatccatatacactctgctacatatatttattatatagaagaatatatatagatataagaggtaatattaataactattctagtccacactttaggcttctcagcatccatgtacaccctgctacatatatttaaacttatagataacaagtgaagacagtttcactctccgcctaagaatagaagacatcaagttccaacatcatagtcatctttgagaagtcactgtatccaactctgagaaatgactattcctctaaatcacacaaatcccacctgaacactctgtaacctaaagaatgaagtttagctgacaatcctatataaaacaataragaaaaataagaacgaataaaaatattaattattaataaaaataagaaaaaacatatactacactgcatacatacaacaaaaaagaaaatatgactaaaacatctctcagttctctagtttgtcacaaaaccatttgatacatgtaatttctttcttctaccaccccatcacatgtttcttttgcccagtgttcagctggttaggatcc

SEQ ID NO: 42213 - DNA, 1381 bp, Homo sapiens
ctaatttttgttgttgttgttgtttgttttttttttgatagagaagaagtttcaccatgttatccaggctggtctcaaactatacaattattatttgtcaattaaaaatttaaaaagataaccacaaaaaaggtaatcatgtatgtcactgtttttctttgagaccttctattatgtttatgcttggtctatcctccatacctacgatatccttatacacccctaatcttgatagtctttacaatttaattatcagctataatatttaaaccatgtgaactttgttgcattatgccaggtgatatttttcacttaaaattttttcagctaaccaattttctcaataccgtttgttttcaaaacatccattcctctctccatttatgtgtgaaggttcttttataaattactaagtttttatatgagaatgtatttctgagcattcaatttggttttcacaattctacaaatgacacacactgtttttaaaattactacattttaagtggctgggaggttaatcccatgtccctaagccccccaaatccctctttttaaactttccttagataatattggctgtgtttattttgaaattaaatcttcaatcatattattaaggtctagggtgatatctaattcccaatttcatacttgatagctttacagctcttaatttgaaaagaattagcatcttaatattattcaatctttccttccaggaacatgatatatttttccatgtcttctataattctcacaatatttctgatatttactctttgtagactcaaccttttaattaggtcattccttagtatggttttgttattttgtgaataaggyctagcttttttcaactatatccttaaatagttattgctatccttcagaagaaacgcttctagttttcttattgatcagtctattgaaattatgtctgcactactaaatgatttagttagtgttccctgattcttgtgcattttgataatttcacaatcttttaaaaatttataacaagagttaaaattttatatctgctataggtcttcagatttctggtacagtatgacattaagtaatacttctgtatatttgtctccagttcagggttgcgggtggatagagcctcaattttgagtttgtacttcaataacacaacttcaacaaagttttacagtgaaagacatatttttcaaggaaaaaatgtgaagcaacattcaaaataatacttattaagttttgtggttcacaaaggaagtcttctatctaatcaagattccttatttctcttaaatcaacgaaactttcctttgctcagctacacacaaatgaatcagaggcaggattcgtacctgccacttcaaatgatgccaac

SEQ ID NO: 42214 - DNA, 1257 bp, Homo sapiens
gagtggcaagtgtttatcataaagtcttctaagatggcrtagcccttacgctcacccattgccaccagcagaccttccccacactcctctcaatttatcctgctgctttcctgaatactgagtttcaaacaaataattttaaatggcctatgtattgattgaaaggttctgcacatgtaccctaaaacttaaagtatactaaaaagacaagtggcatcaatgatcaaatctactaagctcctgaaaataacttatagtacatttttacataaattttctaatgatttccttatattttacttgtagcaagtttttttcttagagtgcaatacatgttcaaccactattaatgttttgctttatggctgcctgtattgaagcctttcttactctgtcaggtaggtattacgatcattatgattcttattttgtaaatgaggcaggatcagtgatgttacttgctcaagagccaatagttaagtaacagaaccagaacctaaattagcagatgagtgtgtgtgtgtgtgtgtgtgtgtgtgtgtgtttggtgtgaaaccaccactgtaaaattataactgagacagtgaaagacatttgatctaaccaactctatcttgcttctaacctccaagctgtccttgttcatttctggatgtaggctgaactaactttgtgaggaacttatagtttagaacaaaaacaataatatccctttcccaaaacaaaccctcttatttcctggggaccagtctgtcatcgtacaccacaaccacactcaactactttttgtatttttagtagagacagggtttcaccatgttgaccaggctggtcttgaactcctgacctcaagtgatccatctgcctcagcctcccaaagtgctgggattacaggtgtgagccactgcacccatcaagtccctcagtttttcttgtggaacagctctctacactcaagcttgagtctaacaggaaagaaacctacagtttgataagctgacactattgcattagtaaagatgagaaagaagggcagatttaactaaaacgatgacaacagagttggagatcagggatggatttgagatctattgaggagcaccatgttcaggctttgttgactaattagagagaagaatgggcataggcagactccctggtttctgacttgagggaaatctatgattcagtgaccatattttattttcatattactttctgataaaaagaagatgtgacagttaattttatgcatca

SEQ ID NO: 42215 - DNA, 1257 bp, Homo sapiens
gagtggcaagtgtttatcataaagtcttctaagatggcatagcccttacgctcacccattgccaccagcagaccttccccacactccyctcaatttatcctgctgctttcctgaatactgagtttcaaacaaataattttaaatggcctatgtattgattgaaaggttctgcacatgtaccctaaaacttaaagtatactaaaaagacaagtggcatcaatgatcaaatctactaagctcctgaaaataacttatagtacatttttacataaattttctaatgatttccttatattttacttgtagcaagtttttttcttagagtgcaatacatgttcaaccactattaatgttttgctttatggctgcctgtattgaagcctttcttactctgtcaggtaggtattacgatcattatgattcttattttgtaaatgaggcaggatcagtgatgttacttgctcaagagccaatagttaagtaacagaaccagaacctaaattagcagatgagtgtgtgtgtgtgtgtgtgtgtgtgtgtgtgtttggtgtgaaaccaccactgtaaaattataactgagacagtgaaagacatttgatctaaccaactctatcttgcttctaacctccaagctgtccttgttcatttctggatgtaggctgaactaactttgtgaggaacttatagtttagaacaaaaacaataatatccctttcccaaaacaaaccctcttatttcctggggaccagtctgtcatcgtacaccacaaccacactcaactactttttgtatttttagtagagacagggtttcaccatgttgaccaggctggtcttgaactcctgacctcaagtgatccatctgcctcagcctcccaaagtgctgggattacaggtgtgagccactgcacccatcaagtccctcagtttttcttgtggaacagctctctacactcaagcttgagtctaacaggaaagaaacctacagtttgataagctgacactattgcattagtaaagatgagaaagaagggcagatttaactaaaacgatgacaacagagttggagatcagggatggatttgagatctattgaggagcaccatgttcaggctttgttgactaattagagagaagaatgggcataggcagactccctggtttctgacttgagggaaatctatgattcagtgaccatattttattttcatattactttctgataaaaagaagatgtgacagttaattttatgcatca

SEQ ID NO: 42216 - DNA, 1257 bp, Homo sapiens
gagtggcaagtgtttatcataaagtcttctaagatggcatagcccttacgctcacccattgccaccagcagaccttccccacactcctctcaatttatcctgctgctttcctgaatactgagtttcaaacaaataattttaaatggcctatgtattgattgaaaggttctgcacatgtaccctaaaacttaaagtatactaaaaagacaagtggcatcaatgatcaaatctactaagctcctgaaaataacttatagtacatttttacataaattttctaatgatttccttatattttacttgtagcaagtttttttcttagagtgcaatacatgttcaaccactattaatgttttgctttatggctgcctgtattgaagcctttcttactctgtcaggtaggtattacgatcattrtgattcttattttgtaaatgaggcaggatcagtgatgttacttgctcaagagccaatagttaagtaacagaaccagaacctaaattagcagatgagtgtgtgtgtgtgtgtgtgtgtgtgtgtgtgtttggtgtgaaaccaccactgtaaaattataactgagacagtgaaagacatttgatctaaccaactctatcttgcttctaacctccaagctgtccttgttcatttctggatgtaggctgaactaactttgtgaggaacttatagtttagaacaaaaacaataatatccctttcccaaaacaaaccctcttatttcctggggaccagtctgtcatcgtacaccacaaccacactcaactactttttgtatttttagtagagacagggtttcaccatgttgaccaggctggtcttgaactcctgacctcaagtgatccatctgcctcagcctcccaaagtgctgggattacaggtgtgagccactgcacccatcaagtccctcagtttttcttgtggaacagctctctacactcaagcttgagtctaacaggaaagaaacctacagtttgataagctgacactattgcattagtaaagatgagaaagaagggcagatttaactaaaacgatgacaacagagttggagatcagggatggatttgagatctattgaggagcaccatgttcaggctttgttgactaattagagagaagaatgggcataggcagactccctggtttctgacttgagggaaatctatgattcagtgaccatattttattttcatattactttctgataaaaagaagatgtgacagttaattttatgcatca

SEQ ID NO: 42217 - DNA, 1188 bp, Homo sapiens
tgcatgcagggcttaaagcctagatgatgggttgatgggtgcagcaaamcaccacggcacatgtatacccatgtaacaaatctgcacattctgcacatgtatcccagaacttaaagaataaaagaaaaaaaaaaaaagaaatagtgcagctgcttactgatacaccttctctgactgctcaaataaaccaatacttcttggccctcagtacgcaggctaatttcattgaaaaggtttttgttcccagaggaattgttaaatgatatgtctgtgtcataattattttaaatagtggaattcatatgaggcatctctgccacagtgatttgcatatagtggacagtcactacattataactgaataaaaagtaattccattaaaagccacagagggttcatcattcaaggcaaagagaatagcaaactgggtgcacagtggaatcagctttaaaatatgcagattccaaggcttcataccaaatacaataagccaaaaatctccagtgttggtaccaggattcagtttttcagtggctgtccttagcttcccaaggcagagaatcagctgttttgaggaacacctgggaagaaatgaaaaacctcccccataggtggagccttgagtgcggaaggagcatagtgagaggaggctttaaagctggggaggaaccagactggggtgagttaaggtgtctatatgtggcccaagaggcagtggggagatatttaatttgtgctttaaaaagatcactctctaaaatgttgtgaatatattgatgagggctgtggcagagtcagagagccagttaagaagagattgttggtacagatgatgaagaggctgatagtctccttgattaggacaaagccagtggctggggcaatgggggtaaactcagggattagcaagatatttggaagaccagataggcagaaattaataacttactgataagtgggattaggaaataagagaaatagactccacttccaaatcctaatagataacataatttattaatgctgaataatcattaggactgaaattctatatattttaaaaattaggtagacatcactgagacttaattagcattctgatttagagaagggaggaatttgaggtcatataccctcttctgttccatttgccctattttaattatctaaaaataaattcttccattt

SEQ ID NO: 42218 - DNA, 1188 bp, Homo sapiens
tgcatgcagggcttaaagcctagatgatgggttgatgggtgcagcaaaacaccacggcacatgtatacccatgtaacaaatctgcacattctgcacatgtatcccagaacttaaagaataaaagaaaaaaaaaaaaagaaatagtgcagctgcttactgatacaccttctctgactgctcaaataaaccaatacttcttggccctcagtacgcaggctaatttcattgaaaaggtttttgttcccagaggaattgttaaatgatatgtctgtgtcataattattttaaatagtggaattcatatgaggcatctctgccacagtgatttgcatatagtggacagtcactacattataactgaataaaaagtaattccattaaaagccacagagggttcatcattcaaggcaaagagaatagcaaactgggtgcacagtggaatcagctttaaaatatgcagattccaaggcttcataccaaatacaataagccaaaaatctccagtgttggtaccaggattcagtttttcagtggctgtccttagcttcccaaggcagagaatcagctgttttgaggaacacctgggaagaaatgaaaaacctcccccataggtggagccttgagtgcggaaggagcatagtgagaggaggctttaaagctggggaggaaccagactggggtgagttaaggtgtctatatgtggcccaagaggcagtggggagatatttaatttgtgctttaaaaagatcactctctaaaatgttgtgaatatattgatgagggctgtggcagagtcagagagccagttaagaagagattgttsgtacagatgatgaagaggctgatagtctccttgattaggacaaagccagtggctggggcaatgggggtaaactcagggattagcaagatatttggaagaccagataggcagaaattaataacttactgataagtgggattaggaaataagagaaatagactccacttccaaatcctaatagataacataatttattaatgctgaataatcattaggactgaaattctatatattttaaaaattaggtagacatcactgagacttaattagcattctgatttagagaagggaggaatttgaggtcatataccctcttctgttccatttgccctattttaattatctaaaaataaattcttccattt

SEQ ID NO: 42219 - DNA, 1188 bp, Homo sapiens
tgcatgcagggcttaaagcctagatgatgggttgatgggtgcagcaaaacaccacggcacatgtatacccatgtaacaaatctgcacattctgcacatgtatcccagaacttaaagaataaaagaaaaaaaaaaaaagaaatagtgcagctgcttactgatacaccttctctgactgctcaaataaaccaatacttcttggccctcagtacgcaggctaatttcattgaaaaggtttttgttcccagaggaattgttaaatgatatgtctgtgtcataattattttaaatagtggaattcatatgaggcatctctgccacagtgatttgcatatagtggacagtcactacattataactgaataaaaagtaattccattaaaagccacagagggttcatcattcaaggcaaagagaatagcaaactgggtgcacagtggaatcagctttaaaatatgcagattccaaggcttcataccaaatacaataagccaaaaatctccagtgttggtaccaggattcagtttttcagtggctgtccttagcttcccaaggcagagaatcagctgttttgaggaacacctgggaagaaatgaaaaacctcccccataggtggagccttgagtgcggaaggagcatagtgagaggaggctttaaagctggggaggaaccagactggggtgagttaaggtgtctatatgtggcccaagaggcagtggggagatatttaatttgtgctttaaaaagatcactctctaaaatgttgtgaatatattgatgagggctgtggcagagtcagagagccagttaagaagagattgttggtacagatgatgaagaggctgatagtctccttgattaggacaaagccagtggctggggcaatgggggtaaactcagggattagcaagatatttggaagaccagataggcagaaattaataacttactgataagtgggattaggaaataagagaaatagactccacttccamatcctaatagataacataatttattaatgctgaataatcattaggactgaaattctatatattttaaaaattaggtagacatcactgagacttaattagcattctgatttagagaagggaggaatttgaggtcatataccctcttctgttccatttgccctattttaattatctaaaaataaattcttccattt

SEQ ID NO: 42220 - DNA, 1396 bp, Homo sapiens
attactgtgtctcctccctgtatctgtcttttatttccccgtggtcacacaaactttattttgtttgttctgagagttttaattttgtgaaatcaaatgatttgtcctacctttcctcttcaggacataaacagagggggaggttctaattaggaaataacttgaagtctgatggaaggcctatcctatggccctgaattgcctggtctagagttactctgaggtaaatggagggtagttaatttgataggaacaggaggactcagaaggtctggtgctctggagttattcttcctctgaggcagctgtggctgaagggaaagagcactgggactgtcatacaaatctttaccttcaggttcttgtcctgaaacataatagttatatttcctcacaaccatgacttcatgctctgaatttcactcttctctgttatgatgcaggaatcataattatgtaactaatttatataattttataaaggaatcatattaagttacaatttaattagaatacaaacaattttttgctaagaaacacatgaaagtaatttatgagctataaagtattataccaatataagatattcattttaatatttctaattataagtcattattcagaacttatctcatagatatatctttgatatgtgtatctcagtatatagattatacacactaaacgtcattggacttaagatattggttttgtatgttcttcactgtttttaattcatcttgtataaagtgatatgaagtgtacgtcatgggagttttttttaatctattaaatcaataaaatgtgattttcaaaagaaaggaaaagaataagagtaagaatactacaaagaattccagaacatcagggatgctgtttactcttcatgcagaaaaaggaacaaacctggggaggttttattatttatcaggcattaacaattgatagattctgcttgattacctgccattacccttcatracctgtattggcagtgggaaagcctccattcagaaccagaggcaagggcacctaagggtcccttcaatcagaaggaagatgctgctgaggtgggagcaaggctaaagttcctgtcagtaacatggaatccttttctgtgcctgcatgctcagggcctctttcattctgtttttgactctgttgtaaaagagcctagccactgctgattataattctgctgtgtaatatgcttactcatctcaaagaatccttgtctcaactgattactgttttgtaacccttgcattctgcagggaatcatgcacttcaatccatgctagacataaaatatctgttttgacagtctttgatttcacttaaagggtacagattttaaataatcaaagagggcttatataataaagtttgaggtctc

SEQ ID NO: 42221 - DNA, 537 bp, Homo sapiens
ccataataggctccagttccatccacattgctgaaaaagacaggatttcatgctttgttatggctgaattatatttcattgtatatgtacatatacartgaaatatatatgtacatatacaatgaaatatatatgtgtgtatatatattacattttctttatccattcatctactgatgggcacttaggttgattccatattttggctattgtgaatagtgatttgggtattgtgaatatcataatatttgggttttatgaatagtgctgcaataaacatggaagtgcaaatatctctttgatatactgattacctttctctcagatatatacaccgtagtagaattgctagacaatatgaaagttctacttgtaggtttttgaggagattccataatgtcctccaagtggctatactaatttacattcccacttagcgtatgaaggttgccctttctccacatccttgccaacatctgttgttgcctgtctttttgatacaagccattttaactggggtgagatatctcattgtgg

SEQ ID NO: 42222 - DNA, 1321 bp, Homo sapiens
gtagttcatcctaaccccctttgtgactagtccatatagaccaacttgtttctttgcagagttttgttttactacattcttcagtcagtgccagggaggttccgttcctctccttaacttctgctggcacccagcattgtttggcttgtggccatgtcactccaatctctgtttccattgtcacattgccttttcatcttctgtagtcaagtctccctcttcttccctcttataaggacacttgaaattatatttagcacctacttggataatccatgataatactcccatttaaaatccttaacttagtcaaatccacaaagtccctcttgctgtataaataatattcctaggctccaggaattaggacctaaatatctttggggccactactcagcctaccatggaaagtgtaagctctttctaaaatcatatagaaattaaaaaaaaagtaaaacagttaaaacaatcttgagacagaagaaccaagttggagcatttatgccacctggtgaaggatagataaacagaccaatgaaactgtaagaaaacaatacttccctaaatttctcagtgctcctgtaaaaaaccctggcctcctgagccacggaaacatatatatcctataatgttagggaatatttgcttttatttctcctaaaaatgttttcatgtatcataagaattagatctatagctattttttaagcttctcttatcacccacaaaaccaaacagttacatctctggagaggcatctagattagctttagctctgaacgtgctgagaagactggagtcctgtcttccttggatatctgttaatacattacaaataattaagtttctgcataaatggtratatggtttggctatgtccccacacaaatctcattttgaattcccacatgttgtgggagggacccgatgggaggcaattgaatcgtgggagtaggtctttcccatgctcttctcatgatagtgaataagtctcatgagatctgatggttttataagggtgtttccctgcacaacctctctttgcttgtctgctgccatgtgagacgtgcctttcacctttcgccatgattgtgaggcctccccagccatgtggaactgtgagtccattaaagctccttcttctgtaaattgcccaatctcgggtatgtctttatcagcagcatgaaaacagactaatacaaattgtattgaatgttccgatctacttaaataaaaagtgattcttcttagaaaaaaaaaagattgaaatctttcttcccatctcttggcctatagaacattgataatcaaactttaatgc

SEQ ID NO: 42223 - DNA, 1321 bp, Homo sapiens
gtagttcatcctaaccccctttgtgactagtccatatagaccaacttgtttctttgcagagttttgttttactacattcttcagtcagtgccagggaggttccgttcctctccttaacttctgctggcacccagcattgtttggcttgtggccatgtcactccaatctctgtttccattgtcacattgccttttcatcttctgtagtcaagtctccctcttcttccctcttataaggacacttgaaattatatttagcacctacttggataatccatgataatactcccatttaaaatccttaacttagtcaaatccacaaagtccctcttgctgtataaataatattcctaggctccaggaattaggacctaaatatctttggggccactactcagcctaccatggaaagtgtaagctctttctaaaatcatatagaaattaaaaaaaaagtaaaacagttaaaacaatcttgagacagaagaaccaagttggagcatttatgccacctggtgaaggatagataaacagaccaatgaaactgtaagaaaacaatacttccctaaatttctcagtgctcctgtaaaaaaccctggcctcctgagccacggaaacatatatatcctataatgttagggaatatttgcttttatttctcctaaaaatgttttcatgtatcataagaattagatctatagctattttttaagcttctcttatcacccacaaaaccaaacagttacatctctggagaggcatctagattagctttagctctgaacgtgctgagaagactggagtcctgtcttccttggatatctgttaatacattacaaataattaagtttctgcataaatggtgatatggtttggctatgtccccacacaaatctcattttgaattcccacatgttgtgggagggacccgatgggaggcaattgaatcgtgggagtaggtctttcccatgctcttctcatgatagtgaataagtctcatgagatctgatggttttataagggtgtttccctgcacaasctctctttgcttgtctgctgccatgtgagacgtgcctttcacctttcgccatgattgtgaggcctccccagccatgtggaactgtgagtccattaaagctccttcttctgtaaattgcccaatctcgggtatgtctttatcagcagcatgaaaacagactaatacaaattgtattgaatgttccgatctacttaaataaaaagtgattcttcttagaaaaaaaaaagattgaaatctttcttcccatctcttggcctatagaacattgataatcaaactttaatgc

SEQ ID NO: 42224 - DNA, 1321 bp, Homo sapiens
gtagttcatcctaaccccctttgtgactagtccatatagaccaacttgtttctttgcagagttttgttttactacattcttcagtcagtgccagggaggttccgttcctctccttaacttctgctggcacccagcattgtttggcttgtggccatgtcactccaatctctgtttccattgtcacattgccttttcatcttctgtagtcaagtctccctcttcttccctcttataaggacacttgaaattatatttagcacctacttggataatccatgataatactcccatttaaaatccttaacttagtcaaatccacaaagtccctcttgctgtataaataatattcctaggctccaggaattaggacctaaatatctttggggccactactcagcctaccatggaaagtgtaagctctttctaaaatcatatagaaattaaaaaaaaagtaaaacagttaaaacaatcttgagacagaagaaccaagttggagcatttatgccacctggtgaaggatagataaacagaccaatgaaactgtaagaaaacaatacttccctaaatttctcagtgctcctgtaaaaaaccctggcctcctgagccacggaaacatatatatcctataatgttagggaatatttgcttttatttctcctaaaaatgttttcatgtatcataagaattagatctatagctattttttaagcttctcttatcacccacaaaaccaaacagttacatctctggagaggcatctagattagctttagctctgaacgtgctgagaagactggagtcctgtcttccttggatatctgttaatacattacaaataattaagtttctgcataaatggtgatatggtttggctatgtccccacacaaatctcattttgaattcccacatgttgtgggagggacccgatgggaggcaattgaatcgtgggagtaggtctttcccatgctcttctcatgatagtgaataagtctcatgagatctgatggttttataagggtgtttccctgcacaacctctctttgcttgtctgctgccatgtgagacgtgcctttcacctttcgccatgattgtgaggcctccccagccatgtggaactgtgagtccattaaagctccttcttctgtaaattgcccaatctcgggtatgtctttatcagcagcatgaaaacagactaatacaaattgtattgaatkttccgatctacttaaataaaaagtgattcttcttagaaaaaaaaaagattgaaatctttcttcccatctcttggcctatagaacattgataatcaaactttaatgc

SEQ ID NO: 42225 - DNA, 804 bp, Homo sapiens
agctcccatttattctctgacctcatctcrtaccgtgttttctgctccctggatattcctccatcgttctctcaaggcctttgtacttgttctattttattggcatactcttctccccacgtgatttataccttcacttccacattgaccaagaaccattcagaaaaacagacaccacaccaggaatttcaacagaagaaatttaatataagaacttaattacacattaatctgtggcacagaagtcagggtagtggttacccttggaagagagcctaagaggatgctggaaatgttttatttcttggcttgggtttgcagcatggctgccttcactttgtgaaaagtcatcgtgttgttcacagtctatcctcattattcactgactctggaataatgaatttacctaattgctaagatttattggtaacccccaaatcagtactcactgagctttgtggccatttgcagacatacacattgaggggaaaaatttgagtcaccaagacgcatgctttcctagctgtggtcagacaaagcaactctctcatattgtgtcagctctacttgtttcagctctcatattgtaaacaagagtcttttttgtggtctacttaatactacatggtgtgtgggattttttttcttttttgcattttcatgctttctggtggtgatttcactgtttaaaattacccacaagaatagtgctgaagtgttacctagtgtgtgtaggtgtaagactgtgatgtggctaatgaagaaaattcatgtgttagcttcattcaggtgtgagttaccgtg

SEQ ID NO: 42226 - DNA, 804 bp, Homo sapiens
agctcccatttattctctgacctcatctcgtaccgtgttttctgctccctggatattcctccatcgttctctcaaggcctttgtacttgttctattttattggcatactcttctccccacgtgatttataccttcacttccacattgaccaagaaccattcagaaaaacagacrccacaccaggaatttcaacagaagaaatttaatataagaacttaattacacattaatctgtggcacagaagtcagggtagtggttacccttggaagagagcctaagaggatgctggaaatgttttatttcttggcttgggtttgcagcatggctgccttcactttgtgaaaagtcatcgtgttgttcacagtctatcctcattattcactgactctggaataatgaatttacctaattgctaagatttattggtaacccccaaatcagtactcactgagctttgtggccatttgcagacatacacattgaggggaaaaatttgagtcaccaagacgcatgctttcctagctgtggtcagacaaagcaactctctcatattgtgtcagctctacttgtttcagctctcatattgtaaacaagagtcttttttgtggtctacttaatactacatggtgtgtgggattttttttcttttttgcattttcatgctttctggtggtgatttcactgtttaaaattacccacaagaatagtgctgaagtgttacctagtgtgtgtaggtgtaagactgtgatgtggctaatgaagaaaattcatgtgttagcttcattcaggtgtgagttaccgtg

SEQ ID NO: 42227 - DNA, 804 bp, Homo sapiens
agctcccatttattctctgacctcatctcgtaccgtgttttctgctccctggatattcctccatcgttctctcaaggcctttgtacttgttctattttattggcatactcttctccccacgtgatttataccttcacttccacattgaccaagaaccattcagaaaaacagacaccacaccaggaatttcaacagaagaaatttaatataagaacttawttacacattaatctgtggcacagaagtcagggtagtggttacccttggaagagagcctaagaggatgctggaaatgttttatttcttggcttgggtttgcagcatggctgccttcactttgtgaaaagtcatcgtgttgttcacagtctatcctcattattcactgactctggaataatgaatttacctaattgctaagatttattggtaacccccaaatcagtactcactgagctttgtggccatttgcagacatacacattgaggggaaaaatttgagtcaccaagacgcatgctttcctagctgtggtcagacaaagcaactctctcatattgtgtcagctctacttgtttcagctctcatattgtaaacaagagtcttttttgtggtctacttaatactacatggtgtgtgggattttttttcttttttgcattttcatgctttctggtggtgatttcactgtttaaaattacccacaagaatagtgctgaagtgttacctagtgtgtgtaggtgtaagactgtgatgtggctaatgaagaaaattcatgtgttagcttcattcaggtgtgagttaccgtg

SEQ ID NO: 42228 - DNA, 804 bp, Homo sapiens
agctcccatttattctctgacctcatctcgtaccgtgttttctgctccctggatattcctccatcgttctctcaaggcctttgtacttgttctattttattggcatactcttctccccacgtgatttataccttcacttccacattgaccaagaaccattcagaaaaacagacaccacaccaggaatttcaacagaagaaatttaatataagaacttaattacacattaatctgtggcacagaagtcagggtagtggttacccttggaagagagcctaagaggatgctggaaatgttttatttcttggcttggstttgcagcatggctgccttcactttgtgaaaagtcatcgtgttgttcacagtctatcctcattattcactgactctggaataatgaatttacctaattgctaagatttattggtaacccccaaatcagtactcactgagctttgtggccatttgcagacatacacattgaggggaaaaatttgagtcaccaagacgcatgctttcctagctgtggtcagacaaagcaactctctcatattgtgtcagctctacttgtttcagctctcatattgtaaacaagagtcttttttgtggtctacttaatactacatggtgtgtgggattttttttcttttttgcattttcatgctttctggtggtgatttcactgtttaaaattacccacaagaatagtgctgaagtgttacctagtgtgtgtaggtgtaagactgtgatgtggctaatgaagaaaattcatgtgttagcttcattcaggtgtgagttaccgtg

SEQ ID NO: 42229 - DNA, 804 bp, Homo sapiens
agctcccatttattctctgacctcatctcgtaccgtgttttctgctccctggatattcctccatcgttctctcaaggcctttgtacttgttctattttattggcatactcttctccccacgtgatttataccttcacttccacattgaccaagaaccattcagaaaaacagacaccacaccaggaatttcaacagaagaaatttaatataagaacttaattacacattaatctgtggcacagaagtcagggtagtggttacccttggaagagagcctaagaggatgctggaaatgttttatttcttggcttgggtttgcarcatggctgccttcactttgtgaaaagtcatcgtgttgttcacagtctatcctcattattcactgactctggaataatgaatttacctaattgctaagatttattggtaacccccaaatcagtactcactgagctttgtggccatttgcagacatacacattgaggggaaaaatttgagtcaccaagacgcatgctttcctagctgtggtcagacaaagcaactctctcatattgtgtcagctctacttgtttcagctctcatattgtaaacaagagtcttttttgtggtctacttaatactacatggtgtgtgggattttttttcttttttgcattttcatgctttctggtggtgatttcactgtttaaaattacccacaagaatagtgctgaagtgttacctagtgtgtgtaggtgtaagactgtgatgtggctaatgaagaaaattcatgtgttagcttcattcaggtgtgagttaccgtg

SEQ ID NO: 42230 - DNA, 663 bp, Homo sapiens
ttttaaaacacacatgcaaatatacatagtcacggaataaaaaacgatgtctggaaataggttactgagggwtcacacgtgccattttaaagcacatcaagcagtgtgcatttaaatatacattacactgagttaaaattctaaagtcctaattgcaaaacaagcctgcacccaaggaaggacaacagatatttattcagattaaatattgtcctcctgagctttcattacacttcatggggccttgagtattgccaaaatttgatttctgtaaaataaaactccaaaactcaaattgatacacattggagcctggtggttttcacagcaaagccctctgggcagggctggaatcacatgcttggagtctcatcctccaaccctgcaggctaaaaaagagtttggttttggctacagataaaaaagacagatcatttcctggtttcaccagagttgttaggagtattgagcttattagagaatttacaaccaaagagctggggctctttaagcatcactagactctgcctccaaaagagcactcctcataaggtgctgggggccttagtgacccgcagccccagctgcatcgtttctgccacatcacattccattgtccacactcctccaattcccctgcctggctgggactagcttcctgac

SEQ ID NO: 42231 - DNA, 663 bp, Homo sapiens
ttttaaaacacacatgcaaatatacatagtcacggaataaaaaacgatgtctggaaataggttactgagggatyacacgtgccattttaaagcacatcaagcagtgtgcatttaaatatacattacactgagttaaaattctaaagtcctaattgcaaaacaagcctgcacccaaggaaggacaacagatatttattcagattaaatattgtcctcctgagctttcattacacttcatggggccttgagtattgccaaaatttgatttctgtaaaataaaactccaaaactcaaattgatacacattggagcctggtggttttcacagcaaagccctctgggcagggctggaatcacatgcttggagtctcatcctccaaccctgcaggctaaaaaagagtttggttttggctacagataaaaaagacagatcatttcctggtttcaccagagttgttaggagtattgagcttattagagaatttacaaccaaagagctggggctctttaagcatcactagactctgcctccaaaagagcactcctcataaggtgctgggggccttagtgacccgcagccccagctgcatcgtttctgccacatcacattccattgtccacactcctccaattcccctgcctggctgggactagcttcctgac

SEQ ID NO: 42232 - DNA, 663 bp, Homo sapiens
ttttaaaacacacatgcaaatatacatagtcacggaataaaaaacgatgtctggaaataggttactgagggatcacacgtgccattttaaagcacatcaagcagtgtgcatttaaatatacattacactgagttaaaattctaaagtcctaattgcaaaacaagcctgcacccaaggaaggacaacagatatttattcagattaaatattgtcctcctgagctttcattacacttcatggggccttgagtattgccaaaatttgatttctgtaaaataaaactccaaaactcaaattgatacacattggagcctggtggttttcacagcaaagccctctgggcagggctggaatcacatgcttggagtctcatcctccaaccctgcaggctaaaaaagagtttggttttggctacagataaaaaagacagatcatttcctggtttcaccagagttgttaggagtattgagcttattagagaatttacaaccaaagagctggggctctttaagcatcactagactctgcctccaaaagagcactcctcataaggtgctgggggccttagtgacccgcagccccagctrcatcgtttctgccacatcacattccattgtccacactcctccaattcccctgcctggctgggactagcttcctgac

SEQ ID NO: 42233 - DNA, 1159 bp, Homo sapiens
tcccaataacttggtgttcttctctagaactagtgatatttctctgacacacttgggctgaagtgatgtgttagcacctctggttcttgaagcagagtgaaaacattaggcctgggggtgagatggcacagagaggtgcagggtggggtgccaatcctagtttagtccatggaaagtgagttgggagagcggcatgatgtccttctcctctgaggccttgctagcatatccagtgaaaaatggctgccttcaggtatctgccttctcacctttgacatacaatggtgaagtgactttgttctagaattccacactgtggctaggagatgtgaatagacagccccaaaggaagtaaatgttgccaacttcagcattacaagcaggtttcaatgtttctggagaaagtctagtaataagtttggaagagttccaataggttttcattcaactttgtacttaacttacctcaagaagcctttgtctcctctttggaaaaaaaaaatgagaaattattcataccttgttactgagtctacctgatagacagtgggtgtttaacagctattagttttcttaacactccttaaatgattgaaataattctggaagtctggacggctcagcttaccatrttttcagagttatctcaaaaaaattatttttagattgctccttttattgtctttgccttttttcattttagcaccattttattatacacttttatatgtttttaaaatattcttgcatttagtataatttgtttttgtaatgtacactgttccactggccagtggctgtagtctgaatgcattaatattcacagtctagaaaatatgaaaattctggctgctttacctggaggtgggtccatttgtgttacatcaaatgttgcagagatgtagggtctaggcagctttagagttagtgtgttagacaatgtagtagaagaaaataggaattgtgaatagtgtggaattgcccatagtctagagttttcctgggactttctcggtgtgggaaccacagaacaccagcagaatcactcatgtttatttttttaatgtcaattccatgaacatgttatattaaaatagtctccctatttaataaatggtgctgggaaaactggctagccatatgtagaaagctgaaactg

SEQ ID NO: 42234 - DNA, 883 bp, Homo sapiens
  misc_feature (1)...(883): n = A,T,C or G
gatcctcaagctgatggagaactgwggatttgtagcaggagagtgacatgcctgagtttgttggattatcaaaagagatctctttagaagtgtggagaatatttggaggaagatgaggcagaatgatctctctcttccactttgcctctctgagtctttcacattccttagaatacatctcaggttcattttctggactgaaatcctctctagcacagggactgtggtgatctccttgctctgaagcattaagggcacatgtaactaatttctgaattaacaatatgctgcaatgtgacaaaccttgcattttttttttttacaatctggcacataaggtgatatttatatgtaatagatgtttgtataatataaatgcgtgtagtacaagacatatttttgacaatgtttgtgtaatataaagaatttttgacaaatacttgtaaaattcagcacttttataaatacataattttatatttatatttgtgtaaccataataaagatagagaatatttccagtatctcaaaaagttctctcatgcttccttgcaacaattctctccccacctctgaccccaggcaacaattttactctaaaatgttgtctttcccacaatttcatataaatggaattatatatcatgaagccttttgggtctggagtcttttattcatcctaatgcttgtgagattcatttgcgttattttgtcaactaaaatttctttgcattactgagtaatattttattgtataaataaaccatattttttatgcatttnnnnnnnnnnnnnnnnnnnnnnnnnnnnnnnnnnnnnnnnnnnnnnnnnnnnnnnnnnnnnnnnnnnnnnnnnnnnnnnnnnnnnnnnnnnnnnnnnnnng

SEQ ID NO: 42235 - DNA, 619 bp, Homo sapiens
aagtccgtagactttgtgtggagatgtccatgaatgggcttaaggataggtaatgttacacatcatttctagggcacatgatttttttgggagtggttggagagagagaatctatagcctttgtcaggttctcaaaaaggtccttcagccaaaaaaaaaatgctccacagggaggtcttgtagaagaatttccaaaataaaaagtgactgcaaagaggaatgcaaaaagaatcttcatgtgtcttggatctctggagcaaatggggaatttttctggtgtcacatagtgacaacccaggtggctgagagtcacaaagacatgtatggtgtctcttcaaaaggaatctcccaggacattcaaccaaggacctctgccaatttcaagaggtagaggaagatcatccttagatttccagttaggtgataatggggtaaaataccaatagttgatcgtctttctgcttggaatgacctcctgatattcrcatgactttctcacttcctttagggctctacgaagttgttcccctttattactgagagactttgtgtcactatactatttaaaatggcacaatcaacatctctaccctgaaatttgttatttccttatctagct

SEQ ID NO: 42236 - DNA, 618 bp, Homo sapiens
actaaagaattatctaagatactcatctatttttataaactagaaactgaaaaacagagacatgaagtatcttggcccagacacaccgctaggtagaggcagactatgattagaaatccaagtatatggactttaagtctgggtctctttccgcttacctcagactttcatccttagtagaggatgcagagcaatcaaaytgatgtccccacccctgttaattggttaattagtacaagttttgggaaatcatcttcttggagagaatcatgaatttctcttagtcacatagatgttctttattcagtagcataaatgttctcagagactatgttttgagcttgagagagagccaaaattccctgctgccaaattctccaaaaaatccttacaggcattaactggaacctgggttgctgcattagtaggtgatagcaactgcttaatgaggtgaccctgtacagtgtgataatagagagcttcgttgggaaccttatctcctcaggagctcacccactctcaagacaaatgcaaagggcacagtgggcagtcaaagaggcagggtgaattagtgtcaaggaacatctttaattcatgggagtcatacatcagagggaa

SEQ ID NO: 42237 - DNA, 618 bp, Homo sapiens
actaaagaattatctaagatactcatctatttttataaactagaaactgaaaaacagagacatgaagtatcttggcccagacacaccgctaggtagaggcagactatgattagaaatccaagtatatggactttaagtctgggtctctttccgcttacctcagactttcatccttagtagaggatgcagagcaatcaaattgatgtccccacccctgttaattggttaattagtacaagttttgggaaatcatcttcttggagagaatcatgaatttctcttagtcacatagatgttctttattcagtagcataaatgttctcagagactatgttttgagcttgagagagagccaaaattccctgctgccaaattctccaaaaaatccttacaggcattaactggaacctgggwtgctgcattagtaggtgatagcaactgcttaatgaggtgaccctgtacagtgtgataatagagagcttcgttgggaaccttatctcctcaggagctcacccactctcaagacaaatgcaaagggcacagtgggcagtcaaagaggcagggtgaattagtgtcaaggaacatctttaattcatgggagtcatacatcagagggaa

SEQ ID NO: 42238 - DNA, 618 bp, Homo sapiens
actaaagaattatctaagatactcatctatttttataaactagaaactgaaaaacagagacatgaagtatcttggcccagacacaccgctaggtagaggcagactatgattagaaatccaagtatatggactttaagtctgggtctctttccgcttacctcagactttcatccttagtagaggatgcagagcaatcaaattgatgtccccacccctgttaattggttaattagtacaagttttgggaaatcatcttcttggagagaatcatgaatttctcttagtcacatagatgttctttattcagtagcataaatgttctcagagactatgttttgagcttgagagagagccaaaattccctgctgccaaattctccaaaaaatccttacaggcattaactggaacctgggttgctgcattagtaggtgatagcaactgcttaatgaggtgacccygtacagtgtgataatagagagcttcgttgggaaccttatctcctcaggagctcacccactctcaagacaaatgcaaagggcacagtgggcagtcaaagaggcagggtgaattagtgtcaaggaacatctttaattcatgggagtcatacatcagagggaa

SEQ ID NO: 42239 - DNA, 1025 bp, Homo sapiens
agattccagggaggggtggcaagtatttttcacaatccaccacatttttcattgcctggctatgaaacayctagttattctagcttaaggttttgttacaaatagtgacaaagccatgaccattctgactgggagaaggtaggacctaaaataaagtaataaatgttagttacactaatgagggtgaaagaataagctgaggtcattttttattatttctccatggagaaacaatgtacaaggtctgtacattggagtaagtcagactcgggttcaaatcccaactttaccttagacttacctgtgagaccttgggcaagtctctgagcctattttctcagataattgcaactgcccttaataactagcaacaattaatattacaatatttttcccaataaataattatcacacctcttgttataatttagcttatttctttgtgctcagtactcggatatatcacatggtagctttttacatatttagaaagtgttattaagtccttacctcctgcccttaccttcccaggtttttcaaaccataacacattaacctgttttccttcacagaccatgaaccctaattattatactcacttacctgtacatttcttattctttcaacaagtagaccaaaggcaagcctaacatacctaggcagatatgaggaatattaaatacagtagggagattgccttcttgctctgaggctgatatgtaagtgtatcagatttcattaaccatattgtgctgctgaattattattctttcaatgtgccggttaactcaaggtgggagggagcaaaagtgaacagagcagccaagagctagaaattacctccttattggcaatctccttctccccagggcaggagtcctctgtgccatttattctgtgttgaaaccaatttgcttcttgttcccccttcaagaagcaacaaaggcctaaaacagcggctattgcctgataacctggagatttgcctgtcttgcttggtaaaatctcctctttgtagattattg

SEQ ID NO: 42240 - DNA, 1213 bp, Homo sapiens
attgtgtgggtctctatgctcccttccacaccacagcaagcacagaaacgaagcttactacgagggcgctgccaaactgaagcagcctctatcactgagccctagtatgggagacagctgtgctggagagttgcctggccttctagtggacttgcataggtgggaaataaagctcttttaaaaaaaatcattaaaattcgaggttgttatcacagcataacttcgcctatcctgagtaatagagaaagcaaaggaaaggaaaatggggttggaaataagaattgtgtgagccaacttgcagcatctgccaaaggtgagtcatgagattcttaattaaaccacatgttagagtgaagtggaggtggaggaatgggtaaaagagacaggactacaaagatattgctgtgagcctagttactactatacacttgggtctatggcaattgtcaaatgaattctcctttacatccattaagaaaatattaagcatcattccatgtactttttaggtactgcagacatcatggtcaataaggtagatatggcccttgctttcatagattttccagcagggaatcctgctagtgtctcaaaaatggaaagtgctgttggaacctgtaacagatggattcataataggctatgagatcagggaatgctttctagaggaaaagrtatttaaattgaagcccaataaatgagaatgtattagctagtttcatagacagtaatgggagatttctctaggtagagaaaatagtaagggctcagccccaactgagaaacttcatggcatatgcaggaaccatgggcagactcgtagggacagaacatagaaaattcagggaaaagaatgatgcttctaggtcagttgtagtatttgattcatttggatattttcgtcaccttattactcattcattaggtttcctactcctaaactctatgtttagtttcccctttccctggtaaatccataagaacctaggtgcacacactttcctttgtcctgctgctcagaatgtatttaaccctaagctacttgccaatttcctcactataacccttctacctccttttccgttctttattttcctcttgaactagcacaatagtctgtacaggtccttgagtgacatcccctctggtgaatccaactacaaattcatgctcctttctgagaaattccagtccattgaggttttattcaggg

SEQ ID NO: 42241 - DNA, 664 bp, Homo sapiens
tttaggattgttttctctagttctgtgaagaatgatggtggtattttgatgggaattgcattgactttgtagattgcctttggcaatagggtcattttttgtgagccaattgttaagttttcaggaattttgaaagccagttggtaaagagtcattattacaaattaaattatatgaacacaaaattaaataattatattaaaacaatggtaaatactgaaaawgcatcacttcttaattattttattttactgttatctatgctcttgagattatttatgtctgttttatctgtatggtagacgtactatataatgttatgctgtgcatcattttccagctctgtatttaatgatgccacattcatggcttgaaatatgtcatggtgggagtgtttacatcatggaaattgaaaaatgttacaaatactatcttctccttccccctgagagccagttgttaaacatttagcagcacataccacttaataatttcacaattaattggtatgatagtgagacacacacacacacacacacacagagacagtacagagctcttaagttctgtgatatattatttaatatttaatattaattatggcagtgatttattcacttttcccatctcatcctttctcacctcaaatataattattagttat

SEQ ID NO: 42242 - DNA, 664 bp, Homo sapiens
tttaggattgttttctctagttctgtgaagaatgatggtggtattttgatgggaattgcattgactttgtagattgcctttggcaatagggtcattttttgtgagccaattgttaagttttcaggaattttgaaagccagttggtaaagagtcattattacaaattaaattatatgaacacaaaattaaataattatattaaaacaatggtaaatactgaaaatgcatcacttcttaattattttattttactgttatctatgctcttgagattatttatgtctgttttatctgtatggtagacgtactatataatgttatgctgtgcatcattttccagctctgtatttaatgatgccacattcatggcttgaaatatgtcatggtgggagtgtttacatcatggaaattgaaaaatgttacaaatactatcttctccttccccctgagagccagttgttaaacatttagcagcacataccacttaataatttcacaattaattggtatgatagtgagacacacacacacacacacacacagagacagtacagagctcttaagttctgtgatatattatttaatatttaatattaattatggsagtgatttattcacttttcccatctcatcctttctcacctcaaatataattattagttat

SEQ ID NO: 42243 - DNA, 504 bp, Homo sapiens
tattttaatatataatatatattatattatataataataaattatatattatattatatagtaataagttatatattatactatataataatatagtataatatataatatatattataatatatattatattatattatattatattatatattataatataaattatatatattttatatatatgttttatatattatatattttaatatatgaaacaggggaacttcttctaaggaaaagacagaattaaggcaacaggctgatcctagtttaccagagaagaaactgaggccgggagcaggagcccagctcactgaagggcagatcccaagtcagagtccaagtctccccacttttttatttatttaattttttctgagatggagtttcattcttgttgcccaaattgagtacaatggcacaatctcggctcaccgcaacctctgccttmtgggttcaagccattctcgtgcctcagactcccaagtagctgggattaca

SEQ ID NO: 42244 - DNA, 1301 bp, Homo sapiens
gtgtgtgcacgtggtccatcgccagcagtctggcagggatgttctgtgcaggatgtgacagtctcaccagctaaggaagggcccgctcatgctttcacttgtcatggtgggagtggggtgtgtagagcttacaagtagccagacattttttaaattgattttttttgagataactgtaaaaccatatgaagttttaagaaataataatgaccccttgtggcctttacctggtttcctccaggggtaacattttgcaaagctctagtatgatatcacaaactgcatctggacattgctacaatccactgatgttaattccartctcccagttttacttgtgtgtgtgtgtgtgtgtgtgtgtgtgtgaagggtaggagggattctggccagctgaagggaaatatatgactgtaagaggtggtaacacacatcaagctttattgggcagcgctgggacaggattgcaggtaggggaagtccttcctgacagatgtctgtccagaggcaataggagaaatccctacccagaagggaaggagggtaagggacctcctaagagagaggggtcggagaggctgtctgtgtttaagtgacgtcctgcagagtctctggggggcagcagcagctgggaccttatcaatagggaacagcgggggtgaggttttgcgggagatgcaaaacaggcaatgtctaaatggctaaacatttgccatttgtagggcctatttttgaaataaaagcatgtgtaaaatttgagtttggcaccagtgagctttagagctaccaggtctcagcctgcagaaactaaataatgtagggttcaacacccagtggtagtctttggctcatctatataactctgtgtgcatgtgtgtgcatgttcgtgtgtgtgtgtgtctgcacgcatgcacacttgtctgtcatggctttcaagctaagaaacttccagaaagtaaaacagcaacttttaatgctaaaaaattaaaatatattcccattccttcccatgagtttttttgtataggttcatggatcttccaccacaatcaggttgctggacagtttcaacaccgccaagctcccacttgttggtattttataactcatcactagctccttttacccctggacctaatccctagcagccacgaatctgttctccatttctaaagtactgctgtttcaaaactgttgtgtaaatggaactatgcaaccatctgggattggcttttcttgttcagtaggatcccctaggagattcaaccatgctgtgtgcatggagtttgtttgagaagtgttcc

SEQ ID NO: 42245 - DNA, 1301 bp, Homo sapiens
gtgtgtgcacgtggtccatcgccagcagtctggcagggatgttctgtgcaggatgtgacagtctcaccagctaaggaagggcccgctcatgctttcacttgtcatggtgggagtggggtgtgtagagcttacaagtagccagacattttttaaattgattttttttgagataactgtaaaaccatatgaagttttaagaaataataatgaccccttgtggcctttacctggtttcctccaggggtaacattttgcaaagctctagtatgatatcacaaactgcatctggacattgctacaatccactgatgttaattccaatctcccagttttacttgtgtgtgtgtgtgtgtgtgtgtgtgtgtgaagggtaggagggattctggccagctgaagggaaatatatgactgtaagaggtggtaacacacatcaagctttattgggcagcgctgggacaggattgcaggtaggggaagtccttcctgacagatgtctgtccagaggcaataggagaaatccctacccagaagggaaggagggtaagggacctcctaagagagaggggtcggagaggctgtctgtgtttaagtgacgtcctgcagagtctctggggggcagcagcagctgggaccttatcaatagggaacagcgggggtgaggttttgcgggagatgcaaaacaggcaatgtctaaatggctaaacatttgccatttgtagggcctatttttgaaataaaagcatgtgtaaaatttgagtttggcaccagtgagctttagagctaccaggtctcagcctgcagaaactaaataatgtagggttcaacacccagtggtagtctttggctcatctatataactctgtgtgcatgtgtgtgcatgttcgtgtgtgtgtgtgtctgcacgcatgcacacttgtctgtcatggctttcaagctaagaaacttccagaaagtaaaacagcaacttttaatgctaaaaaattaaaatataytcccattccttcccatgagtttttttgtataggttcatggatcttccaccacaatcaggttgctggacagtttcaacaccgccaagctcccacttgttggtattttataactcatcactagctccttttacccctggacctaatccctagcagccacgaatctgttctccatttctaaagtactgctgtttcaaaactgttgtgtaaatggaactatgcaaccatctgggattggcttttcttgttcagtaggatcccctaggagattcaaccatgctgtgtgcatggagtttgtttgagaagtgttcc

SEQ ID NO: 42246 - DNA, 1301 bp, Homo sapiens
gtgtgtgcacgtggtccatcgccagcagtctggcagggatgttctgtgcaggatgtgacagtctcaccagctaaggaagggcccgctcatgctttcacttgtcatggtgggagtggggtgtgtagagcttacaagtagccagacattttttaaattgattttttttgagataactgtaaaaccatatgaagttttaagaaataataatgaccccttgtggcctttacctggtttcctccaggggtaacattttgcaaagctctagtatgatatcacaaactgcatctggacattgctacaatccactgatgttaattccaatctcccagttttacttgtgtgtgtgtgtgtgtgtgtgtgtgtgtgaagggtaggagggattctggccagctgaagggaaatatatgactgtaagaggtggtaacacacatcaagctttattgggcagcgctgggacaggattgcaggtaggggaagtccttcctgacagatgtctgtccagaggcaataggagaaatccctacccagaagggaaggagggtaagggacctcctaagagagaggggtcggagaggctgtctgtgtttaagtgacgtcctgcagagtctctggggggcagcagcagctgggaccttatcaatagggaacagcgggggtgaggttttgcgggagatgcaaaacaggcaatgtctaaatggctaaacatttgccatttgtagggcctatttttgaaataaaagcatgtgtaaaatttgagtttggcaccagtgagctttagagctaccaggtctcagcctgcagaaactaaataatgtagggttcaacacccagtggtagtctttggctcatctatataactctgtgtgcatgtgtgtgcatgttcgtgtgtgtgtgtgtctgcacgcatgcacacttgtctgtcatggctttcaagctaagaaacttccagaaagtaaaacagcaacttttaatgctaaaaaattaaaatatattcccattccttcccatgagtttttttgtataggttcatggatcttccaccacaatcaggttgctggacagtttcaacaccgccaagctcccacttgttggtattttataactcatcactagctscttttacccctggacctaatccctagcagccacgaatctgttctccatttctaaagtactgctgtttcaaaactgttgtgtaaatggaactatgcaaccatctgggattggcttttcttgttcagtaggatcccctaggagattcaaccatgctgtgtgcatggagtttgtttgagaagtgttcc

SEQ ID NO: 42247 - DNA, 726 bp, Homo sapiens
tcatgcggtcaccacggtcacagttaataagtcactggttcctctacagaaccaaatggcagactgccaccccccttttagagatgggaagactgaggctcagacaggtatctatctgggcccatgagacccaccggctccagccacaaggtaggaggggctgcccagggcrctcctctcttccttggactcccagcagagctttccagaagcccacccaacacacagcccagggcctgagcaggcagctgaatccctatggattccctgccctccaccgcagcctcagcgcctggtctgcacagagaggacccaagagctcccgaggtggccccgtggaacttgcggcgtgtcacccccacaggcatccccccgcagtgagctgggccccagccccagccccagaccacacgctgtgtgagtcaaggaatcaaggaccaacagtggggtaggtgtgaggccccaaaggtcctgagccctagagggagttcagggcagaggcaccgcggcagcagaaggccacaagctggtggggacaggtgcaaatccttagcgcagctcccagcacccacagagctggctcaggagcaactggtggcatggagggggagagctgtcctggatggtttttgctccatggtcaaggaaaacagccccatcttcacaccacggctggggtaggatgtgtgtggtctctggtggctggacatcctccctctgcccacc

SEQ ID NO: 42248 - DNA, 726 bp, Homo sapiens
tcatgcggtcaccacggtcacagttaataagtcactggttcctctacagaaccaaatggcagactgccaccccccttttagagatgggaagactgaggctcagacaggtatctatctgggcccatgagacccaccggctccagccacaaggtaggaggggctgcccagggcactcctctcttccttggrctcccagcagagctttccagaagcccacccaacacacagcccagggcctgagcaggcagctgaatccctatggattccctgccctccaccgcagcctcagcgcctggtctgcacagagaggacccaagagctcccgaggtggccccgtggaacttgcggcgtgtcacccccacaggcatccccccgcagtgagctgggccccagccccagccccagaccacacgctgtgtgagtcaaggaatcaaggaccaacagtggggtaggtgtgaggccccaaaggtcctgagccctagagggagttcagggcagaggcaccgcggcagcagaaggccacaagctggtggggacaggtgcaaatccttagcgcagctcccagcacccacagagctggctcaggagcaactggtggcatggagggggagagctgtcctggatggtttttgctccatggtcaaggaaaacagccccatcttcacaccacggctggggtaggatgtgtgtggtctctggtggctggacatcctccctctgcccacc

SEQ ID NO: 42249 - DNA, 726 bp, Homo sapiens
tcatgcggtcaccacggtcacagttaataagtcactggttcctctacagaaccaaatggcagactgccaccccccttttagagatgggaagactgaggctcagacaggtatctatctgggcccatgagacccaccggctccagccacaaggtaggaggggctgcccagggcactcctctcttccttggactcccagcagagctttccagaagcccacccaacacacagcccagggcctgagcaggcagctgaatccctatggattccctgccctccaccgcagcctcagcgcctggtctgcacagagaggacccaagagctcccgaggtggccccgtggaacttgcggcgtgtcacccccacaggcatccccccgcagtgagctgggccccagccccagccccagaccacacgctgtgtgagtcaaggaatcaaggaccaacagtggggtaggtgtgaggccccaaaggtcctgagccctagagggagttcagggcagaggcaccgcggcagcagaaggccacaagctggtggggacaggtgcmaatccttagcgcagctcccagcacccacagagctggctcaggagcaactggtggcatggagggggagagctgtcctggatggtttttgctccatggtcaaggaaaacagccccatcttcacaccacggctggggtaggatgtgtgtggtctctggtggctggacatcctccctctgcccacc

SEQ ID NO: 42250 - DNA, 1035 bp, Homo sapiens
tggggacactgcttcacctgcgctcaacggtcacatcttcgctctccccgcaggtacggccggtgattgctttccaaggccaccgaggggtaagtgcgagctcagggtgtgtgagcgaggtgagggcgagggagcataaacgtgggctggaggtggaaggtgcggtcggggccggaggctgcgagtagtcacggtctgaggtagttccgataactgaactccaagtggggcgaggaggctgctggggttgtcccagggggctgtggtttgaggggactgtgctgtttcggcctcctggggaactcaggcccagctgcacctggtgtgctaacaagccctgtgggacccgtcttagtcttacttacggactggctcccggacgagtggcggcggcaggagggggaggggctgacttcatggggcttaccgtctccttccacccccagtatctgagactcccaggccctggttggtcctgcctcttctccttcatagtgtcccagtgttgtcaggagggcgctggtggtagcttggaccttgtgtgccaacgcttcctcaggtgagggggaacaggtagccggcaagaaagggtttgtggaaagtgggggagggaaatgtggagaggtgcttaagagstctccaccctcctatttttttccaccatccttttccaggtctgggcctaacagcctccactgcctgggctcactcagggagcgcctcattatttgggcagccatggattctatcccagccccatcatcagttcagggacacaacctgactgaagatgccagacatcctgagagttggcagaacacaggaggctattctgaaggagatgcagtatcacagccacagatggcactagaggaggtgggtgaggccagaaattgcagggagttgtgataaggtggggcaaagcctgaagtccaaggtatcccagtactccagggaaccaagtgctcctgccactttccccaccaggtgtcagtgtcagatccactggcaagcaaccaaggacagtcactccca

SEQ ID NO: 42251 - DNA, 590 bp, Homo sapiens
catctggggacgtgtaattggaaacttaaacattcattgagccagggaaacctagaaagtcatatgtcaggtggagggaggggggtacccttaatgagattaagtggagaaaaccaaaatggctgtgctaacaaaaagattgaggctgtgtctacagacacaatctgttcgactgttttcagtgaatgactggttactgaccaagttagctattggttgcttgtctgattcaattaaaatgctcaaaccaatgtaagcgtgtatggtaaaaatagcctgaaactagtttgggttacatatrcacaatagggtattgtataacacaatgggctgaaaggccttccaaagacattgctagtaaatggatacattttaaaatgctttgctttatgaaatagcaaaatacttaggggaagttcagaaaaaaatagtttaaatacttcaggtaagaaggggtttaaagaaagaaaacaactaataaagtagctgggtgaatgtttatggagacagaaaacacctcagagagatggagtgtttgttttaacaccccttaacatttaggatgccagatatgagatcaaaaaaggaaa

SEQ ID NO: 42252 - DNA, 526 bp, Homo sapiens
taagtgtgtggtaggcaaccatgatctttcttagctcttaacctttcaaactccatcctgttgggagcaaagcagctcattttacacttcaaatatttattgagcctctactctgagacatagactttgccacatcccacaggttctgcaaagttattaagcaccctgcagtggagttaagcacaagcaggcttgcctaccatgaagtctgattagagtgcagtggagaatgggactggagatgattttagggtggaggtgatgtgaggcctggatgctgtatgataaacaggactctgaaaggcagagaggggatatcaagagcagtgcaggctgagatcacaagatttaaggaaaggggagtgaayatccacacaagatgatacagtgttggtggctaagtgggaaagctatggttgattaaggctgccttaggagaacctggttatttttattaaagaattgggattttgtcttatagatcctggggaaattgatgattttgtttaaggtataacccctttct

SEQ ID NO: 42253 - DNA, 540 bp, Homo sapiens
tttacctgtaggagaggttactcccagatgctggagacacaagtcagaaattcaagtttctaaatcaaactctgctgtcgtcaaactctgtcctctttggaaagttcattaggatctattggcttgaaattttcatccrtatttggggtataaaataaattacctccaagagttgtgattggattgaaatgggacagcacacataaactatatactatattgtctagcctatagcaggtgttttctaaagttaaccatagtgatctctaggcatgtcaaattatctggtgctacttcaggacctacaatgtagcccacttcttatttgtgagatcaaagattagagaattaagttcaaggataatttactaaaactctccagaccctaatgaggttttcattcacttaaattcacccaagaattccagtccttccatggggtccccacgggaaaaaaaaaacaaaatgtatttatggtctattaaatgcttaaggaagatagttgctgaatagatttcaggaatctatcttggctattta

SEQ ID NO: 42254 - DNA, 603 bp, Homo sapiens
tgagctccttcaagacaggaattgtgtcktgttcatttttgaatttgcagcactcagcactgtgcctggtgaagataaagtgtcacttcattgtttctttatttctttgacactgctatggtcacttcatagttcaaggctgctcattgagtccttaaatctagcccctacaacttctgcactctgcattttgaggcatgccaccaccttgtggcagaaggtcccaccaagtggcagcagtcacttggttcaagaacacataatctgaccagaaaagctcataaaataggtgtgcacagccaggccaaagtactaacataggcaacagggccaagcgtgtgctcatgagatcacctccctcccctctcattttgttcatggctgggcaggagcgctagattgcactggatgcagcccaggctgctccacctaatgagctggctggagatgaggtcagcccccaccaccccctacccaaaactccacctctgggccttctccaggcctctaggctctggccgccaccattgaaatctgatatgtagccatctggtgcagggtgtcgatggcagcatggtggctggggatggatcacaggaggca

SEQ ID NO: 42255 - DNA, 562 bp, Homo sapiens
cagcccttcccacccactgtggtgagtattctcttttacagccatcagcgttctcaaggcagctgaatatgagtctgtaattacaagggaaacaatggctccagggcaggaaatgtgcatgaaatataatgcagctgagagcagcattagcccaaagtgctctaatggttttaggacctcaccaggtggtaagccatctccctgggttttcatttccacccaccatttgccaggtaacctttgcccagtcacttaccttcccagggtgctgtcctcagaaggcattatgggattggtcatttgctggcctggcagggggatctcccagctggatgaggtcatgcagacaaagcttacagaaagtggtaagccttcattatatgggcagaaacggagcggcagtgggaggaaggtctacttcaaagctgagtctacatggagggagagatggtgattagatggtgagacttgaagggccctggataaagctttcctgtctctgtgtatcaccagtagyatggcttttctcagtgggaaaaactgatgcagttgaattatttcc

SEQ ID NO: 42256 - DNA, 1034 bp, Homo sapiens
aggtacttcttacaacatctgtgttagggcagctggtgacggcacccggcaaattccagcaactgccctcattccacagaggctccctcctgcaaggccactactgtgactctgagcagcggttcttctcatgaatgtgatagctcggtcagctctaagactgcaacctgcagggacttcatggggcaaccctggggtatgtggccagtgtctgtccttgggcagccgtagcccctgtcaggaacagggagtgactcaggcactggtgtcttgagactgctacggtgtcaggaaacttccataaaatctagtgcgttttaaaaaaagaggccagagccggccaggcacggtggcttattgcctgtaatcccagcattttgggagaccgaggcaggtggatcacctgaggtcaggggttcgaagccagcctggccaacatcgcgaaaccctgtctctgctaaaaatacaaaattagccaggcatggtggcacatgcctgtagtctcagctatttgggaggctaaggcaggagaatcacttgaacctgggaggtggaggttgcagtgagcggagatcgtgccactgcattccagcctgggcaacaaaagtgaaactctgtctccaaaaaaaaaaaagccagagccagcctttgcctcctrtgtcagaaatgatcatttgcagctgctttgctttggggtagaagcctcaaatcctgaaaccctttaccctggggcaggttgtcttgtgctgtaagcaacagaaacccatttagatcatttttaaataatgagaatttctgttggaaggatgtcggcttagctcacacagtgtctaggaagactggaaaatgggtctcagaaacactgcaggcagctttgtgtggcaggatcaatccagttccttcttggtgactgctcaggggaacatcccatttgccttgcatggtactgagccagaaggtcaactccaggcctgtctgcctgtatccgagaaagcagcagctccccacaatgaaatgtagcgttttccagctcc

SEQ ID NO: 42257 - DNA, 965 bp, Homo sapiens
gtacaaagcctaaacacactccacagagggggaaactgagactctgaagggaggcctcaacagctctggtaaaaaaggcgtttaggccgggcgcagtggctcacacctgtaatcccagcactttgggaggccgaggcgggtggattgcctgagctcaggagttcgcgaccagcctgagcaacacggtgaaaccccgtctccactaaaatacgaaaaaattagccgggcgtggaggcgtgcacctgtagtcccagctactcgggaggctgaggcaggagaattgcttgaacctaggaggcagaggttgcagtgagccgagatcgcgccactgcactccagcctgggcgacactgcgagactccgtctcaacaamaaaaaaaaaaaaatggtgtttaaacacatataactaaattatccttcccccttcccctgaagtggctggctcaggaaaaacctctacccactcaggcagaggttttcctgcaccctgcatccgtgaggcaccactgccaaggacgccagggaaggctgccaggcctggagaggggcagggccccctcccctccaaggggccacaaacgctgtctgcgcccagtaccgtgggtaaggcgaggccggccggctaaccccgggctggcggccttgcagcgtgcgtggcaacagcagctgggcccgcaagactcagcacgggacgtcctcgtccaagtctgggccaagagcagcggcccagggggcggggccggccagagggagcggggagaggctgaggggcggtgccagcgccggaccctgccattggctggagattacaggaggcggggacatagcagggaggagccgctggacaagccccacccggccgccagggagggtctgaggtcaagagccggagagaagggatttagggccctgggccaagttgcacagcagggagaaggggctgcgcagaggggcggggagaaagg

SEQ ID NO: 42258 - DNA, 599 bp, Homo sapiens
ggtccgtgtttgttatggctcgagctgagcttttgctcaccatccaccactgctgttctctgccgtcccagactcgctgttgacttccacctctccagatccggcagggtgtccactgtgctcctgatccagagaggcgcccattgctgctcccgattgggctaaaggctcgccattgttcctgcatggctaagtgcccaggttyatcctaattgagctgaacactagttgctgggttccacagttctcttctgtaacccacagcttctaatagagctataacactcaccgcatggcccaaggttccattccttggaatccttgaggccaagaaccccaggtcagagaacaaaaggcttgctgccatttggggagtggcccttccccatcttgggagcggtccgccatatcttgggagctctaagaacaaagacccacccgtaatacaatgcaccaagcactgaatctgctaattaatttctactctgcttacttattttcctctccaaaaatactctcttagttcagccagtccattatagtgattaagtcaaattgctcacgtttaaagctaactttgtgatactgggcacatttct

SEQ ID NO: 42259 - DNA, 599 bp, Homo sapiens
ggtccgtgtttgttatggctcgagctgagcttttgctcaccatccaccactgctgttctctgccgtcccagactcgctgttgacttccacctctccagatccggcagggtgtccactgtgctcctgatccagagaggcgcccattgctgctcccgattgggctaaaggctcgccattgttcctgcatggctaagtgcccaggtttatcctaattgagctgaacactagttgctgggttccacagttctcttctgtaacccacagcttctaatagagctataacactcaccgcatggcccaaggttccattccttggaatccttgaggccaagaaccccaggtcagagaacaaaaggcttgctgccatttggggagtggcccktccccatcttgggagcggtccgccatatcttgggagctctaagaacaaagacccacccgtaatacaatgcaccaagcactgaatctgctaattaatttctactctgcttacttattttcctctccaaaaatactctcttagttcagccagtccattatagtgattaagtcaaattgctcacgtttaaagctaactttgtgatactgggcacatttct

SEQ ID NO: 42260 - DNA, 599 bp, Homo sapiens
ggtccgtgtttgttatggctcgagctgagcttttgctcaccatccaccactgctgttctctgccgtcccagactcgctgttgacttccacctctccagatccggcagggtgtccactgtgctcctgatccagagaggcgcccattgctgctcccgattgggctaaaggctcgccattgttcctgcatggctaagtgcccaggtttatcctaattgagctgaacactagttgctgggttccacagttctcttctgtaacccacagcttctaatagagctataacactcaccgcatggcccaaggttccattccttggaatccttgaggccaagaaccccaggtcagagaacaaaaggcttgctgccatttggggagtggccctyccccatcttgggagcggtccgccatatcttgggagctctaagaacaaagacccacccgtaatacaatgcaccaagcactgaatctgctaattaatttctactctgcttacttattttcctctccaaaaatactctcttagttcagccagtccattatagtgattaagtcaaattgctcacgtttaaagctaactttgtgatactgggcacatttct

SEQ ID NO: 42261 - DNA, 1252 bp, Homo sapiens
ccaaaggcttcctctctcactcacagtaaaagccaaagtcttttcagtgcctgtaaagccctgcccagtttggtctgctgctggctctctgacctcaccccctcctactctctccttgctcctttcactgcagccacaggcttccctgccattcctctaacacccttctgagccttggcactcgctgtcgcctctaccagcaactccctgccatcacttccttcatgcctttgctcaaatatcattttttcagcaaggccttccctgaccaccctacttaaaattgcaaccctccctaccctaacacaccccattcctttgtttctgctttactactacaatttttgtctctttagactaaaccgtaattttcctgacttattgttttgtctccctggactagatggtcagctccatgggaagacatctttgtccattttgttctctaatatagtcccagtacttcaaacagtgcctgccatacagcaggtactcaaatctgttgaatgaatgaatgaattaaagaaatatcaagttgattttatatatatatatatgtatacgtatatttaaatctacctagcttacataaggtttgtaatactaacatgatacaaaccttatttatgctaggtagatttagtagtaacaatgcatttagttgcaatgctagtagtaacaatgcaatgcagggtagacagaatcactacagttttatatgcagtatttcttaaatatattaaaaaccatgacttcgatttcagactggtttcatggaacctgcagcctcctcagaagtacttaaggaattctataaataataatgatttaaactgcctgaagtattatagctttctttcatctgtgttataacatattggggttctactaactgcacagtgaaaaagtcccgatgctkgaaaagactgcaaaccaccctagactctgttagttactagtttaggagcttaccagcagaagcagtatctgcaagcgaatcatgagtctgattcaatatactatccacaacatctgagaaaagggaagctgtgtcccgggggctgtcagccacagctgtttggagaacatgtcgttgaaattcagcctccttggtgcggcacacagtgaggatcatagcactggcagagagtggggaaataactccagtgatggggggccggccttcaccagggtccacatcagcaacctacgtgagaagccctaattagttgagaatattattgtcaatatg

SEQ ID NO: 42262 - DNA, 1252 bp, Homo sapiens
ccaaaggcttcctctctcactcacagtaaaagccaaagtcttttcagtgcctgtaaagccctgcccagtttggtctgctgctggctctctgacctcaccccctcctactctctccttgctcctttcactgcagccacaggcttccctgccattcctctaacacccttctgagccttggcactcgctgtcgcctctaccagcaactccctgccatcacttccttcatgcctttgctcaaatatcattttttcagcaaggccttccctgaccaccctacttaaaattgcaaccctccctaccctaacacaccccattcctttgtttctgctttactactacaatttttgtctctttagactaaaccgtaattttcctgacttattgttttgtctccctggactagatggtcagctccatgggaagacatctttgtccattttgttctctaatatagtcccagtacttcaaacagtgcctgccatacagcaggtactcaaatctgttgaatgaatgaatgaattaaagaaatatcaagttgattttatatatatatatatgtatacgtatatttaaatctacctagcttacataaggtttgtaatactaacatgatacaaaccttatttatgctaggtagatttagtagtaacaatgcatttagttgcaatgctagtagtaacaatgcaatgcagggtagacagaatcactacagttttatatgcagtatttcttaaatatattaaaaaccatgacttcgatttcagactggtttcatggaacctgcagcctcctcagaagtacttaaggaattctataaataataatgatttaaactgcctgaagtattatagctttctttcatctgtgttataacatattggggttctactaactgcacagtgaaaaagtcccgatgcttgaaaagactgcaaaccaccctagactctgttagttactrgtttaggagcttaccagcagaagcagtatctgcaagcgaatcatgagtctgattcaatatactatccacaacatctgagaaaagggaagctgtgtcccgggggctgtcagccacagctgtttggagaacatgtcgttgaaattcagcctccttggtgcggcacacagtgaggatcatagcactggcagagagtggggaaataactccagtgatggggggccggccttcaccagggtccacatcagcaacctacgtgagaagccctaattagttgagaatattattgtcaatatg

SEQ ID NO: 42263 - DNA, 1252 bp, Homo sapiens
ccaaaggcttcctctctcactcacagtaaaagccaaagtcttttcagtgcctgtaaagccctgcccagtttggtctgctgctggctctctgacctcaccccctcctactctctccttgctcctttcactgcagccacaggcttccctgccattcctctaacacccttctgagccttggcactcgctgtcgcctctaccagcaactccctgccatcacttccttcatgcctttgctcaaatatcattttttcagcaaggccttccctgaccaccctacttaaaattgcaaccctccctaccctaacacaccccattcctttgtttctgctttactactacaatttttgtctctttagactaaaccgtaattttcctgacttattgttttgtctccctggactagatggtcagctccatgggaagacatctttgtccattttgttctctaatatagtcccagtacttcaaacagtgcctgccatacagcaggtactcaaatctgttgaatgaatgaatgaattaaagaaatatcaagttgattttatatatatatatatgtatacgtatatttaaatctacctagcttacataaggtttgtaatactaacatgatacaaaccttatttatgctaggtagatttagtagtaacaatgcatttagttgcaatgctagtagtaacaatgcaatgcagggtagacagaatcactacagttttatatgcagtatttcttaaatatattaaaaaccatgacttcgatttcagactggtttcatggaacctgcagcctcctcagaagtacttaaggaattctataaataataatgatttaaactgcctgaagtattatagctttctttcatctgtgttataacatattggggttctactaactgcacagtgaaaaagtcccgatgcttgaaaagactgcaaaccaccctagactctgttagttactagtttaggagcttaccagcagaagcagtatctgcaagcgaatcatgagtctgattcaatatactatccacaacatctgagaaaagggaagctgtgtcccgggggctgtcagccacagctgtttggagaacatgtcgttgaaattcagcctccttggtgcggcacacagtgaggatcatagcactggcagagagtggggaaataactccagtgatggggggccggccttcaccagggtccacatcagcaacctacgtgagaagccctaattagttgagartattattgtcaatatg

SEQ ID NO: 42264 - DNA, 535 bp, Homo sapiens
aacacagtatgtctatcacagaccacgagctgttactcattaaagactagatgaaatattccaccttaytcagttttttgtgtgtgtctgataattgcctctgtaaatataaatttttggtggaatgctaattttccaggggcatatgcatattatattagagtttggaatggaatattagagcattcaaggcccaatgttctctgagatttgaattaatttctactacagaagtttatatccaattgaaattttcataaatgcccccctccccactattattctgtaaaaatattattttaagaaactattatttttacaaaataataataattgtgggaagggggacatttatgaaaattaccatgccttatagaaaatagaagtgattgtaatttaaaaaaacgtatgtatacaaaactcattttccctttttcttctttttctgtccttttccctttcctcctttcctccctccctttcttcttttgccttcttcctttttaaatatttttcgaacatgttaaaatctaat

SEQ ID NO: 42265 - DNA, 1030 bp, Homo sapiens
atcctctaaccaggcattctaccgttcttcctttgctatgtccagaaggagaagagggagggctctcattctttatggcttagaggtagacctcagaccatgggctgaaagttgtgaaaaggcaaattcaagttcaataattaggaaaaacattttaatgttggctccttaaaatagactacatggtgaggtaatgaattccgtggcaatcagcgacttgcccaagcattcaaagctagttaggccagcattagaatgcacacctacggggtcccgactgcaaaatacagtgttctttttaccacctagaagctgggtgttgctcctacaaaacaccacagaattctgagcctaggactagacctgagcagctggaaatatacagacttgctgagtgccttgcttattactgtcatcataacaaatagttgtcattgaacaaacagcaagccatgtcaggtatttccttttattagctcttacaagattcctgttggaaagctgagaggtcatggaaacatttgtctacaacctccttgaagaatgtggtgagaaaaatatacatacatatatgtgtgtgtatatgtctactttgtgatgagtctgaggttgtttcctgctctgaaggggctcagaagtgcttctggagggcagactggatattcttcagcaggccccacttagctcggttcttcccatgtccatctggtgttaccacctgcaatcagaagcraagagtcatgacacccaatagacaacagctcccagtagcctgggcccttctgcatgtcagacactacacacatcatttcattaactcctcacgaccaccacagtggctgttggtgccactttatagatgaagaagctgaggctcagaaggaccaggaaggtttcccaaagccccacagctatagtgtcctgggattgtgattccataggccagatcctacttccctttagggtagctcatgtgactaagtgctgatgacagtgatggggctggaccgcaggtgagcttcaccataga

SEQ ID NO: 42266 - DNA, 657 bp, Homo sapiens
gatttgacagacatttacaaaattagtatttaaaatttaagtacttgcataggaaggcatacygaagtatttacggatatgacttgatgtctgagatatgctttttaaaactccaataaaaagttattagattagtataagaaaacaaagaacaaaattggcaaaaatcagtaactgtagaaactaggtaattggcacatgggagtttgctacactattctttttatttttatgcatgcttgaaatcctctgtaatgtagtttttaagatctgaattattacactcattatttttaacaaatgaggacacaatgatgaatcaaataacaaagtattaagactcacattaccttgcttttttgttatttttactgttaacaactgttagttgttacttcagcaacaaaatatatctattctgattcactgacaatctgaaagtaataagccatatgatattaaattctttcagtgaagacatgaagtgacttacctcctttagttctggccagtctataaggagaagtttagcaggaggtccagaaattagttgcactcgaataaagtcagaaaactcacgccaagtaaaacaaagatccttatttccaggaggacctggaataaatttgatgcctcttacacttatactctgtgtgt

SEQ ID NO: 42267 - DNA, 1534 bp, Homo sapiens
aaatcacctcccatatgcagccatcgactctgcctgcgcctaatcacagaaggctaccgcaagcccagagttttcaccagagtatcccccatcactctaaaatacagcagcctcaagaaatagcagttgttttctccagtttctataactgctgtgtattatgtgtcgcactgaaaattagaaagataggtactcctgaaaaatccaaagcttagattttttytcatttttactttcagttagaataacgagctctttcttccactccactgcataagagatgacaattaaaagctgactttttctctgcaaagtacttcactgttttcaacaccaagttttatgaaagagcaaaaaaaaagagattagtgtattgttctatatacataccatcacactgtccattttaatatttgaagccttaaagtaatgagtaggctttgcgttttgttttgtaaattctgaagcatttgtgtgtgtgcgtgtgtgtgcatatacatatgtctacatatggatagataaatggaataataaaatccatttaaataaaaagttagaagatatataaaaaagaataagacctgctctgtgttattcagacatttttaacctaataggggtggcaatgaacaaataattcaggacaagagaaaatgttaaactgtgcagattaaaagaccaaagctctatccaatagtgtcatatgatacagacatcaaggatcctatagttggtcagacctgcttcaaatcccatcaggacttaattagtacctaattagtacttaatgatcacttaagcacacttatcatcagctaacaaatcagtaaaaattagactaatatctaagtcattaagtctgctatgaagatgaagtgtgaaaatttgctaacttgtctttctccttgctattctctaagctaattgaggcaagaagctgtcttcaccactctctttctctcaaattgattgttattacattgaaatatatacatgtgtgtatctataacacaatgagaacaatgaaatgaacatctgtgctaccaactctaagcaatagagtatttaccaatacatcagtatgatcaatgcgtagaacatacccttccccatatcaccttcttcctccacttcaggggaagtcactttctgaattttatgtttatcattcccttgcttttcttcacagtgactataaatgtatgcattccacttttagccacatatatcagtttcctgaaatcaaatgcttaactggaattatatgttgcaagttctgtgactctctctgtcttaaatgcttaactggaatacatattgcaagttctgtgactctctgtctctctcccccttgcttgtattatgtttttgggagtcatctacatttaggcatgatgctctggtctactcatttttattgctgtatagttttccattgcaggaatgcaccatgatttttccatcctcttcttgatggatctttgggtcatttttctttttacccttatataaaatgctgctgcgaaaactcttg

SEQ ID NO: 42268 - DNA, 1534 bp, Homo sapiens
aaatcacctcccatatgcagccatcgactctgcctgcgcctaatcacagaaggctaccgcaagcccagagttttcaccagagtatcccccatcactctaaaatacagcagcctcaagaaatagcagttgttttctccagtttctataactgctgtgtattatgtgtcgcactgaaaattagaaagataggtactcctgaaaaatccaaagcttagattttttctcatttttactttcagttagaataacgagctctttcttccactccactgcataagagatgacaattaaaagctgactttttctctgcaaagtacttcastgttttcaacaccaagttttatgaaagagcaaaaaaaaagagattagtgtattgttctatatacataccatcacactgtccattttaatatttgaagccttaaagtaatgagtaggctttgcgttttgttttgtaaattctgaagcatttgtgtgtgtgcgtgtgtgtgcatatacatatgtctacatatggatagataaatggaataataaaatccatttaaataaaaagttagaagatatataaaaaagaataagacctgctctgtgttattcagacatttttaacctaataggggtggcaatgaacaaataattcaggacaagagaaaatgttaaactgtgcagattaaaagaccaaagctctatccaatagtgtcatatgatacagacatcaaggatcctatagttggtcagacctgcttcaaatcccatcaggacttaattagtacctaattagtacttaatgatcacttaagcacacttatcatcagctaacaaatcagtaaaaattagactaatatctaagtcattaagtctgctatgaagatgaagtgtgaaaatttgctaacttgtctttctccttgctattctctaagctaattgaggcaagaagctgtcttcaccactctctttctctcaaattgattgttattacattgaaatatatacatgtgtgtatctataacacaatgagaacaatgaaatgaacatctgtgctaccaactctaagcaatagagtatttaccaatacatcagtatgatcaatgcgtagaacatacccttccccatatcaccttcttcctccacttcaggggaagtcactttctgaattttatgtttatcattcccttgcttttcttcacagtgactataaatgtatgcattccacttttagccacatatatcagtttcctgaaatcaaatgcttaactggaattatatgttgcaagttctgtgactctctctgtcttaaatgcttaactggaatacatattgcaagttctgtgactctctgtctctctcccccttgcttgtattatgtttttgggagtcatctacatttaggcatgatgctctggtctactcatttttattgctgtatagttttccattgcaggaatgcaccatgatttttccatcctcttcttgatggatctttgggtcatttttctttttacccttatataaaatgctgctgcgaaaactcttg

SEQ ID NO: 42269 - DNA, 1534 bp, Homo sapiens
aaatcacctcccatatgcagccatcgactctgcctgcgcctaatcacagaaggctaccgcaagcccagagttttcaccagagtatcccccatcactctaaaatacagcagcctcaagaaatagcagttgttttctccagtttctataactgctgtgtattatgtgtcgcactgaaaattagaaagataggtactcctgaaaaatccaaagcttagattttttctcatttttactttcagttagaataacgagctctttcttccactccactgcataagagatgacaattaaaagctgactttttctctgcaaagtacttcactgttttcaacaccaagttttatgaaagagcaaaaaaaaagagattagtgtattgttctatatacataccatcacastgtccattttaatatttgaagccttaaagtaatgagtaggctttgcgttttgttttgtaaattctgaagcatttgtgtgtgtgcgtgtgtgtgcatatacatatgtctacatatggatagataaatggaataataaaatccatttaaataaaaagttagaagatatataaaaaagaataagacctgctctgtgttattcagacatttttaacctaataggggtggcaatgaacaaataattcaggacaagagaaaatgttaaactgtgcagattaaaagaccaaagctctatccaatagtgtcatatgatacagacatcaaggatcctatagttggtcagacctgcttcaaatcccatcaggacttaattagtacctaattagtacttaatgatcacttaagcacacttatcatcagctaacaaatcagtaaaaattagactaatatctaagtcattaagtctgctatgaagatgaagtgtgaaaatttgctaacttgtctttctccttgctattctctaagctaattgaggcaagaagctgtcttcaccactctctttctctcaaattgattgttattacattgaaatatatacatgtgtgtatctataacacaatgagaacaatgaaatgaacatctgtgctaccaactctaagcaatagagtatttaccaatacatcagtatgatcaatgcgtagaacatacccttccccatatcaccttcttcctccacttcaggggaagtcactttctgaattttatgtttatcattcccttgcttttcttcacagtgactataaatgtatgcattccacttttagccacatatatcagtttcctgaaatcaaatgcttaactggaattatatgttgcaagttctgtgactctctctgtcttaaatgcttaactggaatacatattgcaagttctgtgactctctgtctctctcccccttgcttgtattatgtttttgggagtcatctacatttaggcatgatgctctggtctactcatttttattgctgtatagttttccattgcaggaatgcaccatgatttttccatcctcttcttgatggatctttgggtcatttttctttttacccttatataaaatgctgctgcgaaaactcttg

SEQ ID NO: 42270 - DNA, 1169 bp, Homo sapiens
tctaaaatcttttcttttatttcccagttgtctgctggagagtttagcttagagttgagttccgccacctgatcaataccattattccttcactgaatatttgctcagctcaccttgtgtccagtgccatgccagccactgcccgtggaataatgagcagagccctgcatggttcctgtcctcaccaagtttacagtctcagggaaaagagaactgttgtgcaaggggtcacacaatatagtgtcaaacgacagtacgagtagggggtttaaggcattcccccaaaatttttgtccagctggatcctcagaatgagaccatctttggaaattgggtctttgcagaggtaaccagttaagttaattgttctggatggtccagtgtttggcatctataaggaaaaggagagggggattcagattcagagacacagaaacacgcaggcccagaaggccatgtggtgacagaagcagggatggggtgttacagctacaagccagggaactccgagcatggctgagaatcatgagaaacaagagaaaggcaaggaaggactctcgcctggagccttcagagagagcatggccctgctggcgccttggtttttgacttctagcctccagaatgctgagagagtaaatttctattgtgttaagctaatgatctagtggtaatgtgtgacaggagtcctargaaactaatgtattgtggattcaattgacccgtaagaaattgcagatgttcaactgctttgagccacacaaacagcaatattataggattcatcctaccatgttatgagcttgtaagaggaaaactttgtcagagaaagcttctgtgaggaatttctagtggaactgaaatctagaaaacaagtagaatttgatggagttcaagagaaaaagaggaagaaaggggaacccagcagagggccagcagagggccggcagaggtgggggaggcacagaggttctgaggcagagggtgcagatgtttccaagcaactgaaggatgtgactggaacccggtgtggggatagagctagctgaggctggacaggcagggaggggccaaaaaaaggcctctgagcctagattgaagattgagattttgaccaggcatggcagctcgcacctgtagtcccggctactcaggaggctgaggcaaga

SEQ ID NO: 42271 - DNA, 1169 bp, Homo sapiens
tctaaaatcttttcttttatttcccagttgtctgctggagagtttagcttagagttgagttccgccacctgatcaataccattattccttcactgaatatttgctcagctcaccttgtgtccagtgccatgccagccactgcccgtggaataatgagcagagccctgcatggttcctgtcctcaccaagtttacagtctcagggaaaagagaactgttgtgcaaggggtcacacaatatagtgtcaaacgacagtacgagtagggggtttaaggcattcccccaaaatttttgtccagctggatcctcagaatgagaccatctttggaaattgggtctttgcagaggtaaccagttaagttaattgttctggatggtccagtgtttggcatctataaggaaaaggagagggggattcagattcagagacacagaaacacgcaggcccagaaggccatgtggtgacagaagcagggatggggtgttacagctacaagccagggaactccgagcatggctgagaatcatgagaaacaagagaaaggcaaggaaggactctcgcctggagccttcagagagagcatggccctgctggcgccttggtttttgacttctagcctccagaatgctgagagagtaaatttctattgtgttaagctaatgatctagtggtaatgtgtgacaggagtcctaggaaactaatgtattgtggattcaattgacccgtaagaaattgcagatgttcaactgctttgagccacacaaacagcaayattataggattcatcctaccatgttatgagcttgtaagaggaaaactttgtcagagaaagcttctgtgaggaatttctagtggaactgaaatctagaaaacaagtagaatttgatggagttcaagagaaaaagaggaagaaaggggaacccagcagagggccagcagagggccggcagaggtgggggaggcacagaggttctgaggcagagggtgcagatgtttccaagcaactgaaggatgtgactggaacccggtgtggggatagagctagctgaggctggacaggcagggaggggccaaaaaaaggcctctgagcctagattgaagattgagattttgaccaggcatggcagctcgcacctgtagtcccggctactcaggaggctgaggcaaga

SEQ ID NO: 42272 - DNA, 1169 bp, Homo sapiens
tctaaaatcttttcttttatttcccagttgtctgctggagagtttagcttagagttgagttccgccacctgatcaataccattattccttcactgaatatttgctcagctcaccttgtgtccagtgccatgccagccactgcccgtggaataatgagcagagccctgcatggttcctgtcctcaccaagtttacagtctcagggaaaagagaactgttgtgcaaggggtcacacaatatagtgtcaaacgacagtacgagtagggggtttaaggcattcccccaaaatttttgtccagctggatcctcagaatgagaccatctttggaaattgggtctttgcagaggtaaccagttaagttaattgttctggatggtccagtgtttggcatctataaggaaaaggagagggggattcagattcagagacacagaaacacgcaggcccagaaggccatgtggtgacagaagcagggatggggtgttacagctacaagccagggaactccgagcatggctgagaatcatgagaaacaagagaaaggcaaggaaggactctcgcctggagccttcagagagagcatggccctgctggcgccttggtttttgacttctagcctccagaatgctgagagagtaaatttctattgtgttaagctaatgatctagtggtaatgtgtgacaggagtcctaggaaactaatgtattgtggattcaattgacccgtaagaaattgcagatgttcaactgctttgagccacacaaacagcaatattataggattcatcctaccatgttatgagcttgtaagaggaaaactttgtcagagaaagcttctstgaggaatttctagtggaactgaaatctagaaaacaagtagaatttgatggagttcaagagaaaaagaggaagaaaggggaacccagcagagggccagcagagggccggcagaggtgggggaggcacagaggttctgaggcagagggtgcagatgtttccaagcaactgaaggatgtgactggaacccggtgtggggatagagctagctgaggctggacaggcagggaggggccaaaaaaaggcctctgagcctagattgaagattgagattttgaccaggcatggcagctcgcacctgtagtcccggctactcaggaggctgaggcaaga

SEQ ID NO: 42273 - DNA, 943 bp, Homo sapiens
taaatcactggagggccactcaacatggaaacacacccggattgataatagcctgaagtatctttctaaatcaggaaacaaatatttattgtctttctcttatgtttttattcagagaaagatcatctgatttgttcttaacaactgcccttggagaaatcgtagtactctaaatcacagtgcaaacatgccttgccttggacatatgtagaaatgtgcctttatttccagtcagtcaggtattgccaaaaaggaaataaggaacatatgaataaaagaaagcagagagaaggagcctgttgttttgagaaagactgtctttctgctggcattgtaacggtagacacgcctgagttctgagacccatgtatttcagcttggccaccattcctactgaggagaagaccctggaaaaggtgaacaggtatttgaaatccatacatgtagaatacttggggaagttgtcagaatggacaggtgcagtggtaaatatgagaaaaraatagttagcgtttggctgccatacagtataccagttcagccaaatatgagttcttcggcatcagccctcaagttttcttgaggatgtgctgcttcattggggcaatttgccctttggcacccatttaccatacatattcctactttctatcagtcaaagaaatgaaagataagtaagagttggcagtatatatgcaaattgtttacaggaaattcacacacgtgttcatatacttcttcttgacatgtatcattgtatcagtatttaatttgtgaacaaaataggcatatataattattggaaaaaatagcttaaaatagggttgatgtaagtttgtcttattgtaaatggccagattaacaaaaaattagattcaaatagtctgataacttttaaaatgtattaataattataaaaagcacgaaaagataataataacaa

SEQ ID NO: 42274 - DNA, 943 bp, Homo sapiens
taaatcactggagggccactcaacatggaaacacacccggattgataatagcctgaagtatctttctaaatcaggaaacaaatatttattgtctttctcttatgtttttattcagagaaagatcatctgatttgttcttaacaactgcccttggagaaatcgtagtactctaaatcacagtgcaaacatgccttgccttggacatatgtagaaatgtgcctttatttccagtcagtcaggtattgccaaaaaggaaataaggaacatatgaataaaagaaagcagagagaaggagcctgttgttttgagaaagactgtctttctgctggcattgtaacggtagacacgcctgagttctgagacccatgtatttcagcttggccaccattcctactgaggagaagaccctggaaaaggtgaacaggtatttgaaatccatacatgtagaatacttggggaagttgtcagaatggacaggtgcagtggtaaatatgagaaaagaatagttagcgtttggctgccatacagtataccagttcagccaaatatgagttcttcggcawcagccctcaagttttcttgaggatgtgctgcttcattggggcaatttgccctttggcacccatttaccatacatattcctactttctatcagtcaaagaaatgaaagataagtaagagttggcagtatatatgcaaattgtttacaggaaattcacacacgtgttcatatacttcttcttgacatgtatcattgtatcagtatttaatttgtgaacaaaataggcatatataattattggaaaaaatagcttaaaatagggttgatgtaagtttgtcttattgtaaatggccagattaacaaaaaattagattcaaatagtctgataacttttaaaatgtattaataattataaaaagcacgaaaagataataataacaa

SEQ ID NO: 42275 - DNA, 547 bp, Homo sapiens
gctgcatttacacattgagtttaccttacagtacatgaaaattttggcagtctcagccatctccattatccactctttttcctccctttrtaagtaccacaatttttaattaagtgcctacttagtgtttttattattataactaggaaaatactcttccatgctgtacaagatagggtattattgtgttatgggatattataatgtagggtgtacaccttcattttctcatatgatttctggcttttcttagatttaagtattgtcttacatttttatttgcttaattttctttgatccttggctgtgttttccaacactctccaactctcgataaccacttctcgatacaactgcccacagggtaaaaactttcagttcatctctttgctctgagactctgcccctagctttccttcttttcagcaatgcatatctatcagaaaaagagtctatgaaacataaaattttgatattttgcatgtatgtaaatatatttattctatcttcactcttgatgaatactttggcagggtatagaattcta

SEQ ID NO: 42276 - DNA, 547 bp, Homo sapiens
gctgcatttacacattgagtttaccttacagtacatgaaaattttggcagtctcagccatctccattatccactctttttcctccctttataagtaccacaatttttaattaagtgcctacttagtgtttttattattataactaggaaaatactcttccatgctgtacaagatagggtattattgtgttatgggatattataatgtagggtgtacaccttcattttctcatatgatttctggcttttcttagattyaagtattgtcttacatttttatttgcttaattttctttgatccttggctgtgttttccaacactctccaactctcgataaccacttctcgatacaactgcccacagggtaaaaactttcagttcatctctttgctctgagactctgcccctagctttccttcttttcagcaatgcatatctatcagaaaaagagtctatgaaacataaaattttgatattttgcatgtatgtaaatatatttattctatcttcactcttgatgaatactttggcagggtatagaattcta

SEQ ID NO: 42277 - DNA, 569 bp, Homo sapiens
tactttccccaaatcaagtacaattaaatatatggtgaagaaactattttaaatttatgtttaagatggaagttttactaatcagaaatatgttcaattgcaagtatgcaaaatctcattacaatggctaaaacaaaagtaactttarttttctcatctaacaagaaatctggatgtgggtagctgttggcattggttgtgttgctaaataattgcgttggttacatattccaaccttcctatctttagagagttcacttttatcttcatgcatgttgcttcatggtagcaagatagttgttgaaaatccagagagctggtttgtcttcaaggcaggaagaaaaggggaggacaaagaatagcggcagctgcatctgacatccccttctctgtttttaaaaaccaggatacaaaaagcttttcagaaaatctgtaggaagtgtcactgtcattggccagaactatgtcacctggccacttctacacacagtggggattgagaaagtgactatctcacgtgggactggaaacatggctacctcaaaccaagttgagctttgttagcaagg

SEQ ID NO: 42278 - DNA, 569 bp, Homo sapiens
tactttccccaaatcaagtacaattaaatatatggtgaagaaactattttaaatttatgtttaagatggaagttttactaatcagaaatatgttcaattgcaagtatgcaaaatctcattacaatggctaaaacaaaagtaactttagttttctcatctaacaagaaatctggatgtgggtagctgttggcattggttgtgttgctaaataattgcgttggttacatattccaaccttcctatctttagagagttcacttttatcttcatgcatgttgcttcatggtagcaagatagttgttgaaaatccagagagctggtttgtcttcaaggcaggaagaaaaggggaggacaaagaatagcggcagctgcatctgacrtccccttctctgtttttaaaaaccaggatacaaaaagcttttcagaaaatctgtaggaagtgtcactgtcattggccagaactatgtcacctggccacttctacacacagtggggattgagaaagtgactatctcacgtgggactggaaacatggctacctcaaaccaagttgagctttgttagcaagg

SEQ ID NO: 42279 - DNA, 1043 bp, Homo sapiens
catctctactaaaaaaaaaaaaaaaaaaaaaaaattgccaggtgtcgtgktgcatgcctgtagtcccacctactcaggaggctgacatgagagacttgtttgagcccaggagattaaggctacagtgagccatgatcacaccacagcatgccagcctgggatgacagagtgagaccctgtctcaatttttaaaaaaatgaatggaagagtctttgttcaacacgggttccataatctcactatgcttagaaatgtgtcagcacagagctttccccattctctccttctttccctgaactatctgttcttttaccactctccaagaaaatgcaggaggcattaggaaaaggagctaaatgtggtgtccattttaaggatacattttcttaccttcgaaagtgaaattaaggtgttttcacttttccctctgcttgaaaattgcatccaaatgccaaggagaaaaaataagcaaggaaacaaatgtttccagtgactactgaagtataacgggggggggagagagagagacagagaaggaaagcagatgggtaagtagtaaattacttaaggaatgaaaaaggtaacaagtgaaaaggaagccacttcaaccacagaaccccagaaaggctcagtaagtgtcagatatttcagaagacagggtagagggcacctgaaaacaggaattgtttagtctgtataaggaacagttagaaagacccgccaaactgggctcgtgtagtcccagttactcaggaggctgaggtaggagaatggcgtgaacccgggaggcggagcttgcactgagccgagatcgcgccactgcactccagcctgggcaacagagcgagactcttgtctcaaaaaaaaaaaaaaaaaaaagaaagaaaagaaaagaaaaagaaagacccgctgaactcatatcacttaattacatagtcaagtgatcaactttcccatctttagggaattggaagtatattatctggaaaatgaggacaaaagaactccaggcttggatcagctagcatggaggaggtaggggg

SEQ ID NO: 42280 - DNA, 1043 bp, Homo sapiens
catctctactaaaaaaaaaaaaaaaaaaaaaaaattgccaggtgtcgtggtgcatgcctgtagtcccacctactcaggaggctgacatgagagacttgtttgagcccaggagattaaggctacagtgagccatgatcacaccacagcatgccagcctgggatgacagagtgagaccctgtctcaatttttaaaaaaatgaatggaagagtctttgttcaacacgggttccataatctcactatgcttagaaatgtgtcagcacagagctttccccattctctccttctttccctgaactatctgttcttttaccactctccaagaaaatgcaggaggcattaggaaaaggagctaaatgtggtgtccattttaaggatacattttcttaccttcgaaagtgaaattaaggtgttttcacttttccctctgcttgaaaattgcatccaaatgccaaggagaaaaaataagcaaggaaacaaatgtttccagtgactactgaagtataacgggggggggagagagagagacagagaaggaaagcagatgggtaagtagtaaattacttaaggaatgaaaaaggtaacaagtgaaaaggaagccacttcaaccacagaaccccagaaaggctcagtaagtgtcagatatttcagaagacagggtagagggcacctgaaaacaggaattgtttagtctgtataaggaacagttagaaagacccgccaaactsggctcgtgtagtcccagttactcaggaggctgaggtaggagaatggcgtgaacccgggaggcggagcttgcactgagccgagatcgcgccactgcactccagcctgggcaacagagcgagactcttgtctcaaaaaaaaaaaaaaaaaaaagaaagaaaagaaaagaaaaagaaagacccgctgaactcatatcacttaattacatagtcaagtgatcaactttcccatctttagggaattggaagtatattatctggaaaatgaggacaaaagaactccaggcttggatcagctagcatggaggaggtaggggg

SEQ ID NO: 42281 - DNA, 1043 bp, Homo sapiens
catctctactaaaaaaaaaaaaaaaaaaaaaaaattgccaggtgtcgtggtgcatgcctgtagtcccacctactcaggaggctgacatgagagacttgtttgagcccaggagattaaggctacagtgagccatgatcacaccacagcatgccagcctgggatgacagagtgagaccctgtctcaatttttaaaaaaatgaatggaagagtctttgttcaacacgggttccataatctcactatgcttagaaatgtgtcagcacagagctttccccattctctccttctttccctgaactatctgttcttttaccactctccaagaaaatgcaggaggcattaggaaaaggagctaaatgtggtgtccattttaaggatacattttcttaccttcgaaagtgaaattaaggtgttttcacttttccctctgcttgaaaattgcatccaaatgccaaggagaaaaaataagcaaggaaacaaatgtttccagtgactactgaagtataacgggggggggagagagagagacagagaaggaaagcagatgggtaagtagtaaattacttaaggaatgaaaaaggtaacaagtgaaaaggaagccacttcaaccacagaaccccagaaaggctcagtaagtgtcagatatttcagaagacagggtagagggcacctgaaaacaggaattgtttagtctgtataaggaacagttagaaagacccgccaaactgggctcgtgtagtcccagttactcaggaggctgaggtaggagaatggcgtgaacccgggaggcggagcttgcactgagccgagatcgcgccactgcactccagcctgggcaacagagcgagactcttgtctcaaaaaaaaaaaaaaaaaaaagaaagaaaagaaaagaaaaagaaagacccgctgaactcatatcacttaattacatagtcaagtgatcaactttcccatctttagggaattggaagtatattatctggaaaatgaggacaaragaactccaggcttggatcagctagcatggaggaggtaggggg

SEQ ID NO: 42282 - DNA, 1299 bp, Homo sapiens
gcataggcacaatcacataaatattgcacaaaatatgtcccgaacagaaacccagagatacaaaaacatatttcactttgtaaagaagtctgtgagaaaatataactctgtgattgtataggcacgtttcctgataatacattgacattcacgaacagtagattgcactgcagtttgtacacattttaagtttcataaacttctccttgattttcaaagatagtataataccgtctactaaaactcccttttgtttcaactaagtatctcacatatattagtttataataatgtttctattattttttaaagtgttttccattcaaggaaaaagaagtaaattcctatgtcagagtaaccaaggtggttgaagaataggtattagccaaagaggtctagatggtaaaatcaatcttcaagcctcaaagaatctccgtgaacagagaggaatgccaggtgtcacacagctttccttcactctaattcattcttgactagagcctgtatgcctgttccagggacatttgaactcgtaaaggatttcttatgatctttactaaatacattaagaagaatgccaaccagtgcccttttgtgtactgggacatgtagtcatgtgattaaaacaggtaacatgaactctgagtttaaaatgtattgtagatacaaatgctctaagctaggaaaggttttccacatccacagtcaacgatgggaacctttcattcctcagaaataagccctttttaggtcattgaaaaagagtacaactgctgcagctcatgatgcagtatcttcatgagcccagagcacatacaaatsctaagggaaccaccataatacactgctaattcctggcaccggaacagatgaaacacactctatcctggacatacctgccagaggaggccactttcctcttctgtgagatttaaaaagctccctcaaaaggtttcactcccatcaccaatacacagaaaatggaggaaaggctgtttccagttcttggcctttaaacaactctaaatgtcagtactcatagtggcatattacaaagtaataaacagtgcacgcttgggggcaaactacatattgagctaacgaagagctcactgtgattaagattagatcaaacaacagcagaacataggcaaattttgtctgaattctgtagtgaatatacatgctgcaataacattaaaaaagcatggcagcctattccaaaccagcgagaacagttttgggcaaagagtgggtctttgtgtgtttgaacccccaccacgtaagggcaaactcgat

SEQ ID NO: 42283 - DNA, 835 bp, Homo sapiens
actacaattctgcaactctccataacttattttttgctagtatcgggacaactatttgtgtttctcagttactatatagtattttctattataatgttaagtagttgttttagttccagtataatattaaaaacaggcaaacctatgaaacaatagttgactctattggatggaatacaacattcactgcattgtatttcactagcttttcaaattactttaagcagaaattattcatcaagccataggcatatataaggcattatactttatgacctaggaaaataaatgcaatttctaaagacaattttcttagcttgaagtagaaacccaatacaagtaattttgtatcaaatattgtataattctcaaaaagyataacacaattttcaaaattatgtttctattgattttatttttaaatttagaaaagattattggctcatataaagagacacaactcaatagaattaaataccaaaatgcatgcaataaatgttcaagtataaacattggtgaaatgatgttctcttagtttttagaagttttattagtggtcatttttggagatttacaccctaattcatactcttttatattcatctgaaccaaaagtttatatttcatccaactctacaaactatatgattttacttatcacaactacttttgttatatacgtccactatgcttgagttatgacactgcttcttcagttaatggtagcatttcaagccattcatcattaaccaaaccaaaaaaaactgcataaatatttacaatgaaatagtttttggcagcctgtagtaatatatgtgatctatatttatcagaa

SEQ ID NO: 42284 - DNA, 927 bp, Homo sapiens
aagcagcagagtctaaacatctctacggggaaaagcacagaaagaagggaaattgtcccttgatgaaaaaaaaacaacaaagaaagaatcccgtgataaatttttcacaatccttatctgagattgccccacctcaaatactaccaacatcaatcactatgttttcttcttttttgaatattccagttcttgtgcccccttatgctttgaacctaattttgtctgaacacttaccaccctccagtgcaatgattgtttgcttattgttgcctcaaccccgtcccattagactgtaaaatggacaaggataggaatggtgtcatacaagttacaataccaacttctggcacagttccaagcagtgaaaatgtggtctataaatattkgtttaaacaaagtactaaatgaatgtttacctaattcaagtctatttcacccctacctaaagtacagccacttcacatttccagattcttcattactctccgtgctacacccccttcctactgagatgttcttaaatgaccatgatcctgcatggccaccagtgtaattctttcttgtggtctccccagggccctgtgaaggacccttagagacctccaatctattctcttctataaacaaacctaccatcatttcctttaagaaaataaagcaattatcaatgttgattcaaataataagatacaaggcagaatcttctaatttgattttgcattttctaaacaaatgagaggctagaacctgtgagaaaagctttatacaaattgggttttcttttaaataggattgccttatagtaatccaatttgatgtcagatcctcaatgagtcaggagcctttttcatctccactggaaccctgtgacattgagattggagggctgcccattgacatcctcatgggccccacttccacctggat

SEQ ID NO: 42285 - DNA, 927 bp, Homo sapiens
aagcagcagagtctaaacatctctacggggaaaagcacagaaagaagggaaattgtcccttgatgaaaaaaaaacaacaaagaaagaatcccgtgataaatttttcacaatccttatctgagattgccccacctcaaatactaccaacatcaatcactatgttttcttcttttttgaatattccagttcttgtgcccccttatgctttgaacctaattttgtctgaacacttaccaccctccagtgcaatgattgtttgcttattgttgcctcaaccccgtcccattagactgtaaaatggacaaggataggaatggtgtcatacaagttacaataccaacttctggcacagttccaagcagtgaaaatgtggtctataaatattggtttaaacaaagtactaaatgaatgtttacctaattcaagtctatttcacccctacctaaagtacagccacttcacatttccagattcttcattactctccgtgctacacccccttcctactgagatgttcttaaatgaccatgatcctgcatggccaccagtgtaattctttcttgtggtctccccagggccctgtgaaggacccttagagacctccaatctattctcttctataaacaaacctaccatcatttcctttaagaaaataaagcaattatcaatgttgattcaaataataagatacaaggcagaatcttctaatttgattttgcattttctaaacaaatgagaggctagaacctgtgagaaaagctwtatacaaattgggttttcttttaaataggattgccttatagtaatccaatttgatgtcagatcctcaatgagtcaggagcctttttcatctccactggaaccctgtgacattgagattggagggctgcccattgacatcctcatgggccccacttccacctggat

SEQ ID NO: 42286 - DNA, 799 bp, Homo sapiens
aggtattgttcacaatgcacctcagcaacatgggccaatgatagcgtatgttttagaacttatccattggaaggacatatttaatacaaaccagaaattcattaaattactggccacttaaaacatatagaagaggactgtcccaatagaaagggctcacaatctgagctggccttttacaatggcaaatagtattacagtaacattgcaaacaaacaaatatgaaaaaaaaagtagtatatcattattaaacaccttttacgtaagattttcagaaaacccagggatagattttatatcacagaatggtccatatcgtccaaaaatatcttttgattggacagtaaaatagtatctgttggaagctaaaaactgagataaagtacaggccatggggagtggtaaagctttaatttctccaatcttcttccaaatcaacttattattagagttctcatgacacaggaagaggtggtagctttctacaggagcacacttgggattgattttggttatattccaagtcagggcaatgccattkggtctgaaaacccgtttcactttgagctcaggcttctggggaggaagtgtgtctcgggttttgtctactaattcaggtagtggtgctggtggttctgggagaggtggcaggtgctcaaaggactcaggaacctaaaaacacaattgtaagaaaatatagcttttaaagtggtcaattgcagttgtagaaatatatatttctcattcttcaatccatttatcaaaataataaaaggatatttcagtaatatgtgaggct

SEQ ID NO: 42287 - DNA, 1114 bp, Homo sapiens
accaaacacaatcttttggaaaggagcctggaaagttgtatactaaacagttactacaaatgatttttatcaggtacgtttgagaaagcagtagcctacaacaacagtcttcaactattagctcaagaaaccacaatttaaacaagtactcctggtggttcacattgggacaggtccttaaatttgatcatttttgactaagtacccaccatggggcaactcctcttggttagactatacacttgttctaatttaatggtaatgttccttatacaraaggaagacacaataacctccatcaaatacctcataaatgtttttaccaatggtaatgtgcccatcaacagggaatcagattgaagtcctggcttcaaagtggagatggcagccaaactggcctaaagtttggagaaagtacaaacttatctccaatctgtgccaactttctgagataatgggtagagtgaataacttaagactgtaaaggaaaaacccttcctcttcagtaatttaactggaattaacccggccatgctccttatgaaacctcaaaaggctaagaaatgatcactgcaggactccttcagtaggggagaacaatgtcagaatgacggggagggctatctcattgagattcaaacaaggtaaacatctagatatggttgagagagacaactgtttggacagcaataagaagtgaggaaaagctagctatttagagatggttatgtacacatcagaagttacttctggctgggcgcggtggctcacacctgtaatcccagcactttgggaggccgaggcgggcggatcactgaaactgctgttcaagaccagcctggccaacatggtaaaatctgtctctactaaaaatacacacaaaaagttagctgggtgtgctagtgcacacctgtagtcccaactactcaggaggtggaggtagcactgagccgagactgtgccactgcactccagtctgggtgacaaagtgagactctgcctcaaacaaacaaacaaacaaaaacttacttctcacttcagctactaattactggaaacaagacacagctggaatccccaaccttcttcttgaataacatggtccttagggcta

SEQ ID NO: 42288 - DNA, 1114 bp, Homo sapiens
accaaacacaatcttttggaaaggagcctggaaagttgtatactaaacagttactacaaatgatttttatcaggtacgtttgagaaagcagtagcctacaacaacagtcttcaactattagctcaagaaaccacaatttaaacaagtactcctggtggttcacattgggacaggtccttaaatttgatcatttttgactaagtacccaccatggggcaactcctcttggttagactatacacttgttctaatttaatggtaatgttccttatacaaaaggaagacacaataacctccatcaaatacctcataaatgtttttaccaatggtaatgtgcccatcaacagggaatcagattgaagtcctggcttcaaagtggagatggcagccaaactggcctaaagtttggagaaagtacaaacttatctccaatctgtgccaactttctgagataatgggtagagtgaataacttaagactgtaaaggaaaaacccttcctcttcagtaatttaactggaattaacccggccatgctccttatgaaacctcaaaaggctaagaaatgatcactgcaggactcyttcagtaggggagaacaatgtcagaatgacggggagggctatctcattgagattcaaacaaggtaaacatctagatatggttgagagagacaactgtttggacagcaataagaagtgaggaaaagctagctatttagagatggttatgtacacatcagaagttacttctggctgggcgcggtggctcacacctgtaatcccagcactttgggaggccgaggcgggcggatcactgaaactgctgttcaagaccagcctggccaacatggtaaaatctgtctctactaaaaatacacacaaaaagttagctgggtgtgctagtgcacacctgtagtcccaactactcaggaggtggaggtagcactgagccgagactgtgccactgcactccagtctgggtgacaaagtgagactctgcctcaaacaaacaaacaaacaaaaacttacttctcacttcagctactaattactggaaacaagacacagctggaatccccaaccttcttcttgaataacatggtccttagggcta

SEQ ID NO: 42289 - DNA, 775 bp, Homo sapiens
accccccaacacagttccacctcctactgttccaaacagaarcctgctgcagaggcagaggctcttgggaatcctgtactatggtagtgcagaaggaaaataagggctttgagtgactatgcaggaggcaaccatcctctaaaccccagattcatagacctaccaacagttcacaccctcagtatggaaaagctacaggcactcaacactagtccagtctatgaaagaagccatgggggctcagacctgcaaagccacaggtgcacttccttagtagggattttccatgaggctctgcctctgcagcaggctactcccccttcctactaaccaccaccctcccaccaccctacagacagcctactcttccccaccctacccaccccttttttcttccacccctacccctcccatccatgattaaataatctcccaccaggtcccgcctccaacatttgggattacaattccacatgagtttttccaggggcacacagccaaatcatattatgctgaccttgaccccccaaatctcatatccttctcacagaataaaatacattcatgtcttttcaaaagtttccaaaagccttaactcattcctacattaactcacatgtaaaaagttcaaagtcttatctgagacgaggctactatctcttctgcctatgagtccctgaagttaaaaaggtgtttgtttctttcaaggtacaatgatggtacaggtattgggtaagctttctcaatccaaagggaagaaatttccaagaaaaat

SEQ ID NO: 42290 - DNA, 775 bp, Homo sapiens
accccccaacacagttccacctcctactgttccaaacagaagcctgctgcagaggcagaggctcttgggaatcctgtactatggtagtgcagaaggaaaataagggctttgagtgactatgcaggaggcaaccatcctctaaaccccagattcatagacctaccaacagttcacaccctcagtatggaaaagctacaggcactcaacactagtccagtctatgaaagaagccatgggggctcagacctgcaaagccacaggtgcacttccttagtagggattttccatgaggctctgcctctgcagcaggctactcccccttcctactamccaccaccctcccaccaccctacagacagcctactcttccccaccctacccaccccttttttcttccacccctacccctcccatccatgattaaataatctcccaccaggtcccgcctccaacatttgggattacaattccacatgagtttttccaggggcacacagccaaatcatattatgctgaccttgaccccccaaatctcatatccttctcacagaataaaatacattcatgtcttttcaaaagtttccaaaagccttaactcattcctacattaactcacatgtaaaaagttcaaagtcttatctgagacgaggctactatctcttctgcctatgagtccctgaagttaaaaaggtgtttgtttctttcaaggtacaatgatggtacaggtattgggtaagctttctcaatccaaagggaagaaatttccaagaaaaat

SEQ ID NO: 42291 - DNA, 1299 bp, Homo sapiens
tgcatttagaggtcagactttcagccccaacccccaatctccagggaggggtggggagctggagactgaatcagtctccactggtcaaggctygggtaatgaagcctccgagcttctgggttggtgaacacactgatatgctgggaggggatgcacccagagagggtatgcgggctccaggcccctttcctcatccctcgccctgtgcatctcctccatttggcggttcctgagttgtatcctttatgatggcaagagtaaggtaagtaccttcctgagtcctgtgagtcattctagcaaattacagaacctgaagtagggcaggttgtgggaacccctgactttgtagccaagtcagaccaaagtgtgggtaacttggcacctgaagacaggccagtattatgggactaaaccctatggagtgtcaagtcaactccgagtagttaagtgtcagaatcagcttgaaccataggacacccagttgatgccagaattggttggtgtctggagggtttcccaaggaaaattgggatgcacttataggtataaggcacatagatctgggtagcggcagtaacaggcacacttgttcccctgtgacagatgtggcttgccctgcccctgggatgagtcaggagtctctccagcatcacctggggcatgccagcagcatcccaggctgggacaagagacacccattgggggccattgggatgccttgggctgcaagtaacagaaaccctcactgacatgggcttccttgagaaggggatccggggaagaaagggttttggacagcctgcgtggcctttcacagtctttgtccccaaggccgtcttctctcacagctgcaagataaatgccagccgcaactggagcaaggcacttcctcattcctgctagatggggagagagaaagcattccctcaatggcagaaaaaaaattcttatcttcagccattttttttccgttggtagagacggggactctctatgttgcccaggctgctctcaaattctgggctcaggagatcctcctgccttggcctcccaaagtgctgggattacaggcaagagccaccacacctggccttcagccaattttgatacctgcccaaccactctggacgaatagagtcaacaaggaaatgccagggctgattgctttaagcctgagcccctgactgcaacagcagataagatgacatcgcagaccggctggtgtgcttatgctgacttcccgaagggaggggactgtgtgaaggcagcgggttctgggtgggtgctctgtgtgtagag

SEQ ID NO: 42292 - DNA, 530 bp, Homo sapiens
taaaattatctgtatcaataatatattttaatttattcctttttatatcctcagtttttttattgtattcttattgtgtttatgttatcaagttatgttgtttcttaagggagaaagttttgttttttctttttctgtattctttatgcaagacattttcttcaatcatttttttcacaagttttgtaatgytagcttttaatgaatactaattgatttttctataaaattgaaaaattaaattgtatcagtttaaatatatatactttaaagtgtgtgtttattttttaaatatcatatatgaattatttctcagtataatgtttttctcagtgtcttattttactttagtattatttttgctgaattatttttatgcttctaaacatctcagtctttaaactaggaatgttttataataacaaacaatagtttcattctggtagcctttttctttgttatcttaaatttaacacactccttttataatcttatcaacaaaaacaaaaatgcctccaacatttatttat

SEQ ID NO: 42293 - DNA, 474 bp, Homo sapiens
tgcaaaaagttgacgtccaccttgatggcaggttgtaagtttaataacaaactgtccacatcctaaaccaaggtcagcatatgcaaaacgaaactcacaccaagagcaaaaatgggggaagtgtttattaatccttagctgtgattctcagaggacgtttctgtgtgcaatatgcctattctctactaaaacaacttgacttttaacttaaatttaaaactcasaggttttctttcttatgtgcttatgaatgttaattaaaggagacatgaaatagtttgagcaactgtgtacagtctttatttgacaatatttgaaagttgctttctttttatgctggaattcaaattttctacctataagtaacaaatgtggcttgagtctattgtatattaaaaaattgaacatagtattaggctctctgaaaatcactggaaattgacacaattcatgtttcagggtctcagtgattga

SEQ ID NO: 42294 - DNA, 538 bp, Homo sapiens
ccagttgtttatgaaatgtatcttaagaattctacccatcttttgcttaaaacattactgagtttggggtaattaatgtgaattttctataatatcagccaaaaaaattgtgaagggaaatacaggtatcctatgtatgtatatgcaaaatacacagatagaaaaccccataaatacaaaatgcaagtttgggttccaaaaaccaaaagagtctgccaggaaaacgtcagccaagaagatgttctctagcagaatcccagccgttggttcgggcaagggatcagctgctgagattactgggaaggatgttgaagaagggatgtttgcacacaggcccaaggatcatgccacagagaactygctaattgcaaagggaaagcatgttcccagagtcatctggggtcaccagctgatctgcatgataaaacttagcatccctaattgtgggaccacctgaagtgctgtgtccccagtgtgagtcatctgtgcagtatacctaccaaaaatgtttagtctgatctaaccaagcattcatacc

SEQ ID NO: 42295 - DNA, 536 bp, Homo sapiens
tgccttttctcatgcccagttaccttgtttccttgaggagtcttcagatacttagagaaattgtcccatccagtaagataagaggtataacaggtgacatgaggagtcatatactgatttattatttttctcaaaaactgacgtgggaacaggtttagaaagtgtagtgagtagtggatgagaaggccacaggcagccatgtatttccgtgggcttcaccttagctgatggctgccctgggagaggcgatggtgaaggactccagcactgtgagctgctgtcacatcactgccgtgagtgcagaattgcccagagcgtaggggtccgtgctgtctccatgtgtgttctgagccccttccttaaccagctctgatcctggcatgggacatgaactctctcttagccaaaaagtagacttgcatcgattgmctgtaatttgcaacgtaagttagttgttggacaaatgatctatctcacttaccctcatgacaaacctctgaaggtttgtttgcaaataccagtgctctgtcgtgttc

SEQ ID NO: 42296 - DNA, 633 bp, Homo sapiens
tgaaacatatggaatatgtaataaaaaacaaaatcaagcatattgattatagttacctagtgattgcctatttaaatactaaaaatttaagaatttaatttaaaagacatcaacaatrtttatctattagttataaaatatgccaggagatggttatcacaggataccttttaatctacaaatgttgaaattttaagtttaggcaaatcaaggaatgacaatgacatcggcaatgaagttcagatcttcaaacttgcagtatctccatcggagcaattttcaattacaagaagataatgtagttaatgtgcctcttcgtctctccaataatagtaatgcagtttatttttacaaagaagtcataaatgctttccattctatacatggaacattaaataaatgcaaaaaaaacccacctcagctagattgtttcagatagcattttttgacaattgctttatagttccaatttctatgaggcttatatagtaatttattttctttttcttttcttttgagagatggagcctccctctctcagcccaggctggagcacagtggcataatgatggcagttcactgaaacttgaaactccttggctcaaaggatcctgccatctcagcctgctgaga

SEQ ID NO: 42297 - DNA, 491 bp, Homo sapiens
agaataaactgctgttacaataaggaacctgctacagtgaagaaaattagtttctgttttgaacatttggaaatcttgggagcatattttttaagtggtatgctgatatagtgtgcatcagtatgaaacacggaattggaaccagagaggcacaacagagcaggttactgcaacatttgcccatgttttggttattgagtgatactgctattggtgaatcagcctccatgaggaacttatcagttaatcacccaggaatcattttagacttccaaatggcacaccagtctctttactgagtcatggaaagcccctgatcaccaatcaatcacataatcaccmcttaaggtctggaggttcatgatagataggcatatttcttgtctaggtaactggtggagtcagagagatttaaacaaagtcagaacaagtttgtctgatagccactctgaaatcccaacgcagtttatggccataccacatcaacacac

SEQ ID NO: 42298 - DNA, 770 bp, Homo sapiens
tgggagtttaatgcttaattaagatgttaacttgactggattaagcgacacctggatagctgataaagcattattttaatgtatgtttgtgaggctttttccagtggratgaataaagaatatcaccctcatcaatgcatcatccagtcagtttagggcccaaatagaacaaaaatgtagtggaagatttgctctctctgagctgggacatccagcttctcttgcccttagatatcagtgtttgtggttctcaggcctctggactcatactgagacttagactagtggctcccctggtttttggactatcggacttggactgaattataccattggctctccagtgtgcagacagcagatcatgggagttctcagcctccataatcacatgaaccaatttttataataaaccttcttaggtatctatctattcatttatcctactggttctgtttctctggagaatcctgattaacacaccattgtatagtggctcataatttatttaaccagactcccattggtagttccagtttttgactggtacaaacaatgctacagtaaatcttcttgtatagataccttgatggatatatacctgcaaactaaaaacattctcagatctgtgctgaagtgttttgaccccatggattggttgggagccagaggctgattttatagtactaggtcaaaaatgtttttgaaaaataaacaaaagatattaaatagtatatttagtatggcctcattttgaatacatgaataagtag

SEQ ID NO: 42299 - DNA, 770 bp, Homo sapiens
tgggagtttaatgcttaattaagatgttaacttgactggattaagcgacacctggatagctgataaagcattattttaatgtatgtttgtgaggctttttccagtggaatgaataaagaatatcaccctcatcaatgcatcatccagtcagtttagggcccaaatagaacaaaaatgtagtggaagatttgctctctctgagctgggacatccagcttctcttgcccttagatatcagtgyttgtggttctcaggcctctggactcatactgagacttagactagtggctcccctggtttttggactatcggacttggactgaattataccattggctctccagtgtgcagacagcagatcatgggagttctcagcctccataatcacatgaaccaatttttataataaaccttcttaggtatctatctattcatttatcctactggttctgtttctctggagaatcctgattaacacaccattgtatagtggctcataatttatttaaccagactcccattggtagttccagtttttgactggtacaaacaatgctacagtaaatcttcttgtatagataccttgatggatatatacctgcaaactaaaaacattctcagatctgtgctgaagtgttttgaccccatggattggttgggagccagaggctgattttatagtactaggtcaaaaatgtttttgaaaaataaacaaaagatattaaatagtatatttagtatggcctcattttgaatacatgaataagtag

SEQ ID NO: 42300 - DNA, 770 bp, Homo sapiens
tgggagtttaatgcttaattaagatgttaacttgactggattaagcgacacctggatagctgataaagcattattttaatgtatgtttgtgaggctttttccagtggaatgaataaagaatatcaccctcatcaatgcatcatccagtcagtttagggcccaaatagaacaaaaatgtagtggaagatttgctctctctgagctgggacatccagcttctcttgcccttagatatcagtgtttgtggttctcaggcctctggactcatactgagacttagactagtggctcccctggtttttggrctatcggacttggactgaattataccattggctctccagtgtgcagacagcagatcatgggagttctcagcctccataatcacatgaaccaatttttataataaaccttcttaggtatctatctattcatttatcctactggttctgtttctctggagaatcctgattaacacaccattgtatagtggctcataatttatttaaccagactcccattggtagttccagtttttgactggtacaaacaatgctacagtaaatcttcttgtatagataccttgatggatatatacctgcaaactaaaaacattctcagatctgtgctgaagtgttttgaccccatggattggttgggagccagaggctgattttatagtactaggtcaaaaatgtttttgaaaaataaacaaaagatattaaatagtatatttagtatggcctcattttgaatacatgaataagtag

SEQ ID NO: 42301 - DNA, 577 bp, Homo sapiens
tgagataatgagatatacaatcgtgttgtaataacatcagcatactttgaaaattaaatttagaaattcatttctgaaagcatgattgactcacatagttttaccagatcctactaaataagcaaaagctatagacagaattcaacttaatcaccttttaaaattcatattcaccaggtgatttccatcatttaggaagcaataggtcagggttactcagccttggcactattgacattttggactgaataattctttgttatggggggctgtcctgtgcatgtaaagatgtttaatagcatctctggcctctacccactaggtgccagtagtacccctctagctgtaacaaccaaaaatgtgttcagtcagtgcccaatgtcccttgctggataaaatccccattggagaatcactgcaatagagagtttaagcaaaggaaaggtggattgatttctattttagatcctgactgtggcttgtagtcccaaacatcagaactgctctctgtgcttaatcttcttcatatatatatatatatatatatatatatataatwtttatttatttatatata

SEQ ID NO: 42302 - DNA, 577 bp, Homo sapiens
tgagataatgagatatacaatcgtgttgtaataacatcagcatactttgaaaattaaatttagaaattcatttctgaaagcatgattgactcacatagttttaccagatcctactaaataagcaaaagctatagacagaattcaacttaatcaccttttaaaattcatattcaccaggtgatttccatcatttaggaagcaataggtcagggttactcagccttggcactattgacattttggactgaataattctttgttatggggggctgtcctgtgcatgtaaagatgtttaatagcatctctggcctctacccactaggtgccagtagtacccctctagctgtaacaaccaaaaatgtgttcagtcagtgcccaatgtcccttgctggataaaatccccattggagaatcactgcaatagagagtttaagcaaaggaaaggtggattgatttctattttagatcctgactgtggcttgtagtcccaaacatcagaactgctctctgtgcttaatcttcttcatatatatatatatatatatatatatatataatttwtatttatttatatata

SEQ ID NO: 42303 - DNA, 577 bp, Homo sapiens
tgagataatgagatatacaatcgtgttgtaataacatcagcatactttgaaaattaaatttagaaattcatttctgaaagcatgattgactcacatagttttaccagatcctactaaataagcaaaagctatagacagaattcaacttaatcaccttttaaaattcatattcaccaggtgatttccatcatttaggaagcaataggtcagggttactcagccttggcactattgacattttggactgaataattctttgttatggggggctgtcctgtgcatgtaaagatgtttaatagcatctctggcctctacccactaggtgccagtagtacccctctagctgtaacaaccaaaaatgtgttcagtcagtgcccaatgtcccttgctggataaaatccccattggagaatcactgcaatagagagtttaagcaaaggaaaggtggattgatttctattttagatcctgactgtggcttgtagtcccaaacatcagaactgctctctgtgcttaatcttcttcatatatatatatatatatatatatatatataatttttatwtatttatatata

SEQ ID NO: 42304 - DNA, 577 bp, Homo sapiens
tgagataatgagatatacaatcgtgttgtaataacatcagcatactttgaaaattaaatttagaaattcatttctgaaagcatgattgactcacatagttttaccagatcctactaaataagcaaaagctatagacagaattcaacttaatcaccttttaaaattcatattcaccaggtgatttccatcatttaggaagcaataggtcagggttactcagccttggcactattgacattttggactgaataattctttgttatggggggctgtcctgtgcatgtaaagatgtttaatagcatctctggcctctacccactaggtgccagtagtacccctctagctgtaacaaccaaaaatgtgttcagtcagtgcccaatgtcccttgctggataaaatccccattggagaatcactgcaatagagagtttaagcaaaggaaaggtggattgatttctattttagatcctgactgtggcttgtagtcccaaacatcagaactgctctctgtgcttaatcttcttcatatatatatatatatatatatatatatataatttttatttatwtatatata

SEQ ID NO: 42305 - DNA, 608 bp, Homo sapiens
tatttcttaaattatttcagtactttcatgtaagttcttttctgcaatcgctttactatgtttatttaattgtaatgtatgttattgcttcaatctttcactttttaagcttattttaaaatattatattgcaacctcaatctgctttgttgttattttactttacatatatgcatatacaatctcatgacagatcatgatatatcataaatcatctcataatttatccaagaataactgttaacatttgtactgatagtgcaaaaccagttggggttggggggtgtaaagctggcatttcagcaagaatcaagacagtgacaygacacagaactagtagccattgtattcttcactattataatttactaaaatttaaaaaaattaaaattccgtttcttttttctttttttttttgagatggagtctcactctgtcgccaggctgaagtgcaatggcgcgatcttggctcactgcaaccgccccctcccgggttcaagcaatgctcccacctcagcctccctagtagctgggattacagatgccggccactatgcccagctaactttttgtatttttagtagacacggggtttcaccatgttggcc

SEQ ID NO: 42306 - DNA, 616 bp, Homo sapiens
gcctgaaatgcttttccctctcgtgttacatggctcacttccttagctccatgtgaccttttcaggttcctgctaaacagtgagcttcatgaggacaagagtttttctctctcccttcattgctattttctagcacctagaaaagtgactaacacatactctgtcttcaacaaaaatttgttggatgaaaaaaatgaatgaaaaaattttaaaaagtctgtgtgagacaaagtagcaaacttaagaagccaaatttgctcatttctgcttaaacttctgactctgtgacaccatgcagctctctgaaagatagtttgaggacaaaacaggagatagcacatggcccccatgtctcttgcctgagtcaacataattccttaaaaggataaatgatcctggcccttggcttttcttacacataagatgtctgaccgggttagtgatcatacttttacaatctataaccaaaagtactttagtaatctatgaccagatgtactcttacactgaagccttgatttgattctgctataatayaacttctgagccagtttgatgtgattttgcatgtactgaacctccaccacctgtatctaaacagtgggctgaagccctg

SEQ ID NO: 42307 - DNA, 3010 bp, Homo sapiens
aacggttattactgtaaatgaacattccagcttggcttcggttttctacgttcactccatagaacagggagagcgttcttgctgtttttaattctctagagttacatttaaaaagtttaaaaagttgtttattaaataaacatacacagtttaggaaactgctaataattaaactagaaggttaacgtcaaaggcatatatccaaatattttgcaaaacctggtaggcacactcagttgtctctgtatagccaagtattctgcataaacgtgatgccagtaactatgccagtcaaacaaaggatttactgattcaaaaacacatctgccaatttaaatttacaagaactagaaaatgctaaaagagttctgaaatattaacgggtcgtataggtacattgcagcattttttacaaaatgatgacttggctattttaaattttaggtatttctaacagtagatgtgatttctaaatttcagcatgttctcaagtctccagatatcctacatagattggaatgtgccaaaagatattctctggcttcctctctaaccctttccaaaatacaaggtaaataagttattataataaagcaagtttacaagggcaacagagatgagctcctgtttttctgactgaccttctatattatgttttgtgtgagttttctattaaaagtgtaaaatagaaattgagaaataccaaaatgtgataaaaacagctatggtaaggagttatgatataaacacctgtaatatcagaggctgctggaagctatgaaaatgcctggatgtgagaggcacacctggtttcaaatacaagcctgtctttgtaataaccatgtgaccatggatggtgcctcttaaactttctgtctcatttgaaaaatgggagtaatacctacctagccacttgtgatgtcataagaactaaaagaaataatgttaaatataagcctggaacagattaggtatataacaatcattattttctttacccaatcaagaatgacaccaaaaataattctcctgcacttaccctgtagctcccctctctccacaaacttggccttttgttttcaggcttatgaccacgtgctattataattgacataatatacttattggactaattaaatgcatctatcattaaagaacaatgataaagttctatcagtccttccatgtggatatgatatatatatatagaacataagacatgagttaatatactatatatttattaaacacatgtatatctaaggttaaatatataggaatcaaactttttctcaaaaatcactactcagtaatgagatcccaaaaggatattcaacaaaagtactgactgtataagggatacctaaatagggtattacaggatacgacatagtcactctacaatattaaaggatatactgatattcttctattaaaaaaaacccagcattttgccattaaaacaagttcatggcaactggcattattattaatgaagtgttgattggtcacttttcaaacatttcactgtatgaaccatctcatacagtgaacttgtttcaagaaggtttttatttctaaagaccttagagagggctttgtttttaaattacaatttctatgacayttatttacatttttctagtaaatgcataagtaacatttcacatttatttattttgataaatgcaaaatttacatttaaaatttaagttttgaggaaagttatggttgaatgtcagtgcatggttcacgaaaaataatgttaagaactaatcatatttcccttaaaaatagtttcacaaaggtatcacagctttcaaagtctgatcttatgtgggcagcagtgattattttaagtttaacttcttcagcatttgagttggagagcaagttcatcttacaaatgtaaatatttggttttgttaacatatccttcctattttcatttttagcgatatataagcaatacattcacgtgaaacattatttcctatcttaaattttaagctactagacaaagggaagaaactggaaccaactctccagaatttaaatggcaaatgacacagaaggaaagtgagttatcagctgttcctccgggcagttcactttcacttcctcatccagacattttcatctagcccaattaaatgctgaactaatttttcactttttttttggaagttttaacattatgtagacacacgtgtacgtgcaaatatatactttatcaatgttttacattgcttatcttggttgtgggaacttgactatattaggtttcagattataagatgtcacaagctgaaaaaaaattgtcacaataaccactaaatctgcctacttagaaaccagaatttgttttaacagagtacagaggattcctgcaaacagaaaaccttgtgtcttacctttgtttctctttaagattcttttgctttgcttctacatcttccaaagctctctgtaatacatcctggagaaatgcattggttgggagagaacataatgccactgaattaacaaaaagcaagttgatattatcctattatccaaatgtttcaagggtaacaatagctcacattacctaatgcaattctaccatcatagattctcaatacttgataaattattcagttccaatactttagaagataaaccaaatcctaacccactattctcttttgtacatatccagatatcctctctgccttttagagaaagaaagtttattctctataatgacacaacggctttgacaaaaactacatgaaaacttgggtgagttatttagtgtacccaggctctgacttttgtttgtgagaacaataaatgctcaattatgtgaccacgaagtgtttttgcaggaaaaaaaaaaaagataattgagaaattttgttagtagccaacagaaaatatctccttcatatcgaattctggatacctctaatatttctcaaactttccctttataggataccccatgcccagttacctttcttattaa

SEQ ID NO: 42308 - DNA, 3010 bp, Homo sapiens
aacggttattactgtaaatgaacattccagcttggcttcggttttctacgttcactccatagaacagggagagcgttcttgctgtttttaattctctagagttacatttaaaaagtttaaaaagttgtttattaaataaacatacacagtttaggaaactgctaataattaaactagaaggttaacgtcaaaggcatatatccaaatattttgcaaaacctggtaggcacactcagttgtctctgtatagccaagtattctgcataaacgtgatgccagtaactatgccagtcaaacaaaggatttactgattcaaaaacacatctgccaatttaaatttacaagaactagaaaatgctaaaagagttctgaaatattaacgggtcgtataggtacattgcagcattttttacaaaatgatgacttggctattttaaattttaggtatttctaacagtagatgtgatttctaaatttcagcatgttctcaagtctccagatatcctacatagattggaatgtgccaaaagatattctctggcttcctctctaaccctttccaaaatacaaggtaaataagttattataataaagcaagtttacaagggcaacagagatgagctcctgtttttctgactgaccttctatattatgttttgtgtgagttttctattaaaagtgtaaaatagaaattgagaaataccaaaatgtgataaaaacagctatggtaaggagttatgatataaacacctgtaatatcagaggctgctggaagctatgaaaatgcctggatgtgagaggcacacctggtttcaaatacaagcctgtctttgtaataaccatgtgaccatggatggtgcctcttaaactttctgtctcatttgaaaaatgggagtaatacctacctagccacttgtgatgtcataagaactaaaagaaataatgttaaatataagcctggaacagattaggtatataacaatcattattttctttacccaatcaagaatgacaccaaaaataattctcctgcacttaccctgtagctcccctctctccacaaacttggccttttgttttcaggcttatgaccacgtgctattataattgacataatatacttattggactaattaaatgcatctatcattaaagaacaatgataaagttctatcagtccttccatgtggatatgatatatatatatagaacataagacatgagttaatatactatatatttattaaacacatgtatatctaaggttaaatatataggaatcaaactttttctcaaaaatcactactcagtaatgagatcccaaaaggatattcaacaaaagtactgactgtataagggatacctaaatagggtattacaggatacgacatagtcactctacaatattaaaggatatactgatattcttctattaaaaaaaacccagcattttgccattaaaacaagttcatggcaactggcattattattaatgaagtgttgattggtcacttttcaaacatttcactgtatgaaccatctcatacagtgaacttgtttcaagaaggtttttatttctaaagaccttagagagggctttgtttttaaattacaatttctatgacatttatttacatttttctagtaaatgcataagtaacatttcacatttatttattttgataaatgcaaaatttacatttaaaatttaagttttgaggaaagttatggttgaatgtcagtgcatggttcacgaaaaataatgttaagaactaatcatatttcccttaaaaatagtttcacaaaggtatcacagctttcaaagtctgatcttatgtgggcagcagtgattattttaagtttaacttcttcagcatttgagttggagagcaagttcatcttacaaatgtaaatatttggttttgttaacatatccttcctattttcatttttagcgatatataagcaatacattcacgtgaaacattatttcctatcttaaattttaagctactagacaaagggaagaaactggaaccaactctccagaatttaaatggcaaatgacacagaaggaaagtgagttatcagctgttcctccgggcagttcactttcacttcctcatccagacattttcatctagcccaattaaatgctgaactaatttttcactttttttttggaagttttaacattatgtagacacacgtgtacgtgcaaatatatactttatcaatgttttacattgcttatcttggttgtgggaacttgactatattaggtttcagattataagatgtcacaagctgaaaaaaaattgtcacaataaccactaaatctgcctacttagaaaccagaatttgttttaacagagtacagaggattcctgcaaacagaaaaccttgtgtcttacctttgtttctctttaagattcttttgctttgcttctacatcttccaaagctctctgtaatacatcctggagaaatgcattggttgggagagaacataatgccactgaattaacaaaaagcaagttgatattatcctattatccaaatgtttcaagggtaacaatagctcacattacctaatgcaattctaccatcatagattctcaatacttgataaattattcagttccaatactttagaagataaaccaaatcctaacccactattctcttttgtacatatccagatatcctctctgccttttagagaaagaaagtttattctctataatgacacaacggctttgacaaaaactacatgaaaacttgggtgagttatttagtgtacccaggctctgacttttgtttgtgagaacaataaatgctcaattatgtgaccacgaagtgttwttgcaggaaaaaaaaaaaagataattgagaaattttgttagtagccaacagaaaatatctccttcatatcgaattctggatacctctaatatttctcaaactttccctttataggataccccatgcccagttacctttcttattaa

SEQ ID NO: 42309 - DNA, 2171 bp, Homo sapiens
tcatctccctgtggtatatgttttggatcactttactattaataatgtcctataatatatatttatgctaccacatcagaaatattttacatattattaaaaatcttcctcaagatttttttaatgactcttagtctactcacctcataagttaactttttctctcctgttggatataatttatattacctttaagaaggaacattctcaaagatgatgctagcccattttaatagctctattgcaggaatttgatttcaataactaagcagataaatttctccacaatagaaaattacaaaagtatgattacataaccaactcctcccttgatgctccattataaattccttgaaattacactttatataaaaatttgattaaattcaagcaaacatgagaagtttggtataaataagattcatttcaaaaaagtaactgacttaaaactaaattgccttccagaccagttaaaaggattaatggcataataaacacaggatagccaaacagtataaagccaccttgaacaccagagcaagctaagttttgatatgtatactatagattggcctaaaataaagcacattttcaaataatttaattggttttgcatccttgcagcacagttaaaaagtaaaagcttatttcctattcttaacttttgccccaatttctgatgttgtttccttcactgcttccagtctacaggcatcattctaatttcttcccaaccatttcttcactttctttaattcctctgcctgaacctcatatagccatctatgatctctgctctttttccttctttgggtacttactctatttgcctctttttcctttcctttttccctctgctaacatgcccttactgtttcagctggttttagcccacatttgcattggcaaatagcaagagatgaactagataagtaagaagcagatttcaggccaggcaaaggggcagagagcacacaagcatcagatgagcatatgaaaaattcataaagggaaatatgcttttttagcttttgtagattagaaataaaaacagggtttaatggcctcccttgaagagaaatgcagaagttggaggaaaactaaaccttacataccaaaccaaaaaaacaaggattgtaagccgtttgaattgtatttagggaatgggtgatggtgctcaatgcaaaattgactaaccctttctggatagaagaaagaagttaaaggttagatgaaagttcttactgctcatattgttccctcattatccacactatggagaactcctatgtatccttccaaaacaagtttaaagggaacctctcttatgaaatccctctttacttccagtttagctatacagcattgattaacctctcttctataccccagttcccattatatggcatgtactgctttgtgagcctgtttcagtgacatatttatgaaaatgttgcttaatctttccattccaactttcaaggactacttgcctatactttgggggagatggagtgcatttgtggaaactggaatacatactaagttaacattataaaggattgtaatatgtgtttcttatccaaatgcatccctgatattatttatgcaatattttgtcaattatggtcaattctccctgaaattgagacttacaatgctcttcataatgtcaaataatttccaccaatttcttttgtcttctgatctttgtactctctgtttattataatgtcttctcttaaaatgcttttagagataaaattcacgtaatgtaacatttaccatttaacctttttaaagcatacacttcaatggtttttagtatatttcacaaaattgtgtagccaccaccactccagaattttttcctctaaagaaactccatacccattaagcaataactctccattcccctctgtacctggctcctaggaacctctaatctactttccgtttctatggatttgcctrttctgggtatttcatatacatgaaggcatagaaccttgcaagtcttttgtatatgacttctttcacttagcatattttcaaagttcatccaacttgtaacacgtattagaacttcattcctttttatgcctgaataatattccatttatggttatgccagattttgtttaatcgaattatcagttgatgaacatttg

SEQ ID NO: 42310 - DNA, 1918 bp, Homo sapiens
aggaggagataattttaatccgactaatagcaaagtgacatgaactcaaagagggctgtagcctactggttgacctcgtgattggaaattagctcatgaattaatttttgccatagtgacattggatatattcatttgcgcctttcttacttataacttctaatttttttcttaatttcctgactattaaaagtttggtatttctgagaatttccttctctttcctccagctccccaatgatatccaataaatattccagttcatataaaaaaagagtaatttttgcacttagtgagtgcaatttaacttaacatcctttttaaactgagatagattccatataccrtcaaattattctcctaaagtctattggtcagtggattttactacatttacaaagctgtacaaccatcaccactaattctagacccagcaaatgcagtagtttccctgcttcatgcctgtgaaatgtgttgcttttccttagtgtcctcatgagggagcctcagagagtggagaaagtccaggttcatcacgacagcacctcggctgtgaactcacatgaacaggtgagtaaattggaaaagcacaacatactggctagatgacagcttgagttatattttcttcttaattcctggggtagctgagcatagaaatttcagtttagttacataaactgtagcatgattttttactcctcttttaatatcaattatcaaatatttagaaaaatggaagaaataatctacgcttcacagaaactaggataaaaattaaaaggcccttattcccctctttttccagatgttagctatcataacccataaggaaatattaaaaggctatgacctaggctgactaaatttatagaagcaataaaaagaagcccaacatatgcataaataccagctttggtgggtgggagtaagatagtgggggataagagagccctagaatagcagatactaaaataaccatggactgtcaagcaaaagggccaccaagaagcaagggtgccttgggaagggaagtgtcctggggtacaagagtagggtctgcaggataaggaagggagcgcagctatctctcccctcttcctgctgcctgattaccccgcatccctctagaaattggtgctgtggatccaggcttccatctgtttgcattcagatctgtgatcttgccaagtctaatctgaccaaattattggcagctttgcatcgtacacaagtgactggggacctctcctctgaatccagagatgaagtgagccacttggaagaatcctgcagatagtaaaacttctgagcatttatttccccaatcctcttggaggctattcagccagatactgtgcaatacatccacctgggaggctgcagcagaggagagatccacattgataaaacacacagaaaggggattttgatctcaatataagggaacttggagagttgtaaaccatggcagactgtactgtttagcttctgaggcataagagccattacttcaagttgcttgttcaatacgctgagctacagggtcacgccagacttcaggaagagccagaacactcagaacctagactcttactctaaaactaggaactccagctgctgctgtgtgagagctgcttcagaactgtgtgtcatgttctgggcttttctcttgcagggattgcaaggccaggaccctgaaatttgcccaactcggagaccctgaggatgccccagggacctgggtccttcttcctcaaaacagaagggagtttcaaatgagattggaccatgacaacagtgactatcattatctagatgacagtaggtttaaggaaaatattcatttactggttttcaaacttcatgaaagagaaagcatgaattgcagactcagtgtttaaaaatcacatgcatt

SEQ ID NO: 42311 - DNA, 1918 bp, Homo sapiens
aggaggagataattttaatccgactaatagcaaagtgacatgaactcaaagagggctgtagcctactggttgacctcgtgattggaaattagctcatgaattaatttttgccatagtgacattggatatattcatttgcgcctttcttacttataacttctaatttttttcttaatttcctgactattaaaagtttggtatttctgagaatttccttctctttcctccagctccccaatgatatccaataaatattccagttcatataaaaaaagagtaatttttgcacttagtgagtgcaatttaacttaacatcctttttaaactgagatagattccatataccatcaaattattctcctaaagtctattggtcagtggattttactacatttacaaagctgtacaaccatcaccactaattctagacccagcaaatgcagtagtttccctgcttcatgcctgtgaaatgtgttgcttttccttagtgtcctcatgagggagcctcagagagtggagaaagtccaggttcatcacgayagcacctcggctgtgaactcacatgaacaggtgagtaaattggaaaagcacaacatactggctagatgacagcttgagttatattttcttcttaattcctggggtagctgagcatagaaatttcagtttagttacataaactgtagcatgattttttactcctcttttaatatcaattatcaaatatttagaaaaatggaagaaataatctacgcttcacagaaactaggataaaaattaaaaggcccttattcccctctttttccagatgttagctatcataacccataaggaaatattaaaaggctatgacctaggctgactaaatttatagaagcaataaaaagaagcccaacatatgcataaataccagctttggtgggtgggagtaagatagtgggggataagagagccctagaatagcagatactaaaataaccatggactgtcaagcaaaagggccaccaagaagcaagggtgccttgggaagggaagtgtcctggggtacaagagtagggtctgcaggataaggaagggagcgcagctatctctcccctcttcctgctgcctgattaccccgcatccctctagaaattggtgctgtggatccaggcttccatctgtttgcattcagatctgtgatcttgccaagtctaatctgaccaaattattggcagctttgcatcgtacacaagtgactggggacctctcctctgaatccagagatgaagtgagccacttggaagaatcctgcagatagtaaaacttctgagcatttatttccccaatcctcttggaggctattcagccagatactgtgcaatacatccacctgggaggctgcagcagaggagagatccacattgataaaacacacagaaaggggattttgatctcaatataagggaacttggagagttgtaaaccatggcagactgtactgtttagcttctgaggcataagagccattacttcaagttgcttgttcaatacgctgagctacagggtcacgccagacttcaggaagagccagaacactcagaacctagactcttactctaaaactaggaactccagctgctgctgtgtgagagctgcttcagaactgtgtgtcatgttctgggcttttctcttgcagggattgcaaggccaggaccctgaaatttgcccaactcggagaccctgaggatgccccagggacctgggtccttcttcctcaaaacagaagggagtttcaaatgagattggaccatgacaacagtgactatcattatctagatgacagtaggtttaaggaaaatattcatttactggttttcaaacttcatgaaagagaaagcatgaattgcagactcagtgtttaaaaatcacatgcatt

SEQ ID NO: 42312 - DNA, 783 bp, Homo sapiens
gtgggtgaccagagaagcaaggggtaaaactccacagggagaaggaattctctagctgaactttgtaaaaaattgaatacggtgagaagcctcccgccagcactcacaggagggcgcaaattaggtgtgaaaacttcacaggtcrgggaagaactaaagccctttttttttcacagctgggcagcagatagcctcaggcaagttttcaagcctgtctcaccctccgtctggacacagactcagggctgctgtggggagcactgcgggagtgagactggcccttcggtttgtggtttgtgaagaagctgggtgaggacagtgactgccagcttttccccactttcctgacaacctgtatgacagcagatgagccgtaatcctcctaagtacacgggaataacacccctatcccccacagcatcaacaagacacgcccaaggagagtctaagctcagacacgcctagccccactagcacctgatggtccttccctatccacccaggtagtgaaagacaaagggtatataatctttgaagttttagagccaagtccaccaccggttcctctccaactactatagctgatgcattctggaaattgccacctcctgacaagagaccaaccagcacaaaaatagaacattaaaccaccaaagctaagggtcctcatggaatccactgaaccctctgccacctccaccagaaaacgtgctggtatttatggctgagagatccagagacagttcacatcacaggactctgtgcagacaacccccagtacca

SEQ ID NO: 42313 - DNA, 783 bp, Homo sapiens
gtgggtgaccagagaagcaaggggtaaaactccacagggagaaggaattctctagctgaactttgtaaaaaattgaatacggtgagaagcctcccgccagcactcacaggagggcgcaaattaggtgtgaaaacttcacaggtcagggaagaactaaagccctttttttttcacagctgggcagcagatagcctcaggcaagttttcaagcctgtctcaccctccgtctggacacagactcagggctgctgtggggagcactgcgggagtgagactggcccttcggtttgtggtttgtgaagaagctgggtgaggacagtgactgccagcttttccccactttcctgacaacctgtatgacagcagatgagccgtaatcctcctawgtacacgggaataacacccctatcccccacagcatcaacaagacacgcccaaggagagtctaagctcagacacgcctagccccactagcacctgatggtccttccctatccacccaggtagtgaaagacaaagggtatataatctttgaagttttagagccaagtccaccaccggttcctctccaactactatagctgatgcattctggaaattgccacctcctgacaagagaccaaccagcacaaaaatagaacattaaaccaccaaagctaagggtcctcatggaatccactgaaccctctgccacctccaccagaaaacgtgctggtatttatggctgagagatccagagacagttcacatcacaggactctgtgcagacaacccccagtacca

SEQ ID NO: 42314 - DNA, 909 bp, Homo sapiens
atccacatctgcagactatacaaagacaaacaacacagattaaaagcacaatcatcattgaaattacagagcttccaagtatttttatccattttaatgggttactagctgctaatctgtctgcagctcctttaaacactccagttcctggcattaaggccatgtgtgcttgagatgttttaaatatttgttcttytaattttgccatatccaaaaacaagtttgtagtgtgtccttctagatacttttttattctttcccaaattttgatcttattaagagctattaatagtttccacaaatccttcatgtttacctcctacaataagccatatcatttgaggttgaggtgccactatactgccatggtttcagataataggaacttttgccatacttcttatcatttctaccatctgaccattttgtttagatcagctgagcatagtgtggccatggcatgcagactgagaggtgcaatttaggttaaacatccctttaggggaccaatcaataaagattccataggaatcgttatgcagcccctctgcctgttctgtaaagcaatcttcctaaacaagtacattcattatttctggccaggttctattttgtttacaaataggttttttaaggtggtatgcctcaattataggaacaaatttattagggtaaatactgagatcagaaagcatgtgtaactgtgtcatagagtgattatattcaggcattattaccatccaggattgatatatatgcccagtaagtataattgttctctgtgtcagcccttgttgaaggaatactcatggcagggtgataactgctatcatagctaccattaaattactcattgtgactggttgtcctgcttttctcaggttttcttccacaatctgtgacagcttc

SEQ ID NO: 42315 - DNA, 567 bp, Homo sapiens
atttctcatcttggttctcctgcttactagatatgaccttggtcaaaccacttagtataaacctcatttcctcacctgtaaaaatagaaatactcatagctaatttggagggttcttcagaactcaactcaccttttataaagacattttggtaaaatgtctagtacatggtaggtattcaatgattaatagcagttattattaatggaagagaggacaagtggacaaaaaactaaaatacacagacagtatcttattatgtaggagagcatctaacagatgtacactgctgagtctcctggtaaaaaactgcttgggctatacttgcatgtgaatggatctaggagaaaacacctcctaagggagatggtttcagatctgaatcttgaaatatgagaagtgccaggggaaaaaaatgagasaaaaggaaatatcagatattggtgtccctccctggtcccattcatgaccttgtaggtaggatgatgactccagcagttctgtgctgtatttctagaacactgctattagcctttaactttcctccccttcatgtttctggcttca

SEQ ID NO: 42316 - DNA, 499 bp, Homo sapiens
ctcgaacagagtggaatggaaagtgttgagatagaatggaatggactcmtttggaatggtgtagtatgcaatgcaatcgactggcagggaatcaaaaggaatgtaatcgaatggattggactggaatgcaatggactcgaatagattgcaaacggaatgcaaaggaatggaatggaatagtatggaatggaatggaaaggaatggagtggaatagactagagtggaatggaatggactggaaagcaatggactggaatggaactttcttgaatggactggaatcaaacggaatggaatgcaatgcaatcaaatggcatggaataaaatagaatgaaagagaatcaaatggaattgaatcgaatggaatcgaatggattggaaaggaatagaatggaatggaatggaattgactcaaatggaatggactagaatggaatggattcgaatggaaggcaaaggaatggaatctattggaatggactgtaatggaatggaatg

SEQ ID NO: 42317 - DNA, 529 bp, Homo sapiens
cagtccattccattcgagtccattccaatcccttccattccattccattacagtccattccaatagattccattcctttgccttccattcgaatccattccattctagtccattccatttgagtcaattccattccattccattctattcctttmcaatccattcgattccattcgattcaattccatttgattctctttcattctattttattccatgccatttgattgcattgcattccattccgtttgattccagtccattcaagaaagttccattccagtccattgctttccagtccattccattccactctagtctattccactccattcctttccattccattccatactattccattccattcctttgcattccgtttccaatctattcgagtccattgcattccagtccaatccattcgattacattccttttgattccctgccagtcgattgcattgcatactacaccattccaaaggagtccattccattctatctcaacactttccattccactctgt

SEQ ID NO: 42318 - DNA, 621 bp, Homo sapiens
agaatggactcgactggtacggactccaatggaatggaatcgaatggaagggaatcgaacggaatggactcgaagggaaaagactgcaatggaaaggtctcgaatggaatggaaattaatggaatggaatggaatcgaatgaaatggagtcaaaaggaatggaatcgaatggcaagaaatcgaatgtaatggaatcgcaaggaattgatgtgaacggaacggaatggaatggaatccaaaggaatggaatagaatggaatggaatcgaatggaaaggactcgaatggaaatcactcgaatagaatgmaatttaataaaataggatcaaatgtaatggaatggaatggaaaggaatcgaaacgaaaggaatggagacagatggaatggaatggaacagagagcaatggtatagaatggaatggaatcatctggaatggaattgaatggaatggaataatatgaaatggaatggaatggaatggaatggaatgcccttgaattaaatggactggaatggaatggactcgaacagagtggaatggaaagtgttgagatagaatggaatggactcctttggaatggtctagtatgcaatgcaatcgactggcagggaatcaaaag

SEQ ID NO: 42319 - DNA, 621 bp, Homo sapiens
agaatggactcgactggtacggactccaatggaatggaatcgaatggaagggaatcgaacggaatggactcgaagggaaaagactgcaatggaaaggtctcgaatggaatggaaattaatggaatggaatggaatcgaatgaaatggagtcaaaaggaatggaatcgaatggcaagaaatcgaatgtaatggaatcgcaaggaattgatgtgaacggaacggaatggaatggaatccaaaggaatggaatagaatggaatggaatcgaatggaaaggactcgaatggaaatcactcgaatagaatgcaatttaataaaataggatcaaatgtaatggaatggaatggaaaggaatcgaaacgaaaggaatggagacagatggaatggaatggaacagagagcaatggtatagaatggaatggaatcatctggaatggaattgaatggaatggaataatatgaaatggaatggaatggaatggaatggaatgcccttgaattaaatggactggaatggaatggactcgaacagagtggaatggaaagtgttgagatagaatggaatggactcstttggaatggtctagtatgcaatgcaatcgactggcagggaatcaaaag

SEQ ID NO: 42320 - DNA, 621 bp, Homo sapiens
agaatggactcgactggtacggactccaatggaatggaatcgaatggaagggaatcgaacggaatggactcgaagggaaaagactgcaatggaaaggtctcgaatggaatggaaattaatggaatggaatggaatcgaatgaaatggagtcaaaaggaatggaatcgaatggcaagaaatcgaatgtaatggaatcgcaaggaattgatgtgaacggaacggaatggaatggaatccaaaggaatggaatagaatggaatggaatcgaatggaaaggactcgaatggaaatcactcgaatagaatgcaatttaataaaataggatcaaatgtaatggaatggaatggaaaggaatcgaaacgaaaggaatggagacagatggaatggaatggaacagagagcaatggtatagaatggaatggaatcatctggaatggaattgaatggaatggaataatatgaaatggaatggaatggaatggaatggaatgcccttgaattaaatggactggaatggaatggactcgaacagagtggaatggaaagtgttgagatagaatggaatggactcctttggaatggtstagtatgcaatgcaatcgactggcagggaatcaaaag

SEQ ID NO: 42321 - DNA, 579 bp, Homo sapiens
gaatggaattgaatggaatggaattgaatggaatgggaacgaatggagtgaaattgtatgcagtagaagggaatagaatggaatgcaagcgaaaggaaaggaatggattggaatggaatggaattcattggaatggaagggaatgtagtgtaatggacaggcctggaataaagtggaatgctacggtctcgaatggaataaaaatgtatggaatggaatgcaatgaaacggaatcgaatgtcatagaatgtaatggaatgcaamaaaatggaatccaaaatcattgactggaaaggctgggtgtcgaaaggaattgactccaatggaatggaatcgaatggaatggaagtgaatagaatcgaactaaatcgaatggaatggaattgataggaacggaatggaaaggaatgcaatgatttggcatggaatggaatcgaatggcatcgaatggaatggtatggaatgcaatggaatggaatgtattagaatgtaatgaactttaatggaatgtactcgaatggattcgactggaatggaatgttctggaagtgaatggactccaatggaatggattcaaaa

SEQ ID NO: 42322 - DNA, 579 bp, Homo sapiens
gaatggaattgaatggaatggaattgaatggaatgggaacgaatggagtgaaattgtatgcagtagaagggaatagaatggaatgcaagcgaaaggaaaggaatggattggaatggaatggaattcattggaatggaagggaatgtagtgtaatggacaggcctggaataaagtggaatgctacggtctcgaatggaataaaaatgtatggaatggaatgcaatgaaacggaatcgaatgtcatagaatgtaatggaatgcaacaaaatggaatccaaaatcattgactggaaaggctgggtgtcgaaaggaattgactccaatggaatggaatcgaatggaatggaagtgaatagaatcgaactaaatcgaatggaatggaattgataggaacggaatggaaaggaatgcaatgatttggcatggaatggaatcgaatggcatcgaatggaatggwatggaatgcaatggaatggaatgtattagaatgtaatgaactttaatggaatgtactcgaatggattcgactggaatggaatgttctggaagtgaatggactccaatggaatggattcaaaa

SEQ ID NO: 42323 - DNA, 1774 bp, Homo sapiens
ggaagacggccacacccaaggggaccatctatagacccaccctcaggggcttattctctttcccagggatgttccttgctgagaaaaagaattcagtgatatttctcccatttgctttttaaagaagagaaatatggctctgttccacccggctcaccggtggtcagagtttaaggttatctctcttgttccctaaacattgctgttatcctgtttttttcaaggtgcccagatttcatattgttcaaacacacatgctctacaattcatgcagttaacacaattatcacagggtcctgaggcaacatacatcctcctcagctgatgggattaagagattaaagtaaagacaggcataggaaatcacaagggtattgattggggaagtgataagtgtccatgaaatcttcacaatttatgtttagagattgcaataaagacaggcataagaaattataaaagtattaatttggggaactaataaatgtccatgaaattgtcacaatccacgttcttctgccatggcttcagccagtccctccatttggggtccctgactccctgcaataggcagctacccagmaatgttatctatacttatgacatctgctactatgcatgcactgatgaatcacatgtctctccatccaaccaaaacttttattggaatgcctgcatttttttaatgtctattgaaaagtgtatattttgggtaccacaagcaccacaacatattctgtaaaaatataatcatctttacctaaactccatagcaactagatcttcctgttgtcattatcttctaattgaataaaatcatcaggaacccagatatccaagctagaaggataaaatatcttcttttcaacccttcattcactatagcccagagatagaatccatttctttatttcatttccagcactcttgagaaggtttcatcgtatctccttggactgttttaatagctgggaactgtctttcctgccccctatttggtttccctacaaactgtccttcacatttttgccagaaggatagttgtaaaatgcaaatcccacattttcactactctgttaaaacatataactctaaagcagcattgtcaagtagaaatataattctagccacatatgtaattttaaatttttcagtaatcagttaaaaaaagtaaagacaggtgaaattcatgttaataatacagtatattttacttagctcaatatatctaaaacgttatcatttcaacacgcaatcagtaaaaaaaaaaagaggtattttacaattttttttgtagtaagcttttgaaatctggtgtgtattactttacatttatagcacatcttaatttggtttagccacattttaagtactcattgccacatgtggatcgtacctcccatactggtctgcacaggactaatacataaaaggtccaaattcgtttgtctggtttatgagggtccttgattatctgcttccattcctcattttcagcaccatctccaatcaacttctcaacaaactctaagtcctagctctgctgaaatttttcaagatctactaagttcttagcatctatgctttcgccaatattatcctcccctttacttggaagagtgccccatcttctctacttggtgacttgattgttctttacaccactttctctgcaaagtttttccaagtccctactactgaagacccagatgcccactcttcttgtacatgtcccagttcatatatggtgtgaatggaagttttgttttgtccc

SEQ ID NO: 42324 - DNA, 571 bp, Homo sapiens
ttttttaaatctagttttctccacaaatagcttgagtagcatagctctaaactagagatttttaaaccttgttgtacattagactcgcttgaggaacttggtaaaaagagatacacctaagccccatcttacttcatggagcctgggcctctgtattttttattgttgcactaggtaattctaattcacaccaaatgttgagaaccaattgctagactaatctctacacaatttcaaaattccrgtttcacctcttctaggaagccatcctgatgtcccactcagcaaagccttcagagccaacagagttgacacaccaagctttctaagacctatttacaggacgaaaaaaatacttaacacatgataactgttagtccattactaaacttcatcttttcacccacagattgacatttgagtagtgaaatgagggaggagcacgttttgatggtactcaccagcaggaatataaaagtccttttgcaaccagccagctaaatgggcagaaaacaatgtaatatgtacattaagtacatatttgactcccactggtaaagtataaatattt

SEQ ID NO: 42325 - DNA, 743 bp, Homo sapiens
ttgcctgtcaaggcagtgaaaatacagcaccttgatcagtcagcacttaagtcctgattacctgataatagtcaggctatatccctgtggtcacttcatctggtctgattatcattacaaacaaaaaaaaaaatcagtaaggttctggatctcctagttgtataaagaatatagatgattatgatactcatgaatattctataaaatacttgggtcttatcagagttcattatacaggtaaaactttgcctcctatgggcacactatccagcaattaggattatcactctcacacatgcacaaagcccactggtgaggttctgaatctcacatgtgcaaacagtccacggttggaattgggactgttctatgtggatctggcaacagtttggaaggtgactcatttctggacccaactcatagtcatgtgaatgtctctcatgcctggtcccaggtagtagaagagacgttgattcttgtatctaggcttactgcaacagataagatcctgggctttccacttttacagaygtctcagagaattacaacactcatgcatattgaataataccctaaggtggtacagagagtgtgaaaagagtgcccagctcaaaattttgattgtgactcttatatgcacacacagcccacagttaggattaaatgtgaagagaacccactcaggaggtcctggatctcacttacagaaatagtttacagttagaattgtgactatcatatct

SEQ ID NO: 42326 - DNA, 620 bp, Homo sapiens
cattcaggagcacttttatcacccaaatatagctattggggaaccggtgggctaaaatagtggcaacattttctagactccaattttcccattggtaatttgcaggatgacgagtcataatttcacggtaatcctgcacattcccggagaaagagaggacgtggcggctgcgrctcttccttcacccactccccggagatgtcccgccgctccagtcccgccttggtcgccgccagcaggagcaactccgtgctacgcggcccatcggctccggggatggcgaacagccacaggctctgaggcggcgcctggcgacggattgggagcatcgtgcaccgccgctgctgctggtttcatggttctgtcctgagagcaggacaaggcatctccaattccaacgtgaggcagcaggagcagcagccgccgcgaccgcaaagacccgagctgtttggaggtggagggtagggagtcctgaggttgggactgctgcaggacgcccaactgtcggggccacggccaggccagaagccagtgcggggcaaccacttcagaggccgatgtcagcgcgcagcgctggatttcattatttgtgtggttaaatctcattccattgtgtgtat

SEQ ID NO: 42327 - DNA, 999 bp, Homo sapiens
attggtaaaggctcctagctttctagttctctaccgtgtacctgggtctgctgcactcttgaccactgcctggctggcaatgtggatattttagtttgaattccctggtttaaatgatgctgatatgatcaagtgagaaatgatttgccatgagacctatagttctctaaaccaagttttcccaaccttggcactattgacattttgagctagataattcttttctgtaagggctaccaaagtattctagagtgtttagcaatattccaggcatctactcgctgaataccagtattataaccccacccccacaattstaacaaccaacaacgtctctgtcaagtgagaagtctctgtgctaattttacaatttatatgcttctaactatttttaaagttatctaaaaactaaagaaatggtgagcaagtattgttgactgggtgcttattcaaagtagcccatttctcagcctcagtttctctaagagaaaaatgggaatagtatatacctcataggatcgttttgtggacgacataaaataaacagtgcgaagagcttagtgctccactttgggcaagggaggtattgaattgttcctcaatgataaaagtaacttagtttaggaagttttcttcataaacttagagtgagttttatttttcttcaccatcttctttcctgttcattgctcattaattactaacaacttgccgcagggtgatcccatctcagagaggaggacctgaaaagtgctagtgatactcaaacctgccattggggaagcactttatttgccacaccatgagtatgctttcttcctttagaatagaatctcctgacgctcattaggacaagcatcccattcttcttatagattgtagaaaggtacattggactccgcacaagcatcactaatttgaccattttgattgaattggacagaaacgtaagtgactggatgatgtcaaaaagctgtggaattcataggtgtatttgct

SEQ ID NO: 42328 - DNA, 1198 bp, Homo sapiens
tgtccccaggaccctgtgagagggaagcccaatgtcccaccaggttggcagggctggggaagggcaagtgttatggtagccccaagaaaaaaaagaggcagcagagggagcaggccagcgctcacatggaactcatgccactgcctgagtgacgggagggaggagtgcatgccagtgacatcagggggcagagaggcgcagttccagggcggctttccccctcacttcctgccatgttactctgatcgcctccaggtgagcctgcccactttgtgcccaggggcctgtagaaaaccacagctccccatggttacagccccaggagtggggcagagcagggaggagtcctggacagaggagaggcaggggcaggagggagtgggcctcaaactccaggagggggcccttctcatgggtcctgctttctggcttctccttccttacccctgggctgatcactcagggaagaactgagacaaagtttctcaccctcaggcccagggggtttaattactgggcccttagggaggtgtgagccccctgaaaggatgcaaggttttgttttgttttgttttttgagacagagttttgctcctgttgcccaggctggagtgcagtggcgtgatctcaccacactacaacctgcgcctcccgggttcaagtgattctcctgcctcagcctccggaggagctgggattacaggtggctcccaccacgcctggctaattttttgtatttttagtagagacagggtttcgccatgttgggcaggctggtcttgaactcctgacctcaggtgatccgactggctccgcctcccaaagttctgggattacatgagccactgtgcttggccaygatgaaaggttttgtgtggagagcatgtacatgcctttctgggaaaacagtccacagctcttattctcagcaggcttcatggtcaaaaaaggttagaactcttgctacagagctgtggaagcagctaggtgaggggcctgccaagggcactctgggcactacctgggcactctcgagcccatcatcccctcggcaggttgcactgcttggtatttgcagagctgagggggtggggcatgtggggactgtgaaatcaccctgagatgacccacagtcctcagctgggaagtgagcggtgcatctcctgcagcatcctccgtccctagagccatggggcca

SEQ ID NO: 42329 - DNA, 1198 bp, Homo sapiens
tgtccccaggaccctgtgagagggaagcccaatgtcccaccaggttggcagggctggggaagggcaagtgttatggtagccccaagaaaaaaaagaggcagcagagggagcaggccagcgctcacatggaactcatgccactgcctgagtgacgggagggaggagtgcatgccagtgacatcagggggcagagaggcgcagttccagggcggctttccccctcacttcctgccatgttactctgatcgcctccaggtgagcctgcccactttgtgcccaggggcctgtagaaaaccacagctccccatggttacagccccaggagtggggcagagcagggaggagtcctggacagaggagaggcaggggcaggagggagtgggcctcaaactccaggagggggcccttctcatgggtcctgctttctggcttctccttccttacccctgggctgatcactcagggaagaactgagacaaagtttctcaccctcaggcccagggggtttaattactgggcccttagggaggtgtgagccccctgaaaggatgcaaggttttgttttgttttgttttttgagacagagttttgctcctgttgcccaggctggagtgcagtggcgtgatctcaccacactacaacctgcgcctcccgggttcaagtgattctcctgcctcagcctccggaggagctgggattacaggtggctcccaccacgcctggctaattttttgtatttttagtagagacagggtttcgccatgttgggcaggctggtcttgaactcctgacctcaggtgatccgactggctccgcctcccaaagttctgggattacatgagccactgtgcttggccatgatgaaaggttttgtgtggagagcatgtacatgcctttctgggaaaacagtccacagctcttattctcagcaggcttcatggtcaaaaaaggttagaactcttgctacagagctgtggaagcagctaggtgaggggcctgccaagggcactctgggcactacctgggcactctcgagcccatcatcccctcggcaggttgcactgcttggtatttgcagagctgagggggtggggcatgtggggactgtgaaatcaccctgagatgacccacagtcctcagctgggaagtragcggtgcatctcctgcagcatcctccgtccctagagccatggggcca

SEQ ID NO: 42330 - DNA, 542 bp, Homo sapiens
agaacaaacaaacaaggtcctggttcaagaatgccagaatgtaaatacacagctaatttagctgtggtcagaagcctacagtgtggactaaaaacttgaagcctcctgcaataacagagaaggaaagaaccactaacccaaggacgaatttgactagcaagtcctgaatttagtccttttgtgttaaaaaaaaaaaaaaaaaaaagatctcagctcttctagcaaataatgttacctcataaaaactcacttaaattatgaaaaagaaaaacctgttakgtgtttctaaaatactaaaaaccacaaacagaagatatcacacgatactcaatttttgagactttgtagcttcattaaaaatttttatcatttcttttgtataatatagcatcatttttaaagtaacccatgagaaacagcttctgtctccaaatgtttctcctctccccatagcataatgtcttcctgttagtttttgtacagaaccatattatcaaaggcagagtgtaactacatttgggtaagtgtgattaccaaattca

SEQ ID NO: 42331 - DNA, 542 bp, Homo sapiens
agaacaaacaaacaaggtcctggttcaagaatgccagaatgtaaatacacagctaatttagctgtggtcagaagcctacagtgtggactaaaaacttgaagcctcctgcaataacagagaaggaaagaaccactaacccaaggacgaatttgactagcaagtcctgaatttagtccttttgtgttaaaaaaaaaaaaaaaaaaaagatctcagctcttctagcaaataatgttacctcataaaaactcacttaaattatgaaaaagaaaaacctgttaggtgtttctaaaatactaaaaascacaaacagaagatatcacacgatactcaatttttgagactttgtagcttcattaaaaatttttatcatttcttttgtataatatagcatcatttttaaagtaacccatgagaaacagcttctgtctccaaatgtttctcctctccccatagcataatgtcttcctgttagtttttgtacagaaccatattatcaaaggcagagtgtaactacatttgggtaagtgtgattaccaaattca

SEQ ID NO: 42332 - DNA, 542 bp, Homo sapiens
agaacaaacaaacaaggtcctggttcaagaatgccagaatgtaaatacacagctaatttagctgtggtcagaagcctacagtgtggactaaaaacttgaagcctcctgcaataacagagaaggaaagaaccactaacccaaggacgaatttgactagcaagtcctgaatttagtccttttgtgttaaaaaaaaaaaaaaaaaaaagatctcagctcttctagcaaataatgttacctcataaaaactcacttaaattatgaaaaagaaaaacctgttaggtgtttctaaaatactaaaaaccacaaacagaagatatcacacgatactcaatttttgagacttkgtagcttcattaaaaatttttatcatttcttttgtataatatagcatcatttttaaagtaacccatgagaaacagcttctgtctccaaatgtttctcctctccccatagcataatgtcttcctgttagtttttgtacagaaccatattatcaaaggcagagtgtaactacatttgggtaagtgtgattaccaaattca

SEQ ID NO: 42333 - DNA, 520 bp, Homo sapiens
agggatctaggttgtgcactccttatgagaatctaatgcctgatgatttaaggtgggacagtgtcatcccaacaccatgctcccaatccctccacccctccacccactgtctgggaaaaaattatcttccacaaaactggtctctggtgccagaaatgttggggacccctacatttacctccctccacacttaacgtgcttctcttggtgatgtattttagttctttatatatttaagaccccagaaagtaaaaagttgtttcacacattcartatttatttagttttatacacatacttaccctttccattgcctttcaatgcctttctgcacctccagctgtggtcagtgatcattttccttctgctccaacaacaccctttagtactttcctttcatacttttggtacttttcattggtggcaaattctattttcctttgtctggacgtgtctttggaaggatatttttgcctcatagtcttctaggttgactattattttcttgaagctctttgaa

SEQ ID NO: 42334 - DNA, 1039 bp, Homo sapiens
agagacctctagagagaggaggtggaattgcacaccctgggaaagaggaaggtgtgagttaccatccctgggggaggccccacaggtgtcagccctcagggggcaggggactgacaggggacagagctgacagcaggggtcatatacaagagttgggttgggggcctaaggaaacttccccaaaggtgagaaccatgttgggataaaggacagaggaggacctatatgatatggagagaagtgaaatacagctaagtggggtcctcacctctaaagaggccaggggccgggcacatctgtaatcccagcactttgggragccgaggtggacagatcacttgaggtcaggagttcaagaccagcctggccaacatggtgaaaccccgactcttactaaaaatacaaaaattagctgggcatggtggcgcaagtctgtaattgcagctacttgggaggctgaggcagagaatcgcttgaaccaaggagacagaggttgcaatgagccgagactgcgccactgcactccaacctgggtgagagagcaagactccatctaaataaataaataaatggggcagaaaacaggttatgccaattacaggttgttgtagattcccagtccctcctcctcatgccggatagctgggggatcgacactgcagccgcggtgaggccacggcaggtcaggaatgaccacacggacatccatcttgttgtccaccactgacaatgagacggatgaccaggctcccgagtgccgagtgccgtagtgctctgcggccaggaaatggccaggggccagggaccctccttatctggaatcctcccactcggccctggggtggccacttgtgccgagacagcccaaggttgggggcgtggcatcaggcctccccaaggcctttactgctgcagagccacagccctcaagaaacaaggcccctggaagattccttccctaagcagaagctgctggaggccattttaaggcaatatgtgagctggcgtgtcgcctgcaactgagttcagaggtgctaaa

SEQ ID NO: 42335 - DNA, 568 bp, Homo sapiens
tgcccttctagtatggctgtttgcactaagctaactctgagtctggtcaaataaagacagtgagctgtcataaatagtgaacattctttgggaatgaggcatgtgatggatgtgatgggctaaattcagttctacctcttccaatggctcatagtctaccatagttgcaagaatgttggttttcaaggtcactaaagagctggaaagggagataaaatttggacatactaaaccatcacaaagcttattgtttttataggattcaactttttttctttttttttttttaactaaacacttctcagattgtggcagacttttgcatactttccagaatttttaaaaagttgattttgacaggtttttttttgaggtttttttggggccaatatccctgttattgttatggaagggtaggttttcagagatctttgttcttccattccaatagttgaamctgattcttatctttttctttagaaaattttctagtgtcattcagatgtggctaggctacttctcaattcttgtaattagcattattattgtagtaatgtagtacagctac

SEQ ID NO: 42336 - DNA, 571 bp, Homo sapiens
tattttgtaatgaggattgaatgacacaatgtacataaagttgatgacagtcagaacatgatataagagcattattatttccaaaagtaacttttaaaaataaatgatggaaaaatttttattctaaaaattaaacattgaattttgaaaagcatgcagggtttgtttttgatccatacatgtttttcaagtcttacatatatatacagactaaaacctgrttagtgaattttctctaatcacatgtaattttaataatatatggccacaactttaacaggctacctatgttattaaactacaaaggcaaacatagccaataagcacattcatacacattttcaactacatagcaaatatggggaaagctcatgaaatatacattggaatcactatatatttacagcattttatttcaaatgttttacctttagaaaattattttatgaaaacttttgatctgctgaaaaatgttttctggatcagaaaaatgttcaccaattccatctttcaaatcggtatcctaatcataagctaaaagtatccctgccaatcctttagtccatccacc

SEQ ID NO: 42337 - DNA, 571 bp, Homo sapiens
tattttgtaatgaggattgaatgacacaatgtacataaagttgatgacagtcagaacatgatataagagcattattatttccaaaagtaacttttaaaaataaatgatggaaaaatttttattctaaaaattaaacattgaattttgaaaagcatgcagggtttgtttttgatccatacatgtttttcaagtcttacatatatatacagactaaaacctggttagtgaattttctctaatcmcatgtaattttaataatatatggccacaactttaacaggctacctatgttattaaactacaaaggcaaacatagccaataagcacattcatacacattttcaactacatagcaaatatggggaaagctcatgaaatatacattggaatcactatatatttacagcattttatttcaaatgttttacctttagaaaattattttatgaaaacttttgatctgctgaaaaatgttttctggatcagaaaaatgttcaccaattccatctttcaaatcggtatcctaatcataagctaaaagtatccctgccaatcctttagtccatccacc

SEQ ID NO: 42338 - DNA, 524 bp, Homo sapiens
tttatattagatatatttagagaggttaagcttccatctctgccctctctcccatgttctgatgttttccctataggtacaaatttttattggttttccatttatcctttttttatttttttttaaatgtaagcaaacagtataggtatttgtaccccttttttttctttataaaaaagtagcaaactgtgtgtgcttatttrtagcttgctttttccttttaaacttaatatatcctggtggtcaccttatagcaatatgtaaagatctttgttattttttcaggagatggatagtactccattgtttgtatccactatatgttcaatcatttctgtatagtaggatatgtgaaatgttatcagtcttttgctacctgaattagtgcttcaacaaatagccttatgcatatatcatttcatatatttgtcattatgcctttgggagatcataggaggtttttgatcagcaaaatgttataaaagcattgttaggaagattaaactggcaatggaatacatatt

SEQ ID NO: 42339 - DNA, 524 bp, Homo sapiens
tttatattagatatatttagagaggttaagcttccatctctgccctctctcccatgttctgatgttttccctataggtacaaatttttattggttttccatttatcctttttttatttttttttaaatgtaagcaaacagtataggtatttgtaccccttttttttctttataaaaaagtagcaaactgtgtgtgcttatttatakcttgctttttccttttaaacttaatatatcctggtggtcaccttatagcaatatgtaaagatctttgttattttttcaggagatggatagtactccattgtttgtatccactatatgttcaatcatttctgtatagtaggatatgtgaaatgttatcagtcttttgctacctgaattagtgcttcaacaaatagccttatgcatatatcatttcatatatttgtcattatgcctttgggagatcataggaggtttttgatcagcaaaatgttataaaagcattgttaggaagattaaactggcaatggaatacatatt

SEQ ID NO: 42340 - DNA, 625 bp, Homo sapiens
attcataacatcatacggtggatctcagtcttgctgtacgttatgatcacacctcaaagcaattatatctgaaccactgagggctggacccaagtatcagcctttttttgtttgtttgtttgttttttaagaaaaagagcattctaattgtagccarggttgagaaccactagtttcatagatctgaatccattttaccttttcagccttagctcagtaggagcttctcgcatccatcacttactgcatgagctacttgaccatttcttagacaaacttcctgtattcccacctgtgcctttcaaaatatacctagtctagggaggcctacgcggactgtcagggcccagctgacaaactctcctccagaaagcttctccagtgccctgtagtaggaatgatttgcttccttccctggctcccatttgcacttagatttctcagccctgatcacagtcagctgtatattatcatctcctttgcttatttactcatgccttcaacaaatactgtaccacttggctgaatgctctgctagacactaggatttactacaatgcaaagacagtcttggttgggcgtggtggctcacacctataatcccagcactatgggggggtgaggt

SEQ ID NO: 42341 - DNA, 625 bp, Homo sapiens
attcataacatcatacggtggatctcagtcttgctgtacgttatgatcacacctcaaagcaattatatctgaaccactgagggctggacccaagtatcagcctttttttgtttgtttgtttgttttttaagaaaaagagcattctaattgtagccaaggttgagaaccactagtytcatagatctgaatccattttaccttttcagccttagctcagtaggagcttctcgcatccatcacttactgcatgagctacttgaccatttcttagacaaacttcctgtattcccacctgtgcctttcaaaatatacctagtctagggaggcctacgcggactgtcagggcccagctgacaaactctcctccagaaagcttctccagtgccctgtagtaggaatgatttgcttccttccctggctcccatttgcacttagatttctcagccctgatcacagtcagctgtatattatcatctcctttgcttatttactcatgccttcaacaaatactgtaccacttggctgaatgctctgctagacactaggatttactacaatgcaaagacagtcttggttgggcgtggtggctcacacctataatcccagcactatgggggggtgaggt

SEQ ID NO: 42342 - DNA, 625 bp, Homo sapiens
attcataacatcatacggtggatctcagtcttgctgtacgttatgatcacacctcaaagcaattatatctgaaccactgagggctggacccaagtatcagcctttttttgtttgtttgtttgttttttaagaaaaagagcattctaattgtagccaaggttgagaaccactagtttcatagatctgaatccattttaccttttcagccttagctcagtaggagcttctcgcatccatcacttactgcatgagctacttgaccatttcttagacaaacttcctgtattcccacctgtgcctttcaaaatatacctagtctagggaggcctacgcggactgtcagggcccagctgacaaactctcctccagaaagcttctccagtgccctgtagtaggaatgatttgcttccttccctggctcccatttgcacttagatttctcagccctgatcacagtcagctgtatattatcatctcctttgcttatttactcatgccttcaacaaatactgtaccacttggctgaatgctctgctagacactaggatttactacaatgcaaagacagtcttggttgggcgtggtggctcacacctrtaatcccagcactatgggggggtgaggt

SEQ ID NO: 42343 - DNA, 625 bp, Homo sapiens
attcataacatcatacggtggatctcagtcttgctgtacgttatgatcacacctcaaagcaattatatctgaaccactgagggctggacccaagtatcagcctttttttgtttgtttgtttgttttttaagaaaaagagcattctaattgtagccaaggttgagaaccactagtttcatagatctgaatccattttaccttttcagccttagctcagtaggagcttctcgcatccatcacttactgcatgagctacttgaccatttcttagacaaacttcctgtattcccacctgtgcctttcaaaatatacctagtctagggaggcctacgcggactgtcagggcccagctgacaaactctcctccagaaagcttctccagtgccctgtagtaggaatgatttgcttccttccctggctcccatttgcacttagatttctcagccctgatcacagtcagctgtatattatcatctcctttgcttatttactcatgccttcaacaaatactgtaccacttggctgaatgctctgctagacactaggatttactacaatgcaaagacagtcttggttgggcgtggtggctcacacctataatcccagcactatgggrgggtgaggt

SEQ ID NO: 42344 - DNA, 580 bp, Homo sapiens
tgtgtgtgtgtgtgtgtgtgtgtgtgtgtgtgtgtgtatagaactcaggactttgagctagacaaacctgaggttaaaacctaatttcattattggctgccttaagatccagttgtttaacatctgtctctgtttcctcagctatgaatacaggatagtagtaatccttgcatctcaytaggttcttgttaggatttaaaaaatacaacaggtataaggtacacagcacacctctctaacacactgagaagcactgtgacatgctcacccacactattattttacccaacatcatgcaaaacagtcacagggaagaccaggcaaaagagaatgatcaataatccaaaattcagctccaaacctaaaaaagttttcagaaggcacatgcatatacagaagcatttacatgcacaaatatcagcacactaatcctcaagccccattacgcagtacaaaggacagaaagacagcagtgagaccaaggttatttccaataaaggatttgcagggccatagagaattagcaaataaaaacttgttttttaaaataacaaataagaaagcacagtttggaactcct

SEQ ID NO: 42345 - DNA, 1104 bp, Homo sapiens
cgtggcattattcattagtttaaacctacagaatgcaccgcaccaagagtgaaccctaatgtatgctatggctctgggtgataaggaggygtccatgtgtccatgtaggttcactggtaaatgtcccactctggtgcaggctgttgctggtgggcgaggctgtgcatgtgtgggggcaggaggcatgtggggactttgtactctctgttcaattgtgctgtgaacctaaaactgctctttaaaaaaaatctacttaaaaataaaaaaggaaccacagggaggaagctcatgaagtagaagatgcctgctgccccaagatacctggtatccccagaccatgccccacctttggtgatagcccccacagtccccagggtacctgggctccaagtgaggcttagcaaacgtttcactgatggtgggaggggtttccagtccagtaaatgggaaaaactgagtcaaggggctgggggcaccctctgagggaaaggacacctccagagtcctctggagcaatgaggggtcagaatcctcaattggcctggaagtcctggcaccaactggcctttgttccttgacagcatctctctcctcctctgtacgatttccagcttttctttttcttcctctagttaccctgtgttgtcctggacaggtgaatggggagaattaactgcatggtggctcagggcctactggcacagtatgggatgacacacagctgagcaaatccacagagcggctcagcccagccttccctcctctcccccactcctggaatgaagccaagaggagcctcagtattcggaaaactgttcaatgtgctccctagagaaggctccaagagcctgagctacaacaggcctcacgagaacaggccttttcctggaggagagctcagaggtccccccgggcccctggaacggctttgaagtggcaatcttactgaaggtctccaccaggacccctttggcttggggagtgcatggtcctttgctgggatgcaggaaggctgctgtgggttctcatgtggcagagagcgaggactagagccctgagaacctgacttctcacaggcactattagagcagcaggccaggatcc

SEQ ID NO: 42346 - DNA, 1104 bp, Homo sapiens
cgtggcattattcattagtttaaacctacagaatgcaccgcaccaagagtgaaccctaatgtatgctatggctctgggtgataaggaggcgtccatgtgtccatgtaggttcactggtaaatgtcccactctggtgcaggctgttgctggtgggcgaggctgtgcatgtgtgggggcaggaggcatgtggggactttgtactctctgttcaattgtgctgtgaacctaaaactgctctttaaaaaaaatctacttaaaaataaaaaaggaaccacagggaggaagctcatgaagtagaagatgcctgctgccccaagatacctggtatccccagaccatgccccacctttggtgatagcccccacagtccccarggtacctgggctccaagtgaggcttagcaaacgtttcactgatggtgggaggggtttccagtccagtaaatgggaaaaactgagtcaaggggctgggggcaccctctgagggaaaggacacctccagagtcctctggagcaatgaggggtcagaatcctcaattggcctggaagtcctggcaccaactggcctttgttccttgacagcatctctctcctcctctgtacgatttccagcttttctttttcttcctctagttaccctgtgttgtcctggacaggtgaatggggagaattaactgcatggtggctcagggcctactggcacagtatgggatgacacacagctgagcaaatccacagagcggctcagcccagccttccctcctctcccccactcctggaatgaagccaagaggagcctcagtattcggaaaactgttcaatgtgctccctagagaaggctccaagagcctgagctacaacaggcctcacgagaacaggccttttcctggaggagagctcagaggtccccccgggcccctggaacggctttgaagtggcaatcttactgaaggtctccaccaggacccctttggcttggggagtgcatggtcctttgctgggatgcaggaaggctgctgtgggttctcatgtggcagagagcgaggactagagccctgagaacctgacttctcacaggcactattagagcagcaggccaggatcc

SEQ ID NO: 42347 - DNA, 549 bp, Homo sapiens
tgggagcagaacaccatggtgatttgatcctctaagcctcaccatcacagtcatttaggcagctcaaattagaagtccaggattcaaaacacctatggcttatcatccctaatattgaaaaaggagaataaaaaatccacagcaagaaatgaagtatttttcaatccttcaactacaaaaagagaaaaatttgatcagcagaaacaacacatgaaattaaccgcccaggtccacccattccctagggaaatatgtggccagattggccccattagtcatrtataatcacataaataagacattcatgcaggaagtcacccttcaccccaaaggaacagttagatgagtaacagcattggtcactacagaaatccattttttctttcactgtcctaatacacagttttcttctttctccttactatttcctgtgttaaatataagtgtccgaggttgtttaataataaaaaaaaataccgtgaaactctgcttcaactattctaatttattcccctacagttaaacgtctggtattttaaatctatgtca

SEQ ID NO: 42348 - DNA, 569 bp, Homo sapiens
ggaacagattaggtaaaaaggcgatgggaaacctgttggggaggaggtgtgctgacatgtgcaaatagataaatgtgattcctgggtttcaaaccagagctaaatgacttgatcttctcccaagcacacatatacacacacacatggatacacttacacaaaatttgcactccatatattatactcaagctgctctgtaaaaattttgtcccaaaccatggaatatatttctttcacataaaatattcacacaactctttttatgaaagaaccagcagggtaactacttaatttggtcactaagaatgggcatttagtgatgcaagggttgatttgtttatttataaaaaataaaactttacattgtaccttcccttaaacaagcaggaaaacgcaatgtaatttttagasagaacagaaacctggcatttatagctgggcttcgtaaaattaaactaagtccctggagggtagaggaaggatttaaatttctgtttaaaaggattaatctcgttgacaagtctattctcctaatattcatcttttgaaaagtttgctttctccttctt

SEQ ID NO: 42349 - DNA, 574 bp, Homo sapiens
cttaagaaactggacaattacagaggaaacatttaccaaaataagaataggaaataaggaagctgataagacagaccctgaagaccctgaagtgggcaatgaaattttcccataaacagcgggggtttgaggaccaggtagaaaattaatgagattggatctcgagaacattattgtaaagaaatatcatctggagtataaaaataagacctggtggaattgtgtctaaatgtgtactggtataataggygaagacagtgggtggggaagaaggatgtagttaatgggataattatgtatttctctctacctatacttatatttttctttgcctttattctcaatgtaataataacttatgtagtcttgtgtaaatcattttaacaattcgattttcaattttttgctttgtaaaatggggatagcaatacttacaatgctgttctgtaatgtttttattgcatttatacatgcattatctctgtccttcccatacctactcatgaggtctaatcattgaatctagagtagagtaagtgcatagtaaacaacatctctttttaaaaaattacat

SEQ ID NO: 42350 - DNA, 1185 bp, Homo sapiens
atcccacaagctgaggctccatgcctcagggactgaagagcaygggccccacacagctcactgcagggggttgggaggccttggttgtgtgaccccagacaatgaactttggctaggttggatcttgatgctcctggcctgcttatctagtaacacaaagtatttctaatttaaatgataataacaaattggaaaaaaaatgcttgcatgcattcagtgaactgtgaccatcatccgtgttactcctggatctggtgctgacggaacattattaagcccttatctacgacgcccacactaagcatgttgctgatggaattagcagaacaggtgtggtattctataccttgagctcttcagaacacatgccctccttgtgttgtcagagcaataactgagaaaatgttctcttaaaaggagagagcagtcacaaagaagttgacattctttcttaaggtaagttaagagaacacatgttttcagatggaaaattgtgtttcctttttactcttttctgtccagagtcagcgatatggagtaaatccatcactaggagaacacctttctcttccagaattgctgatgaatcattaggtaaagccggggccaccggcagagtggccttctggcagatggctggggcttgggaaatgcacatcttctctcggctcagctatgtggttcttctttcttcaagaagccaaagtactgggtgtaccccacaaagtcacaactgggcacagacgggaaaggctggctgtcagcaccttgctggccatggtcgtggaccccagagtgagctgacaaagcagtcagtccaagcatggctgcaggagcgccagaaggcgctgggtgctaacacttaggaggcagcatggacagtggagggctatagaggaggccccacatgagggacagaatgagggtccactggctgcctgcactgcctgatgctcctgctatggcggcagaaggccaggcccctagcagggctgctgctgtgtggattctgatgccactaatgacttatcgtgcatctgggcctctgactctgggtgcctcttagggctgagataaggatgaggggagagaacaaatgggaaatgcccaggctcactctcagcaccaagtggtctgtgcagcccaggagcctggagcaagccctcgcaggagcccaagggatcc

SEQ ID NO: 42351 - DNA, 1185 bp, Homo sapiens
atcccacaagctgaggctccatgcctcagggactgaagagcacgggccccacacagctcactgcagggggttgggaggccttggttgtgtgaccccagacaatgaactttggctaggttggatcttgatgctcctggcctgcttatctagtaacacaaagtatttctaatttaaatgataataacaaattggaaaaaaaatgcttgcatgcattcagtgaactgtgaccatcatccgtgttactcctggatctggtgctgacggaacattattaagcccttatctacgacgcccacactaagcatgttgctgatggaattagcagaacaggtgtggtattctataccttgagctcttcagaacacatgccctccttgtgttgtcagagcaataactgagaaaatgttctcttaaaaggagagagcagtcacaaagaagttgacattctttcttaaggtaagttaagagaacacatgttttcagatggaaaattgtgtttcctttttactcttttctgtccagagtcagcgatatggagtaaatccatcactaggagaacacctttctcttccagaattgctgatgaatcattaggtaaagccggggccaccggcagagtggccttctggcagatggctggggcttgggaaatgcacatcttctctcggctcagctatgtggttcttctttcttcaagaagccaaagtactgggtgtaccccacaaagtcacaactgggcacagacgggaaaggctggctgtcagcaccttgctggccatggtcgtggaccccagagtgagctgacaaagcagtcagtccaagcatggctgcaggagcgccagaaggcgctgggtgctaacacttaggaggcagcatggacagtggagggctatagaggaggccccacatgagggacagaatgagggtccactggctgcctgcactgcctgatgctcctgctatggcggcagaaggccaggcccctagcagggctgctgctgtgtggattcygatgccactaatgacttatcgtgcatctgggcctctgactctgggtgcctcttagggctgagataaggatgaggggagagaacaaatgggaaatgcccaggctcactctcagcaccaagtggtctgtgcagcccaggagcctggagcaagccctcgcaggagcccaagggatcc

SEQ ID NO: 42352 - DNA, 940 bp, Homo sapiens
ctaggacaatcccaatttttgtaccttctggtctgggtctctttggcctatttctatactctcttctttgtatctaacctggctctttcctcttataacttatttaatttattcttgtgctattattggcaatggtggagaataacatgtcacaacccttcctataaatatcttctcatatgcttgcagttcgtaaacctattctcaatcctgctatgaaccaagtagtatgattcaacaaccttctcccaccagtcctatgtactgagcctttaacaaggttttctgaaaagagaggtgtcaatttcactgtgttcccagaagtgacaggggtctattttttctccattcagagtggaaataataaaaagaggaagaatcacagtgaattgatttgggggttgatcaccaacccttccttaaaaatgtgtacatgtgaatgtcctttcacacaaatgcaatcacagaatttccccggagcacattagacctggtgatatgttagactctcagcataccagattggtggggaaaaggctaaagtcataacaaaaaggaaccagagcaaggccagggacagctcctaccccagttaaccagttatgaagcataacaatatccggaaatagttatatgtgctggaccttatgccaagtgttatatatgaatgatctcatctaattctcttacccacttttgctttagagttatttttcttacctacagatgaagaaactagggttcataaggtgaagaaatgcattcaggattacacttgtaggaagtatcagagccagaattgacaccaggtcatctggttccaaggcttaggctggaaakcaccatattctcaagggccatgatacccgatgttggagctggagagggagtgcccagtctggtaggcagctgcctaggggatctggaggaaggtggaaga

SEQ ID NO: 42353 - DNA, 940 bp, Homo sapiens
ctaggacaatcccaatttttgtaccttctggtctgggtctctttggcctatttctatactctcttctttgtatctaacctggctctttcctcttataacttatttaatttattcttgtgctattattggcaatggtggagaataacatgtcacaacccttcctataaatatcttctcatatgcttgcagttcgtaaacctattctcaatcctgctatgaaccaagtagtatgattcaacaaccttctcccaccagtcctatgtactgagcctttaacaaggttttctgaaaagagaggtgtcaatttcactgtgttcccagaagtgacaggggtctattttttctccattcagagtggaaataataaaaagaggaagaatcacagtgaattgatttgggggttgatcaccaacccttccttaaaaatgtgtacatgtgaatgtcctttcacacaaatgcaatcacagaatttccccggagcacattagacctggtgatatgttagactctcagcataccagattggtggggaaaaggctaaagtcataacaaaaaggaaccagagcaaggccagggacagctcctaccccagttaaccagttatgaagcataacaatatccggaaatagttatatgtgctggaccttatgccaagtgttatatatgaatgatctcatctaattctcttacccacttttgctttagagttatttttcttacctacagatgaagaaactagggttcataaggtgaagaaatgcattcaggattacacttgtaggaagtatcagagccagaattgacaccaggtcatctggttccaaggcttaggctggaaatcaccatattctcaagggccatgakacccgatgttggagctggagagggagtgcccagtctggtaggcagctgcctaggggatctggaggaaggtggaaga

SEQ ID NO: 42354 - DNA, 699 bp, Homo sapiens
  misc_feature (1)...(699): n = A,T,C or G
tgaataagccacagttcaatgctggtgaagactgacaatcaagctgactaatctttacctgagatttctgtttccctcactgccatgtgtatccccactccttctcaaattatgagaaatagcttcartacagtccagagggactgatttagcaggtattctgtctgctttaccgctttcacatgaacacatctttcatgggcttatttgccacctaaactgaaactgaaatttagtttttcctttcacctctctcttttcatttgagatgtatctccgtctttctagtttgtctagccagtatctagactgagacatttgtgactcctcactctgagttttcaggtcaacctgtaaacttggagagagaagggaaagagagacagacagacagacagatagacagacacacacacacacacacacacacacacacagtcagcactccctggcttcctttgacgtctatacgtccaagctggctgttctgtcatgcacatttacttgctgttgcatgagactagtggtaccaaactgagagctactggatggcagggactgtgttttctttatctttgtgcttagtatagtaactaccataggtgggtgctcaatacatgattattgagtgaatatttgaaattggagaagacattgcttcatgttaagcgacaggaagangttctattctgacttttt

SEQ ID NO: 42355 - DNA, 543 bp, Homo sapiens
tcaggattcagtaaggtgcctttacagtccacagcaaggcaccctaacaccatctgcgaatgcagagagtctcagcagagatgccgtccaagccaaaattcaaggatgggcttgatttatgtggtcagtaggggataattctaacacacataagttctatggctttggataattacctacttgatacagtttgaaagtttgtcccctccaaatctcatgtggatatgtaatcccagtgttggaggtggagcctggtgaggggtatttgggtcataggggcaaattcttcatgaagggtttgttgccctccctgtagtaatgagttcacactgcatctggttatttaaaagagtctgtcacctctgcctctctctgttgctccctctctcaccctgtgatgcactgacttccsttagtctactgtcatgattggaagctccctgaggtctcaccagacacagattccagcgccacgcttcttgtacaatctgcagaaccacgagcaaaacaaacaaacaaacaaacaaaaaccaaaaaaaaaaa

SEQ ID NO: 42356 - DNA, 543 bp, Homo sapiens
tcaggattcagtaaggtgcctttacagtccacagcaaggcaccctaacaccatctgcgaatgcagagagtctcagcagagatgccgtccaagccaaaattcaaggatgggcttgatttatgtggtcagtaggggataattctaacacacataagttctatggctttggataattacctacttgatacagtttgaaagtttgtcccctccaaatctcatgtggatatgtaatcccagtgttggaggtggagcctggtgaggggtatttgggtcataggggcaaattcttcatgaagggtttgttgccctccctgtagtaatgagttcacactgcatctggttatttaaaagagtctgtcacctctgcctctctctgttgctccctctctcaccctgtgatgcactgacttcccttagtctactgtcatgattggaagctccctgaggtctcaccagacacagattccagcgccaygcttcttgtacaatctgcagaaccacgagcaaaacaaacaaacaaacaaacaaaaaccaaaaaaaaaaa

SEQ ID NO: 42357 - DNA, 1167 bp, Homo sapiens
actgccttgggggctccagcctcctggtctgctctgctgattttggacttgccagcacccacaatcatgtgagccaatttcttaaaataaatctttctgtctgtgtctcactgtctctctgtctctacctttctctttgtctgtctctttcttttctctctatacacacaaacacacagatatattatctatttacctatcatatatctatttatctatctatctatctatctatctatctatctatctatcatctattctttttttctgaagaaacctggttaatacagctgtggaattcaagtaactagttaaagattttttgcctcattttttaatctataaaatagaaataatgatactatttacctcacagagttgatatgagaacaagattcatcatggctttaatgtgtttagaaaatatcttactgacctcatagctcacgggtgtgagctattattattacagctattttacttcttcatttccagtgtggagactgtatttataacattaggatatgcattattgtgcatacatctccctatttatttctgtattatttctttaaaatatataccagtgtctaaccagggtcagttccaaatcccacatgctgtggtttttaccacctctctgacatctgcctcatttcaccattactagctctattgccattcctcaaaattagcaatgcacttcccygtagaaatttgttatttgtgatcatctctcctgtccagaagcaaggtattatacaagtgcatttactttagtcacattataatggctgttttcttttaagaccattctagatactggatgaaacagaagactcataatttccccattcgtagactttactttttatgatgattttgactgagaaatctggattacattgtctgacttagcttagaaatacaaagacatactcaagttttcacaaataatggggcttgtcatatgaagagaagcaagtaacaggatgttgtctgagagcagggtggccaggccttggcgggcagatgtgggggtgttgctcaggcaaccctggcctttgatttttctacaagagggttgtctcttattcttcataaacacactccaggatttggggaatccacatgcctcccttctctggttgtctctgcttatccctg

SEQ ID NO: 42358 - DNA, 503 bp, Homo sapiens
tcacgcaggcctggcggacctgaagactgcgacacggacactcaagcccgcggctctccggcctgggctcagggcggggggaaggagagggaaccaggggtacccacacggcgctcctcagggacaagaccccaggctcgggcccgaggcggctcgctggagagacgccgcagcctcgcgggggcggccgtggctgcgtccgggagactgactagccaaggccccgctcctggacgccctagcggggggacagcggcctgcggaccccgcccggccctctcggcggactgtgccctggcaaggcggccgggctccggagccagccggggctgcggctaaggcgttgcccgcccccgtccggaacgcgccactcacccggcgcgggcggggtagaggacggcgcgaccgcaccctgcagccgctgactggaccccgcsggcgcggccccacagatcagccgacaaagcctgcaccgccgccagcccgccgcgaccggaagtcgc

SEQ ID NO: 42359 - DNA, 556 bp, Homo sapiens
cctgggggtgtcctctcaactaaccgtcttgtctcaggcagcattatacctaaaacattccacagatgagactaaagcctattttaggaaaaaaaaaaaaaaaaaaacatttgattamcaaagtgggaatgttttctcacggtgccgctgcaagtatggaatcgttggcattctacttcatcttccctcttagggccttcctactcaccgtgtgggccacacaccggccgcagtagtgtcatgagagcttgttgaaaatcaaaagttccaggcatcatcccagacctaccaaagctgaacccacattctcacaagaccgcatgggtgatgaggggacacactggagtctgagagttaccatcctacagtcccgcaggttgattccaggtcaggtctatacatccggccatctgcatctggctgggttgctgtagctcttgtggattggccagtagttctggctctgttgtggatgggcagggtgagtggggaccctattcatagaccataaggagttttcttctctggtcattgctctgttcccaactctctacac

SEQ ID NO: 42360 - DNA, 509 bp, Homo sapiens
tttttttttttttttgagacagagtctcgctctgtccccccaggctggaatgcagtggcgggatctcggctcaatgcaagctccgcctcccaggttcatgccattctcctgcctcagcctcctgagtagctgggaccacaggtgcccaccaccatgcctggctaattttctgtatttttagtagagatggggtttcaccgtgttagccaggatggtctccatctcctgacctcgtgatccacccgcctcagcctcccaaagtactgggattacaggmgtaagccacggcacccggccgtcctttgcatctgtttaaattattctgcaatgaatagaaattatataatttaaaagtcttagcataatctgacagctagatacaggtatacctcattaccatggacttcaccaatccaaaattttataatcattcacagacaggattgaccagatattgcgaatgacttacccttcttagtaatttatcttctagttctacctctttatac

SEQ ID NO: 42361 - DNA, 1313 bp, Homo sapiens
tgtggggcttaaaacctagataatgggttgataggtgcagcaaccgccatggcacatgtatacctatgtaaaaaaccactttctgcacatgtatcccagaacttaaagtaaaatttaaaaaaaattaaaaagaagcttggtgggaaaggagcccacttgtttcatactggacattaaaatgaagagttcaaaactaattcaatgcacatttattatctcttactatataatggatgccaagtgtcttagacattgaggatatgtagtctgtaccctttaaactgttcacagtggagaggtagagaaacaaacagagttagagaacatcatgataaccattaaagcagaagtagagacagggttctatggaaaagcaaaggagagcatgtaacacatgttagtttggaagcctttcctgagttgataatgaatgaactaaattatgaagcaagagcagttttacaggtggcaagttgcagggggacagtattgggcacacctcagattgatgaaacagtctgtgcaggggaagggaagggtgagaatgcacactgtgtcagggcccataagtagcccagtgctgctgaaggtcagggagaggacagagggcagagacatccggggcaaactcaagctcaatgtggatgccatgaattcttctgcatttcttacaaaaagcactcagaaacttttcaacgttttttgagtaaggaactataaaattataattgtgttatagaaaatagattgataagtttggaaaccagcaaacaagttagaaaactattttccaagcaagaaattgtaatgatagtaccagtgggaatggtcagtagaagacaaattaaaacctattaggtgggtagaattggcagggttggtagtagcagcaataatgtgaagaacaagaatgagcagtggcttgcattgacttccaggtctcttgggctatgacattgctaattgtgccagtagccgwaacatgagctataagaagagactagaatgaaaatagagggagaagatgagatcagcttttgaagagatgaatttaaagtatccctgtctagaaaaagttggatatataatctaaagcttagaaaagactgaatacttgaaaccacagcaatgaacagactctataaacatatcacgaagaatgagaaaagagaagcaaaaataataccctgaaaaataatcacatatgaagggtgggctagtgagggaaactgaataggaaagcccagagaaggaaaagaaactctaggagaaataagggtgctacatttttcatgagagcatccagtgatcca

SEQ ID NO: 42362 - DNA, 1165 bp, Homo sapiens
tacatgtaagtggtggctagtgtcctggaaaggacagttacagaacattccaccattgcagaacgttctgttggactacattgtaatgaagttgctaccaaaatgtggacgacttcaagaaccctaagactatttctggctatcagccaagtcctacagaatactcactggctaacttatggcactgcaaaactagatatagaagtgaactgagagaagccgtgtttcttccccagtcatgcttgcatataagataggtatcatgccactaacctgcccagagcccatccatgataatggtcaaggcagctggtcagagacacaggaagtctggagtaaaacgcataatatagagcacaccttaatcttactttaaggcaatatgctaaggtatcaaaataaaagcaagcacaaattcagcaaacacaccagggagaacaaaggattataggcttatgggctcaagtgctttgcagggataccaggttttacggtggtatgacagagactagcccattctcctgcctctagtaagggtccatgtataatttctgaagtcagatgagtgccaattccaaagacctctgagacctctttgcagggttctcactctatcaaatccatccagagagcttagcagctccagagtaaaatgggataatcctaatcacaccgtgtgtccaggcaatccctggagtagggtaggcagttgcatgtgtgtctctgtgtctcccctctatgccagctgcagacatcaccaatgaattgggctactcttcgccgtggaccctggatgcagccagtaccaaccagtccaagcttacatgcacaggaggacactagttcacygtctttgtttttgagtaactcaaattcttgtacatacctcagcttctttttggaaaatccaaatatgactttcctgtatgacaagatgctatagggcatttctcctttagcgaaccaaagaagtcttccctggctttctaaaggcgatcacttaacgtttactgccctcattccttttctatcgacaaaccttgtatttcagcacaaactgtaattctcctctccacagtaagttattggtgtctcgggaacttgacagacccagtcaacattaaaagtgctcctagattggtttttagctctgcttcttaacttg

SEQ ID NO: 42363 - DNA, 2092 bp, Homo sapiens
aggcatgcatttggtctttttcctccttgccaaatgttatacttctgcagaaaaacacatgaggaaaaggcttttagtcaaataaaaattcaaagatccagaaaaaccagaatatggaattagattttgtttaaaagtactatttctgtcttgcctaattgtacataaattacccattttctgtttaatttttctcattacaaaataaatgtatttttttcaatttaaaatctgaaccatacaaataaaaatggtaagaaaaaaaacactaaattgctattgctcaaaatcaatcatttccaagattttgaaatatttcttttaaatatttttctacactgttaaaatagctaaactctatgcttagaatacatgcagatatgcaattggttctgtgatttttagttaatatatacaagaatttctccatgttattataaattccttgcaagcattttaaatgcaatacttttctcatcaactagaatttacttaattcccatttgttgaacatctaatggtggcccccccatgtatstccactaataatgctaaaatagacatttttgtgcatcaagcttttttcttgattttacttattttcttagaattctttctaggacataaaattattaataaaatgtttgaaatatgtttaaatatcttgccaacttactttctagtaaaattgaaataaatggcactgttactgggcatgcatataatggcttcctttcagtttaattattccctaccatgggttcaataatttaagggaaaaaaaatggcttgctagtttgatggattaaagacaattatcatagttgtttcaataacttgtatgataacctgaattgtaagttgccaatgagaacaaacatctctataaaattatttgctagttagcttggcccaaggcaaagatgaaggaagtaacaatctatttggaaggtgtcctcgggggtgcgagtgggagctagggagagatgccaggagatgatgcactggggatccggctagaaggagcctcgaaggggggcacagcagaacactaagcaaatatgattgttagaaacgcagaaattctccaatgcaggaaagaaaggcaccttggaagagagaaaggacagcctgcggctcgtccagcgggactccggcaggcgagtccagcaggagggcgggcggaaggaggctgcctcaactctgaaaagacacacccaggtattagctagatctctgtctctgcgattctgtttatattctttccacaattcctcttactggaatattgaggggagaaaacagattgatgaaaaacgtgcaaagccagattacttaacagttcgctttcgcaagtctgaacactgaaagacagtaggtaatattccttagagtagaggagaaagtaatgtaaacctggagttcttccctcacccaagatggtgttatcaggttaaggtgacagataaatattttttggtatgaataatccaaacaatatatcaggcttaggttcttcctgaaagaaaaatgttcaatcacttaaaagagaacagtataaggccggacgtggtggctgacgcctgtaatcccagcactttgggaggccgaggagggcggatcacgaggtcaggagatcaagaccatcctggctaacatggtgaaaacccgtctctactaaaaatacaaaaaattagccaggcgtggtggcgggcgcctgtagtcccagctactcgggaggctgaggcaggagaatgacgtgaacccgggaggcggagcttgcagtgagccgagatcgcgccactgcactacagcctgggcgacagagcaagactccatctcaaaaaaaaaaaaaaaaaagagagagagagaacagtataccaacattaattacaagagaagtttgactatgagcacttatttttatatctgtggacccctataggctctcctggttggtgtaattttttggcataacttaactaacagatttcgaatacttctagaacttacctacccagtgcctcagttgtttttaaatatttttaaacatgagttattagacattctgccttccagttttccaattttt

SEQ ID NO: 42364 - DNA, 602 bp, Homo sapiens
tactacactatgagagaataaatttctgttgttacaaactacccagtttatggcactttgttatgcagccctagaacactaatataatatgctagatgtttttgtaagaaaaaaagaaaaataaaaatgtatttgtctatttacctttttttcttttgcaaatgaaacataaaagaaccagaaattaacacaattatttaccatagaggattagttgaaaggccatggagaggatatgttggggagtragccttctttaaacataccttgtcatagagttttgactttatacatgttatacataacttacttattttttaaaaaaagtaaattgaaagaaaacaaaacaaaaaaggaaacattgaaattgaacacaaatgtaatcaaaagaactgaaatatatatcaaattgattccatagcacatagagaaaagggtgatttcagaaaacttctgaacacagtactctagatatccagtgcaggatatactctaaaaacaataggaagtgcaaaatgatcttaggcttctctttatttttagtggcagtattaaaattgtaaaagaccactcaactcaaatcgttggttgacttgcttttt

SEQ ID NO: 42365 - DNA, 865 bp, Homo sapiens
attattgctcaccagtatttatcacgtggtattcaagtgagtgtcattaaactaaacagcttttgtagttaatagtcagcaaatgcaaaccatcctgtcaatcttgccactggttaacacctaactaactacaacttgaatatcttgaaaactgtagcatttcattaccccttccactcagtgctaagggactaaatatccagagaagacaaaagtgaattcaccgactttcatagtcttctattttccttacttgaatttcccatcactgagcctgtaccaccagcatagcactgaaagtaataatagagaaaaattaattaaatgactgtatttcaatcgcaagacttatttctggcattatgaactaaaagagtacgtattgagcagtttgtaactgacagcagtgccatgaaattacaatgcagccatkataattatcctcttcattattttttaatatatatcaagataaatatagcatttctttcacttttaatggcatgcagtataataggaagacaagaagaggggtgtttttcttacagtgttatggttaaagacagtgacaaagaaaaggatatgactttgatgatgttccatcatcaatgctgaaatagacatcaattatattatcagtctatacaaactgcatacacacagttaaagtaaaacaagatgcactttcttcacaaagctgtaactgctgacaaccatcaagaacaaaaatataatgcaattgaggtggacaaaatgattcgtttctggactcaactgtatcaattatcaaacgaagttcacagaaatttaaatgtaattaatttattattatttgaaaatatactaagcaattagagagactttg

SEQ ID NO: 42366 - DNA, 528 bp, Homo sapiens
  misc_feature (1)...(528): n = A,T,C or G
caagcttttgtttgtttctttgtctgtttgtttgtaatgatggcaagattgtttctgttgcccaggcgagcaaccatgatggctcraagcagatataaggagagaaaataagatgggacagtgctagacacatagtgtttcttttaattgagaaaggaaatactttttcagaaacagttgtaacaaacttattctttgttgttcagaattggactatctatatcttggagtgatgctgagaaaatgagaacaagaattgctctaattgtcttatgtttcaatgtctggatttgttcacatttccactacaaaataaatgagattctgttaagaaaggtgatatttttgatcttgcctcagcaacattgtctgcaacatctgcctaattctcagatgcttgatgcttacaggagaaggcatatgaannnnnnnnnnnnnnnnnnnnnnnnnnnnnnnnnnnnnnnnnnnnnnnnnnnnnnnnnnnnnnnnnnnnnnnnnnnnnnnnnnnnnnnnnnnnnnnnnnnnaaa

SEQ ID NO: 42367 - DNA, 1114 bp, Homo sapiens
cccacaggcccttccagctccaatactcagtcatcattattcactccgtgcctccatattctagccactgtgctaggaaggcagggacatgggggaggttaagattctgagaagagtggggaagacaaacacttaaatagatcactggggccgagcgcagtggctcacgcctgtaatcccagcactctgggaggccgaggtgggtggatcacttgaggtcaggagttcgagaccagcctggccaacatggtgaaaccccatctctactaaaaatacaaaaattagccaggcatggtggtgcatgyctgtagtcccagctacttgggaagctgaggcagaagaatcacttgaacccgcgaggtggaggttgcagtgatctgagatcacacaccactctactccagcctggacgacagaatgagattccgtctcaaaaaaaaaaaaaaaaaaaaatcattggaacactgtgtagtaagtcacagaacagaagtctgtgtgggcatgatacatgagccaaagaggaagacatgaagactccgtggaggagatgaactctgagttgggtcttgtaggttgagtaggaacttaccagaatgacattctaggcagagaaactagcatgtgtaaagccatgtgatgagagcttcctaagtggtacaactccaggggcccattcacatcagagtctatgtaaatggtgcacccaggcctgtgcagtacacaacctctgcaacctgacacagcaatgctgtaaagctggggccccagacacaagcgggagatggtgatgctgatcccacatcccagcatacatcatagtagacctttggcgcagggcttcttaccccgtttgccaccatctctctgacatcgggccccttagaggggctgctgcttagatatggcctggccctagagggatttctgtttcaccctcaaactctgggaacccccagggagctttcaggaagctctgaagagacccaaatctatttccccctttagcaaaagcaattgcgcattctctttactctgcagggaagtatatgggtttctcctctacaaatgggattattattgaaaaatagactttcaaggcaatggcttatctggg

SEQ ID NO: 42368 - DNA, 546 bp, Homo sapiens
gttcacagaactctggatcatgaaagccaaggagctccacagagaaacctcctttgtatctggaccagaggggaagctcaaacttgtggatttccagcctgatgcaatacctgggataaaacttttgcaattattgtgataggagtaagcgtactttccatgtgcaaaaatgattaatttgtggccagaaaatggagtgtggtaaatttgtggtttgatagccacaaattccacccatcccaatatgcatgccctttggcttctcctttcatccaaagacaggatatatgtctatatccctttcaatcttgactggcattgtgacttatttgaccagtagaatgtggtagaagggacagggcatgagtttttaatcctgggccacaagaggccctgacacttcctctgttgctctcttgaaaccttcacgaaaggaagccaacctaggcagcatccaacactgactgccagacatgtaagtgagaccatcttggatttccccgcccagackaccatctggctgaataagtgaaatcaagtgaaggc

SEQ ID NO: 42369 - DNA, 545 bp, Homo sapiens
tgggtttagatcagaaagctcttaaaggccaggcatttgtggcatatcttggagttagtggagagactttgaaaatcataaagtagaggaatgagaagtgatgaaagagtaattttctgaaaattagttacatttttatttctgaatttgtgtcatgtaaagcagcatagtaataattaggaagcccatctgtaaaccaacatcccctacccagcagctgttccatcttgcttcctagtttttgtaggtagttgctgtttcactcagttgaaacactgtctcctgagttgcatctgttggctcacacagttctgcttcctgctttctctttcactgctcacattctgctcactgctacattgtcttcataacactccaggagtgtgaatgtgctatcctgcacctcttctgggctggttccagtttttctcatagttcagataatgatgcaatgaataccttcatgatatarggctttttgtttacttctgaaattattttctttggacaaattcttcggagtgaagttattaggtggtcagagg

SEQ ID NO: 42370 - DNA, 601 bp, Homo sapiens
ttgtagttttgatttgcatttctctatgaccagtgttgatgagcattttttcatgtgtcttttggctgcataaatgtcttcttttgagaaatatctgttcatatccttcacccacttgttgatagggttgtttgtttttttcttgtaaatttgattgagttctttgtagattctggatattagccctttgtcagatgagtagattgcaaaaattttctcccattctgtaggttgcctgttcactctgatggtagtttcttttgctctgcagaagctctttagtttaattagatcccatttgtcagttttggcttttgtggccattgctttttataaatgtaaaagaatgttagcattggcagagaaatgtttgtatataactgtaattgacccctctaggatgcatttctgtcaggaaaggagatgccattccctataaatcaatggtcttatggtatcctgcttacacaatcccaggtttcttaataataaacartaaactaacaagttttcattcacagattgataaaattcctagacttacatctgctaaagagaaacaaaaagaaaaggagggacagcaatagaagaaggaggagaa

SEQ ID NO: 42371 - DNA, 514 bp, Homo sapiens
aaggagataaaataaatatagtgggattgccaggtccaatttatgttggagactatgaatatgtagaagcacttgtattagtcagggttctccagagaaataaaaccaaaggaggtaggtagatacatagaaagacaaatagatacttattttgagggattggctcacatgattttggatgctgagaagccccatgatctgcaatatgcaaactggaggcccaggaaatccactggaatagttccagtccaaactcaaaggctggagaaccagaagtgtcaatgtgtacatccaatttctaatccaaaggcacaagaaccgggggtgcttctgtctcatggtaggagaagaatgaggtcccaactcgagcagagacaaaatttgcccttcctccacctttttgttctatctgggcccytggtagattggaagatacccaccaacaatggtgaggacagatcttctttactaaatctactgattcaagtgcaaatctatcaatagttcagaaata

SEQ ID NO: 42372 - DNA, 528 bp, Homo sapiens
tggtagaattggtgtctggtgaggctcttttcctcatagatggagctttgtagctgtataatcacaaaagggaagaggaaaacaaactcctcygtgtctgttgtataaaggcattcatctcattcacgaagactccatcctcacgacctgatcaccttccaaaggctccacttcctaatatcacactcttgagtgttaggattttaacatatgaattttggaggaatacaaacattcagaccacagtgactctcatttttggatactttttaggtacgcttcaaagtctcctcaaatattttacttttgtgtgaatactcccctattttctgaaaattcaggaaagtaaaatgcagagtcatcatggatttactatatgatttgacaattatgacaatgtatttattctttatattcattgaaagataaaacttattgcttgataaatctgttcattaatcaacaaatatattgaatgcctagtctcttattggtaataagctactataggttttatacaaaagtgaa

SEQ ID NO: 42373 - DNA, 802 bp, Homo sapiens
tcacacctcagcctcccaagtagctgggactataggtgaccaccaccatgtgggctaattttgaaatgtttggtagagacagtgccttgctatgctgtccaggctggtctcaaactcctgggctcaagcaatcctcccttagmctcccaaagtgctggtgttataggtgtgagctactgtgcctggcccccatcccttctttgagttccctgtcacagcccctctgaacatcctgcacttctctttaaaaaaaaaaaaaagttgtagtccaagataatacatgctgagtatcccttatgtgaaatgcctggaaccagaagtgtttccaattttgaattttttcagattttgaagtatctgtgtatatgtaatgagatattttggggaagggacccaagcctaaacacaaaatccatttctgtttcatatacactttatacacatagcctgaaagtaattttatacaatattttaaataattgtgtgcattaatcaaagttgcattaagcatttatgtatagaattttccgcttgtagcattatgtgcccaaaatgttctggatttcggagtacttcagattttggatttttgaattaaggatgctctacatggataacatataatttactattttagccttttttggttcgagatggaatctcactgtcacccaggctggatgctgtggcacaatctcggctcactgcaacctccaactcccgggttcaagcgattctcctgcctcagcctcctgaggagctgagactacaggtgcccaccaccacgcccggctaatttttt

SEQ ID NO: 42374 - DNA, 699 bp, Homo sapiens
  misc_feature (1)...(699): n = A,T,C or G
cttgagcccaggagtttcagacaagcrtgggcaacgtagtgagaccatctctacaaacaatttacaagttagccaggtgcagttgcatgcacctgtagtcccagctactcagggggctgaggggggaagatcgctgcccaggaggtcaaggctgtaatgagccatgatcgtgccactgcactccagcctgggtgacagagcaagaccctatctcaaaagaaaagaataagcattaaaatacatacatatatatataatataaaatccttaaagcctggcacaagatgacttctcaacaaatgtgggggcgagacgcggtggctcacacctgtaatcctggcactttgggagaccgaggtgggcgggtcatctgaggtcaggagttagagaccagcctggacaacatggtgaaacctgtctctactaaaaatacaaaaacttagccaggcgtggtggcgggcgtctgtaatcccagctactcgggaggctgaggcaggagagttgcttaaacctgggaagtggaggttgcagtgagcggagattgtgctactgcactccagcctgggcgacagagcaaggctgtctncataaaaaaataaaaaatcagcccaccaaaatgtggggcttttgtatccaccgcctagtactctcaccgcgcgttcaatccacctgggagaatgagtggatttacccattaga

SEQ ID NO: 42375 - DNA, 699 bp, Homo sapiens
  misc_feature (1)...(699): n = A,T,C or G
cttgagcccaggagtttcagacaagcgtgggcaacgtagtgagaccatctctacaaacaatttacaagttagccaggtgcagttgcatgcacctgtagtcccagctactcagggggctgaggggggaagatcgctgcccaggaggtcaaggctgtaatgagccatgatcgtgccactgcactccagcctgggtgacagagcaagaccctatctcaaaagaaaagaataagcattaaaatacatacatatatatataatataaaatccttaaagcctggcacaagatgacttctcaacaaatgtgggggcgagacgcggtggctcacacctgtaatccyggcactttgggagaccgaggtgggcgggtcatctgaggtcaggagttagagaccagcctggacaacatggtgaaacctgtctctactaaaaatacaaaaacttagccaggcgtggtggcgggcgtctgtaatcccagctactcgggaggctgaggcaggagagttgcttaaacctgggaagtggaggttgcagtgagcggagattgtgctactgcactccagcctgggcgacagagcaaggctgtctncataaaaaaataaaaaatcagcccaccaaaatgtggggcttttgtatccaccgcctagtactctcaccgcgcgttcaatccacctgggagaatgagtggatttacccattaga

SEQ ID NO: 42376 - DNA, 641 bp, Homo sapiens
gtttgtgtaagtataccctatgatgttcccacaaagacaaaatcacataagaatgtatttctcacaatgaaycttcatcattaaatgaggtatgactgtatatattattaggaatgtagtggtatagggactgtgccttaacaacattgtacagaggcgaatcatttaagctcatagatccctggagctaactagaatataattaaaatctgttctgaccctaaggctagcactgcaattggacatttcgaaaaaattttgagatgagtcttatcacttgcatacattgtttgagatataaatttagtctaaattttaattaaccaaggtttgaatagtttgagttcttgtaactaaagactgacttcactgcaattagagttagtgtggctcagcattattcttatagtttaaggggaaaactaagattgaagctataacttaatagaactttttggggtgaaagtccttcagcttctattagatgctcatgaattttacagcacaaaaacacacaattatttggatgcttagaaatggttgcttagtttttggtggaagcttctgtcttttaagaaataaacagtttgatttgagctaaagggaagatcaggcacagaaacacagctggggtatcaatt

SEQ ID NO: 42377 - DNA, 532 bp, Homo sapiens
taataataatgacaatagataatacttaaattttgtggattgtgtgccaggtaaaattgcaaccctatgaggcagatactattatcatccctattttagagttgagaattacctgctgaaggtcacatagtaaatagcagagtgaaaattcaagcctagtaggtctaactttagggtttttaggatttaaccatgatgtcctattgcctcttattttagtaagaggagatagacaaaaaaaatataggtacaaaaaagtttctctggtgaggcaataactgcaactgtgaaaaataaatcacagtatggagacagaaagtgacaagggggtatgttactttttaaaataagacagggaagtttcctccccgatttttaacataaagagacatttaaacaaatacatggagtgggccatgtggataactgagcaatgcatatttcaggcagaaaaaaacagagcaagtacaaagtcccygaggtacgtttagtaagttcaggaagtggctaggaggccagcgtggctggagta

SEQ ID NO: 42378 - DNA, 577 bp, Homo sapiens
cttcatctcttgatgaagaaacagatttttttktttgtttgtttgtttgttttgagacacagtcttgctctgccgccaagactggagtgcagtggcatgatcatgattcactgcagccttgaactcctgggctcaacaatccctccatctcagcctcccaagtagctgggactacaggcacgtgccatgtttctcaggctggtcttaaactccttgtcttaagctatcccctcaccttggcctctcaaagtgcttggactataggtgtgacactgcacctggccagaaacagagtttttaaaaggttaaattacttagcaaagtaggtggtaggttttcagtcttccaagttgggtgtttaaactttcgtaaagttatacatgaaagtaagttacacaatctgtggcccacagaaagagtctaaatgttagtttctggttttataattattactgacaacaatagatacatatttttgagctctgacttcatatgtgttcctaggcattcatgtagatatttcacaaatatgcagtcacttctctgcacagccatgtgagattaatcttgtgtcaat

SEQ ID NO: 42379 - DNA, 577 bp, Homo sapiens
cttcatctcttgatgaagaaacagatttttttgtttgtttgtttgtttgttttgagacacagtcttgctctgccgccaagactggagtgcagtggcatgatcatgattcactgcagccttgaactcctgggctcaacaatccctccayctcagcctcccaagtagctgggactacaggcacgtgccatgtttctcaggctggtcttaaactccttgtcttaagctatcccctcaccttggcctctcaaagtgcttggactataggtgtgacactgcacctggccagaaacagagtttttaaaaggttaaattacttagcaaagtaggtggtaggttttcagtcttccaagttgggtgtttaaactttcgtaaagttatacatgaaagtaagttacacaatctgtggcccacagaaagagtctaaatgttagtttctggttttataattattactgacaacaatagatacatatttttgagctctgacttcatatgtgttcctaggcattcatgtagatatttcacaaatatgcagtcacttctctgcacagccatgtgagattaatcttgtgtcaat

SEQ ID NO: 42380 - DNA, 577 bp, Homo sapiens
cttcatctcttgatgaagaaacagatttttttgtttgtttgtttgtttgttttgagacacagtcttgctctgccgccaagactggagtgcagtggcatgatcatgattcactgcagccttgaactcctgggctcaacaatccctccatctcagcctcccaagtagctgggactacaggcacgtgccatgtttctcaggctggtcttaaactccttgtcttaagctatcccctcrccttggcctctcaaagtgcttggactataggtgtgacactgcacctggccagaaacagagtttttaaaaggttaaattacttagcaaagtaggtggtaggttttcagtcttccaagttgggtgtttaaactttcgtaaagttatacatgaaagtaagttacacaatctgtggcccacagaaagagtctaaatgttagtttctggttttataattattactgacaacaatagatacatatttttgagctctgacttcatatgtgttcctaggcattcatgtagatatttcacaaatatgcagtcacttctctgcacagccatgtgagattaatcttgtgtcaat

SEQ ID NO: 42381 - DNA, 2207 bp, Homo sapiens
  misc_feature (1)...(2207): n = A,T,C or G
ttaaatatttttttaaaagtatatttaatatgagttccatttattcctgctacacagtcaccagtagtatattacaggttcatttttcaggatgtaccttaagtattcattctgtattgcaaaaaccaataataataataacgaaatncaccatgacactatttctagatactattctagtgtctattaacatttctagacactattaacatatttaatatatcaaatatgccctattttgattttgagtgtttaattctggtattatatttttaactctatttattagaaaagatatgtcaaattaagataactggcataattttattaagagatctcaaaagattttccaaaacaatgtccctgttggtctgaagatacacaagtataacatatgttatacccaagtcatttcaytggataaatgttaactaagcatagttccaatgcttttataacccgtagctgatgcatgtaatgtttaaatggcaaagccaaagagacaacaagcaaaagtccaaaacttctcctgagcactggcagataggctctcaggagacatatcccagaagatatttcagaatcctaaaactgtggaaatctattaataggaaacaatctcacaatataatcaatacagatggagtaaggtaaatttagatcattctggggtctgcaggagaaaaaaagggtataaaatggaggcttttagtttgttgaagttgtacacactgcagttttagtttgtgaagtagggtagacaagttgagatactttttagaaataatataaaagacaggtcagcctagagaataaggagtaggagaagagagtgagagaaaaagtgggcagtaatcatagacaggcttttaggggaagaaacaaattatttggagaggatttctagcgatttttgcaatataaaaaatcactccatcactccaaaaatatagatttttttcagtaaaaattaaatgttagttaaatttaagttttggggggagtacaagaacattttaagactggcttcaaaaagtcctagcaaaagcaagagggttttggtcactttgaggttaatggagaagatattcacacacagaaggcattttgaaagagtaatttcagagtatattcacatccaaggaaaattacattttttgatatccttgctttttataaagcaatgaaattttacatagaattagctatataaaatatatttgataaaagcctgaaatattatactagaaagtcattgtatttttaaaatagaatttcgagtatgtcagtacttagagtgtgaggcggaagacagcacagtacaggatagagctgagaggctttgaagccatattgagccagacctctttggtgtgaccccttggttaagtcatttaatttaactaagccctgttttctcatttttaaaattataggagtgagaataacttcatagcgttattgagaggactgtaaataagtaaagtgactacttaattatgatgatgattataaatgttacatcacattaaacatgcaaaacatttattgcagtgcttgacatataatatacattccgaaaagaattccagttcctttcctttctctctgcaattggcatatcaagctaaggtacaagaaagcagccagtgcaacaaggactggcatataccaaaatgagatgaggactcacttggaacactgaagtagctcagcatgtgattcagaaactagaaaataagaacaacaacaaaaaaataataaccaggacatagaaaatacattagacattcttgactaagggttccagcaacaactgatgtgatacaattaattgagtatagcagactccacagtatttttacatgtatgttattatcctatgaagtatccagaagacacaagcagacatattatatcagcaaatgttaccaaaaagtactagcaggatacacatttcctcagatgggctgctgataaaagtttttgtaacatttaagttgcttttatttttatttatgttttgactaggcaatacatgcatataatagaaatccgagtttaaaaatgatatttatacatagtaaaaaatctttctattcttattatccagctatataaattcattcctcagatataatctatgcatacagaaccataaacctgcatacttctctttttacaaattccatacattgatacatata

SEQ ID NO: 42382 - DNA, 548 bp, Homo sapiens
tcattaggcattcttgaacaactccttgaaaagccttgaaaagcaaactaccttaaaaactcttgtaaattatataaaggcaaataaaattattaattaaataactaatatgcttcattgctttcatttattaaggtcataaggatcccttactattatagtttttctagaaatctaaraattttggtccttaaagggtagtactgagaccaccaccatgcagcagcagcagcagcaaaaacagaaacagccaggaagatcacctgaattttcaggtcccaccatagacctactgaatcagaaactctggggatagggcccagcaatctgttttaagattccaggtgattttgatgcaatctacaatgtgagaatctgtgtcttactctgagggaagtcttctctcaactttcctatgtctctgaagctaatcagccacttcaaaattctactctacacttaaattacacgattttaaacaactgtttggcacaataatgtaaatattattaagaagtaattgttcaaatcattgaaaaattggtttg

SEQ ID NO: 42383 - DNA, 623 bp, Homo sapiens
caatatttgtaagtaacaggcaggattttaacccagtccctgaatgcttacaggttcataggctaaagtaatcacctaaaaatcaaacacagatgaacctaaaaaggcaaagctttttttttctttttaaaataacatgacaaaagtaagtaaaagaaaatggtcctccagagactccaagctttctcatgactgcccttactaaaaaagctccacgagaacccacacggggtttgggatgccagggatgaaggacgtgccctgaggaagtggtttgtgtgggatggtcagaccatggtgaatagtatttaacatggttgatatatatgtaccagatagttcttcagctatataaggatcttgggaatgaatgctcagtatgtcaaattgatctgtttctttastcagttccaagtgtccatcccatttttttttctcacatacttgttggagaaaggcccgctgctctggtttgaagtatcgaaggggaatgaacatgaaggccatggtagggactgtcaccaaaccctactggcttcctctgtgctaaatgtccttgcagccaggccactcagtctctgaacagcactgtcctccacccctagttttacctcctgtattca

SEQ ID NO: 42384 - DNA, 544 bp, Homo sapiens
attgtgaggcttccccagtcacgtggaactgtaagtccaattaaacctctttgttctgtaaattccccagtctcagatatgtctttatcagcagcatgaaaacaaattaatacattcaccattacacatgccacagtcaaatcctctcacagttcacggttgtatctggcacccccaaaagccaaagaggtcaggataggtcatgcaatacaggaaagcagagctatgaagaatctgtccatgactcttggaacttcacaaagaaaaaagaacacccaaaaagggataagcagcaccttttttctgagttttaggggttcaagtcattagaggccttctctagactttttcttgtaccaaagatgatgacgagggaaggagaaatgggggaaagaaaggtaaatgaaagatcatttgtttttgtttttaaagacaggaagcaaacacagaaaccaagtgcatggytttgttttgctttgctttgtttctcttttgcagctctgaggaatttaagccaattcagagaggtcttgttatccataat

SEQ ID NO: 42385 - DNA, 1037 bp, Homo sapiens
tgatgtcatgagttcagtgggccagcatatcttgtgagatggtaagatgggtcaggatccctatgtgctaacttgtagcagagtcagaaagttcatgtaaccatgagacagtgtagattgatgtgtgttatatctgttgttttctgctattaagccaaagaaaaatacttcactggattaatgtcttccttttcaattgcatttatttgtttatttatttattttaccttcttgccttcatcaatgtcttgtttgtatttcgtacttttctctctctctctctctttctctttcttttcattttttaagagataggggccgggtgcagttgctcatacctgtaatcccagcactttgggaggccgaggcaggtggatcacctgaggtcaggagttcaagaccagcctggccaatatggtgaaaccccgtctgtactgaaaatacaaaaattagctgggtgtggtggcaggcacctgtaatcccagcattttgggaggctgaggcaggaaaattgcttgaacccaagaggtggaggttgcagtgaactgagatcaaaccactgcactccagcctgsgtgacagagcaagactctatctcagaaaaaagagagagagagagagagagagagagatggggtattctgtgttgcccaggctggtctcaaactcctgggctcaagtgatcctcccacctcagcctcccgaaatgctgggattatgactgtgagccaccatgtgtggcatccctttcttttcactaacactctctcaaaatagatgtaaccattcttctgacttctaatatccttgatcagtttttctgattcttgaacttcatacactggcagtgtataagcactatacctgctccagattcttgccaaatattggtattgtcaggttttctttttaatgtaagcctttctagtagatgtagtactgttctgtgttttcttagattcaattctgtatttgtgtatttggtatccattaatcatagggccaaactgccagccaaagttgtttacatgtcccct

SEQ ID NO: 42386 - DNA, 582 bp, Homo sapiens
tttctatacaattaaaaacatgttttaaggtatttttatgttttttagttatcttttatttggaaacattttaatttgcrtgatttgtctaaaattctcaatttttctttattagatattacagtgacagagagaaacacagaaaactggatgatcacaggagtagagatcacaggtcaaatttggaaggaagtttaaaagatagatctcattctgatcatcgttctcactcagatcatcggttacattcagaccaccggtcaagttctgaatatacgcaccataaatcttccagggattataggtatcactcagactggcaaatggaccacagagcttccagcagtggccctaggtcaccactagatcagagatctccttatggctccagatctccatttgaacattcagttgaacacaaaagtacaccggagcatacctggagtagtcggaaaacataacaaaaactgatacttcgtctttctggacttttcttttagccatatatcataaaccaacacagtaattgccttacatgacttgaaagatataaacagatcttctatcagtagcagtattgtt

SEQ ID NO: 42387 - DNA, 1222 bp, Homo sapiens
attcaagtggttgggggccttakaattttatttttggcttacaatgtttataataatgagggataaaaaaggaaataaactttctccttgtatgtgtggagctgtggatggatctgaaacaatgtgtggcccatgatgctctcagctgcctatctccagtgcacccccataaatacagtttccagagcagctggaggaacaactgggacacaaggagattagtgaatattcattaattttagctgctgccaaggtgaatcttcccaaatcctgattatgtttgtttaagtgaaacatctgccaataaaagggaggcatgtttatagtaacggcagctccatggcttctgttctctgaataatcataatactgacactgactgtattgccttgtccttggcaattttcttttgttctttttttattattacagagtaataaactctgtaaagtgaactttctcatgctactgggattgctagcagttacagcaataaaagagctgtttgttgtctttccatttggaaaatggttggtaggagcaagggaagcactcaggaagcaaccgggtttgctaacataaaccacactcgagcatttctgtccagagtttatacactaaccagggatgaaccagctgagaattgtgggaacatgctgtatatactcacagatacgagcagcccaagtgtgaattgtcctgtgttttcaatatttcagtaacagtaataaatatgaagtcaacgatgaggagatagagctgtggaagatatgcgaatagatttcatctgtatttcctgagtattattgtttccattgtttatccataactttatttgaataaaaatgggctattataagaacataaaacttgaggtcttccatgtttccattcaacaaataccttagggcccattttgtgaagtatcctttcttgaagggtgactaagatgagtcatacatagtctctggcttcatggaaattttagtctagtagaagtggaagaaaggcaggtgcatatctacttgtttgtaccaagcacacagtccatataaatcatcaggccaggcagtgaggatacaacagcagctaataataacacaaaatgccacacaatgtgtggtttgaaacaagagaaatccactctctcatggttctggagactagtagttggaaatcaacatgttgataggaccatgctccctctgaagcctccagtgaa

SEQ ID NO: 42388 - DNA, 1222 bp, Homo sapiens
attcaagtggttgggggccttagaattttatttttggcttacaatgtttataataatgagggataaaaaaggaaataaactttctccttgtatgtgtggagctgtggatggatctgaaacaatgtgtggcccatgatgctctcagctgcctatctccagtgcacccccataaatacagtttccagagcagctggaggaacaactgggacacaaggagattagtgaatattcattaattttagctgctgccaaggtgaatcttcccaaatcctgattatgtttgtttaagtgaaacatctgccaataaaagggaggcatgtttatagtaacggcagctccatggcttctgttctctgaataatcataatactgacactgactgtattgccttgtccttggcaattttcttttgttctttttttattattacagagtaataaactctgtaaagtgaactttctcatgctactgggattgctagcagttacagcaataaaagagctgtttgttgtctttccatttggaaaatggttggtrggagcaagggaagcactcaggaagcaaccgggtttgctaacataaaccacactcgagcatttctgtccagagtttatacactaaccagggatgaaccagctgagaattgtgggaacatgctgtatatactcacagatacgagcagcccaagtgtgaattgtcctgtgttttcaatatttcagtaacagtaataaatatgaagtcaacgatgaggagatagagctgtggaagatatgcgaatagatttcatctgtatttcctgagtattattgtttccattgtttatccataactttatttgaataaaaatgggctattataagaacataaaacttgaggtcttccatgtttccattcaacaaataccttagggcccattttgtgaagtatcctttcttgaagggtgactaagatgagtcatacatagtctctggcttcatggaaattttagtctagtagaagtggaagaaaggcaggtgcatatctacttgtttgtaccaagcacacagtccatataaatcatcaggccaggcagtgaggatacaacagcagctaataataacacaaaatgccacacaatgtgtggtttgaaacaagagaaatccactctctcatggttctggagactagtagttggaaatcaacatgttgataggaccatgctccctctgaagcctccagtgaa

SEQ ID NO: 42389 - DNA, 1222 bp, Homo sapiens
attcaagtggttgggggccttagaattttatttttggcttacaatgtttataataatgagggataaaaaaggaaataaactttctccttgtatgtgtggagctgtggatggatctgaaacaatgtgtggcccatgatgctctcagctgcctatctccagtgcacccccataaatacagtttccagagcagctggaggaacaactgggacacaaggagattagtgaatattcattaattttagctgctgccaaggtgaatcttcccaaatcctgattatgtttgtttaagtgaaacatctgccaataaaagggaggcatgtttatagtaacggcagctccatggcttctgttctctgaataatcataatactgacactgactgtattgccttgtccttggcaattttcttttgttctttttttattattacagagtaataaactctgtaaagtgaactttctcatgctactgggattgctagcagttacagcaataaaagagctgtttgttgtctttccatttggaaaatggttggtaggagcaagggaagcactcaggaagcaaccgggtttgctaacataaaccacactcgagcatttctgtccagagtttatacactaaccagggatgaaccagctgagaattgtgggaacatgctgtatatactcacagatacgagcagcccaagtgtgaattgtcctgtgttttcaatatttcagtaacagtaataaatatgaagtcaaygatgaggagatagagctgtggaagatatgcgaatagatttcatctgtatttcctgagtattattgtttccattgtttatccataactttatttgaataaaaatgggctattataagaacataaaacttgaggtcttccatgtttccattcaacaaataccttagggcccattttgtgaagtatcctttcttgaagggtgactaagatgagtcatacatagtctctggcttcatggaaattttagtctagtagaagtggaagaaaggcaggtgcatatctacttgtttgtaccaagcacacagtccatataaatcatcaggccaggcagtgaggatacaacagcagctaataataacacaaaatgccacacaatgtgtggtttgaaacaagagaaatccactctctcatggttctggagactagtagttggaaatcaacatgttgataggaccatgctccctctgaagcctccagtgaa

SEQ ID NO: 42390 - DNA, 1222 bp, Homo sapiens
attcaagtggttgggggccttagaattttatttttggcttacaatgtttataataatgagggataaaaaaggaaataaactttctccttgtatgtgtggagctgtggatggatctgaaacaatgtgtggcccatgatgctctcagctgcctatctccagtgcacccccataaatacagtttccagagcagctggaggaacaactgggacacaaggagattagtgaatattcattaattttagctgctgccaaggtgaatcttcccaaatcctgattatgtttgtttaagtgaaacatctgccaataaaagggaggcatgtttatagtaacggcagctccatggcttctgttctctgaataatcataatactgacactgactgtattgccttgtccttggcaattttcttttgttctttttttattattacagagtaataaactctgtaaagtgaactttctcatgctactgggattgctagcagttacagcaataaaagagctgtttgttgtctttccatttggaaaatggttggtaggagcaagggaagcactcaggaagcaaccgggtttgctaacataaaccacactcgagcatttctgtccagagtttatacactaaccagggatgaaccagctgagaattgtgggaacatgctgtatatactcacagatacgagcagcccaagtgtgaattgtcctgtgttttcaatatttcagtaacagtaataaatatgaagtcaacgatgaggagatagagctgtggaagatatgcgaatagatttcatctgtatttcctgagtattattgtttccattgtttatccataactttatttgaataaaaatgggctattataagaacataaaacttgaggtcttccatgtttccattcaacaaataccttagggcccattttgtgaagtatcctttcttgaagggtgactaagatgagtcatacatagtctctggcttcatggaaatttyagtctagtagaagtggaagaaaggcaggtgcatatctacttgtttgtaccaagcacacagtccatataaatcatcaggccaggcagtgaggatacaacagcagctaataataacacaaaatgccacacaatgtgtggtttgaaacaagagaaatccactctctcatggttctggagactagtagttggaaatcaacatgttgataggaccatgctccctctgaagcctccagtgaa

SEQ ID NO: 42391 - DNA, 768 bp, Homo sapiens
gggtacaggtgaatgcacaaagagggaaggggcacaagggatagaggctggtttccacaggtctatgtgttagtcaaatcttatccaataggatacttaacatttgtgcatttcacgatatataaattttatcttaaaaggaaaaaatgtaaataccaattccagttaatatatatggtacaattttgggatggagtgtattactgtttggaactaacattgaaattcatcaaaaaatgttggattagatagaggaatagataagtggatagataagtgatgaaacatgtttatacagtaaaatattattatagagtctattggtgatgtgggtgttcatattaacttctttcaatctttgagatttttcytctgaaaatactgaaagaaacaatctacataaagaaactgagaccactagacatggacagttgtctaagggcagtggctagttacaatattcggttttcagtttttaccaaaaaaatctgttcatttttaactagtatacttggcttatcgaataaatatgatataaagtaattaaaagagttattaggagatctaaaattgtcacgaagtaaaatagcatcttagaaatgtgcacttaattatgacaaaaatatcaacacttttttagagtattctggcaaacatatttagttttttcctttcattttttaactcccacgcaacaccgatattcatatttaatttttaaaaactacaatttctagggacctgaggctaaaagagaaggcggtggtc

SEQ ID NO: 42392 - DNA, 1215 bp, Homo sapiens
caagacttgaggaatgacatgtggtaaattccctagtttcctcatttcctcctaaatgtcggacaaggcactacagaattctgcagccctgcaccatgaataggcacagacaaaacaaagacccatggaaagcctgttttcctgagtcaaagaatagaaaaaagtgtggcccaacaatgaaaaacctcatcagcttcttccctagtccaaccaaacactgatggaacaactgcattccccaaacctcaacccccagcacagtttcagcagagccaaccaggaagttgatattccactctaccccttaacctatggaagtgggaggcagctctccagttccctgtgggtgactttggtaggtctgactgggagctgaccttttattccctaccttatagaagcagacaatgctccagttcccccagcagattgagcaaggagmcaagcttacatccccaatcagaggcatcaaggtggtcgaagttggtgccacactttcactgggatgttgtcagtggagcaataggagagctgaacttccagcccaccatttgcaataagaccatgtgagtcagtacttcagttttgccaagttactgtcagtggggcccagagggaaactaaacatgcctgtgaagaagaagaaggaagaaggaagaagaagaagaagaattattaaataggatacaaatccaaactcttataatatgctatccaaaatatccaggatacaataaaaaatcattcatccaagaaccagaaaaatcacaacacggatgagaaaagcaatcaacggctgtcaaatgatgagataaatcaagtgttcaaattatctaacaatgatattaaaatagcatcataaaatgcttcaacaatcattcaaattctcttgaaacaaaaatttaaaacccagcaaaaaaaaagagaatttattaaagaattaaatgaaaattatagaacagaaaacaagtacaagtaaaattttaaaacttgctgtatgggctcgatagtagattgaagataccataggatagaatcagtgattgaggacagacagatagaacttacccaatctgaacaatagagataggggaaataatgaacagggtctcaaggatctgcatgatatttaaaaggaaaaaaaaattcaaagaatagctgaaaattccccttacttggcaaaagagatgaaacttcagattcaggaaactgaac

SEQ ID NO: 42393 - DNA, 564 bp, Homo sapiens
tggagtcagaaccctatttgaaatgaacaaaatgtacattatatagtctacataaattgaacaaaaattaaaacataaaacatcttaataatttttaaaacagatcttcatattttctcattctgattgtttttgtgtgtgtgtagttaaatgcatccacatttgtttttgcttgttagtgataactcatgtgtctagcctttaacttctggtgtgagagagatttaggcttctctctatggtaacagtattagttcctgctgctgctacagatgtaagagaccacagctgtgtagtgcaatgaatttccctgaatgaatttccaattaaaggacaactcttgactacttctcctaaatttagtttgttgactcttgaagctagacttaatattatttctaattttgtttcaatagttaagtttcttaatgcatctctacaacaatttttatagtcagtatttgatatagccagcactttttaaaataaaccatggctctatttacagacattagcttttaaatttattttaactaaacttatrtactttaaaatggaataatg

SEQ ID NO: 42394 - DNA, 563 bp, Homo sapiens
gcatcttacttcctccttttcctattgaagattttaagagacaaaactcctgaaagtagcacttgtacagagtttctctatatgtgggtttaattttaaaaaattgttttctggcttgaaggttgacggttttttatttctctttattcttcaaatactgtattacattttccagagttcaaagaattatttatttcactaagctctgattaaaaactaatgcaggctgatgagaatacactacatcaygattaggggagtggtggttatgagaccatatatatttgtcaaaactcactgaattgtacatgtaaaattgtgttatacgtaaattatatctcaacaaaactgaattttaagaatagagctaatgttggccgggcatggtggctcacgcctgtaatcccggtactttgggaggccaaagtggatggatcacctgaggtcaggagtttgagaccagcctggccaacatggtgaaacctctctactaaaaacacaaaaattaggccgggctcagtggctcacgcctgtaatcccagtactttgggaggccgaggcag

SEQ ID NO: 42395 - DNA, 591 bp, Homo sapiens
acccacttaaaatgtaaaattaaaaacaaattaaaatttaaattaaaaaaattaaatttaaaaaagccaccaccaccaatgtaaccactaccatcatcaccaacacaccactagcaccactaagcactggctcagcaggtagagcattttacatttttcttttttttttttttttgagacggagtttcactttttttatccaggctggagtgcaatggcacggtctcggctcacagcaacctctgcctcccgagttcaagcgattctcccgcctcagcctcctgagtagctgggattacaggcatgtgacactatgcccagctaattttgtatttttagtagagacagggtttctccaggttggtcaggctggtyttgaactcccgacctcaggcgatttgcccaccctggcctcccaaagcgctgggcttacaggcgtgaaccaccacacccagccacatttaaaattttcaatgtgaaaaactgatctatttttaacaaactgtctcatgccatatttcatatgtatcttaagtttgatggattccaaactccaaatattatgacattaatacttagttaatatggtca

SEQ ID NO: 42396 - DNA, 591 bp, Homo sapiens
acccacttaaaatgtaaaattaaaaacaaattaaaatttaaattaaaaaaattaaatttaaaaaagccaccaccaccaatgtaaccactaccatcatcaccaacacaccactagcaccactaagcactggctcagcaggtagagcattttacatttttcttttttttttttttttgagacggagtttcactttttttatccaggctggagtgcaatggcacggtctcggctcacagcaacctctgcctcccgagttcaagcgattctcccgcctcagcctcctgagtagctgggattacaggcatgtgacactatgcccagctaattttgtatttttagtagagacagggtttctccaggttggtcaggctggttttgaactcccgacctcaggcgatttgcccaccctggcctcccaaagcgctgggcttacaggcgtgaaccaccacacccagccacatttaaaattttcaatgtgaaaaactgatctatttttaacaaactgtctcatgccatatttcatatgtatcttaagtttgmtggattccaaactccaaatattatgacattaatacttagttaatatggtca

SEQ ID NO: 42397 - DNA, 898 bp, Homo sapiens
acattattattacagcagttgaaatgtgaagttgaagaacattttaatttcaaaatagtattcatgagaatcagatgacacatctatactttaactctggtgaagtgtgaaaattaaatgaacactccgtcagattctgaaagttgaattatgacccccacctccctcactaaagagatattttttcatatttagggtggcatacctcatttgtggaaaaggtctttctggcactcatcccctgtttctcaatttattgtagccatcttattaatcactgtgtttgctggggaagagccaaagtatacctaaatctagaattaaactatatagcactagggtttaaaataatagaatttgtcatcaagttgactgcctcatattcakccagtgtcaaactcaatagttgatatgtttgcttatgcaaaaatatcagagaggaaaagaaaattttaatttgtaatggatctatttctcataaaatgtcattcctgccgctctgctctttagcacatgatgaggggaagctgaggcagcttctattgtaaaggaagacccaaggaggtgccattttaggggaccttcagtctccacccagttcaggggattcacatgagcctccctgcatatatgggcgtgtcccatcactgcttcttctgcttggaagcccacaaagatggtttgctatcctagtacctcaggtcttgatggaagaaggccttggtgtgttcttaattatatcctttgcctcagatgttttgttgtcagtgtttcactcttcccagtcaggttttagggctgctaccagtctctccatgaaatagaaaccccctaatgtgctgttctgctgaacttcctcattgactgaccttgtactatgatgtctttcttcctgggg

SEQ ID NO: 42398 - DNA, 575 bp, Homo sapiens
gtggtggcgggcgcctgtagtcccagctacgcgggaggctgaggcaggagaatggcgtgaacccgggaggcggagcttgcagtgagccgagatcgcgccactgcactccagcctgggcgacagagcaagactccgtctcaaaaaaaaaaaaaaaaaaaaaaaaagaaaatcamtgttatttaggacgtgttaatgatgattaaattttccagttagttcatggattgaagaatatataaagaaattttgacagaactagaagagtaagcatgctgtaggaaatccttggcttagagctgtatagtcttatgacattgcttctagatcaatacagaagcaggagtttgcaacctctcctattggaaggggtagctgcaattgtgtatgggaaaggtgcaccatgcagagatagggaagcttcaggtgtatgagaagggtgggtgagcatagtgaagcagacagtttttggagtaccattcagctcacaacactatgtttctttgaaatatagggttcagcacctggaagtcatattcacttgtccccccccaaaaaaaatagataaatgattctga

SEQ ID NO: 42399 - DNA, 575 bp, Homo sapiens
gtggtggcgggcgcctgtagtcccagctacgcgggaggctgaggcaggagaatggcgtgaacccgggaggcggagcttgcagtgagccgagatcgcgccactgcactccagcctgggcgacagagcaagactccgtctcaaaaaaaaaaaaaaaaaaaaaaaaagaaaatcactgttatttaggacgtgttaatgatgattaaattttccagttagttcatggattgaagaatatataaagaaattttgacagaactagaagagtaagcatgctgtaggaaatccttggcttagagctgtatagtcttatgacattgcttctagatcaatacagaagcaggagtttgcamcctctcctattggaaggggtagctgcaattgtgtatgggaaaggtgcaccatgcagagatagggaagcttcaggtgtatgagaagggtgggtgagcatagtgaagcagacagtttttggagtaccattcagctcacaacactatgtttctttgaaatatagggttcagcacctggaagtcatattcacttgtccccccccaaaaaaaatagataaatgattctga

SEQ ID NO: 42400 - DNA, 761 bp, Homo sapiens
ccacgccaccccttgcccgggtgtttggggcgtgtccacgagcccgggctgtctgctgcgttcgtcagcggagcggggcgggcgtccggggtcagaggagagggctgcttgtcccggcggctccctggcctggagtctgcagactccaagggcctgggccagccccgtagccagggaaccagaatggtggcgcctgggagaggacgaggcaagcgggagatggaggtgcctccccttcccctgttggcagccagctcctgagtgggccttgccttcctgctgggctttcagcagggatgctgagcgggtggtggggtgcactgccctgctcagcccccattgaagagcccagccccttcttgtttgggagaaatggtcgctgctgtacctcctcctcctcaacygccctctctcacccagaaccaggcaggtgcactttccccggtgcctggctggagtggttgggtatttgtattgtctcaggctgagcggggtgtcactgaggatgtcagaggatgctttaggcctgaaggacaggacatgctggcgctgctgctggtggtggggatgttggggatttggggaaaatgagttataacacgagaagggtcagagagggacgaagtgtgtttgttgaatggtccctgaggaaaacaggcattgggacctagcctcggagtcaagagtgctgggctgtttccacatgtgtgaaatgagggtgatgtccctgtcctgcccatgatgtgacgtggggctcttgt

SEQ ID NO: 42401 - DNA, 511 bp, Homo sapiens
atgttctcttcccaggcctttggaggggaaatggggaaagcagaactgaagccacttggcccagaaagctgcggaytggggtgataaggggccttgctctgagcacaggtgacagatcataggaagtggctggtctggagtcccacccggacaggtggggcctcagcctggggctctctgacccggttgcagtcactgtgattcgttaccgtagatactacttaaaatgattctctaccaacaataaaccaaacccagccactgccaagcttcctgtgccctcaccccaatccctgccactgggctctggacctcaggagggcaggctgaggtggggaaggagggacttggctgtccttccccttccccgtcccctgcagcctgggtctggatgggaggagagccactgggcccctgtccccagtccccagtccccagccctgggcttggctcttggcttccagaaggcagcaaagaggggcgctgtcctgcgttcagcccctgatctctg

SEQ ID NO: 42402 - DNA, 511 bp, Homo sapiens
atgttctcttcccaggcctttggaggggaaatggggaaagcagaactgaagccacttggcccagaaagctgcggattggggtgataaggggccttgctctgagcacaggtgacagatcataggaagtggctggtctggagtcccacccggacaggtggggccycagcctggggctctctgacccggttgcagtcactgtgattcgttaccgtagatactacttaaaatgattctctaccaacaataaaccaaacccagccactgccaagcttcctgtgccctcaccccaatccctgccactgggctctggacctcaggagggcaggctgaggtggggaaggagggacttggctgtccttccccttccccgtcccctgcagcctgggtctggatgggaggagagccactgggcccctgtccccagtccccagtccccagccctgggcttggctcttggcttccagaaggcagcaaagaggggcgctgtcctgcgttcagcccctgatctctg

SEQ ID NO: 42403 - DNA, 1184 bp, Homo sapiens
tctggaacctgccgagaatacacgtgagagtctttgacctgctccagcagtcttcacccctacgtaccccctcaacagcattatctccagcctcttttgatgtttctttctttttttttttkttttgttttgttttcttttcttttggtagagacagggtcttactctgttgctcaggctggtcttgaactactgggctctcaagcagtcctcctgcctcagcatcccaaagtgctgggattacaggcgtaagccaccattcctggcctcttttgattttctttctgcggtaattttcatatctgtgcactgcttttcattccctcttctacctctattataagaagatgttacccttacttggcattataaactttatgagtgctttacatgtaatttcgcttgcttcaaacaagttcatgctctcttagcttcccaactggtctccctcattgttacctttttccagctaccctaattagtcctaaatgctttagctagattaatctttataaaatattcactcattgcttcatccaagaacattgagtgagtgctccctcactgttgagtcaagttcatgttccctgttctggcattgcaggccctatactttgtggttccaggtagagcacagcacacacagtacttgcgtgcctcaagtagtacatgtggtcccccctgcatccaccaactccatcattgttcatctcttccagcccaccttagaaatggtctcttctggccgagcatggtggctcatgcctgtaatcccagcactttgggagaccgaggcaggtggatcacttgagtccgagagttcgagaccagcctgaccaacatggtgaaactgtgcgtgcctctaatcccagctacttgggaggctgaggcggaagaatcgcttgaacccaggaggcagaggttgcactgagccacagttgtaccactgcaccactccagtctagacgacagagtgagaatctgtctcaaaaataaaggtctctaccatgaaaccttctctgttacatgctagctgaaatggtttcctctccctctggtgacagaaacatcttacttccatcttccttatgatatgtagtacattgtcttgaattatagttacttgagtaggtatgtattcttcctgtcttccttattagattatcttcttctcccagacagga

SEQ ID NO: 42404 - DNA, 802 bp, Homo sapiens
ttgtgctgttatccattcaatcaatcatttatttaacaaatatttattgagcacctactatgtgctggccacatcacagcatctaccacattgtagtgtctgtttctgtgcttgcttctacactggacagtaagctccttgagggcagggacacattaccaggacccagcattaatctacttcacaattgtkcaactgtgtggcaacggcccagatcatcagctccattttacagattagaaaaccagggaccccttgacaatggacatgtgcaagaagaggaaaggttttctaaagtacacacctgacatggcagcccccacacttgcacaatccttccatgccttcccactgtcttccctaaaaggttaacctatttaccccacccacaggcctctgcatgacaggtctctcctctctcccttctcctacagtggtcccagcttccggagcctttgtaattctttctaaactccactgtctctctgtctcgttcatcttggtttctcaaatgcctgatacatggtatatgtatgagtgaatgaagaatgaatgaacaaattacatttcataggtatctgaaactcaagatgtctaaaactcatcaccttccctccaaagaaaactcttcccttcacccttctgtgttcactgtctccgtgaacatcctcatcaaccatccaatctctgcagccacaaactggatgtcccccaactcctgctcctccctctccctcccctcactttgttgtctaatcaatctctggatactaatcgttttacctcgggaataccctctgat

SEQ ID NO: 42405 - DNA, 627 bp, Homo sapiens
gccaagccttctgctggagaaagaggttgggggatgaggagcaaccagctccaagtcttcatgtagaaagtagtgtttggtgggagctctgcaactcagcaatcattaagatgaggtcaaggatggtaactcaggggtgggcatagactggcatatccccttgagagtggggaacctgcaatccagggatagagagaggcacacccatctggaatggtmcctggcctgccaccctcaaggagcctagaaatagttggcctctatggaggtgggaggccggcagatgttacaaatatcttgaatttgtatctactgatattatgtgtggagtttcatggttttctttccttactgcattataatttccctctgtaatttgtgagccttctgaaacgtttttctaaaaagaacttaggggctcttgtccacatttgaggaaatctgcaagggaggaaggaaagactgaaaagttggtgatctgatagtaagagaatgagtatgcatatgggaagtggccaaggaaaccaacaacagtcagagcagaaataccaagaataaaagaatctgataaaattaccagattcccgtagtcatgtttgatgggagcctggactacttgaatattaa

SEQ ID NO: 42406 - DNA, 627 bp, Homo sapiens
gccaagccttctgctggagaaagaggttgggggatgaggagcaaccagctccaagtcttcatgtagaaagtagtgtttggtgggagctctgcaactcagcaatcattaagatgaggtcaaggatggtaactcaggggtgggcatagactggcatatccccttgagagtggggaacctgcaatccagggatagagagaggcacacccatctggaatggtccctggcctgccaccctcaaggagcctagaaatagttggcctctatggaggtgggaggccggcagatgttayaaatatcttgaatttgtatctactgatattatgtgtggagtttcatggttttctttccttactgcattataatttccctctgtaatttgtgagccttctgaaacgtttttctaaaaagaacttaggggctcttgtccacatttgaggaaatctgcaagggaggaaggaaagactgaaaagttggtgatctgatagtaagagaatgagtatgcatatgggaagtggccaaggaaaccaacaacagtcagagcagaaataccaagaataaaagaatctgataaaattaccagattcccgtagtcatgtttgatgggagcctggactacttgaatattaa

SEQ ID NO: 42407 - DNA, 627 bp, Homo sapiens
gccaagccttctgctggagaaagaggttgggggatgaggagcaaccagctccaagtcttcatgtagaaagtagtgtttggtgggagctctgcaactcagcaatcattaagatgaggtcaaggatggtaactcaggggtgggcatagactggcatatccccttgagagtggggaacctgcaatccagggatagagagaggcacacccatctggaatggtccctggcctgccaccctcaaggagcctagaaatagttggcctctatggaggtgggaggccggcagatgttacaaatatcttgaatttgtatctactgatattatgtgtggagtttcatggttttctttccttactgcattataatttccctctgtaatttgtgagccttctgaaacgtttttctaaaaagaacttaggggctcttgtccacatttgaggaaatctgcaagggaggaaggaaagactgaaaagttggtgatctgatagtaagagaatgagtatgcrtatgggaagtggccaaggaaaccaacaacagtcagagcagaaataccaagaataaaagaatctgataaaattaccagattcccgtagtcatgtttgatgggagcctggactacttgaatattaa

SEQ ID NO: 42408 - DNA, 585 bp, Homo sapiens
ttttatgacaagtccattaacatgattgtacacagtacatcatcagaggcaataatgggaaatatgtgcaggcccacatctttccaaaatgcatattctgtattatctgaatatttcctagcagacgctagaaaaaataaatgctcctccccaaagcaaagagtggtcaagtgtccatttcttcttggttctactattgcaagaggaagaattgttttcttttaggaaaaaaaaaattagcttccttcaaaggcattaaagaaaaagggaaaataaggtggccacaaatcttattctggtaaagtgcacctgcttaggtatcttatgtaagtcttattttttacactctttctttacctgaactccccaatacctacacacacacaaaaagaacatrtctctcttccattgacacacacaaaaaaactttactcacaaaagaagcagaattgtatcttttttttttttaagtaaattgatctctgcaagccatcacttcattgtgccaggaactgggttttaaaccctatcttctcatctaggaattgatttgtgtttaaaggaaaaataaagcaggaacaggga

SEQ ID NO: 42409 - DNA, 407 bp, Homo sapiens
cttaacccctaaggtaattgtattcagaaagtgattggatcatgaggtatgagaccttatgaatgggagtagtgcctttataaaggaggcctgagggggcttttttgtctttccaccacatgaagacacagctagctagaaggtgctatctttgaaacagagagtgaattctaaacagacattacatctgctggtgacttgaccttggactttctaccttcagaactatgagctataaatgtatgctgttcataaattactcagtcyaatgtccttttaaagaacaacctaaaaagcctaagacagggagagaggatagcagaatcaaagttgatgttcaaatgttctgttcaatagatagatctctagaatataagttccatgaagacagtaattttcttccattt

SEQ ID NO: 42410 - DNA, 515 bp, Homo sapiens
ccccatggagaccagagatgataaataaacaaaatctaaaggtaaactggttcagaaatgtagtgtccactcttcaggatttgcttattcctatatgctatttgcaagagacatgtckaaaattcaaggccataaattatttaaagcaatactaattaaaataaatagtcattgctaatgctttttaccatgagtcactacatattgatacaaggttcaattcattagaaagaattctaaacttacacatacttaataatgaaactccaaaatatggaccacaaagagaacctcctaaatatagcaacacggtagaagattttaccataggtcgctcaataaatgatgctgcaaacagataaaaatttggtaatgatacagtgacttgagcaacccaattaagaagcttaatcttctgtatggaatgcagctgaggtagcatacaaaatgttactttttaaacttaaatgtttctaatagaaaatatcaatgaaaactaaacaatttaataagct

SEQ ID NO: 42411 - DNA, 515 bp, Homo sapiens
ccccatggagaccagagatgataaataaacaaaatctaaaggtaaactggttcagaaatgtagtgtccactcttcaggatttgcttattcctatatgctatttgcaagagacatgtcgaaaattcaaggccataaattatttaaagcaatactaattaaaataaatagtcattgctaatgctttttaccatgagtcactacatattgatamaaggttcaattcattagaaagaattctaaacttacacatacttaataatgaaactccaaaatatggaccacaaagagaacctcctaaatatagcaacacggtagaagattttaccataggtcgctcaataaatgatgctgcaaacagataaaaatttggtaatgatacagtgacttgagcaacccaattaagaagcttaatcttctgtatggaatgcagctgaggtagcatacaaaatgttactttttaaacttaaatgtttctaatagaaaatatcaatgaaaactaaacaatttaataagct

SEQ ID NO: 42412 - DNA, 566 bp, Homo sapiens
aaatgggatctctttttgtcaagtcccacttcttccttgctaatggaaacctgtttctgaggatctctgtcttctgtgcagcaatgtgcctcagggaaagctgaccccatccagcatcaggacacgcattcacttctcatgaataaacacatggtctcgccctggttgtgtgttatcagttaaagtctgatgaaccttttagaacacattctttaatcctaatagagaagcaggaggtgacactcttttcttccacaagataccagtggatcatatgtgaagtttgtaaggttgcaagcaatcttcctccggcctgacagtgaaataagcacttaggatggcaaaatggaaaaagaaaagaaaaacaacaaacaaacaaaaaccccaamcttggacattgtggttatccttaagaaactgaaacctacgttacctctgtacttaccattatgtgagttgattaagtttcttttttttaatgccatcttgaccagcagccagaatctttctgggggtttaagattcctcattggtctcttgtctcccgttctgctgcagccgcaatg

SEQ ID NO: 42413 - DNA, 520 bp, Homo sapiens
tggctcactgcagccttgacgtcttagtttcaagccatcctcccacctcaacctcccaagtaaccaggacagcaggcacacaccaccacttctggctaacttttttttttttttttgtattgtattttttgtagagagtaggtctcacagtgttgaccaggctggtctggaactcctgacctcaggtgatctcctgccttggcctctcaaagttctgggattacaggcatgagctatcatgcccagacaattatgatttttgagacagttgcagtttttattatgtcagtaatttttcaaatttgaaatttgaaaaattataagtaatttgaaaaattactgacttataatggaaaaaaggtccataattattratatgttttctagtgaaaactaacctcaacattttgaggctgaagctctgaatgtattgagatgtaattttactccatattgaaaattgtaatgaatacagtcaatcgttattttgttttatatcttattagactgagagatcaat

SEQ ID NO: 42414 - DNA, 908 bp, Homo sapiens
gtcttgcctcctggggtgttacactccagcagaggattcagaaacatttcaaaagatacaatgacatttttttttaaaatctatcttttagaagaagaaaagtcctgtgggaaaagacagaagtagagcagaatgaaaggaaagtcaaggcctggtccagaaggactcagtgagttcgggttgaaggagtgaataaattaatccatcgatgccctaagcctcttcaaagttacttgacattaaattccccatcctcacagccttctctgcttatctgcctctgccctttgtttcccaatcttcagcacagaaggaacttagtaaatgttagatgaatagatggacttttgctgtgggtcccgaatgagggcttcctcccatctcaagtggacattgcagtggagactcagttctgaattcggagtcccccagggtctctcctcatcaattcagaagccatcctrcctcacagcagcttgatcataaaacacagcccagccagcactgggcactttgactcactgttttattaatgggttccttctgcaaatatttatcacctcctttgggatttcaggtagctctaggccctagtctgcatttactttgtccttgagaaagaacagaagctgggtttttctagttgtcccctgtgagagtggggttcagatgaatggtctggacagaaacaaatcataccatctcacccaggggaccaaccaacaacctcccgaagaacagatgagggacgtcctttgaaaagtaaggtctagatcaatgtgattatctgtgattcataggcccgcagagcctcaccaccctccctaggggcactgcacatagtctttgcttggctaatgcttgacggttgctgccgcagagtcaggtggataaggcgggggttggtg

SEQ ID NO: 42415 - DNA, 1098 bp, Homo sapiens
atggcagctttgtctcactgtaaggcaacccagacagagctgagggcctgtgctgggccgggagctgtcctcctccttccctagcagtcctagggaaggaccagccgtgtctctccccaccccacccctggtcttagcccaggagacacacagggaaggtaggaagagggtctccctgtgggctgacgcctgtgaagggacaggacctgggagaagaggggtgtgtgggtggggcagggaccactagggccctgtagagcatgggcttgggctacacaacagggctgcccctcctgggctagaggcagtgccctctgcaggagctgagaawgtccagtcctgagaaaggacgtgtatggcccagggtgggtgactgggccccaaaagcagtcctcgagggagtgaccacattaccaggccaggatcctgagacctgcccagtgcactgagggtgcacctggggcctgtcccacctgatgtccccaagtgccccgcaaggtctgatctctcagcctccatctacctcccccggggggtgggggcttgctttgagctgtccccacctttctggatagaactaatgtacttcttacatatattgattgatgtctcatgtctccttaaaatgtataaaagcaagctgtgggccaggcgcagtggctcacgcctgtaatcccagcactgtgggaggccgaggctggtggatcacgaggtcaggagatcgagaccatcctggctaacacatagaaactccatctctactaaaaagtacaaaaaattagccaggcgtggtggcgggcgcctgtagtcccagctacctgggaggctgaggcaggacaatggtgtgaacccgggaggtggagcttgcagtgagccgagatcgcaccactgcactccagcctgggcgacagagcgagacgccgtctcaaaaaaaaaaaaaattatctgggcatggtggtgggtgcctgtaatcccagcctttcaggaggctgaggcatgagaattgcttgagtctgggaggcagaggttgcagtgaactgagatcgcgccactgcactccagcccgggtgatagtgtgagacgccgtctcaaaaaaaa

SEQ ID NO: 42416 - DNA, 610 bp, Homo sapiens
gtaaagatctctgttttagaaacccacttacagtggatcagtcatgcaatcctagcactttggaaggctgaggcaggaggatcgcttgagcccaggggtttcagaccaaaattggcaacataatgagactcctgtctctataaaaaaaaaattaaaaaaawaaaaaaaaagttgggcgtggcggcgtatgtctgtagtcccagctactcaggaggctgaagcgggaaaatcccttgagcccaggaggtcaaggctgcagtgagctataattgtgccagcgcactccagcctaggtgacggagtgacacccccgtctcgaacaattactactgctactactaataaaagaaactctcttttagaaatcatcaccagatatccttaagacacagaatgggggtgtcctcactagggatctccagtgagagagggatatggaagaagagcaaatgtttagttttagaaacaccaaaaataaaaggctgagtggacactgatatgtttttcctttttgtcctctttctccaagttcttggagaaacgaatctaccccatcccatgctgaggtcctactataaacttgattttctggtgggagaattctcagccc

SEQ ID NO: 42417 - DNA, 581 bp, Homo sapiens
taggcactttaagctccagagaaaagtgtgatggaaataccaagttacattattctaggcaaagttgaagaaggaatagttcaagggacaatgctgtcttttctgaggctgtatctcattaataatgcattataatttagaataaaaagtaatgttgcatttcttacattcagtataactctagcttgttttcacgacctcttcataagcttaatgcatgagttttatttgattatcaaactgttttggatgtcagttatgtcaaacacataggtagattagggtatatgatgataaatggcatattttctatttcagaagataggcatgcatattaataattgaaaggcaaaactgaaagttttgagccacatgatttttataaaaaaattacagaaatttagatacaataagatcactttcaacctagggaagctattcttcttaacgtctctgtrttaccagtctcattcacttagcaaccttatcttgcatatggaaaattttacctgagtgtgttgaactgtttcactcatctcttcttttataccttagttctcttcctctatgtgttcaaggga

SEQ ID NO: 42418 - DNA, 649 bp, Homo sapiens
aaaatatataaaaatctctcttaaggtaaattatcagaaagaattttttagattctcttttatattgtcttctacttcctaccaaagaagtttttccctcctaagctttttttttcaatctcytacaaacatctcaagtacttttacctgaacacttgttatgcatttgaaaaaaggaggcactcatgaatgaaaccaacaagacaaatatttctcatttaacaggagatactgataatgcgtacctagagatatactctcaaaaatttcatgaaccaactcactacactcctctatgacacttctggggaagaaaccttcatctttatgctcatgcactccgattttgttttgcattgtttttatttatttgtttttcattacattaactgtttggcagaggaatagaagtcatcaggtatggggaatttccttcacttgtacattccaaaatgtattttcctaaatcaatatataatagataatgttctaagaaaatgcattggccatttgccatgaattcttttcaagattatctgggtacaaagacaggcctaatgataacaaggaaatgcgggcagagatgacacaatctaccatccccttgcagattggctttttctaagtcagaaggggaaactggctgtat

SEQ ID NO: 42419 - DNA, 649 bp, Homo sapiens
aaaatatataaaaatctctcttaaggtaaattatcagaaagaattttttagattctcttttatattgtcttctacttcctaccaaagaagtttttccctcctaagctttttttttcaatctcttacaaacatctcaagtacttttacctgaacacttgttatgcatttgaaaaaaggaggcactcatgaatgaaaccaacaagacaaatatttctcatttaacaggagatactgataatgcrtacctagagatatactctcaaaaatttcatgaaccaactcactacactcctctatgacacttctggggaagaaaccttcatctttatgctcatgcactccgattttgttttgcattgtttttatttatttgtttttcattacattaactgtttggcagaggaatagaagtcatcaggtatggggaatttccttcacttgtacattccaaaatgtattttcctaaatcaatatataatagataatgttctaagaaaatgcattggccatttgccatgaattcttttcaagattatctgggtacaaagacaggcctaatgataacaaggaaatgcgggcagagatgacacaatctaccatccccttgcagattggctttttctaagtcagaaggggaaactggctgtat

SEQ ID NO: 42420 - DNA, 649 bp, Homo sapiens
aaaatatataaaaatctctcttaaggtaaattatcagaaagaattttttagattctcttttatattgtcttctacttcctaccaaagaagtttttccctcctaagctttttttttcaatctcttacaaacatctcaagtacttttacctgaacacttgttatgcatttgaaaaaaggaggcactcatgaatgaaaccaacaagacaaatatttctcatttaacaggagatactgataatgcgtacctagagatatactctcaaaaatttcatgaaccaactcactacactcctctatgacacttctggggaagaaaccttcatctttatgctcatgcactccrattttgttttgcattgtttttatttatttgtttttcattacattaactgtttggcagaggaatagaagtcatcaggtatggggaatttccttcacttgtacattccaaaatgtattttcctaaatcaatatataatagataatgttctaagaaaatgcattggccatttgccatgaattcttttcaagattatctgggtacaaagacaggcctaatgataacaaggaaatgcgggcagagatgacacaatctaccatccccttgcagattggctttttctaagtcagaaggggaaactggctgtat

SEQ ID NO: 42421 - DNA, 649 bp, Homo sapiens
aaaatatataaaaatctctcttaaggtaaattatcagaaagaattttttagattctcttttatattgtcttctacttcctaccaaagaagtttttccctcctaagctttttttttcaatctcttacaaacatctcaagtacttttacctgaacacttgttatgcatttgaaaaaaggaggcactcatgaatgaaaccaacaagacaaatatttctcatttaacaggagatactgataatgcgtacctagagatatactctcaaaaatttcatgaaccaactcactacactcctctatgacacttctggggaagaaaccttcatctttatgctcatgcactccgattttgttttgcattgtttttatttatttgtttttcattacattaactgtttggcagaggaatagaagtcatcaggtatggggaatttccytcacttgtacattccaaaatgtattttcctaaatcaatatataatagataatgttctaagaaaatgcattggccatttgccatgaattcttttcaagattatctgggtacaaagacaggcctaatgataacaaggaaatgcgggcagagatgacacaatctaccatccccttgcagattggctttttctaagtcagaaggggaaactggctgtat

SEQ ID NO: 42422 - DNA, 649 bp, Homo sapiens
aaaatatataaaaatctctcttaaggtaaattatcagaaagaattttttagattctcttttatattgtcttctacttcctaccaaagaagtttttccctcctaagctttttttttcaatctcttacaaacatctcaagtacttttacctgaacacttgttatgcatttgaaaaaaggaggcactcatgaatgaaaccaacaagacaaatatttctcatttaacaggagatactgataatgcgtacctagagatatactctcaaaaatttcatgaaccaactcactacactcctctatgacacttctggggaagaaaccttcatctttatgctcatgcactccgattttgttttgcattgtttttatttatttgtttttcattacattaactgtttggcagaggaatagaagtcatcaggtatggggaatttccttcacttgtacattccaaaatgtattttcctaaatcaatatataatagataatgttctaagaaaatgcrttggccatttgccatgaattcttttcaagattatctgggtacaaagacaggcctaatgataacaaggaaatgcgggcagagatgacacaatctaccatccccttgcagattggctttttctaagtcagaaggggaaactggctgtat

SEQ ID NO: 42423 - DNA, 781 bp, Homo sapiens
ccagtgaaatgtgaattatgagtaaataataaataattttttggtatgtagggcatatgctaaatacttctttaaaaaatcagttgtttacctgaaaatcaaatttaactaggtattccttattttgtctggcaatcctaattcaggagtaaattcaataattgtagtcacaaatatcagtggccattccatgaatggactgcagtttaagtgcagcgaaggaagttgtatcagaggtctccggagaaatttaacatatatacatatatatttgtatttacatacatacagatatttttacatacatacattatatatatccctttctgtgcctttttgttctatttgggccctcaatagattgggtgatgcccatgcacattggtgagagcatcttctttattcagtctacttattcaaatgctcacctcttccagaaacaccctcacaaacagagagaaataatgttttaccaactatttgggcaccctttagcctaatcaagttgacacataaaattaaccattacagatgtgttrtaggaatatgcatatttcttacaaaaaagtgtatagggagtttctgaacacatctctgaaccattgcatatctagcagggcttatgccacccaacagacatgggtgggattattttctagaaataaaacaagtgtttgtttcagggtgacagcttaaaaaggaactagaacaattcatcattttaaaaaaaagacaaccaaggagtactttgctaacagcaaataaatatgtgaaaatgatt

SEQ ID NO: 42424 - DNA, 572 bp, Homo sapiens
attccttacattaagtgacaaaaccacacttaagtttaatgcggtaaagcttgctggagtacttgtaaatgagcatgggtggtcatccacgttttcagccactatcgatttagcactttctttgtgtcaggctctggctaggttctggagacacaaggctgttcccaaacccccatctccagagctaaacagcatgtcacatcatggttcttagccatcagaataacacacctaaaattcagaaattgctgacsctcaggctctgtctcagactacagaatctccagcagaggacccaggcatgtaagttcttccagaattgcacatgtcatttttaggtccacatcgaccttgagagaaccttctacatttttgtagatgagagaattgaggctcagagaagtgataagtgaggttgcacacctggcaaatacagcattgaacttcagacccagagcttctgaagttaagattcctaggcctttccacttggccatggccaccctcgcatatgcatggtgtgcaactctgtgcctaaatgctatgctggtaaaatgctccaagatatagat

SEQ ID NO: 42425 - DNA, 572 bp, Homo sapiens
attccttacattaagtgacaaaaccacacttaagtttaatgcggtaaagcttgctggagtacttgtaaatgagcatgggtggtcatccacgttttcagccactatcgatttagcactttctttgtgtcaggctctggctaggttctggagacacaaggctgttcccaaacccccatctccagagctaaacagcatgtcacatcatggttcttagccatcagaataacacacctaaaattcagaaattgctgaccctcaggctctgtytcagactacagaatctccagcagaggacccaggcatgtaagttcttccagaattgcacatgtcatttttaggtccacatcgaccttgagagaaccttctacatttttgtagatgagagaattgaggctcagagaagtgataagtgaggttgcacacctggcaaatacagcattgaacttcagacccagagcttctgaagttaagattcctaggcctttccacttggccatggccaccctcgcatatgcatggtgtgcaactctgtgcctaaatgctatgctggtaaaatgctccaagatatagat

SEQ ID NO: 42426 - DNA, 572 bp, Homo sapiens
attccttacattaagtgacaaaaccacacttaagtttaatgcggtaaagcttgctggagtacttgtaaatgagcatgggtggtcatccacgttttcagccactatcgatttagcactttctttgtgtcaggctctggctaggttctggagacacaaggctgttcccaaacccccatctccagagctaaacagcatgtcacatcatggttcttagccatcagaataacacacctaaaattcagaaattgctgaccctcaggctctgtctcagactacaraatctccagcagaggacccaggcatgtaagttcttccagaattgcacatgtcatttttaggtccacatcgaccttgagagaaccttctacatttttgtagatgagagaattgaggctcagagaagtgataagtgaggttgcacacctggcaaatacagcattgaacttcagacccagagcttctgaagttaagattcctaggcctttccacttggccatggccaccctcgcatatgcatggtgtgcaactctgtgcctaaatgctatgctggtaaaatgctccaagatatagat

SEQ ID NO: 42427 - DNA, 572 bp, Homo sapiens
attccttacattaagtgacaaaaccacacttaagtttaatgcggtaaagcttgctggagtacttgtaaatgagcatgggtggtcatccacgttttcagccactatcgatttagcactttctttgtgtcaggctctggctaggttctggagacacaaggctgttcccaaacccccatctccagagctaaacagcatgtcacatcatggttcttagccatcagaataacacacctaaaattcagaaattgctgaccctcaggctctgtctcagactacagaatctccagcagaggacccaggcatgtaagttcttccagaattgcacatgtcatttttaggtccacatcgaccttgagagaaccttctacatttttgtagatgagagaattgaggctcagagaagtgataagtgaggttgcacacctggcaaatacagcattgaacttcagacccagagcttctgaagttaagattcctaggcctttccacttggccatggccaccctcgcrtatgcatggtgtgcaactctgtgcctaaatgctatgctggtaaaatgctccaagatatagat

SEQ ID NO: 42428 - DNA, 1195 bp, Homo sapiens
tccctgtttaggcagcaaatttacactgggaggaaaggaggaaagtgaggaagagaacagaagatgaatggaaaaagacacatcaacaacctacctgactcaggataaccaaagatcaaccacatgtggaaacatggactaagttcctctgggctattccacctgagagatgaggaagctggggtatgtatacacctcatcgtgtcctcactgattgtgcgctgtctctcttgttctatttcaagctgctataacagattcattgtcactatgtaattcataaggaasagaaatttattttcttacagttctggagaatgggaaattaaagatcaagacatgggcaggttaaggtccgctttctccactttcaagatgctgcctggagttagaaatgcaaaagttctacacaggttttcatctgcacccatggtcagtgcccaaacctccatgttgttcaagggtcaactgctcattcaatctgtagctgcatctctctggaacaggatcttggcaggtgggttgcaagtaaaggaatccagaaaataacatctcaaactatgctgcactggtatgatgattatgtaaaaccaaagacctttagaaagcaccaaatgcacaaaaagacttttcctaaatgtcccttatctgcataatagcagattctccagaaggaaaccaattgtcaaaaaaattcttcctgagaatttttacatcagggaatattaacacaaaagaggaatctaaaatacaagagactgaagttgatgctttatccagacaggctatgacctgttcttttgaggatgcacttctgttctcatctattctctccaggttgcctacacttctcaattccctcttccttagaaaagaaatacaaacaactgtatcccattgagatatctgggtaatcaccctgctatgatattctgctgcacttcaaatgaattttgtttgccttttctcttattaatctttcttttgtccattcattttcagcaaatatttagaggacaaatggagctttcttcctttctcccaatgtaagcaagttcccttaaaattcaggcagcttaaaaaacagcaggaaggtttgtgcacagcctgcagcactgtgatttggctcccctagtcaggcatcagtaaaattttgtggagtcctaggtggcagcccactgatgctgatgtagtt

SEQ ID NO: 42429 - DNA, 1195 bp, Homo sapiens
tccctgtttaggcagcaaatttacactgggaggaaaggaggaaagtgaggaagagaacagaagatgaatggaaaaagacacatcaacaacctacctgactcaggataaccaaagatcaaccacatgtggaaacatggactaagttcctctgggctattccacctgagagatgaggaagctggggtatgtatacacctcatcgtgtcctcactgattgtgcgctgtctctcttgttctatttcaagctgctataacagattcattgtcactatgtaattcataaggaacagaaatttattttcttacagttctggagaatgggaaattaaagatcaagacatgggcaggttaaggtccgctttctccactttcaagatgmtgcctggagttagaaatgcaaaagttctacacaggttttcatctgcacccatggtcagtgcccaaacctccatgttgttcaagggtcaactgctcattcaatctgtagctgcatctctctggaacaggatcttggcaggtgggttgcaagtaaaggaatccagaaaataacatctcaaactatgctgcactggtatgatgattatgtaaaaccaaagacctttagaaagcaccaaatgcacaaaaagacttttcctaaatgtcccttatctgcataatagcagattctccagaaggaaaccaattgtcaaaaaaattcttcctgagaatttttacatcagggaatattaacacaaaagaggaatctaaaatacaagagactgaagttgatgctttatccagacaggctatgacctgttcttttgaggatgcacttctgttctcatctattctctccaggttgcctacacttctcaattccctcttccttagaaaagaaatacaaacaactgtatcccattgagatatctgggtaatcaccctgctatgatattctgctgcacttcaaatgaattttgtttgccttttctcttattaatctttcttttgtccattcattttcagcaaatatttagaggacaaatggagctttcttcctttctcccaatgtaagcaagttcccttaaaattcaggcagcttaaaaaacagcaggaaggtttgtgcacagcctgcagcactgtgatttggctcccctagtcaggcatcagtaaaattttgtggagtcctaggtggcagcccactgatgctgatgtagtt

SEQ ID NO: 42430 - DNA, 1195 bp, Homo sapiens
tccctgtttaggcagcaaatttacactgggaggaaaggaggaaagtgaggaagagaacagaagatgaatggaaaaagacacatcaacaacctacctgactcaggataaccaaagatcaaccacatgtggaaacatggactaagttcctctgggctattccacctgagagatgaggaagctggggtatgtatacacctcatcgtgtcctcactgattgtgcgctgtctctcttgttctatttcaagctgctataacagattcattgtcactatgtaattcataaggaacagaaatttattttcttacagttctggagaatgggaaattaaagatcaagacatgggcaggttaaggtccgctttctccactttcaagatgctgcctggagttagaaatgcaaaagttctacmcaggttttcatctgcacccatggtcagtgcccaaacctccatgttgttcaagggtcaactgctcattcaatctgtagctgcatctctctggaacaggatcttggcaggtgggttgcaagtaaaggaatccagaaaataacatctcaaactatgctgcactggtatgatgattatgtaaaaccaaagacctttagaaagcaccaaatgcacaaaaagacttttcctaaatgtcccttatctgcataatagcagattctccagaaggaaaccaattgtcaaaaaaattcttcctgagaatttttacatcagggaatattaacacaaaagaggaatctaaaatacaagagactgaagttgatgctttatccagacaggctatgacctgttcttttgaggatgcacttctgttctcatctattctctccaggttgcctacacttctcaattccctcttccttagaaaagaaatacaaacaactgtatcccattgagatatctgggtaatcaccctgctatgatattctgctgcacttcaaatgaattttgtttgccttttctcttattaatctttcttttgtccattcattttcagcaaatatttagaggacaaatggagctttcttcctttctcccaatgtaagcaagttcccttaaaattcaggcagcttaaaaaacagcaggaaggtttgtgcacagcctgcagcactgtgatttggctcccctagtcaggcatcagtaaaattttgtggagtcctaggtggcagcccactgatgctgatgtagtt

SEQ ID NO: 42431 - DNA, 869 bp, Homo sapiens
atcataaaattactgaacagttaaataatactcaaaaataaagaggagcacataattagaacacaggacatctgaatgaatctgagaaagagtcatgctgcacaaaagtcaccagacacaaaagagcgcatcctatgtttcatttatgtgaaactcttacaaggaaaatgaaatctgtactgacargaagcagatcaaaattccctgatctgtgaggcagaaagcaagttgattccaaaagagtgggtcaaaatgttttggagctatagaaatgttctatgtctggattttggatgtggttctaaagatgtatttatttgtgacagttcattgacaatgtgttttattgtaatcattttttttttacagtgaacttagttaacagcgagcaaagcaagtgtaaggccaattgggtagtgttgtcttcacatcttctgtcttgcagtgtactgaaaattgtatgagccagaatatctgagagataatctctgctttgaaactgaagaactgtgtatctcatggcaagatttctcttttccaagtactttggatttttcttctatagaatgagaatttaaatacacttcacagataaagtcaaagtgaataaaatacctaggaatccaacttaaaagggatgtgaatgacctcttcaaggagaactacaagccactgttcaacgaaataaaagaggacacaaaacacatagaagaacattccgtgctcatggataggaagaatcaatatagtgaaaatggccatactgcccaaggtaatttatagattcaatgccatccccatcaagctaccaataactttcttcacagaattggaaaaaactactttaaagttcatatggaatcaaaaaa

SEQ ID NO: 42432 - DNA, 869 bp, Homo sapiens
atcataaaattactgaacagttaaataatactcaaaaataaagaggagcacataattagaacacaggacatctgaatgaatctgagaaagagtcatgctgcacaaaagtcaccagacacaaaagagcgcatcctatgtttcatttatgtgaaactcttacaaggaaaatgaaatctgtactgacaagaagcagatcaaaattccctgatctgtgaggcagaaagcaagttgattccaaaagagtgggtcaaaatgttttggagctatagaaatgttctatgtctggattttggatgtggttctaaagatgtatttatttgtgacagttcattgacaatgtgttttattgtaatcwttttttttttacagtgaacttagttaacagcgagcaaagcaagtgtaaggccaattgggtagtgttgtcttcacatcttctgtcttgcagtgtactgaaaattgtatgagccagaatatctgagagataatctctgctttgaaactgaagaactgtgtatctcatggcaagatttctcttttccaagtactttggatttttcttctatagaatgagaatttaaatacacttcacagataaagtcaaagtgaataaaatacctaggaatccaacttaaaagggatgtgaatgacctcttcaaggagaactacaagccactgttcaacgaaataaaagaggacacaaaacacatagaagaacattccgtgctcatggataggaagaatcaatatagtgaaaatggccatactgcccaaggtaatttatagattcaatgccatccccatcaagctaccaataactttcttcacagaattggaaaaaactactttaaagttcatatggaatcaaaaaa

SEQ ID NO: 42433 - DNA, 869 bp, Homo sapiens
atcataaaattactgaacagttaaataatactcaaaaataaagaggagcacataattagaacacaggacatctgaatgaatctgagaaagagtcatgctgcacaaaagtcaccagacacaaaagagcgcatcctatgtttcatttatgtgaaactcttacaaggaaaatgaaatctgtactgacaagaagcagatcaaaattccctgatctgtgaggcagaaagcaagttgattccaaaagagtgggtcaaaatgttttggagctatagaaatgttctatgtctggattttggatgtggttctaaagatgtatttatttgtgacagttcattgacaatgtgttttattgtaatcattttttttttacagtgaacttagttaacagygagcaaagcaagtgtaaggccaattgggtagtgttgtcttcacatcttctgtcttgcagtgtactgaaaattgtatgagccagaatatctgagagataatctctgctttgaaactgaagaactgtgtatctcatggcaagatttctcttttccaagtactttggatttttcttctatagaatgagaatttaaatacacttcacagataaagtcaaagtgaataaaatacctaggaatccaacttaaaagggatgtgaatgacctcttcaaggagaactacaagccactgttcaacgaaataaaagaggacacaaaacacatagaagaacattccgtgctcatggataggaagaatcaatatagtgaaaatggccatactgcccaaggtaatttatagattcaatgccatccccatcaagctaccaataactttcttcacagaattggaaaaaactactttaaagttcatatggaatcaaaaaa

SEQ ID NO: 42434 - DNA, 2012 bp, Homo sapiens
tttccgctgttaaaaaatattgtaaagaaataggaggcacacaaatgttttaaacgatgacggttggttctataagaaaaggttcaagggtttgggggtgtttggtcaggagaaaagtagactgagggggtttaatgacaatctttaggtaaatgacaagttttaatgtggggaatgtgcactagtttttcatcagttttgtggaggaccaaattagtggacatagacttaaattaaagaggaggatttcacatctgtaacaagctcccaaaaatcataacgagaaactgctgcagggagctgccaagtgggaaggagagctggcatccagagggctgaagaaaaacacaaatgaaaatatgtcattaagatactttttcttggcctggtgcagtggctcatgtctgtaatcctagcactttgggaggccaaggcaggaggatcacttgagcccaagatttcaagaccaagctgggcaacatagtgagacccttgtctttattttttaaaaaatatatattttttaggccaggcatggtggctcacacctgtaatcccagcattttgagaggccaaggctggcagatcatgaggtcaggaaatcgagaccatcttgggcaacccggtgaaaccccgtctttactaaaaatacaaaaaaaaaaaaaaattaaccgggggtggtggcagatgcctgtagtcccagctacttgggaggctgtggcaggagaatggcgtgaacccgggaggcagagcttgcagtgagccaagatagcaccactgcactccggcctgggtgacagagcgagactctgtctcaaaaaaaaaaacacaaaaaacaaaaaaacatatttttttaaaaaagttattttttcctaaaatcccttcaggctcaataggtcatttattctttggatctaattctaggcaaaaaatgtaaaagtgctctaaatagtcatgcaatttaaaaattttcagtgtaaacaaaacaaacggatctttctcactgacgtctaggacatttatcaagtttcgctcttcctggagccgtttcctactggcctctggtttcttggttccattagagggctggggttcctaactttctaactatgtctgcccatggatgtttataattcaccagctgcattttctccttgactgtgttcctcatatcctcactcaaggccacctgtctccttcctccagggtctgaattccagaagctgcacgtgtttgcttcctcttttattattgctgcttacagcatctagaatgaagtcacgccctgacagcttctatgaggatcgcctcctgccacatgcatttacagttcataatggagttgaagctttttacattttgtaattcatatgtgcacattcctgagaagtatttccaaggtatgtttttgcctatgaaaatgtatatgctcaggcyaggtgcagtggctcacgcctgtaattccagcactttgggaggcctaggcaggtggatcacctgaggtcaggagttcgagaccagcctggccaacatggcaaaaccccgtttctactaaaaatacaaaaattagctgggcatggtggcatgagcctgtaatcccagctactcaggagactgagacaggagaatcacttgaacccggaagacagaggttgtagtgagccgagatcaccccactgcactccagcctgggggacagagcaaaactccgtcaaaaaaaaaaaaaagaaaatgtatacactcagtcttctgacatgacaaaaatataacaagtttatcctaaaattataacttttaagtctagaatagtagggcatggcatgggatacacaagggtttggccaaccactgcccatgggttaaatctggccctccatctgtttttgtacagcctgtgggctaagaatggcttttacattttcaaatatttgaaaaacaccgagtctgggaaacatagggagactctgtctctacaaaaaaaaaaaaaaaaaaaaagctaagggtggcggtgc

SEQ ID NO: 42435 - DNA, 2012 bp, Homo sapiens
tttccgctgttaaaaaatattgtaaagaaataggaggcacacaaatgttttaaacgatgacggttggttctataagaaaaggttcaagggtttgggggtgtttggtcaggagaaaagtagactgagggggtttaatgacaatctttaggtaaatgacaagttttaatgtggggaatgtgcactagtttttcatcagttttgtggaggaccaaattagtggacatagacttaaattaaagaggaggatttcacatctgtaacaagctcccaaaaatcataacgagaaactgctgcagggagctgccaagtgggaaggagagctggcatccagagggctgaagaaaaacacaaatgaaaatatgtcattaagatactttttcttggcctggtgcagtggctcatgtctgtaatcctagcactttgggaggccaaggcaggaggatcacttgagcccaagatttcaagaccaagctgggcaacatagtgagacccttgtctttattttttaaaaaatatatattttttaggccaggcatggtggctcacacctgtaatcccagcattttgagaggccaaggctggcagatcatgaggtcaggaaatcgagaccatcttgggcaacccggtgaaaccccgtctttactaaaaatacaaaaaaaaaaaaaaattaaccgggggtggtggcagatgcctgtagtcccagctacttgggaggctgtggcaggagaatggcgtgaacccgggaggcagagcttgcagtgagccaagatagcaccactgcactccggcctgggtgacagagcgagactctgtctcaaaaaaaaaaacacaaaaaacaaaaaaacatatttttttaaaaaagttattttttcctaaaatcccttcaggctcaataggtcatttattctttggatctaattctaggcaaaaaatgtaaaagtgctctaaatagtcatgcaatttaaaaattttcagtgtaaacaaaacaaacggatctttctcactgacgtctaggacatttatcaagtttcgctcttcctggagccgtttcctactggcctctggtttcttggttccattagagggctggggttcctaactttctaactatgtctgcccatggatgtttataattcaccagctgcattttctccttgactgtgttcctcatatcctcactcaaggccacctgtctccttcctccagggtctgaattccagaagctgcacgtgtttgcttcctcttttattattgctgcttacagcatctagaatgaagtcacgccctgacagcttctatgaggatcgcctcctgccacatgcatttacagttcataatggagttgaagctttttacattttgtaattcatatgtgcacattcctgagaagtatttccaaggtatgtttttgcctatgaaaatgtatatgctcaggctaggtgcagtggctcacgcctgtaattccagcactttgggaggcctaggcaggtggatcacctgaggtcaggagttcgagaccagcctggccaacatggcaaaaccccgtttctactaaaaatacaaaaattagctgggcatggtggcatgagcctgtaatcccagctactcaggagactgagacaggagaatcacttgaacycggaagacagaggttgtagtgagccgagatcaccccactgcactccagcctgggggacagagcaaaactccgtcaaaaaaaaaaaaaagaaaatgtatacactcagtcttctgacatgacaaaaatataacaagtttatcctaaaattataacttttaagtctagaatagtagggcatggcatgggatacacaagggtttggccaaccactgcccatgggttaaatctggccctccatctgtttttgtacagcctgtgggctaagaatggcttttacattttcaaatatttgaaaaacaccgagtctgggaaacatagggagactctgtctctacaaaaaaaaaaaaaaaaaaaaagctaagggtggcggtgc

SEQ ID NO: 42436 - DNA, 2012 bp, Homo sapiens
tttccgctgttaaaaaatattgtaaagaaataggaggcacacaaatgttttaaacgatgacggttggttctataagaaaaggttcaagggtttgggggtgtttggtcaggagaaaagtagactgagggggtttaatgacaatctttaggtaaatgacaagttttaatgtggggaatgtgcactagtttttcatcagttttgtggaggaccaaattagtggacatagacttaaattaaagaggaggatttcacatctgtaacaagctcccaaaaatcataacgagaaactgctgcagggagctgccaagtgggaaggagagctggcatccagagggctgaagaaaaacacaaatgaaaatatgtcattaagatactttttcttggcctggtgcagtggctcatgtctgtaatcctagcactttgggaggccaaggcaggaggatcacttgagcccaagatttcaagaccaagctgggcaacatagtgagacccttgtctttattttttaaaaaatatatattttttaggccaggcatggtggctcacacctgtaatcccagcattttgagaggccaaggctggcagatcatgaggtcaggaaatcgagaccatcttgggcaacccggtgaaaccccgtctttactaaaaatacaaaaaaaaaaaaaaattaaccgggggtggtggcagatgcctgtagtcccagctacttgggaggctgtggcaggagaatggcgtgaacccgggaggcagagcttgcagtgagccaagatagcaccactgcactccggcctgggtgacagagcgagactctgtctcaaaaaaaaaaacacaaaaaacaaaaaaacatatttttttaaaaaagttattttttcctaaaatcccttcaggctcaataggtcatttattctttggatctaattctaggcaaaaaatgtaaaagtgctctaaatagtcatgcaatttaaaaattttcagtgtaaacaaaacaaacggatctttctcactgacgtctaggacatttatcaagtttcgctcttcctggagccgtttcctactggcctctggtttcttggttccattagagggctggggttcctaactttctaactatgtctgcccatggatgtttataattcaccagctgcattttctccttgactgtgttcctcatatcctcactcaaggccacctgtctccttcctccagggtctgaattccagaagctgcacgtgtttgcttcctcttttattattgctgcttacagcatctagaatgaagtcacgccctgacagcttctatgaggatcgcctcctgccacatgcatttacagttcataatggagttgaagctttttacattttgtaattcatatgtgcacattcctgagaagtatttccaaggtatgtttttgcctatgaaaatgtatatgctcaggctaggtgcagtggctcacgcctgtaattccagcactttgggaggcctaggcaggtggatcacctgaggtcaggagttcgagaccagcctggccaacatggcaaaaccccgtttctactaaaaatacaaaaattagctgggcatggtggcatgagcctgtaatcccagctactcaggagactgagacaggagaatcacttgaacccggaagacagaggttgtagtgagccgagatcaccccactgcactccagcctgggggacagagcaaaactccgtcaaaaaaaaaaaaaagaaaatgtatacactcagtcttctgacatgacaaaaatataacaagtttatcctaaaattataacttttaagtctrgaatagtagggcatggcatgggatacacaagggtttggccaaccactgcccatgggttaaatctggccctccatctgtttttgtacagcctgtgggctaagaatggcttttacattttcaaatatttgaaaaacaccgagtctgggaaacatagggagactctgtctctacaaaaaaaaaaaaaaaaaaaaagctaagggtggcggtgc

SEQ ID NO: 42437 - DNA, 843 bp, Homo sapiens
ttattttattttccaagctttcttttaatcatgcttgaacttttaatcctttatttaaaggccttatcttttttttttttttttttttttttttgagatggagtctcgctctgtctcgaccaggctggagtgcagtggtgtgatctcagttcactgcagcctccgcctcccgggttcaagaaattctcctgcctcagctttccgagtagctgagattacaggcgtgcgccaccacaaccagctaatttttgtatttttagtagaaatggggttttaccaagttgaccaggctggtctcgaactcctgacctcaggtgatccgcccgcctcagctcccaaagtgctgggattacaggcatgagccactatgcctggcctaaggccttatcttaatatttaattgtttgatgttttttcaagcataattccattttcatgtgtcattccaaatatgtacaatattctaatgcccagttgatactgagcatttacacaatacatgcattatcytactctgtgtgttaaaagtctacacatcacatcgtcttacttgtatgtatttgctgtgtacctttcaatttgctgtgttttgtcttctaacctttgaattgttttatatctgggctatttaacttagtttgttggttttggataatgtctttatagtgggttaagtgacaccctctcaaaagatacgtccagatcctaacccctggaacatatggatggtaccttatttggaagaaggctctttgcagatataattaaggatcttgagatgaggaaatcaccatgggttatcctggcgggccctaaatccaatgacaagtgtctttatgggag

SEQ ID NO: 42438 - DNA, 1968 bp, Homo sapiens
atccgatcgcacgcacaatgcgcggctgcaaaccgcattcttttcatgaatattcatcgaacgcttggccaggctccttatctgcgtccccagagacatttccgccttgaaacgaactcggtggacagcccttgcccatgtaattctcactctgctgaaattagcacagcacacatgggtgcattttttagkaccttgtacaggttgacaacacctctgtctcccccgcggccactcgcactgtggggcgggctaaaacccaacactagcgtcgaaatggccttctgctatagggttgtggaccgaccccccacccccacctcccgggattacagcccgggccaacagacccccagtatactgcaggcaaaatgaataaatcgggactgtaattacctattcctttgtcttggcctcgcgcatgcgccggagagcagggtgtggagggcccggcagccccatcccatctccatcatccagccacccactcccctcccgagccgaggaacaaaggcgtttgccctaaatgttgcgggaaacccttggacaccaatgacagtttttcccgcctgtgtgtgtgtttcttcttttccaggctgtctctcatcttttgctttcttgctgatttcaattgaccaaaattaagatttgccttgatgaggatgaaggcaaattgtggattaaatattttgtacccgcacactgttattttcctttctagtactgttcattgttctttttcctgtaacatatcttactgcagtgagggtggctttcttaatttgcatcaattaaccgtttgacagatcttttttggtcatttgattaagggaaggtggcctcaaaactgtcagtgggcgttgcctccagtgacaccacctggggaaaattaagacatcttggcgtttattcgaacaagatggcctacaaaaaccggagagaagaaaacgattaccttgtcgggatcctaaccctttctgttttctctggactccgaactcattgtttcattaaggattccaaaaggcgaatggcgtccagatggaaatctgatgggggcagaaagaaggcagtcgttggggtgaagctggttgattaggttcgcaatgattcctttttccccattacctaacagaagccatgatatacctttgatggctgattttctttcagatgatctattttccaggttatggccatttagatttattttcaggtagtttgtttttaccacacaaaaagggacttattgtgtatattaaataggagccaaatatgatattttttgcagtggtaggttatgtttaatagggttttatgcttaagtactgtcagtacatcctggtggaataacgcgtggcagcaatggaaataatctcttttgtcctttttgatgagaacttgatattgaccacgtttaatatatcagggcccatctactggctacggtggctgtctagctgtcttctaggtggcatggattgtaccctctgtactccttagtattgagtaggttattatgatttagagagctacgttctttcttttttcttttcctttaggttgtgtttttggcgaggggtatgttggaatatagaacaaattcaatagcaaatatataccagcatgtccccaattcagtaaatcttaggtttttgagtgagataatatttaaatcgatttttaaaaattattacagaattaaaatatttctatcagttcgcttattcttttagccagctagctttttgccaagctttagcagatagagaaattgagccttttgataaaaagcaccaacaatgacagtggcatttctgttctttaactggtactcagtctgccattgtgacgtgtagaagagaaccttatctccccacatcaccctagtttaaaggtccaatgggagagccctaaacatttaggctgtctatccttggaggcctcttcataatcctggatttacta

SEQ ID NO: 42439 - DNA, 1968 bp, Homo sapiens
atccgatcgcacgcacaatgcgcggctgcaaaccgcattcttttcatgaatattcatcgaacgcttggccaggctccttatctgcgtccccagagacatttccgccttgaaacgaactcggtggacagcccttgcccatgtaattctcactctgctgaaattagcacagcacacatgggtgcattttttagtaccttgtacaggttgacaacacctctgtctcccccgcggccactcgcactgtggggcgggctaaaacccaacactagcgtcgaaatggccttctgctatagggttgtggaccgaccccccacccccacctcccgggattacagcccgggccaacagacccccagtatactgcaggcaaaatgaatraatcgggactgtaattacctattcctttgtcttggcctcgcgcatgcgccggagagcagggtgtggagggcccggcagccccatcccatctccatcatccagccacccactcccctcccgagccgaggaacaaaggcgtttgccctaaatgttgcgggaaacccttggacaccaatgacagtttttcccgcctgtgtgtgtgtttcttcttttccaggctgtctctcatcttttgctttcttgctgatttcaattgaccaaaattaagatttgccttgatgaggatgaaggcaaattgtggattaaatattttgtacccgcacactgttattttcctttctagtactgttcattgttctttttcctgtaacatatcttactgcagtgagggtggctttcttaatttgcatcaattaaccgtttgacagatcttttttggtcatttgattaagggaaggtggcctcaaaactgtcagtgggcgttgcctccagtgacaccacctggggaaaattaagacatcttggcgtttattcgaacaagatggcctacaaaaaccggagagaagaaaacgattaccttgtcgggatcctaaccctttctgttttctctggactccgaactcattgtttcattaaggattccaaaaggcgaatggcgtccagatggaaatctgatgggggcagaaagaaggcagtcgttggggtgaagctggttgattaggttcgcaatgattcctttttccccattacctaacagaagccatgatatacctttgatggctgattttctttcagatgatctattttccaggttatggccatttagatttattttcaggtagtttgtttttaccacacaaaaagggacttattgtgtatattaaataggagccaaatatgatattttttgcagtggtaggttatgtttaatagggttttatgcttaagtactgtcagtacatcctggtggaataacgcgtggcagcaatggaaataatctcttttgtcctttttgatgagaacttgatattgaccacgtttaatatatcagggcccatctactggctacggtggctgtctagctgtcttctaggtggcatggattgtaccctctgtactccttagtattgagtaggttattatgatttagagagctacgttctttcttttttcttttcctttaggttgtgtttttggcgaggggtatgttggaatatagaacaaattcaatagcaaatatataccagcatgtccccaattcagtaaatcttaggtttttgagtgagataatatttaaatcgatttttaaaaattattacagaattaaaatatttctatcagttcgcttattcttttagccagctagctttttgccaagctttagcagatagagaaattgagccttttgataaaaagcaccaacaatgacagtggcatttctgttctttaactggtactcagtctgccattgtgacgtgtagaagagaaccttatctccccacatcaccctagtttaaaggtccaatgggagagccctaaacatttaggctgtctatccttggaggcctcttcataatcctggatttacta

SEQ ID NO: 42440 - DNA, 1968 bp, Homo sapiens
atccgatcgcacgcacaatgcgcggctgcaaaccgcattcttttcatgaatattcatcgaacgcttggccaggctccttatctgcgtccccagagacatttccgccttgaaacgaactcggtggacagcccttgcccatgtaattctcactctgctgaaattagcacagcacacatgggtgcattttttagtaccttgtacaggttgacaacacctctgtctcccccgcggccactcgcactgtggggcgggctaaaacccaacactagcgtcgaaatggccttctgctatagggttgtggaccgaccccccacccccacctcccgggattacagcccgggccaacagacccccagtatactgcaggcaaaatgaataaatcgggactgtaattacctattcctttgtcttggcctcgcgcatgcgccggagagcagggtgtggagggcccggcagccccatcccatctccatcatccagccacccactcccctcccgagccgaggaacaaaggcgtttgccctaaatgttgcgggaaacccttggacaccaatgacagtttttcccgcctgtgtgtgtgtttcttcttttccaggctgtctctcatcttttgctttcttgctgatttcaattgaccaaaattaagatttgccttgatgaggatgaaggcaaattgtggattaaatattttgtacccgcacactgttattttcctttctagtactgttcattgttctttttcctgtaacatatcttactgcagtgagggtggctttcttaatttgcatcaattaaccktttgacagatcttttttggtcatttgattaagggaaggtggcctcaaaactgtcagtgggcgttgcctccagtgacaccacctggggaaaattaagacatcttggcgtttattcgaacaagatggcctacaaaaaccggagagaagaaaacgattaccttgtcgggatcctaaccctttctgttttctctggactccgaactcattgtttcattaaggattccaaaaggcgaatggcgtccagatggaaatctgatgggggcagaaagaaggcagtcgttggggtgaagctggttgattaggttcgcaatgattcctttttccccattacctaacagaagccatgatatacctttgatggctgattttctttcagatgatctattttccaggttatggccatttagatttattttcaggtagtttgtttttaccacacaaaaagggacttattgtgtatattaaataggagccaaatatgatattttttgcagtggtaggttatgtttaatagggttttatgcttaagtactgtcagtacatcctggtggaataacgcgtggcagcaatggaaataatctcttttgtcctttttgatgagaacttgatattgaccacgtttaatatatcagggcccatctactggctacggtggctgtctagctgtcttctaggtggcatggattgtaccctctgtactccttagtattgagtaggttattatgatttagagagctacgttctttcttttttcttttcctttaggttgtgtttttggcgaggggtatgttggaatatagaacaaattcaatagcaaatatataccagcatgtccccaattcagtaaatcttaggtttttgagtgagataatatttaaatcgatttttaaaaattattacagaattaaaatatttctatcagttcgcttattcttttagccagctagctttttgccaagctttagcagatagagaaattgagccttttgataaaaagcaccaacaatgacagtggcatttctgttctttaactggtactcagtctgccattgtgacgtgtagaagagaaccttatctccccacatcaccctagtttaaaggtccaatgggagagccctaaacatttaggctgtctatccttggaggcctcttcataatcctggatttacta

SEQ ID NO: 42441 - DNA, 1968 bp, Homo sapiens
atccgatcgcacgcacaatgcgcggctgcaaaccgcattcttttcatgaatattcatcgaacgcttggccaggctccttatctgcgtccccagagacatttccgccttgaaacgaactcggtggacagcccttgcccatgtaattctcactctgctgaaattagcacagcacacatgggtgcattttttagtaccttgtacaggttgacaacacctctgtctcccccgcggccactcgcactgtggggcgggctaaaacccaacactagcgtcgaaatggccttctgctatagggttgtggaccgaccccccacccccacctcccgggattacagcccgggccaacagacccccagtatactgcaggcaaaatgaataaatcgggactgtaattacctattcctttgtcttggcctcgcgcatgcgccggagagcagggtgtggagggcccggcagccccatcccatctccatcatccagccacccactcccctcccgagccgaggaacaaaggcgtttgccctaaatgttgcgggaaacccttggacaccaatgacagtttttcccgcctgtgtgtgtgtttcttcttttccaggctgtctctcatcttttgctttcttgctgatttcaattgaccaaaattaagatttgccttgatgaggatgaaggcaaattgtggattaaatattttgtacccgcacactgttattttcctttctagtactgttcattgttctttttcctgtaacatatcttactgcagtgagggtggctttcttaatttgcatcaattaaccgtttgacagatcttttttggtcatttgattaagggaaggtggcctcaaaactgtcagtgggcgttgcctccagtgacaccacctggggaaaattaagacatcttggcgtttattcgaacaagatggcctacaaaaaccggagagaagaaaacgattaccttgtcgggatcctaaccctttctgttttctctggactccgaactcattgtttcattaaggattccaaaaggcgaatggcgtccagatggaaatctgatgggggcagaaagaaggcagtcgttggggtgaagctggttgattaggttcgcaatgattcctttttccccattacctaacagaagccatgatatacctttgatggctgattttctttcagatgatctattttccaggttatggccatttagatttattttcaggtagtttgtttttaccacacaaaaagggacttattgtgtatattaaataggagccaaatatgatattttttgcagtggtaggttwtgtttaatagggttttatgcttaagtactgtcagtacatcctggtggaataacgcgtggcagcaatggaaataatctcttttgtcctttttgatgagaacttgatattgaccacgtttaatatatcagggcccatctactggctacggtggctgtctagctgtcttctaggtggcatggattgtaccctctgtactccttagtattgagtaggttattatgatttagagagctacgttctttcttttttcttttcctttaggttgtgtttttggcgaggggtatgttggaatatagaacaaattcaatagcaaatatataccagcatgtccccaattcagtaaatcttaggtttttgagtgagataatatttaaatcgatttttaaaaattattacagaattaaaatatttctatcagttcgcttattcttttagccagctagctttttgccaagctttagcagatagagaaattgagccttttgataaaaagcaccaacaatgacagtggcatttctgttctttaactggtactcagtctgccattgtgacgtgtagaagagaaccttatctccccacatcaccctagtttaaaggtccaatgggagagccctaaacatttaggctgtctatccttggaggcctcttcataatcctggatttacta

SEQ ID NO: 42442 - DNA, 1968 bp, Homo sapiens
atccgatcgcacgcacaatgcgcggctgcaaaccgcattcttttcatgaatattcatcgaacgcttggccaggctccttatctgcgtccccagagacatttccgccttgaaacgaactcggtggacagcccttgcccatgtaattctcactctgctgaaattagcacagcacacatgggtgcattttttagtaccttgtacaggttgacaacacctctgtctcccccgcggccactcgcactgtggggcgggctaaaacccaacactagcgtcgaaatggccttctgctatagggttgtggaccgaccccccacccccacctcccgggattacagcccgggccaacagacccccagtatactgcaggcaaaatgaataaatcgggactgtaattacctattcctttgtcttggcctcgcgcatgcgccggagagcagggtgtggagggcccggcagccccatcccatctccatcatccagccacccactcccctcccgagccgaggaacaaaggcgtttgccctaaatgttgcgggaaacccttggacaccaatgacagtttttcccgcctgtgtgtgtgtttcttcttttccaggctgtctctcatcttttgctttcttgctgatttcaattgaccaaaattaagatttgccttgatgaggatgaaggcaaattgtggattaaatattttgtacccgcacactgttattttcctttctagtactgttcattgttctttttcctgtaacatatcttactgcagtgagggtggctttcttaatttgcatcaattaaccgtttgacagatcttttttggtcatttgattaagggaaggtggcctcaaaactgtcagtgggcgttgcctccagtgacaccacctggggaaaattaagacatcttggcgtttattcgaacaagatggcctacaaaaaccggagagaagaaaacgattaccttgtcgggatcctaaccctttctgttttctctggactccgaactcattgtttcattaaggattccaaaaggcgaatggcgtccagatggaaatctgatgggggcagaaagaaggcagtcgttggggtgaagctggttgattaggttcgcaatgattcctttttccccattacctaacagaagccatgatatacctttgatggctgattttctttcagatgatctattttccaggttatggccatttagatttattttcaggtagtttgtttttaccacacaaaaagggacttattgtgtatattaaataggagccaaatatgatattttttgcagtggtaggttatgtttaatagggttttatgcttaagtactgtcagtacatcctggtggaataacgcgtggcagcaatggaaatmatctcttttgtcctttttgatgagaacttgatattgaccacgtttaatatatcagggcccatctactggctacggtggctgtctagctgtcttctaggtggcatggattgtaccctctgtactccttagtattgagtaggttattatgatttagagagctacgttctttcttttttcttttcctttaggttgtgtttttggcgaggggtatgttggaatatagaacaaattcaatagcaaatatataccagcatgtccccaattcagtaaatcttaggtttttgagtgagataatatttaaatcgatttttaaaaattattacagaattaaaatatttctatcagttcgcttattcttttagccagctagctttttgccaagctttagcagatagagaaattgagccttttgataaaaagcaccaacaatgacagtggcatttctgttctttaactggtactcagtctgccattgtgacgtgtagaagagaaccttatctccccacatcaccctagtttaaaggtccaatgggagagccctaaacatttaggctgtctatccttggaggcctcttcataatcctggatttacta

SEQ ID NO: 42443 - DNA, 1107 bp, Homo sapiens
ctgaactaaggtgatagcaaagagaatggagagaaggtggatttgaaagtgagtaaacactttgggaggccaaggcggtggatcacctgaggtcaggagtttgagaccagcctggccaacatggtgaaaccctgtctctactaaaaatacaaaaattaggccgggcacggtggctcacgcctgtaatcccagcactttgggaggccgaggctggtgaatcacgaggtcaagagatcgagaacatcctggctaacacggtgaaaccccgtctctactaaaaacacaaaaaattagctgggcatggtggcagatgcctgtagtcccagctacttgggaggctgaggcaggagaatggcgtgaacccgggagacggagcttgcggtgggccgagatagcaccactgcactccagcctgggygacagagtgaaactccgtctccaaataaataaataaataaataaataaataaatattagctgggcgtggtggtgggtacctgtaatcccagctactcgggaggctgaggcaggagaactgcttgaacctgggaggcagaggttgcagtaagctgtcacgccattgtactccagcctgggcaacagagtgactctctgtctcaaaaaaaaaccaaaaaccaaaaaacagtcagtaaagaagtggggctcatagacatagtgactaaccagaagtcagggattcgggcctgggctcctgggctgggagtgagagggttctggcctgttccttcccttggcaaatggcaccaccctttcctgcagccctcctgtatcttgtgtttatacctggaagtgtggctttagccagtggagccagaagtctggtaaatgtctgtgaaacacagaagagccgaggtagccctgagtcgtggatgccattggtgccttacccagactgtctttgctgggggcccctgtctcagctgctgggtcatttgagaggccttttctggaaaaatgttcttgactcacaggagcccccctgcctggagacagctgagtaggtacctcaggatgcccccatttaccccaccacatacacactggggactggccagtcaactagcagatacggagccagaaagactg

SEQ ID NO: 42444 - DNA, 437 bp, Homo sapiens
tggctcaggccaggtcagaaaggaacaatgaggtagacagatgagcaatgtctatgatgcatgaggaggtatggcagtagcaacacaagtatcaaataattgatttccttgggctagtgggtaagcaaagaataaaagtaaagctcagaagccactggttaaatgaagtggggtaaatttaaaaaatgtgagtagttttgaattgatataaagtaatatggagaatcattaaaaacaaaagataaaaacaggacccagcatgcaaggtcaagttaagggtagccataatggaaggcaaataatggttcaacaccagatagatagaggcaaccaagaartacagattattaaagaggatggcagaagtgcagtcagaaaattagctgtctctagaaacttaacaagcagagtcaaaaattccagagagatgtttttta

SEQ ID NO: 42445 - DNA, 568 bp, Homo sapiens
acgacagactatatagcccaatggaacagaaataagcgcatatatccatgaccagctcattatttataagggtgccaagtccattaattatggaaatactagtctcttccacaaatggtaaagagacaagtggatttccaactgcaaaagaatgaagttgaacccctacttcatatcaaatacattaattaactcaaaatggatttatgacctaaatatatcagagcaaaaactattaaatccctggaamaaaacataaggttaaatcttcacgctttcatacagcaacaaaggcttagatctgacaccaaaaacaagggtaacaaaagaaagcgcacgtaactttgacttcatcaaaattaagattttgtccatcaaagtatattatcaagaactttgcaaattggcaaagcagaaatgtttacagggtctaaataactggtacaatatataaacactaaacataagaaagctggaatggttttatattaatatctaacaaaataggcttcaatgtaagaaatattatcaggaatataaaaatgtactacataatgatagaggagga

SEQ ID NO: 42446 - DNA, 568 bp, Homo sapiens
acgacagactatatagcccaatggaacagaaataagcgcatatatccatgaccagctcattatttataagggtgccaagtccattaattatggaaatactagtctcttccacaaatggtaaagagacaagtggatttccaactgcaaaagaatgaagttgaacccctacttcatatcaaatacattaattaactcaaaatggatttatgacctaaatatatcagagcaaaaactattaaatccctggaaaaaaacataaggttaaatcttcaygctttcatacagcaacaaaggcttagatctgacaccaaaaacaagggtaacaaaagaaagcgcacgtaactttgacttcatcaaaattaagattttgtccatcaaagtatattatcaagaactttgcaaattggcaaagcagaaatgtttacagggtctaaataactggtacaatatataaacactaaacataagaaagctggaatggttttatattaatatctaacaaaataggcttcaatgtaagaaatattatcaggaatataaaaatgtactacataatgatagaggagga

SEQ ID NO: 42447 - DNA, 789 bp, Homo sapiens
tggatcccttcccaaaagactctttgttacaagattacttttcccatattttacatcctatacttttagagtagctcatctcagctagttgttataaggaaagtaaactaagtcaaaattagtcatcaatgaattattagcttttagtactgcrggagattttttttttcaagagtaccaatgtgtccggaattggtgggttcttggtctcacttcaacaatgaagctgcggaccctcgcggtgttacagctcttaaggtggcacgtctggagtctgtcccttctgatgttcagatgtgtttggagtttcttccttctggtgggttcgtggtctcgctggctcaggagtgaagctgcagatcttcgcggtgagtgttacagctcataaaagcagcctggacccgaagagtgagcagtagcaagatttattgcaaagagtgaaagaacaaagcttccacggtgtggaaggggacccgagctggttgccaatgctggctcaggcagcctgcttttattctcttatctggccccacccacatcctgctgattggtagagccgagtggcctgtttcgtcagggcgctgattggtgcgtttacaatccctgagctagatacaaaggttctccacgtccccatcagattagttagatacagagtttccacacacaggttctccaaggccccaccagagcagctagatacagagtgtcgattggtgcactcacaaaccttcagctaaacacagggtgctgattggtgtgtttacaaaccttgagctagatacagag

SEQ ID NO: 42448 - DNA, 789 bp, Homo sapiens
tggatcccttcccaaaagactctttgttacaagattacttttcccatattttacatcctatacttttagagtagctcatctcagctagttgttataaggaaagtaaactaagtcaaaattagtcatcaatgaattattagcttttagtactgcgggagattttttttttcaagagtaccaatgtgtccggaattggtgggttcttggtctcacttcaacaatgaagctgcggaccctcgcggtgttacagctcttaaggtggcrcgtctggagtctgtcccttctgatgttcagatgtgtttggagtttcttccttctggtgggttcgtggtctcgctggctcaggagtgaagctgcagatcttcgcggtgagtgttacagctcataaaagcagcctggacccgaagagtgagcagtagcaagatttattgcaaagagtgaaagaacaaagcttccacggtgtggaaggggacccgagctggttgccaatgctggctcaggcagcctgcttttattctcttatctggccccacccacatcctgctgattggtagagccgagtggcctgtttcgtcagggcgctgattggtgcgtttacaatccctgagctagatacaaaggttctccacgtccccatcagattagttagatacagagtttccacacacaggttctccaaggccccaccagagcagctagatacagagtgtcgattggtgcactcacaaaccttcagctaaacacagggtgctgattggtgtgtttacaaaccttgagctagatacagag

SEQ ID NO: 42449 - DNA, 1102 bp, Homo sapiens
ggatcctgcctgttgcctagcacggsctggcctccctcccagtggacgctggaaaaacgccctgaaatggggagcggatcgcggtctgggttagaccagccttgtagaattgtgaacttaagttttgggagtgtaaacccaaacccaggaaaaggaagggggagtagagaggcaaggcacgagttttccaggcgtggtgaagctggagacgagtataatccctccctaagtggcttttggatggcagctcaggaaacagtcaatcctcttgatgccactttgaagacacacgtgcaaattcctgttctaccgcgatagataactctaattctggagatggtctttgttgcccagcagtgccaggatttggactcacctgtcctcagaaagatttccatgctcttcctaggccattacatcaacttattccaaaagtatgttaaatgcctacagggtgcctgacagtgtgctaggtgttaagtgagtataaagataacataacatcccttgttttcaggatggaatgacattcttgatcccctgcctcccagccttaaaaaacagtaatacagtggagaattaagaaagttaaaaatcttaatagccaatgaaactgcttacattattaacatgctttgagagagacatgggcttaataatttggttgaaggtcctttctgcccattgcaatttgaagattaatctgacatgcttgctaaaggacgaaaatattaaaagcttggaacactagttcattgaagtttttatcttaaaggtttcaaacaatttggtatgaggaaataggaatttaaaagctcaagctgattatgttgatatcccagatagcttttgcatttgacgttatagaaaagcttcatttactggaagctacccagattctggaattcaccaccactgaagcatctaattctacttcatttctccaagaatgagcaaaatttcattatgagattttttactctggcaattcttcagatactttccttcctccctgctccttttcctgtttcctgcacattagttagaataagaaactggatttggaatgagggaattaggctcttctcttagtatattttac

SEQ ID NO: 42450 - DNA, 600 bp, Homo sapiens
taccatgcttttattggtaagtactgtgtcatttgttttcataaccttgcatttgacattgtgtatttatgtttgctcctgctttctagttttcttataaacatcagagggtataaatgctaatcacctcgatgtcctcggtatttatttattagatttacaaagtatttcttccaaataattaaaggttctggatatttaagcgtaaacctgagagatggcatctgtattttgtggactctaggaatgtgtagaaacttcaaatgtgaaaatatagacctagaaagaagagcaaacacggtttgaaagaaagacatgtggtaacttaatgcgtgtctgtaaatctgagggtaagagccccataatatagtaaagaacaaggtgacatgccaagaaagagatatcacacagtgatcatataaagtgtaaattggaagartgatacaaaggagggagagaagaagaacaaaaatagtcaaggtaaagaatgaaatcctaaaataactgaatcagaaagaaggtaatattgaacatagaagacagaaatttatctggtatgcaatggtttgtctcaatgctgcagttaggggaagtaatcca

SEQ ID NO: 42451 - DNA, 1072 bp, Homo sapiens
  misc_feature (1)...(1072): n = A,T,C or G
cctctttactccataaactaactgtcacagggaaagatgagcctatttaactgcaggaaaatgctgaaatagtttaattgtcttccctcgatggcagacggttgttatcagagtggaggagggaatgcagaacccaatgaaatattaaatgcagacaaaaatgtgtgggtgaatgtgattgtgtagtttaatccatgtgcttttttttcaagtagtttctagtttcattgcaaagtgtggtataaaaatgatgtcagaggaatggtttgctggsttatttaaaagattgcatacaccacttacaaggtatgttgttgatggttaaaaatgacatatttattattcatgtggtccccctgacatagaagaagctgcttgaaaaatgaaatgtagatgaaaaaaaaaaaggaaaagtaatggagttcgcaatgtaaatctgtggttaaatgtgtctggggccatttcaggagctcaatattgcaattttcctatgagacacaaccagctcagggacatctgaatctgatccaagcaccacttaatgaagttttcttgtatccttcaatcatttgtcttagtttctttnnnnnnnnnnnnnnnnnnnnnnnnnnnnnnnnnnnnnnnnnnnnnnnnnnnnnnnnnnnnnnnnnnnnnnnnnnnnnnnnnnnnnnnnnnnnnnnnnnnngggatgatgcgcatttataggaaaagccaagagtagcatatcgctgtaagcacaggcgactttaaaataacagtagaaaaaaaaaaaaaggtaacagtggcaaaaaatttagcatgatagttcttaaacttttcgttctaggacccattacacacttacaacccatctaggcccccagacagtttctgcttttgtaggttatgtcaacatttatattttagaaattcaaaccaatacaaaaaccaatacaattttaaatgcttatttatcaatgcacttaaaataacaaccataaatccattacatgttagcataaataatgtaaatttattaaaaaataaccaaagtttccaaaacaaaaaacaatttagcaagatgactggcatt

SEQ ID NO: 42452 - DNA, 556 bp, Homo sapiens
tctccacagtcctcaagtgagccttggcaatgttcacataatggcatttgttgacaggttgttagggctgacagtgaatatgtttgaaaaactgtcaagctggtgaaaaaaaaaattaaagagagagcttccttacatttgaaacagcatgttaaactgtaagtacatcctcaaaatgcagaaayctccattctcatcaagttacatgctcacagtgacagcctgagaaggtagaatccctaaaaattaatgtcatcttgtcccttgaaaggtcataaggcacattaccactaacctctatttatctgcataaaattgagtttgcctttaatgctcaataacaggtgaatagaagagaggcatcattgcaaatgcagtcagggtgatgcaaggtgtttaattgggcaagcagaactgcccaaggagttggcagggagccctaaaatgtggcattgcaagtctagtcacttgggccactattgtgattgatctttaatcagtaggttttcaaggattgagttaactcacaagtggtaatggaagcaatgaatggaca

SEQ ID NO: 42453 - DNA, 824 bp, Homo sapiens
ctctgtgaggggtaggagggttcttcaattctttttacccattttgaagctcatacatgtcgtgtaaatgcgaaacaaaatgacttcagctttcttccaaacctcagtttggggagagcagaaacaagccactgggcttgtaaccaagatccatggtccagtggtgaaaaaagagccctcccyctttagcatctgaagccactggcaggttagggatgagggctctattggaggccagcaatgtgtgtttataccttgcacctgcaggtgggaagaggggtgtgtgggagggagggtctcctggctttggtggggtcagagaggatagggaaggctgtcagtatcttccccactcaaaatctacactgaagatgagtctatgaaacaccgtgccaaccccccatgatggtgtgaatcaggcagcctacagactggagacttgcatgggccattcttaatgaaaacaattactcatcattcatctgaaattcacatttaactgggcatctcctgtatatttatttaaacttggtaagtgaggcaatggtactctggagctagattgcctggcctagaatcctggccctgcccttcaagctgtgtgacttaggtaacttactcaacttctctgtaccttgtctattctctaaagtaaagacagtactatctcctttggaaggtggttgtgagcaataaatgattttaaaagggtcaagcacctagcacagtatctagcaataagtgctcacaaaataatatctattagtattgtctgttgatgactgttgatgacctctgtttctttgccaagtgtattgtgtttg

SEQ ID NO: 42454 - DNA, 824 bp, Homo sapiens
ctctgtgaggggtaggagggttcttcaattctttttacccattttgaagctcatacatgtcgtgtaaatgcgaaacaaaatgacttcagctttcttccaaacctcagtttggggagagcagaaacaagccactgggcttgtaaccaagatccatggtccagtggtgaaaaaagagccctccccytttagcatctgaagccactggcaggttagggatgagggctctattggaggccagcaatgtgtgtttataccttgcacctgcaggtgggaagaggggtgtgtgggagggagggtctcctggctttggtggggtcagagaggatagggaaggctgtcagtatcttccccactcaaaatctacactgaagatgagtctatgaaacaccgtgccaaccccccatgatggtgtgaatcaggcagcctacagactggagacttgcatgggccattcttaatgaaaacaattactcatcattcatctgaaattcacatttaactgggcatctcctgtatatttatttaaacttggtaagtgaggcaatggtactctggagctagattgcctggcctagaatcctggccctgcccttcaagctgtgtgacttaggtaacttactcaacttctctgtaccttgtctattctctaaagtaaagacagtactatctcctttggaaggtggttgtgagcaataaatgattttaaaagggtcaagcacctagcacagtatctagcaataagtgctcacaaaataatatctattagtattgtctgttgatgactgttgatgacctctgtttctttgccaagtgtattgtgtttg

SEQ ID NO: 42455 - DNA, 824 bp, Homo sapiens
ctctgtgaggggtaggagggttcttcaattctttttacccattttgaagctcatacatgtcgtgtaaatgcgaaacaaaatgacttcagctttcttccaaacctcagtttggggagagcagaaacaagccactgggcttgtaaccaagatccatggtccagtggtgaaaaaagagccctccccctttagcatctgaagccactggcaggttagggatgagggctctattggaggccagcaatgtgtgtttataccttgcacctgcaggtgkgaagaggggtgtgtgggagggagggtctcctggctttggtggggtcagagaggatagggaaggctgtcagtatcttccccactcaaaatctacactgaagatgagtctatgaaacaccgtgccaaccccccatgatggtgtgaatcaggcagcctacagactggagacttgcatgggccattcttaatgaaaacaattactcatcattcatctgaaattcacatttaactgggcatctcctgtatatttatttaaacttggtaagtgaggcaatggtactctggagctagattgcctggcctagaatcctggccctgcccttcaagctgtgtgacttaggtaacttactcaacttctctgtaccttgtctattctctaaagtaaagacagtactatctcctttggaaggtggttgtgagcaataaatgattttaaaagggtcaagcacctagcacagtatctagcaataagtgctcacaaaataatatctattagtattgtctgttgatgactgttgatgacctctgtttctttgccaagtgtattgtgtttg

SEQ ID NO: 42456 - DNA, 522 bp, Homo sapiens
ttagtaatggtgtttttaactccaaagcaacagggaaactctcccttacagactccttgcaatgtcctataacaggagtgtttccagtgcttctcattgttactgtatgtatggattacctgggtgttgtgtttaaatgtgaacccactttcagcaggtccaggatggaacctgagattctcacaagcttctcagtggtggtgcagctgctgcaggtctgcaaaccactcgttagcaagtatatttcatttttktctctcactgctttcaagccccagtaaatctttattctgaaactaataactaacatttatgaagtgactcacatggggcaaactttgtgctgagggtgtcacatgcattatatcatttaactttcaacaaccttttgaaacagtgaaaagttattgtgttcacttgaaagtctaactggcctttagaagggctatgcaactagactcaggcttcaagcctagcaagtggcctcaccaacatttgagcccacggtgcatgttcctaacc

SEQ ID NO: 42457 - DNA, 522 bp, Homo sapiens
ttagtaatggtgtttttaactccaaagcaacagggaaactctcccttacagactccttgcaatgtcctataacaggagtgtttccagtgcttctcattgttactgtatgtatggattacctgggtgttgtgtttaaatgtgaacccactttcagcaggtccaggatggaacctgagattctcacaagcttctcagtggtggtgcagctgctgcaggtctgcaaaccactcgttagcaagtatatttcatttttgtctctcactgctttcaagccccagtaaatctttattctgaaactaataactaacatttatgaagtgactcacatggggcaaactttgtgctgagggtgtcacatgcattatatcatttaactttcaacaaccttttgaaacagtgaaaagttattgtgttcacttgaaagtctaactrgcctttagaagggctatgcaactagactcaggcttcaagcctagcaagtggcctcaccaacatttgagcccacggtgcatgttcctaacc

SEQ ID NO: 42458 - DNA, 522 bp, Homo sapiens
ttagtaatggtgtttttaactccaaagcaacagggaaactctcccttacagactccttgcaatgtcctataacaggagtgtttccagtgcttctcattgttactgtatgtatggattacctgggtgttgtgtttaaatgtgaacccactttcagcaggtccaggatggaacctgagattctcacaagcttctcagtggtggtgcagctgctgcaggtctgcaaaccactcgttagcaagtatatttcatttttgtctctcactgctttcaagccccagtaaatctttattctgaaactaataactaacatttatgaagtgactcacatggggcaaactttgtgctgagggtgtcacatgcattatatcatttaactttcaacaaccttttgaaacagtgaaaagttattgtgttcacttgaaagtctaactggcctttagaagggytatgcaactagactcaggcttcaagcctagcaagtggcctcaccaacatttgagcccacggtgcatgttcctaacc

SEQ ID NO: 42459 - DNA, 1096 bp, Homo sapiens
acctggaagagaaacactacaaatgccccaagtgccaggagagctttcggcggcgctcagacctcaccacgcaccagcaagatcacctaggcaagcggccataccgctgtgacatctgtggcaagagcttcagccagagtgccacgctagctgtgcatcaccggacccacctggagccagcaccctacatctgctgtgagtgtgggaagagcttcagcaacagctccagctttggcgtgcatcaccgcacccacacaggtgagagaccttatgagtgcactgagtgtgggcggaccttcagcgatatctccaactttggagcacaccagcggacccacagaggggagaagccctaccggtgcactgtgtgtgggaaacacttctcccggagctcgaatctcatccgccaccagaaaactcacttgggcgaacaggctgggaaagattccagctgaaggagagccccatttagagtgagggagagagagtgagagaccctaacctattggaggaagatcttcagcatcttttgctgctaccttgacctcaagcccttcatcccactttggagaatggttttgtatagcctctgaagtcaggatctcaggaagtcctgaggagggactctggaataaaaacccttgcctctttccaggccaatttctcgtgttggaaagtcagaagacccagtcttggctttactttcttggggtgaaagagaaatagggtaggctcagaacatgctcatgttattaaggcagcartccccctggcctttgaggaagtacttatgagatgggtgtcactgtctgaaggttctccaaattgtctgtgaactgcttaggtaggagtgcactgcagtttcctgctagttcccacctgttgtgccccaactttgcttctagatctctggggtgggaggagtgaccttctcaatggaaggggcctccttggtctggagaagagatctgaggtcccaccttagaaatgaaagggaaaccctcagggagccatgacccagggaccttcacactcccccatgtttgttacttgttatccctcccccaacctgcctctgttttccccagagtgatta

SEQ ID NO: 42460 - DNA, 537 bp, Homo sapiens
attcaaatataaatgcctctcattattgagttcccaaggagaattcaaagctcaaagtctaaattcccttgctgagtcaaagttcaaagaagctaatctccatcatcaaattcacttgcttgtgtgagttaaagttcaaggaaattaaagtctgaaattcatcgtcttcgatttcttattctgctcagactcagccagaagagttcaggatggctgggtggagctgggattctttcagcagcctcaacctggattctcattagatcatgtaatccttgcagggccttaggagttttattaatgcaatgccaagtcttagatacctcacattttttttttttttgagatggagtctcgctctgtcgcccaggctggagtgcagtggcgctatctcggctcactgcaagctccgcctcccgggttcacgccattctcctctcctgcctcagtgtcccaagtagctgggactacasgtgccaccacgcccagttaattttttgtagttttagtagagatggggtttcaccgtgttagcca

SEQ ID NO: 42461 - DNA, 614 bp, Homo sapiens
ttttttgtaagtgcctatatgattgttttgtagattgctcatgctttgataaagcctgccataggctgtgttttctgatgacggggttaatggcagaacctgaagccttatgtcgtgatgcacgtaaactgctaggctaaggaattagtattagcatcatgtgcattagctatttgacagccataaaatatacttagtcaaagggtgtaatacagtcaggtctgtatatttgaaagagttttgatggcagtgtggagaataaaccgaaagaaggagatacggagctggggaaaagttgtcgggttattgccatagatgaggcagatgatgatgaagacctgaatttgggtgtcaggaacagaatggagaaaaaaagagtaaaaaaacattgagggaaaaccaaaaggatatgttcatraatgcaatttagggcataaaggaaataggaggaagactaaggtgacttttgtgattatggtttaggtaactggctggctgaggatgccatgaagagaagtaaaacactagagaaggagcagacttggaggttgtgtggtagaaatttaacagcttcaatttcatttgagattccttagggtatttatagaaaattg

SEQ ID NO: 42462 - DNA, 548 bp, Homo sapiens
cgagccttccgccccgcaggtgtccacgtgttcggcctgtgtgccacagccctggtgacggacgtgatccagctggccacgggttaccacactcccttcttcctcaccgtctgcaagcccaactacactctcctgggcacgtcctgcgaggtcaacccctacatcacgcaggacatctgctccggccacgacayccacgccatcctgtctgcacggtgagccggacccccaactcccctgactgggagccttcttccgccccggtgaacatgcggggaaacagagacacagagaggccactggagctggggtccccaggtgggcggggctcacgctggacgcctcttacaggaagaccttcccgtcccagcacgccacgctgtcagccttcgccgcggtctatgtgtcggtgagtccggcccctcactgcccttcccaggccctcttgctgacccgtggggagccctccctgaccccaacccccatgccccagatgtacttcaactcggtcatctcggacaccaccaagctgctgaagcccatcctgg

SEQ ID NO: 42463 - DNA, 528 bp, Homo sapiens
agagtaggcatttaaattcaaagtgattaccttctggaacagttctgagttctcatctcatttctggccctagcatgtaagcttgggtttttggtttcttcgttttcaaaagaaascagttggaataaaccatctccctggtccctcctagcattctgaaaccttcagtataagaaatttctaaaaggaagccctgaaacacctctacttctcagtgctactctggtcttgagttttctggaacatgttcaacatgcattcatttagcaaagctttgattgcaagtgcctactatgtgccattcctttctaggcatttactcaggctgttcctccacctggagggcccttagcctcatcttcttttgagtttcgaattgcagattttcccaggagaggagtctccatctccttcagcactttgcacagcactccttaggtgagagttgagaggtgtgtgtgttttcccctaagttatttgtctccaaagagcagggaccgtgattttttcttcattgtgtctctacaa

SEQ ID NO: 42464 - DNA, 529 bp, Homo sapiens
cagtttcacatctaaatctgtgagggagaaatggatcagtagctaccatattgtgacaaaacaaatcaaagttaccccatttaggacctgacagtaaattatgagggcagtagaggaaggatttctaagaatacataaattttaagaagaaattgggagattcaaaagcaggtagatagacttgaagttaaacatcttgtaatttatccttagaaagtaataatacagtgtgcaaaatatacatatgaataaagatgtccagtaaaaaaatgaaaagttgtttatggccttgtatgattacacttatttgtatttttacttttactatgtatgtgtatgaaaaagtatacctttatatatatccacacccttacatatcaaaataagagttgttttcttggaatacttgaaatttgttttactcaggaatrtttgatatttgaattacagttagatgtgaaaataataataataaaacagaactggagttaacagtaatttataattgagacactgcaactaaatgtca

SEQ ID NO: 42465 - DNA, 584 bp, Homo sapiens
cattatagtattatagagcagggaaattgctttaaaattcctctgtgtgctgtctattcatttctttctcccctccaactctgagtaaacattgatccttttactgtctccagagttttgctactttaggcatttttaaattctgttttacacgtaagttaactgagacctgagtgattcactgatattcatcaagtcacttagcaagcctcatgtctggatttgaattagaacaaagatcccacattactctttccaaataatgttataagcttgcatcctaatgttaatgggccaaaagagcaggaagttatttcttataaaattaaaaaaaatttaaaaaaaattttyggctttatgcctctgtaacattgtattatcacaatctaagggaggcaacgaaggatagtaaaaacaaaaacaaaaaacacagaattagaagtcaagtgttcactcagctttgacaagttgtttaaactctctgagacttagtcattttatctataatgtgtatgatattttctttttattttattttattttattattattatactttaagttttagggtacatgtgcacaat

SEQ ID NO: 42466 - DNA, 584 bp, Homo sapiens
cattatagtattatagagcagggaaattgctttaaaattcctctgtgtgctgtctattcatttctttctcccctccaactctgagtaaacattgatccttttactgtctccagagttttgctactttaggcatttttaaattctgttttacacgtaagttaactgagacctgagtgattcactgatattcatcaagtcacttagcaagcctcatgtctggatttgaattagaacaaagatcccacattactctttccaaataatgttataagcttgcatcctaatgttaatgggccaaaagagcaggaagttatttcttataaaattaaaaaaaatttaaaaaaaattttcggctttatgcctctrtaacattgtattatcacaatctaagggaggcaacgaaggatagtaaaaacaaaaacaaaaaacacagaattagaagtcaagtgttcactcagctttgacaagttgtttaaactctctgagacttagtcattttatctataatgtgtatgatattttctttttattttattttattttattattattatactttaagttttagggtacatgtgcacaat

SEQ ID NO: 42467 - DNA, 662 bp, Homo sapiens
ccggcacacacagctggaggggctccagccactgtgtggcaacctctcagcctgggcacaccagtgtcaggtgcctgggaagggttttcacccagctagccctcccattaacctacctgagcactgccatcagccccattttacagataaggaaactgaggaacagaaagaaaatgattagtccgagggatgtaggtgacagggaggctgctcagctcagccctgcctgcctgcrccacccaggctcccccagggaggtccaatctcccacccaaggcaggacaaggcagacgagagcctcacgacaccgacagtgacgcacacttccacttaggtagcgcctccgctgtgccaggagcagagtgtgcatcagctcatttaatctttacaaccacctgatgcagggggtacctttaccaaccccatttcacaggtgcaagaaacaggctccatcccttgctcatctcacacgctgttgggaggaggcagaacagagctggaacccgtgccgccggaccagagcacagtccagttctgcctggaggcgggatgctggaccggataacctctggaagacccctgcttctctggctggtgttcagatgtggtctcattctccagttccaactaacttccagctcttggctacatgtgtctatcta

SEQ ID NO: 42468 - DNA, 787 bp, Homo sapiens
aggaggaaaaccagctacaatcaagaaaaagcaagaaaaaggaaaaacaatgccctgagacgggtagttttccacccaacaccaaactaggcaccacttgtaacagggtgaatacggaaggtttttactgtaactaaaaatactaccttaagggttgggcgtggtggctcatgcttgtaattccagcactttgggagaccaagacagggagatcaggaggatcgcttgagcccaggagttcaagaccagccggcgcaacagagtgaaacctcatctctacaaaaaaaattagcctgagctggtggtgggcacctgtggtcccagctacttgggaggctgagataggaggattgcttgagcctggaggtcaaggctgcagtgagctataattgagccactgcactctagcctgggagacagagagggaccatgtttcaaaaaaaaaaaaaaaatactaccttaaagtcattgaatatcaatgactgccagtattacaaaaggaaattcaccagaccacatgtgcctcccagaaatttccaatagcatctccaatgtgctgttgtgtgaaaaaaatcaaaactgaattagatcaagcctctggatacaactatgaatttrtaggattcaggggacaaggagcatgctacacattataggaagctctcctacaggtaaagggacccagcttcaacaaaaacaccacatggaagacagagagaatgagtaccagtcctacagatgaaaaactgaagaaacatatcacagtctcatcatgcagacctcattc

SEQ ID NO: 42469 - DNA, 739 bp, Homo sapiens
tggcccagcaccctgcgatcacttcctaggacagtgaactgggagcccccggaggcsaggcggggacaatgacaggcaaggctggctggctaggtggggactggggcacactggaggcccgagctctgggtgaggcgccaccctgccgagcttccaccggtagctgccatgcagcaacgtggccaggggtacaggccttctaagttggcaaaagaaactagaaatctaggctttatgtaaaaatcttgtggttttcaaatgttgatgattaattcaaaataaactttaagcacttctgcagtcctcctcccacggccctggcctctgcggtgtcctgagcaagccacttcacctctctgggcttcaactgtgtcatctgtaaagtggagaaacaaggcctgcccctcaggatcatggcaacaggagatgggacacacgttgcccatactaaagataacaaaaagcggcagcaacaataacagctaatgctcgatgagtgccagaggctgttttaagtaccgggaagtaatgtcatttcatcacaccacaatctcataagacaggcttttttttctttttctttctttttttttttaaatcagggtctcgctctatcacccaaactagtgggcagtagagtgatcatagctcattgcagcctcaaattcctgggctcaagtgatcctcctgcctcagcctctggagtagctgggaccactggcgtgtgcctccacacctg

SEQ ID NO: 42470 - DNA, 739 bp, Homo sapiens
tggcccagcaccctgcgatcacttcctaggacagtgaactgggagcccccggaggccaggcggggacaatgacaggcaaggctggctggctaggtggggactggggcacactggaggcccgagctctgggtgaggcgccaccctgccgagcttccaccggtagctgccatgcagcaacgtggccaggggtacaggccttctaagttggcaaaagaaactagaaatctaggctttatgtaaaaatcttgtggttttcaaatgttgatgattaattcaaaataaactttaagcacttctgcagtcctcctcccacggccctggcctctgcggtgtcctgagcaagccacttcayctctctgggcttcaactgtgtcatctgtaaagtggagaaacaaggcctgcccctcaggatcatggcaacaggagatgggacacacgttgcccatactaaagataacaaaaagcggcagcaacaataacagctaatgctcgatgagtgccagaggctgttttaagtaccgggaagtaatgtcatttcatcacaccacaatctcataagacaggcttttttttctttttctttctttttttttttaaatcagggtctcgctctatcacccaaactagtgggcagtagagtgatcatagctcattgcagcctcaaattcctgggctcaagtgatcctcctgcctcagcctctggagtagctgggaccactggcgtgtgcctccacacctg

SEQ ID NO: 42471 - DNA, 669 bp, Homo sapiens
tggccrggcatggtggctcatacctgtaatcccagcactttaggaggctgaggcaggcagatcacttgaggtcagttcgagaccagcctggccaacatggtgaaacccccatctctactaaaatacaaaaataaataaaaaataaaaagcctagctgggtgtggtggtgcgtgcctgtaatcccagctacttgggcagctgaagcacgacaatcacttgaacccaggagacagaggttgcagtgagctgagatcgtgccactgcactccagcctaaggaacagagtgagactctgtctcaaaaaaaaaagaatgataaatggtggtgtgtcatgaaatacttcttcagcagtgagaataagcaaactaaatctacacccaagcatcaacacgggtgaatctcacaaggtgttgagcaaaagaaacccaacacaaaagggtatgtgctgatgattccagttatataaagttcaggttcacaaccaggcaaaattaatttgtgctgttagaagccaggagagtggatgcccttgggaaggtggggatatctgggagggaatatgagagaagtttctgggatgctggtgaagttctaattttttttttctgtgaacttgcatacagaagtaaagaagtcctatttgttatctgggtgctgatttcatggaga

SEQ ID NO: 42472 - DNA, 669 bp, Homo sapiens
tggccgggcatggtggctcatacctgtaatcccagcactttaggaggcygaggcaggcagatcacttgaggtcagttcgagaccagcctggccaacatggtgaaacccccatctctactaaaatacaaaaataaataaaaaataaaaagcctagctgggtgtggtggtgcgtgcctgtaatcccagctacttgggcagctgaagcacgacaatcacttgaacccaggagacagaggttgcagtgagctgagatcgtgccactgcactccagcctaaggaacagagtgagactctgtctcaaaaaaaaaagaatgataaatggtggtgtgtcatgaaatacttcttcagcagtgagaataagcaaactaaatctacacccaagcatcaacacgggtgaatctcacaaggtgttgagcaaaagaaacccaacacaaaagggtatgtgctgatgattccagttatataaagttcaggttcacaaccaggcaaaattaatttgtgctgttagaagccaggagagtggatgcccttgggaaggtggggatatctgggagggaatatgagagaagtttctgggatgctggtgaagttctaattttttttttctgtgaacttgcatacagaagtaaagaagtcctatttgttatctgggtgctgatttcatggaga

SEQ ID NO: 42473 - DNA, 669 bp, Homo sapiens
tggccgggcatggtggctcatacctgtaatcccagcactttaggaggctgaggyaggcagatcacttgaggtcagttcgagaccagcctggccaacatggtgaaacccccatctctactaaaatacaaaaataaataaaaaataaaaagcctagctgggtgtggtggtgcgtgcctgtaatcccagctacttgggcagctgaagcacgacaatcacttgaacccaggagacagaggttgcagtgagctgagatcgtgccactgcactccagcctaaggaacagagtgagactctgtctcaaaaaaaaaagaatgataaatggtggtgtgtcatgaaatacttcttcagcagtgagaataagcaaactaaatctacacccaagcatcaacacgggtgaatctcacaaggtgttgagcaaaagaaacccaacacaaaagggtatgtgctgatgattccagttatataaagttcaggttcacaaccaggcaaaattaatttgtgctgttagaagccaggagagtggatgcccttgggaaggtggggatatctgggagggaatatgagagaagtttctgggatgctggtgaagttctaattttttttttctgtgaacttgcatacagaagtaaagaagtcctatttgttatctgggtgctgatttcatggaga

SEQ ID NO: 42474 - DNA, 669 bp, Homo sapiens
tggccgggcatggtggctcatacctgtaatcccagcactttaggaggctgaggcrggcagatcacttgaggtcagttcgagaccagcctggccaacatggtgaaacccccatctctactaaaatacaaaaataaataaaaaataaaaagcctagctgggtgtggtggtgcgtgcctgtaatcccagctacttgggcagctgaagcacgacaatcacttgaacccaggagacagaggttgcagtgagctgagatcgtgccactgcactccagcctaaggaacagagtgagactctgtctcaaaaaaaaaagaatgataaatggtggtgtgtcatgaaatacttcttcagcagtgagaataagcaaactaaatctacacccaagcatcaacacgggtgaatctcacaaggtgttgagcaaaagaaacccaacacaaaagggtatgtgctgatgattccagttatataaagttcaggttcacaaccaggcaaaattaatttgtgctgttagaagccaggagagtggatgcccttgggaaggtggggatatctgggagggaatatgagagaagtttctgggatgctggtgaagttctaattttttttttctgtgaacttgcatacagaagtaaagaagtcctatttgttatctgggtgctgatttcatggaga

SEQ ID NO: 42475 - DNA, 669 bp, Homo sapiens
tggccgggcatggtggctcatacctgtaatcccagcactttaggaggctgaggcasgcagatcacttgaggtcagttcgagaccagcctggccaacatggtgaaacccccatctctactaaaatacaaaaataaataaaaaataaaaagcctagctgggtgtggtggtgcgtgcctgtaatcccagctacttgggcagctgaagcacgacaatcacttgaacccaggagacagaggttgcagtgagctgagatcgtgccactgcactccagcctaaggaacagagtgagactctgtctcaaaaaaaaaagaatgataaatggtggtgtgtcatgaaatacttcttcagcagtgagaataagcaaactaaatctacacccaagcatcaacacgggtgaatctcacaaggtgttgagcaaaagaaacccaacacaaaagggtatgtgctgatgattccagttatataaagttcaggttcacaaccaggcaaaattaatttgtgctgttagaagccaggagagtggatgcccttgggaaggtggggatatctgggagggaatatgagagaagtttctgggatgctggtgaagttctaattttttttttctgtgaacttgcatacagaagtaaagaagtcctatttgttatctgggtgctgatttcatggaga

SEQ ID NO: 42476 - DNA, 669 bp, Homo sapiens
tggccgggcatggtggctcatacctgtaatcccagcactttaggaggctgaggcaggcagatcacttgaggtcagttcgagaccagcctgsccaacatggtgaaacccccatctctactaaaatacaaaaataaataaaaaataaaaagcctagctgggtgtggtggtgcgtgcctgtaatcccagctacttgggcagctgaagcacgacaatcacttgaacccaggagacagaggttgcagtgagctgagatcgtgccactgcactccagcctaaggaacagagtgagactctgtctcaaaaaaaaaagaatgataaatggtggtgtgtcatgaaatacttcttcagcagtgagaataagcaaactaaatctacacccaagcatcaacacgggtgaatctcacaaggtgttgagcaaaagaaacccaacacaaaagggtatgtgctgatgattccagttatataaagttcaggttcacaaccaggcaaaattaatttgtgctgttagaagccaggagagtggatgcccttgggaaggtggggatatctgggagggaatatgagagaagtttctgggatgctggtgaagttctaattttttttttctgtgaacttgcatacagaagtaaagaagtcctatttgttatctgggtgctgatttcatggaga

SEQ ID NO: 42477 - DNA, 987 bp, Homo sapiens
tggctgccgtggccaccactcacccccacctttaccatggggcgcttgtgtttgctggctggatgctaaaattcagccacgcctccccatcccaattccagcagggcactgaacacaggacacccctggggtgtaataggcaggggaggggcctggctttgcccattgtaggccagcgggctcaccttggcgatctggtcgaacttgccaaagagctcattcagcaccaccaccagctccttgggagaacagtcgctggccagctgcgtgaagcccacgatgtccgcatagaggatgctggggatggggcagggtgggagggagtgtcagagccaggctcctagacagcagcagcaggagcacgcaggactgtctggagccccaggagcctgccaggcctgagcccattcacccccgtccttcctcagcctccatagggatgggagagtcgcgcccagccatagagacagattaaagttccaggggcttcacgttaaagcagaagggagcaaaattcagagcctacaggagccctcggccccaccccaggccctatcactgcagacagccgaagggcactcctgcaggcagcccggagccttcccctttcccatccaatgttcaccacagcacagacttcagaactccctggtgagaggcagctccatgctccctcaagccaacctccacacccagcactttacaggcatcgagtcctcacacagcccttgccgaactcccgttctacagatgcacaaactgaggctccaggacattgagacttgctgggaagccaagagctggcatctgcaccagttctccctgctccaaagtccttaagytcatggaccatccacagcccagagaaaaggcagcgggccagccttggatgtaatgctggcgctgcaggcagaggacccagggggtctcctgggacccacatctacactcaacggcacccagcacccacatcgacacttgacaaac

SEQ ID NO: 42478 - DNA, 1141 bp, Homo sapiens
aatgtggaattcagagctcatataagatactcaaaaagggggaggaggctgcactatcaagaactacatttatggtgccacattgagaggtgacagagactgcggccagagacagggaaataggtgtacctgaggacacacagatacacctaagtgtgttagaaacagaagaaaactggaaaacctctttgaaaaatgacttgtcaatgatgaaaaaataatttaataacgatgacaataatagtagtaacttcactaaaaccctccctatggcttatgggctgccacccatctctatgtattgccctcctggctttctctttgctccaaccaagtttcttttagtacttggacttcatcccgactggcgtttgtatatgctccttctgcagggaacactgctttccactgcccctgccccttcacctgatgaagtctcagatgaaacaactgttcctcagggaacctttccccagtttcctgagaatcagcgacacccccagtcttatgttctcacagccacttaggttttcatgacaatcatgataattttattcttgttcaatgaatcttataggagactatcaattctatgaggtcagagactatgtctgtctcccaagctcacaacacagtgcccaccacaggggtattcagtaaacacttgttgaacaaattactmttgagcaaaacaacatctggatggtattttctggtaaatacagtatttcgcttcatagggaaaggggagataatttaggaactccttgaaattgccaaaaactacatcaaattctcatttatctcaagttatccagagcactggaagtcaaaatctactgataataatattataacactttctttatataatcatttttaattatatatgtaatacataatcattatagccccacatgtccccaaggattcttccacatcactttttttaaataaactggtagaaaggatctaatttgattcttgtggtttcctctctttaatcatttatgatttattgattcatccattgatttatatgttcatttctcttttctgtcataggaggtgtggaagcttctctgcctgtctttaccaccctctagtctaggccaaaactgagggtggaagagttgaaaac

SEQ ID NO: 42479 - DNA, 237 bp, Homo sapiens
cttctttatagcacaatagaagcactaagtgctttaaaaataggagatgaaaagttaaaaaaaaaaaatgtaaaggatataggaagaaagcccctgtcatgaggatgcaacaaaacccaagggtcaaacatcaccctctgctgggcctgttgacagtagagggaaacagttacctgacattaaaacataactttagtaattaaagtttaagaattactttaaaccatttttwaaaaa

SEQ ID NO: 42480 - DNA, 829 bp, Homo sapiens
taataagagtaaggcacattggccaggtgtggtggctcacacttgtaatcccagcactttgggaggctgaggcaggcggatcacttgaccccaggagttcgagaccagcctggttaacatgctgaaaccctgtctctactaaaaatacaaaaattagctggttatggtggtgcacacctataatcccagccactcaggaggctgaggcacaagaattgcttgaacccagggagcagaggttgcagtgagccaagatcgtaccactgcactccaacctgggcgacagagcaagactttgtctcaaaaaaaaaaaaaaaaaaaaaaagtgaagcacataccaaaaagagtaaggcaagccagcgtggtggcccatgcctattttsccagttacttgggaggctgaggtgggaggatctcttgagcccaggagttcgagaccagcctgggcaacacagtgagaccccatctctaaaaacaaacaaaagagcgaaggagaaggaggtcagatacagagaaatagatgcacagaggagaagatcctgggaaaatggaggcagagattggaatgacaggctgtaaaccaagggatgctaaagattgctggcagccacaaaagctaggagaaaggcaaggaaagattcgaggcttggtgcagtggctcatgcctgtaatcccagcactttaggaggctgaggctggaggatcacttgaggccaggaagttcaagaccatcctggttaacatctctacaaaaactaaaaaaaaaaaaattagccaggcatgcgagtgcatacctgtactctcagctactggggacgctgaagaagga

SEQ ID NO: 42481 - DNA, 433 bp, Homo sapiens
agtttttatctcttctacctagatagactcagaaagaagtctttacttagttttaaagggagcaaaagatagaatacattgtttctacattaaaacatttattttaattccttcgtaatgttttcaacacaaattagtgtgctaagtggataattatgtgcctgggacacttttctagttgaaaagaaatagagatttttccaaacaatatgtgtttgaacaacttgtattcttatttcagatgatggcatacaactatatataatatctattatatctaatgctaatataataaaatgttacatatagttagcaaaagtgtttgaccamttacccattgaagatttgagatttgagattttattttccgagcattgtttaatcttatctattacccatagtccaaccactggtatttctgtccccttggaag

SEQ ID NO: 42482 - DNA, 695 bp, Homo sapiens
aaatttaaatttcaaatcagcttctataaataaacatttagaaaatattatgcataataatatgatgaaaatattttatagaatatttaatctaatcatcacaacacaactttcaggaaaaatcattattcccactttacatataaggaaactgaggctaaggggaattaagcagtttatttgaggttatgtagctaacatgagaaagaacttggattcaagcccaggctatttttcttcaaagtctaagtattgttcaataatacctaagcacagacaaattcaatactaactttcagaaatttatttttatctatttttctatctgatatattatgtrcccacttgcaaatcaaaccaatttttatttattaaaggggtctgagggtctggtaacatagtttttacatatcccaacctgattaattaattatcaagttttactctatacaaggatttgaacttataaaacagtttgcaatgaaaatacgtattaccagttgtatgtgtgtgtttctacatacatatatgtgtgtgtaccaaaaattcatatttaaaatcaataggtgaaactgggagataaaattatatatgtttaaagactatagttagataacaaatgctatattgaatcatttaattactcaaatatttaccttttttaaacctttttctatttcataaacaccatgatg

SEQ ID NO: 42483 - DNA, 684 bp, Homo sapiens
cataatgcacaggcattctctattggagttgatatcaccatctggtgtctaattattcccacctcacaccacacggttgtatgcatttaacggaatgactgtacattatgataactcagtacacaggctctttgctgttaattataaggtgctagttgttgttgttttaaagatcatggaaatcccccaaaatttgatattcattgcttaaaatgaatattttgtaagatgacactaggaaaagagaactatagttagctttatttttctaaaagatctatgttcctttaagtttagtttcttctaatacctgtattataaattaagatcttgcttccataaggatacatggtcagtatccttttctctaactgaatgcttttattctgatttatcaatatatgytttccaggtgtaacaatcagtgttaacagtttttattcctaaaataataaagaaggctataattcttatgaaaccattcactcatttattcttttttttttttcaataagcattcattacatatttgccaggcaccagacactatttaagttataagggaacaaaactaatgtctttagaaggactcaggttaattagtgaaaatgtagttataggtaagtgattatgataaaacttggtaaatgctttattagcagtattcacagattcttaatggag

SEQ ID NO: 42484 - DNA, 684 bp, Homo sapiens
cataatgcacaggcattctctattggagttgatatcaccatctggtgtctaattattcccacctcacaccacacggttgtatgcatttaacggaatgactgtacattatgataactcagtacacaggctctttgctgttaattataaggtgctagttgttgttgttttaaagatcatggaaatcccccaaaatttgatattcattgcttaaaatgaatattttgtaagatgacactaggaaaagagaactatagttagctttatttttctaaaagatctatgttcctttaagtttagtttcttctaatacctgtattataaattaagatcttgcttccataaggatacatggtcagtatccttttctctaactgaatgcttttattctgatttatcaatatatgctttccaggtgtaacaatcagtgttaacagtttttattcctaaaataataaagaaggctataattcttatgaaaccattcactcatttattcttttttttttttcaataagcattyattacatatttgccaggcaccagacactatttaagttataagggaacaaaactaatgtctttagaaggactcaggttaattagtgaaaatgtagttataggtaagtgattatgataaaacttggtaaatgctttattagcagtattcacagattcttaatggag

SEQ ID NO: 42485 - DNA, 525 bp, Homo sapiens
agccatgcttcctgtaaagccttcagaactgtgagtcaaatctcttttcttcataaactacccagtctcaggtagttcattatagcagtgtgagaatggactaatacactgcccaactcatagctcaagaaacctctgccctcctcctacccctccaacacatacatgcacacaygcacgcatgtgcatgcacacacacacattgcactttaatgcagaccttaccttgtcctcactatgccctactggatctagaaagctttgagggcaaacatgtcacatttctctctcccccagcagaccaagagccctttgagggcaaggacatgagagtgtcttcctttacataggtagagagtgaattccttagtgatgaatccagagccgggtcatagctcttttctcctctctgtctgacctttattgataactataaccaatgaatatgaaagaacagtgtggtcccagccttctgaaggaacaaataattagtagatattcgaagggagcaggggaatacatttt

SEQ ID NO: 42486 - DNA, 525 bp, Homo sapiens
agccatgcttcctgtaaagccttcagaactgtgagtcaaatctcttttcttcataaactacccagtctcaggtagttcattatagcagtgtgagaatggactaatacactgcccaactcatagctcaagaaacctctgccctcctcctacccctccaacacatacatgcacacatgcaygcatgtgcatgcacacacacacattgcactttaatgcagaccttaccttgtcctcactatgccctactggatctagaaagctttgagggcaaacatgtcacatttctctctcccccagcagaccaagagccctttgagggcaaggacatgagagtgtcttcctttacataggtagagagtgaattccttagtgatgaatccagagccgggtcatagctcttttctcctctctgtctgacctttattgataactataaccaatgaatatgaaagaacagtgtggtcccagccttctgaaggaacaaataattagtagatattcgaagggagcaggggaatacatttt

SEQ ID NO: 42487 - DNA, 1334 bp, Homo sapiens
ccttgaaaccagttgaaatggaacccattctcaagtgtttgggctggaaccatggaaagagagcagatgcaatggtcagactttctctcatgtgtattcttctccagacttggtacaaaattgaaaaggaagtttcatgtgcagaaaactaccaggaatgaaaagtagtgggtttggatgactttcccagagtggtgggaatttggaattcttataatgcaaatcaatactaagtccgtttagaatcagacaaacaaagtgatgattattttacgtttttgggcccagagcaaatctgcttccagctagtctagtacctattaacatttataaagttctttctagtaaaggacaagtctttggggaatagctcatgcctagctatttcgtgccttttcacacttggcataaaacagatctacaaatccaggttttgatgtggaaattcttccttgttataagaattctgattcttgaaatcctccctttcccaccccactctcatctcctaaaactacctggtggtgaaagaagtcagtggggaatcatttcttaagcattatgattggcctgcaagaaaaatctactctgctggttttatgacccagatggaggctcagaccctctctaccagggatggcaattctcattgactccagacatgcatgcgctgtctatccagggcatgttgtgggtatcttcagtacctctcttctccgggtttctaataactttaactgttcaatttccgctccctttgctatcctataaaaaatgcaaccccttaaagtgaggaagctgcctcagccaggaatcactcagctcacacgtaccaatatgttgcctacggagttcaatgagaagtatgtttcttactccttggatgaatagctagacctaaaaatcctattggccccaaaatatcatggtatcttttggaatataaactctttaagcratcctgatatgatttcttgatagtgaccacttccttgtccagaggagtgtgtatatggcagcaattgtactaggttctgggatataaaggtaaatgccacatgaatttgccctcagaaacttcacattccagatggagaaacagataggtaaacaaccacctgcaacacagtgtgagctatagagatgatagatagatattagatagataatagagatagatatagataggtagatgatagaaagaaagaatggacaggcacattgtttaggggaagatttgtttcatgtaggggttcctgggtggttggttcacaaagggtcatatctgatctgggctttgaagagtaggaaggaaataatattcctggcagaaa

SEQ ID NO: 42488 - DNA, 1452 bp, Homo sapiens
cacatgtgcaagtgtatacaaatgtgtgtatgtgtgtttgtgtgtgtacttcgtttttttaaaagccacctcatgtttggttacataaatgtgttagggcattcttacattgctataaataatttcttaataaattacccgagactgggtagtttataaggaaaagaggcttaattgactcatgggtctgtaggctgtacaagcatgtcaccagcatctgtttggcttctgtggaggctcagggagcttttactcatggcagaagatcaagcaggaccaggcatgtcaaatggccagaacaggagcaagagagagaaatgggggatggggaatggcacacacttttacacaactggatctcaggagaacttgagagaactattatgagaacagcatcaagccacaggggatccacccctatgaccaaagcatttgtcaccaggcctcacctccaacactggggattacaattcaacatgggatttggcaggaacatatattcaaactgtatcagcgagatttccaaaaaatgggagaataaggtcaaaagttagcataagatgaaattcaaggttacataatttttcgcagagattgggatgagctcttatctaaatccccatttggattattttctttttcaaatttgataatgtgatagcgaaattgtctttctttccatcgaaggctggaattagcaaactactttctagttcctgtcctcagtttgtactacctgcaagttaaaaatatttttacattttatttttcaaaaggtggagggaaaaaggataaaagaagaatgcgaagaagaatgcaaagaagatgaagaagcaacagagactcgtatgtagcctgcaaagtttaaaatatttattattacacatttgtagaaaaatttatctgaccacataaacaaaatgatrtaaaataacttctgtgttcttacaggattctagagatgctgtgaaagtttatgtacatattattcaaaaggggagcatttgggttaaattttacctaaatgaataagtaaaaattccattctattgtcttctgccccaattttttttttgttttactatcaacgtcagtacccccttggatgtttgactaaccctcctcagaccccaataagaagcataatctgatgagttcaaggctacatagtttctcaggcttacatccttctttctttcctccgtagggactcttcttgctattataaattaagataccattttgcttagtgcaggtcttccatgaagcagacaccatgataagattagatcttctatagaattgttagaaaaaaattattcttttgtacacgtaataatatggagcatacaaaacattattgtaatgaatttacaagaaaggagaaagaaagactcttacttctggtagaaaagtcattcccctctatgtggaaggccctgattgaaacat

SEQ ID NO: 42489 - DNA, 1452 bp, Homo sapiens
cacatgtgcaagtgtatacaaatgtgtgtatgtgtgtttgtgtgtgtacttcgtttttttaaaagccacctcatgtttggttacataaatgtgttagggcattcttacattgctataaataatttcttaataaattacccgagactgggtagtttataaggaaaagaggcttaattgactcatgggtctgtaggctgtacaagcatgtcaccagcatctgtttggcttctgtggaggctcagggagcttttactcatggcagaagatcaagcaggaccaggcatgtcaaatggccagaacaggagcaagagagagaaatgggggatggggaatggcacacacttttacacaactggatctcaggagaacttgagagaactattatgagaacagcatcaagccacaggggatccacccctatgaccaaagcatttgtcaccaggcctcacctccaacactggggattacaattcaacatgggatttggcaggaacatatattcaaactgtatcagcgagatttccaaaaaatgggagaataaggtcaaaagttagcataagatgaaattcaaggttacataatttttcgcagagattgggatgagctcttatctaaatccccatttggattattttctttttcaaatttgataatgtgatagcgaaattgtctttctttccatcgaaggctggaattagcaaactactttctagttcctgtcctcagtttgtactacctgcaagttaaaaatatttttacattttatttttcaaaaggtggagggaaaaaggataaaagaagaatgcgaagaagaatgcaaagaagatgaagaagcaacagagactcgtatgtagcctgcaaagtttaaaatatttattattacacatttgtagaaaaatttatctgaccacataaacaaaatgatataaaataacttctgtgttcttacaggattctagagatgctgtgaaagtttatgtacatattattcaaaaggggagcrtttgggttaaattttacctaaatgaataagtaaaaattccattctattgtcttctgccccaattttttttttgttttactatcaacgtcagtacccccttggatgtttgactaaccctcctcagaccccaataagaagcataatctgatgagttcaaggctacatagtttctcaggcttacatccttctttctttcctccgtagggactcttcttgctattataaattaagataccattttgcttagtgcaggtcttccatgaagcagacaccatgataagattagatcttctatagaattgttagaaaaaaattattcttttgtacacgtaataatatggagcatacaaaacattattgtaatgaatttacaagaaaggagaaagaaagactcttacttctggtagaaaagtcattcccctctatgtggaaggccctgattgaaacat

SEQ ID NO: 42490 - DNA, 600 bp, Homo sapiens
ataaagaaattttacttcactaagaaaaataaaaatagcagagaagaaatgtgatgtgttactgtgctaacctagagttagagttatgctaccattgcaatgactttcaggaatatttgatgatatcaacaaggtattgtttctgcaatacatggaaaaggctacagagatagtttcggcttaattgaagtggagctaacattgttaattttactaacaatggaagtgatatgcatratattagaattatataattgttctgcaggttttgattgcatgctctatgtcaccaatttttaatattacaaaagtataagagtgggaaaagtacaaatgggcattattttttgtgtgtgcttaatgtgttgccaaaatgtaagggctggtgattggtaattctatcaaaaagaacacacacactgcatacatacatatcctggaaagagaagatttaaaagaaaagtgaaattaagatcaatagagtctgtgctaaataacagttgacataacagacattgtatactatttcaaataataatttccataatagctataagataggttaccattattattcaaattttagagataaggaaactg

SEQ ID NO: 42491 - DNA, 544 bp, Homo sapiens
actagagcacacatttttaccaataggaatctaatacttctcagttgtaacctcaggttttattttcaaagtctaaaaattttcagtgttccaaaggggaataytacaaatataagccatatgtttataagtataatactggctttcactttgctacagttgcagacccttcctttttgccagtaataattgaatcctgtttgcttctcctggccacagtgtaattatttatcaccaagagttatggtatgtaacatagggctataaataaaacaccatgaattgctatgcaggtatattttactttcattctgtattataataattggttcaagttctcaatttgaggtcttaaaagttattaataaaatctatagtgcctgaacaaatttttacctcattataaattgttacagcattgacacaggctgctacaataactagatattagcttaaagcagcatctcaggcaaaatgttccaagtaatatgagagactaatttcttctgcttgcacagagtcttcttaacggaggaaacctgaa

SEQ ID NO: 42492 - DNA, 544 bp, Homo sapiens
actagagcacacatttttaccaataggaatctaatacttctcagttgtaacctcaggttttattttcaaagtctaaaaattttcagtgttccaaaggggaatactacaaatataagccatatgtttataagtataatactggctttcactttgctacagttgcagacccttcctttttgccagtaataattgaatcctgtttgctkctcctggccacagtgtaattatttatcaccaagagttatggtatgtaacatagggctataaataaaacaccatgaattgctatgcaggtatattttactttcattctgtattataataattggttcaagttctcaatttgaggtcttaaaagttattaataaaatctatagtgcctgaacaaatttttacctcattataaattgttacagcattgacacaggctgctacaataactagatattagcttaaagcagcatctcaggcaaaatgttccaagtaatatgagagactaatttcttctgcttgcacagagtcttcttaacggaggaaacctgaa

SEQ ID NO: 42493 - DNA, 753 bp, Homo sapiens
atgtcagcagatgctcttgcctgagtgtaagggaaccaacaaatgaaaaagaataggctgaatatagaatgtaaatataaaaaatgtagcatayaaaactgaaactattggaattagtttcataacaaatgaagagtgaaaagaaaaagaataaatgtttcagggaaaaatatattagaaatgaatagaaaattaaagtccataaaaaaattacagagatcaacatgggaagtgggaagaaagatcatatggaaccacttactgtaaaatgggagaattttaatgaggtaaatgaataaatgctgcagaaatgtctaataagataatatccagaaataattttatgtagaagaatactattagttgtctgcctgacagcattttcccaatttgttctttgtagtaagaatctcattttgagaatataaataaaaataataatctgtgtagagggattagaaaagaaaaagaataccagaaaaaataaaaagtaaggatttatataagtcacaatgagccaagtttagtagcagataaaaacatttgaaatgttacatatggattaacaatttgaattgaaaagatcagcaatcttggaaaagtatgattgtaaatctgtattttgtggttaattgaaaaatgaagactacaacaagagacagtgagggttgaacttgctcaatatcctttgcttaggaagtctggagtatacttagatggatgcatgagcttgaaggaagctcatttaatttt

SEQ ID NO: 42494 - DNA, 753 bp, Homo sapiens
atgtcagcagatgctcttgcctgagtgtaagggaaccaacaaatgaaaaagaataggctgaatatagaatgtaaatataaaaaatgtagcatacaaaactgaaactattggaattagtttcataacaaatgaagagtgwaaagaaaaagaataaatgtttcagggaaaaatatattagaaatgaatagaaaattaaagtccataaaaaaattacagagatcaacatgggaagtgggaagaaagatcatatggaaccacttactgtaaaatgggagaattttaatgaggtaaatgaataaatgctgcagaaatgtctaataagataatatccagaaataattttatgtagaagaatactattagttgtctgcctgacagcattttcccaatttgttctttgtagtaagaatctcattttgagaatataaataaaaataataatctgtgtagagggattagaaaagaaaaagaataccagaaaaaataaaaagtaaggatttatataagtcacaatgagccaagtttagtagcagataaaaacatttgaaatgttacatatggattaacaatttgaattgaaaagatcagcaatcttggaaaagtatgattgtaaatctgtattttgtggttaattgaaaaatgaagactacaacaagagacagtgagggttgaacttgctcaatatcctttgcttaggaagtctggagtatacttagatggatgcatgagcttgaaggaagctcatttaatttt

SEQ ID NO: 42495 - DNA, 753 bp, Homo sapiens
atgtcagcagatgctcttgcctgagtgtaagggaaccaacaaatgaaaaagaataggctgaatatagaatgtaaatataaaaaatgtagcatacaaaactgaaactattggaattagtttcataacaaatgaagagtgaaaagaaaaagaataaatgtttcagggaaaaatatattagaaatgaatagaaaattaaagtccataaaaaaattacagagatcaacatgggaagtgggaagaaagatcatatggaaccacttactgtaaaatgggagaattttaatgaggtaaatgwataaatgctgcagaaatgtctaataagataatatccagaaataattttatgtagaagaatactattagttgtctgcctgacagcattttcccaatttgttctttgtagtaagaatctcattttgagaatataaataaaaataataatctgtgtagagggattagaaaagaaaaagaataccagaaaaaataaaaagtaaggatttatataagtcacaatgagccaagtttagtagcagataaaaacatttgaaatgttacatatggattaacaatttgaattgaaaagatcagcaatcttggaaaagtatgattgtaaatctgtattttgtggttaattgaaaaatgaagactacaacaagagacagtgagggttgaacttgctcaatatcctttgcttaggaagtctggagtatacttagatggatgcatgagcttgaaggaagctcatttaatttt

SEQ ID NO: 42496 - DNA, 539 bp, Homo sapiens
gaagccattactgcatgacatcaagcatagtttgataggggttgtatattytatcaatatacattttatcccagtattacccacaagtattttgtcactttgtcattttatctaaggatcccttgttggacatatatgaagctgctgtctttccaaggagaaagcatgcataatgcccacaggtagagtaaggccctggctgaaactagtttggaagtaccgtgttataattttaacagttgatgaacagaattttgcaataaaaggaagaatatttcaaaaatcatcatgagtcctcagaactagacaaccagatgcccacttgataacaacacactaggtctccacagaagactagtcatttaactgcaagctccatagttccataccactattcacatcctattcatgaataacaaaggtttgtgcagatcagtcaagagacaggtgtttattgggccctggtgctggaagcatttctctttcttggtgtgtggtttctaatatttttttctgtttccttccagctgccccccagc

SEQ ID NO: 42497 - DNA, 539 bp, Homo sapiens
gaagccattactgcatgacatcaagcatagtttgataggggttgtatattttatcaatatacattttatcccagtattacccacaagtattttgtcactttgtcattttatctaaggatcccttgttggacatatatgaagctgctgtctttccaaggagaaagcatgcataatgcccacaggtagagtaaggccctggctgaaactagtttggaagtaccgtgttataattttaacagttgatgaacagaattttgcaataaaaggaagaatatttcaaaaatcatcatragtcctcagaactagacaaccagatgcccacttgataacaacacactaggtctccacagaagactagtcatttaactgcaagctccatagttccataccactattcacatcctattcatgaataacaaaggtttgtgcagatcagtcaagagacaggtgtttattgggccctggtgctggaagcatttctctttcttggtgtgtggtttctaatatttttttctgtttccttccagctgccccccagc

SEQ ID NO: 42498 - DNA, 539 bp, Homo sapiens
gaagccattactgcatgacatcaagcatagtttgataggggttgtatattttatcaatatacattttatcccagtattacccacaagtattttgtcactttgtcattttatctaaggatcccttgttggacatatatgaagctgctgtctttccaaggagaaagcatgcataatgcccacaggtagagtaaggccctggctgaaactagtttggaagtaccgtgttataattttaacagttgatgaacagaattttgcaataaaaggaagaatatttcaaaaatcatcatgagtcctcagaactagacaaccagatgcccacttgataacaacacactaggtctccacagaagactagtyatttaactgcaagctccatagttccataccactattcacatcctattcatgaataacaaaggtttgtgcagatcagtcaagagacaggtgtttattgggccctggtgctggaagcatttctctttcttggtgtgtggtttctaatatttttttctgtttccttccagctgccccccagc

SEQ ID NO: 42499 - DNA, 1243 bp, Homo sapiens
ataagagcctgtgggcacaccatgtaggggcggtgtctggttggcccatgggcctttgggtctggaatgggtggagcccagggtgcagccacagcccaaggaggggccagggctggaggagccagggctggaggagccagggctggaggagccggggccatcgatgagcgtcctggggagaagggcccatgattcctgatggaggaggcccagaacactgtaggcatcatgtactcagtgctgagtgaaaagcttcccgccactcagaatggtcacgctcgggatggctgagacatctgcaactcacaactctcacctcccagctgtggcactgaaagcctccctcagagccttggtttcctaacccaccgaacaggattaactgcacttgccagaaagggcttgtggtagcatttcataggacagtgcaggccaatgctctttggaagtcgcagatgcagggcacagatgggagatggcatggacaggtcctgctcgtcaaatagccggggagtctcccatgcttcttggtctccctaagctgggccacatggcagctctgatccatggcacgtgagcagaggggaccgtgtcactcccaggcagaggcaggtctgagctgtgagccctgtagcctggccagaaccggtgtcccagggcaaggaagaagcctttagtatgttcacgctgttgaggctcacccagcctgactggccagaaatcagttaggccacagacaaccctgtggcctcaggtagaaggccactgtctcattctgaatggtagttttcaaaaactcaaggaaccgcgtgaggaaggaagggggatttataaattcctgattccattagctttgctctgtaattttgggtgagtcacagcatgcacaaattagagggctgaaaacatctcccagacagtctggcagaagccccccctgagaacgaggaaaccgaggcccaggaaggagcagagtcgctcaggggctgctccagcggccacgggcctyggggacaacgcaggcccagcccggggagaagccccacgccagccttctctctctccctgcagggaagaggcagccacacaactgggcatgtccttctggcctgcacacctgggagtctccaacagacgctcactcgggtcctggggtaaggatacctcccaggtcgcttactggagaaggagccacacatgtgtccctgggtctgatggttgcaagaggaaacggaaagtgggg

SEQ ID NO: 42500 - DNA, 1243 bp, Homo sapiens
ataagagcctgtgggcacaccatgtaggggcggtgtctggttggcccatgggcctttgggtctggaatgggtggagcccagggtgcagccacagcccaaggaggggccagggctggaggagccagggctggaggagccagggctggaggagccggggccatcgatgagcgtcctggggagaagggcccatgattcctgatggaggaggcccagaacactgtaggcatcatgtactcagtgctgagtgaaaagcttcccgccactcagaatggtcacgctcgggatggctgagacatctgcaactcacaactctcacctcccagctgtggcactgaaagcctccctcagagccttggtttcctaacccaccgaacaggattaactgcacttgccagaaagggcttgtggtagcatttcataggacagtgcaggccaatgctctttggaagtcgcagatgcagggcacagatgggagatggcatggacaggtcctgctcgtcaaatagccggggagtctcccatgcttcttggtctccctaagctgggccacatggcagctctgatccatggcacgtgagcagaggggaccgtgtcactcccaggcagaggcaggtctgagctgtgagccctgtagcctggccagaaccggtgtcccagggcaaggaagaagcctttagtatgttcacgctgttgaggctcacccagcctgactggccagaaatcagttaggccacagacaaccctgtggcctcaggtagaaggccactgtctcattctgaatggtagttttcaaaaactcaaggaaccgcgtgaggaaggaagggggatttataaattcctgattccattagctttgctctgtaattttgggtgagtcacagcatgcacaaattagagggctgaaaacatctcccagacagtctggcagaagccccccctgagaacgaggaaaccgaggcccaggaaggagcagagtcgctcaggggctgctccagcggccacgggcctcggggacaacgcaggcccagcccggggagaagccccacgccagccttctctctctccctgcagggaagaggcagccacacaactgggcatgtccttctggcctgcacacctgggagtctccaacagacgctcactcgggtcctggggtaaggayacctcccaggtcgcttactggagaaggagccacacatgtgtccctgggtctgatggttgcaagaggaaacggaaagtgggg

SEQ ID NO: 42501 - DNA, 1243 bp, Homo sapiens
ataagagcctgtgggcacaccatgtaggggcggtgtctggttggcccatgggcctttgggtctggaatgggtggagcccagggtgcagccacagcccaaggaggggccagggctggaggagccagggctggaggagccagggctggaggagccggggccatcgatgagcgtcctggggagaagggcccatgattcctgatggaggaggcccagaacactgtaggcatcatgtactcagtgctgagtgaaaagcttcccgccactcagaatggtcacgctcgggatggctgagacatctgcaactcacaactctcacctcccagctgtggcactgaaagcctccctcagagccttggtttcctaacccaccgaacaggattaactgcacttgccagaaagggcttgtggtagcatttcataggacagtgcaggccaatgctctttggaagtcgcagatgcagggcacagatgggagatggcatggacaggtcctgctcgtcaaatagccggggagtctcccatgcttcttggtctccctaagctgggccacatggcagctctgatccatggcacgtgagcagaggggaccgtgtcactcccaggcagaggcaggtctgagctgtgagccctgtagcctggccagaaccggtgtcccagggcaaggaagaagcctttagtatgttcacgctgttgaggctcacccagcctgactggccagaaatcagttaggccacagacaaccctgtggcctcaggtagaaggccactgtctcattctgaatggtagttttcaaaaactcaaggaaccgcgtgaggaaggaagggggatttataaattcctgattccattagctttgctctgtaattttgggtgagtcacagcatgcacaaattagagggctgaaaacatctcccagacagtctggcagaagccccccctgagaacgaggaaaccgaggcccaggaaggagcagagtcgctcaggggctgctccagcggccacgggcctcggggacaacgcaggcccagcccggggagaagccccacgccagccttctctctctccctgcagggaagaggcagccacacaactgggcatgtccttctggcctgcacacctgggagtctccaacagacgctcactcgggtcctggggtaaggatacctcccaggtcgcttactggagaaggagccacacatgtgtccctgggtctgatggttgcargaggaaacggaaagtgggg

SEQ ID NO: 42502 - DNA, 1243 bp, Homo sapiens
ataagagcctgtgggcacaccatgtaggggcggtgtctggttggcccatgggcctttgggtctggaatgggtggagcccagggtgcagccacagcccaaggaggggccagggctggaggagccagggctggaggagccagggctggaggagccggggccatcgatgagcgtcctggggagaagggcccatgattcctgatggaggaggcccagaacactgtaggcatcatgtactcagtgctgagtgaaaagcttcccgccactcagaatggtcacgctcgggatggctgagacatctgcaactcacaactctcacctcccagctgtggcactgaaagcctccctcagagccttggtttcctaacccaccgaacaggattaactgcacttgccagaaagggcttgtggtagcatttcataggacagtgcaggccaatgctctttggaagtcgcagatgcagggcacagatgggagatggcatggacaggtcctgctcgtcaaatagccggggagtctcccatgcttcttggtctccctaagctgggccacatggcagctctgatccatggcacgtgagcagaggggaccgtgtcactcccaggcagaggcaggtctgagctgtgagccctgtagcctggccagaaccggtgtcccagggcaaggaagaagcctttagtatgttcacgctgttgaggctcacccagcctgactggccagaaatcagttaggccacagacaaccctgtggcctcaggtagaaggccactgtctcattctgaatggtagttttcaaaaactcaaggaaccgcgtgaggaaggaagggggatttataaattcctgattccattagctttgctctgtaattttgggtgagtcacagcatgcacaaattagagggctgaaaacatctcccagacagtctggcagaagccccccctgagaacgaggaaaccgaggcccaggaaggagcagagtcgctcaggggctgctccagcggccacgggcctcggggacaacgcaggcccagcccggggagaagccccacgccagccttctctctctccctgcagggaagaggcagccacacaactgggcatgtccttctggcctgcacacctgggagtctccaacagacgctcactcgggtcctggggtaaggatacctcccaggtcgcttactggagaaggagccacacatgtgtccctgggtctgatggttgcaagaggaaayggaaagtgggg

SEQ ID NO: 42503 - DNA, 1173 bp, Homo sapiens
tccttcatccttcaaagtgtctcctagggtgcgtttgtcttaaaactagcttcagaggtgagggaaagaaggtgagatgaggaatttgtccccaagtggtttcttggctgactctgctccctggtaaactggaacagtagtagctggttatgcttatgatctcatttctctgtggttcccaaggtgcctagagtgagccttaaataaagtagaatgctggccgggagcagtggctcactcctgtaatcccagcactttgggaggccgaggtggtsggatcacgaggtggggagattgagaccagcctggccaacgtggtgaaaccccgtctctactaaaagtacaaaaattagctgggcgtggtggtgcgtgcttgtaatctcagctactaaggaggctgaggcaggagaatcgcttgaaaccaggagggtggaggttgcagtgagccgaaatcacgccactgcactccagcctggagacagagcaagactccatctcaaaaaataaaaataaaataaataaagtagatgcccattaaaccttttgtggtcccccttgctgccagcaagacaaggcctttgcctctttgctcaggcagctccagaggattgctctggggccctcttatcctcccattcctgaattcattcatttagtcaacaaatacttcctgagcacctgttctgtgctaggctcagtgtaggtgctgggactacaggggtgataaataagatggacatgaccctttctttcttggaacttagatctttctgtccacttttcaccccttcccccaaatatatatcaaataaaaacacagaaacttaagagagaatttctcctgccacatgacagaataccaagcacatcgtttcagagagagagaaagagagaaaaggagaaactagaaagaaaactcccagctgtatgggagtctcccagaacaagggtcccatttttgttactccttgttcaaaaatctcatgtcccccactcagtacacacacacacatacgtataatacatatgttacttgcaccgtttacattcataacatgtacagctggagagcagcgaagtctgcctcccacattttacagaacggattggcagctgggactgaaggcgatagaaataagctattgatcaagggttaagaaagtactgccactg

SEQ ID NO: 42504 - DNA, 596 bp, Homo sapiens
aagacacatgccaatcaaagcaccgttatattaattgttttaacatcctgttagctgtctaaaatgctggctatgtctaaataatttaatatatttttataccattatgagtgttcttttggactttgctagtgaaattgttaagataataagtattgttagggccattttaaatggcttatatatgcaaataatgttttctatattactagataaattttgagaaatgtgacaagtttaaagcaaatgtctactttgcactttagactttattcttctgttgatataccttttgagcaatgtttcctaagcttggctcaagaatagaacttcttggggatcttttaacgatcctgatgatgaggcaacatcctaggccaattaagccagaagtagtgggtttgaggccttttattagtattttttaaagctatatgggaaattgctgtgtgcagccaatgtcagagaactgtactgtaaaggtatagaaatcttgcgataaatcgcaaatgccatactattacaacttyatgtgtactaataggacatttaaacagattggaatttgtaaatataatatttaactgtctctgatc

SEQ ID NO: 42505 - DNA, 764 bp, Homo sapiens
ctgaattgtacacttaaaaatgattaaaatgggtggctcatgcctgtaatcccagtactttgggaagccagtgtgagaggatcacttgaggccaggaatttgagaccactctgggcaacatagcaagacctcatctctagaaaaaataaaaaattagctggctgtggtggcgtgcctctgtggtcccagctagttgggaggctgaagcaggaagagcacttaagcccaggaggccaaggctgcaatgagctgtggttgtgccactgtactccagcctgggcaacagagtgagaccctgtctcaaaaaaaaaatggttaaagtggtaaaaattatgctatgtatattttaccacaataagacatatattataagtataacatggaaattgcagtttggtggtttttccactatttrtattcactttttggtcaagaatctgcattaaaaaaatcaaaagatgtgcaaaaattgttggaggagattgtctattaatatagttttcatttatgtgtcttcttcttttcaagtaatggtgagaaaatcttatttaaacagcactcaaggacacactcctactaagtaattttttcctgtgacttttgcacactaatatacaaaagaaaacatgcttaatgagtcaaatgagtatttgcaaaagttacccaataagcttgctgactgtggcaactccttgtagttgtgccaggtaaccgagattttgcaattcatccacacacattgaataacactttttgtcttggga

SEQ ID NO: 42506 - DNA, 764 bp, Homo sapiens
ctgaattgtacacttaaaaatgattaaaatgggtggctcatgcctgtaatcccagtactttgggaagccagtgtgagaggatcacttgaggccaggaatttgagaccactctgggcaacatagcaagacctcatctctagaaaaaataaaaaattagctggctgtggtggcgtgcctctgtggtcccagctagttgggaggctgaagcaggaagagcacttaagcccaggaggccaaggctgcaatgagctgtggttgtgccactgtactccagcctgggcaacagagtgagaccctgtctcaaaaaaaaaatggttaaagtggtaaaaattatgctatgtatattttaccacaataagacatatattataagtataacatggaaattgcagtttggtggtttttccactatttgtattcactttttggtcaagaatctgcattaaaaaaatcaaaagatgtgcaaaaattgttggaggagattgtctattaatatagttttcatttatgtgtcttcttctttycaagtaatggtgagaaaatcttatttaaacagcactcaaggacacactcctactaagtaattttttcctgtgacttttgcacactaatatacaaaagaaaacatgcttaatgagtcaaatgagtatttgcaaaagttacccaataagcttgctgactgtggcaactccttgtagttgtgccaggtaaccgagattttgcaattcatccacacacattgaataacactttttgtcttggga

SEQ ID NO: 42507 - DNA, 584 bp, Homo sapiens
tgctcttaaagcctttcaactgattagatcaggcccatccagatggtagaggataatctcttttacttaaaatcaactgattayagattgaaccatatctacaaaataacttcacagtgatatctagattagtgttcgattgaataagtggggactgaagcctagccaatttgacacataaaaccgaccatctcacctttcctctgaaatccagtttgttattagagaaatggcaaggtttggcaataaaggcaacatatactgaatgtgacagaaaaacaaatcacttttcctggattttctgagatatttctggggtcaaaaatattttattgaatctaagatgacatcgattgtaagatacaccattattttttgtgctactaataaagaaaaaaataccaccagtttaacagacatgctattgatcataagacatatacttatttctgttatattacaatgattatgtgtattggccaaggctctccagagaagcacaaccaatatgctgaacactggcatactggctcttcccacttcttcctattagatacatagggagagtttttttttttaaaaaa

SEQ ID NO: 42508 - DNA, 628 bp, Homo sapiens
ataaactcctctaaagatgggggcacaggttaggggagattggacactgacatggttaggctgtgtccccacccaaatctcatcttgaattggagttcccataatcctcaagtgtagtgggagggggccggtgggaggtaattgaatcatggggatgattacttccatgctgttctcagtgatagtgggtgagttctcacaagatttgatggttttataaagggcttgtcccttcgctcatcctctttattttctctcctgccactacgtgaagaaagatgtgttgcttccccttccatcatgattgtaaggttcctgaggcctcccaagctgtgcggaactgtgagtcaattaaacctcttttctttataaattacccagtcttggatatttcttcatagcagtgtgagaacagactgatacaggcaccctcaggaccttgctgacactgccttccttctaaggaagctacatctgactgaccacagggtgcgtgtgtgtgtgtgtgtgtgtgtgtgtgttttgytaacaggaaacttcaagtttcaggccaaaagcgactttctggtgattattatagaaaacctgagaactaccacaactggttctctttctttatccttctttc

SEQ ID NO: 42509 - DNA, 522 bp, Homo sapiens
tatatatatatatgtatatatraaactcagccattagaaggaatggaaacatgttttttttgcagcaacatagatggaagtggaggccattatcttaagtgaaataacagaaagacaaataccgcatgttctcacttataagtgggtgctaaataatgtgtacacaaggacacaccttgtggaataatagacaacagagaccccaaaaggggagagcataggaggagggtaagggaagagaaattacagactgggcacaatattcattatttgggtgatagttccactaaaagcccagacttcactactatgcaatatatctatgcaacagaactgcacttgtgccccttaaatttatacaaataaaaaaaagattaaggcaaatgtaagcatgctttcttaaaaaaaaggaggggatacatgccacacttttctagtgtccccatgacatttaaggtagcagggattcaccctgctcctcactcctaaggaagggagaggaacaacgccatgatagcctaa

SEQ ID NO: 42510 - DNA, 522 bp, Homo sapiens
tatatatatatatgtatatataaaactcagccattagaaggaatggaaayatgttttttttgcagcaacatagatggaagtggaggccattatcttaagtgaaataacagaaagacaaataccgcatgttctcacttataagtgggtgctaaataatgtgtacacaaggacacaccttgtggaataatagacaacagagaccccaaaaggggagagcataggaggagggtaagggaagagaaattacagactgggcacaatattcattatttgggtgatagttccactaaaagcccagacttcactactatgcaatatatctatgcaacagaactgcacttgtgccccttaaatttatacaaataaaaaaaagattaaggcaaatgtaagcatgctttcttaaaaaaaaggaggggatacatgccacacttttctagtgtccccatgacatttaaggtagcagggattcaccctgctcctcactcctaaggaagggagaggaacaacgccatgatagcctaa

SEQ ID NO: 42511 - DNA, 683 bp, Homo sapiens
agccacttcaggcctggagggaggaagaaagagcctgtgtttctgagctgctggcggcccctctgcctgccgccctgcctggcccccggcagagaaagactcctccagcagagcccgcctctgtttatttgtgcatcagggggaactgtgggcgggccaccctggctgctttcgtccaggaaaggagagaagcagcagccagaggggcctgtgcacatgcagctctctgcagagagctggcctcccttccaatccggcttctctccctcctctccagagaccacctcagaatggcatagaagctctggagacaggctgcatagtgtgaatcccagcggtgccccgactccgtgatatcgctggagccctaacctctcagagcctcagtttcctcatctatgaaatggggacagtagtagactgatcttcatgggctgtggtgaggaattactgggttaaagcacgtcaagtgcttagcacagtgctggcaactggcatttgcttattattatcacccgttaaactgagccctcactttctcagtgagactgtttgatgggacctgaaagcagaatttctttctctctctttttttttcawagatagggtctctttctgtcgcccaggctggagttcaatgacgctatcacagctcactgtaaccttgaactcctgggctcaag

SEQ ID NO: 42512 - DNA, 683 bp, Homo sapiens
agccacttcaggcctggagggaggaagaaagagcctgtgtttctgagctgctggcggcccctctgcctgccgccctgcctggcccccggcagagaaagactcctccagcagagcccgcctctgtttatttgtgcatcagggggaactgtgggcgggccaccctggctgctttcgtccaggaaaggagagaagcagcagccagaggggcctgtgcacatgcagctctctgcagagagctggcctcccttccaatccggcttctctccctcctctccagagaccacctcagaatggcatagaagctctggagacaggctgcatagtgtgaatcccagcggtgccccgactccgtgatatcgctggagccctaacctctcagagcctcagtttcctcatctatgaaatggggacagtagtagactgatcttcatgggctgtggtgaggaattactgggttaaagcacgtcaagtgcttagcacagtgctggcaactggcatttgcttattattatcacccgttaaactgagccctcactttctcagtgagactgtttgatgggacctgaaagcagaatttctttctctctctttttttttcaaagatagggtctctttctgtcgcccaggctggagttcaatgacgctatcayagctcactgtaaccttgaactcctgggctcaag

SEQ ID NO: 42513 - DNA, 520 bp, Homo sapiens
atcagtcagttggtaaatgattattgacaaacaatgtgctgggaaggtggagtgatttgagtagatttggcctctattctcatggagcttcctttctagaggggaaggcagatgatggatggataaatataaatgattctaataggttggtgcagcagtcattaaaagtratggcaaaaaaaaaaaaaaaagaaacggggaggagccgttgctgcagttcattaatagtaatggcaaaacccgcgatgacttgtgcgccaacctaacccagtaaccacgggtgtgcaaatgtggcgatgggcaagttccgagtgctaggagagcatctagcttcccggagtcaggagacgggggttggcaacctaaccaaggttaagtccaagtgaggggggtgggcagggagcgatatttcagtggagactccaaggatgaatggtatttagagagtaaaccccgatagagggtttgtgtctggcacagagaagagcctgtgcaaaagctggtggggcgagaggacacc

SEQ ID NO: 42514 - DNA, 520 bp, Homo sapiens
atcagtcagttggtaaatgattattgacaaacaatgtgctgggaaggtggagtgatttgagtagatttggcctctattctcatggagcttcctttctagaggggaaggcagatgatggatggataaatataaatgattctaataggttggtgcagcagtcattaaaagtgatggcaaaaaaaaaamaaaaagaaacggggaggagccgttgctgcagttcattaatagtaatggcaaaacccgcgatgacttgtgcgccaacctaacccagtaaccacgggtgtgcaaatgtggcgatgggcaagttccgagtgctaggagagcatctagcttcccggagtcaggagacgggggttggcaacctaaccaaggttaagtccaagtgaggggggtgggcagggagcgatatttcagtggagactccaaggatgaatggtatttagagagtaaaccccgatagagggtttgtgtctggcacagagaagagcctgtgcaaaagctggtggggcgagaggacacc

SEQ ID NO: 42515 - DNA, 541 bp, Homo sapiens
gatgttccagtttgaggtccgtgcagctggagatctggtggggagctgatgttccagtttgaggggccctgcagctggagacccatggggatctgatgttccagtttgagggtggtgctgctggcgacccaggcgggagctgatgttctagttttagggccctgcagctggagacccggggaggagctgacgttcccattcgagggctgtgcaggtggagacctggggaggagctgatgttgttctaatttgagtgtggtgcagctggagatccagggatgagatggccctgcagttcaaatatgagggtcccggagctggactctacgtgaggaaccaatgctgcctctgatgtcttaggttgtggagctggaaactcgyggaggagctggtattggtgtttctagttgagggttgtggtatttccagggtttcacaaaggccagattttatttcagttactgagaagagaaagaaaatgtcttctgaaagaggtgaactcagtcattaccaatagaaaaagtatccactgtatttatct

SEQ ID NO: 42516 - DNA, 541 bp, Homo sapiens
gatgttccagtttgaggtccgtgcagctggagatctggtggggagctgatgttccagtttgaggggccctgcagctggagacccatggggatctgatgttccagtttgagggtggtgctgctggcgacccaggcgggagctgatgttctagttttagggccctgcagctggagacccggggaggagctgacgttcccattcgagggctgtgcaggtggagacctggggaggagctgatgttgttctaatttgagtgtggtgcagctggagatccagggatgagatggccctgcagttcaaatatgagggtcccggagctggactctacgtgaggaaccaatgctgcctctgatgtcttaggttgtggagctggaaactcgtggaggagctggtattggtgtttctagttgagggtygtggtatttccagggtttcacaaaggccagattttatttcagttactgagaagagaaagaaaatgtcttctgaaagaggtgaactcagtcattaccaatagaaaaagtatccactgtatttatct

SEQ ID NO: 42517 - DNA, 732 bp, Homo sapiens
tagtcagtgtggcctgggtgacgaggatctgatgtaaaatgagactaggggagggattgaggcagagatggaagctgtgtctttttttttgtttttgagtcagagtttctctctgtcactggagtgcagtggtgccatcatggctcactgcagccttgaattcctgggctcaagcgatcttcccaccttggctgggattacaggcatgagccactgctcccagccaggaagctgcatctttgaatgcgatcagaaccaaaccccatagagggagtgatggcttacaggccatgaggattcccagactcatctcaggcttggtcaatacccacagcatcaaggctaggaagggaatgtattttggttaaaggcaggactgatacttatttatttattttgagacggagtctygctctgtcacccaggctggagtgcagtggcgggatctcggctcactgcaagctctgcctcccaggttcacaccattctcctgcctcagcctcctgaatagctgggactacaggcgcccgccaccacgcccggctaattttttgtatttttagtagagacggggtttcaccgtgttagccaggatggtcttgatctcctgacctcgtgatccgccagcctcggcctcccaaagtgctgggattacagacgtgagccaccgcacccggccaggcaggactgatatttaacctgcatgccctggcactactgtaccagtggtgg

SEQ ID NO: 42518 - DNA, 732 bp, Homo sapiens
tagtcagtgtggcctgggtgacgaggatctgatgtaaaatgagactaggggagggattgaggcagagatggaagctgtgtctttttttttgtttttgagtcagagtttctctctgtcactggagtgcagtggtgccatcatggctcactgcagccttgaattcctgggctcaagcgatcttcccaccttggctgggattacaggcatgagccactgctcccagccaggaagctgcatctttgaatgcgatcagaaccaaaccccatagagggagtgatggcttacaggccatgaggattcccagactcatctcaggcttggtcaatacccacagcatcaaggctaggaagggaatgtattttggttaaaggcaggactgatacttatttatttattttgagacggagtctcgctctgtcacccaggctggagtgcagtggcgggatctcggctcactgcaagctctgcctcccaggttcacaccattctcctgcctcagcctcctgaatagctgggactacaggcgcccgccaccacgcccggctaattttttgtatttttagtagagacggggtttcaccgtgttagccaggatggtcttgatytcctgacctcgtgatccgccagcctcggcctcccaaagtgctgggattacagacgtgagccaccgcacccggccaggcaggactgatatttaacctgcatgccctggcactactgtaccagtggtgg

SEQ ID NO: 42519 - DNA, 503 bp, Homo sapiens
caatttttgtatttttttactttatggttataatctgtcgtattcctagggtgtgcctagtttatttgccttttattatagttgcttggattatggttatctaattacaacctagtaatcggcatacaatgttttcattacacatgaaaargattcataccacatatattgtgaatgttttgatttgttgttgttgttgtttatttctgagttttcccatctgaataataatattctacatactggctcctgtttcctgttcttgtatataattttctttctcatcataattttccctttgtactattcctctctgttctaaaaatactattccaatctgcctttcatagcattcacttgatttttttccacaaaatcagttcttttcaatctaaagactagttttctcagttctgctgtttctaccagcttctgctgtgtctcagatcactcacaagctttcttcccttcagtcatctctctttctcaacatactgcatttt

SEQ ID NO: 42520 - DNA, 586 bp, Homo sapiens
tcagtcactgggtgtctattaccttcagtctcattgatgaaagcaaatacctttccattctgtctcaccccttaagtccttccgcagccctctaggaaactagtgataaccttcagcttctctctgttgagatctatgtgcacctccaaatagcaaagcccttctgggtgggattttttctttttttgtttttgtttgtttgtttttgagacagggtctcaytctgttgcccaggctggagtacaatggcgtgatcacagctcactgcagcctcgaccttccagattcaggtgatcctcctatctcagtcccccaggtagctgggactacaggcacacaccaccacattcagctaaaattttttttaagagatggggtggggggggtctcacttgttgcccaggctggtcttgaactcttggcctcaagtgatccacctgccttgatctcccaaagtgctgggattacaggcatgagccactgcacctggctaacccctccaatcttaaagcttaaaacttacatctgttttatctgaattccttcctcaataaaggacacccaagtctctcaaaaagtatcaaag

SEQ ID NO: 42521 - DNA, 586 bp, Homo sapiens
tcagtcactgggtgtctattaccttcagtctcattgatgaaagcaaatacctttccattctgtctcaccccttaagtccttccgcagccctctaggaaactagtgataaccttcagcttctctctgttgagatctatgtgcacctccaaatagcaaagcccttctgggtgggattttttctttttttgtttttgtttgtttgtttttgagacagggtctcactctgttgcccaggctggagtacaatggcgtgatcacagctcactgcagcctcgaccttccagattcaggtgatcctcctatctcagtcccccaggtagctgggactacaggcacacaccaccacattcagctaaaattttttttaagagatggggyggggggggtctcacttgttgcccaggctggtcttgaactcttggcctcaagtgatccacctgccttgatctcccaaagtgctgggattacaggcatgagccactgcacctggctaacccctccaatcttaaagcttaaaacttacatctgttttatctgaattccttcctcaataaaggacacccaagtctctcaaaaagtatcaaag

SEQ ID NO: 42522 - DNA, 360 bp, Homo sapiens
aggcaggagaatggcatgaacctgggaggcggagtttgcagtgagccgagatcactccactgcactccagcctgggcaacagagcgagactcctctaaaaaaaaaaaaggtagtaacagtggacatgagaaaatgaactggattaggaaaacatggtttattcatcttaatgacctactggataaagatataagaaaaataggaatgtagaatggtttcaacctttatattaaacaactgggtagaagagggtattttataacatgagaaacatgattggaagggagactggagacaatgataaattaaattttggacwtgctgcagatgaaatatatgacataattaagaaaagttgaa

SEQ ID NO: 42523 - DNA, 540 bp, Homo sapiens
tgcacgattgttaaataagttacaaaagacttcttgggatatttcatcactttaagatgttttcctcctctgcaattccttaatcataataataattatcattactaatgtcataatgataaaaacaaaagcagagctgctattatcaagttacaagaaytttgctaaaagctttgtatttattatcccaattaattttcacaacagccctgtgaaatatggactatcagtatttccattaagaggatgagagaactcaaactctattcatcatcaagttcttaactacttattttcttcttagtcctgaatctctccaactcctgatgtccagccaatcagtcctccactgtatttggtttggcaactctggtgctgattttaagcatgttctaggtcataattgctcaaaatctctgactcccctaacacgatccagcccaaagtctaggctggtcctctgggttggtattttgctaacctgccccatctccacacctgggaatgtctgaaagctcaagtcttattagggtcattttt

SEQ ID NO: 42524 - DNA, 540 bp, Homo sapiens
tgcacgattgttaaataagttacaaaagacttcttgggatatttcatcactttaagatgttttcctcctctgcaattccttaatcataataataattatcattactaatgtcataatgataaaaacaaaagcagagctgctattatcaagttacaagaactttgctaaaagctttgtatttattatcccaattaattttcacaacagccctgtgaaatatggactatcagtatttccattaagaggatgagagaactcaaactctattcatcatcaagttcttaactacttattttcttcttagtcctgaatctctccaactcctkatgtccagccaatcagtcctccactgtatttggtttggcaactctggtgctgattttaagcatgttctaggtcataattgctcaaaatctctgactcccctaacacgatccagcccaaagtctaggctggtcctctgggttggtattttgctaacctgccccatctccacacctgggaatgtctgaaagctcaagtcttattagggtcattttt

SEQ ID NO: 42525 - DNA, 544 bp, Homo sapiens
aattaagataaagtctgaggccacctttgtgacatggagttatgcagaggggcctatatgtcaactaaaaatccctacttcctttctcagtctaaaagaactagctaaaaactgtataagaattccatccatttactccattccagtcacagagcaaattccaaacctgggcaactttgtgcttgctaattgactttattcagtatcttgatctaaaggttgactgaaggtggagaagaaaaaaatacgaatttatacaaatgacttaactgcatgtaatacaacacgaggcacaagcaagctcagcatacaccaggtgcatcgcagatgggggagtattccttattgctaataaattcaagtgcatgtcttcagtggaaaaagtaaaaatgcaggccccattagtattaatgtagttacttacctcacatctatacagastttttttttgcattatcccaaagctggtagtcatagcatgcacattttgcatcattttcatagaccctcttgtcttcccacacacatctatgaaatgtccact

SEQ ID NO: 42526 - DNA, 576 bp, Homo sapiens
agcgacctgaagaaggagggagaacagggggatggggtacagaggtagtcagaggcaggaccaacaggtgcaaaggccctggggcaggactgtgcctggcagcagagtgcccggggggaggtcaggaaggccggagggaggcagggcgggggcttcgtgcttttgtccagggcccccccaccccacagcagggcttgtgcttgggttaatatttactgctgcattttgagattyctaatcatttttgaacaaggggcctttgagttttcttttgcactgggccctgctaactctgtagctggtgaagcaggccagtccagcaaggacttgtgggtcttggggaggacttgggattttgctctgagtgaggtaggagccctggaaggctgtgggaggaggagggacgggacctggtggttggttggtttgttttttgagatggagtttcgctcttgttgcccaggctggagtacaatggcacaatctcagctcaccgcatcctgggttcaagtgattcctgcctcagcctcccgagtagctggattacaggcacgtgccaccacgccccgctaattt

SEQ ID NO: 42527 - DNA, 541 bp, Homo sapiens
aggggtacaggccccttgccttcgtgcctgtccacacttcccatggttccgacccttgtgttgagttgctcagccaggcacttccctgcgttacctccatgacagctttccctccccattaattctatattttcaaattctagagtcataaccatgagactgacattttattacttgcagacaacagcagcaactacaaaaagagacaatatctattcagcacctactgtgttccaggcacactatatgaattactttgtttaatttgcaagcaattttgtgaggtaagtgccactagtatccccaatttrcagatgggaatgggactatagtatggtaaaacaactaattacattgacaaagtaatggactgcaagcttatccctcccagacacaaagtgtacattagaatagcatgtgcttggaaacaagatgtcttacctcaagactgggtggatgtaggtgagttctggggaggaatcagtgatggcagaggggagagggttagttacggtttctggataaagcggtcaagaggtca

SEQ ID NO: 42528 - DNA, 553 bp, Homo sapiens
tggttccaattctacgtctgactgtattactgattacctacatgtccttaaatgaaacactttgccaggatgactcttagacttctcatctatgaaattgagatgaaaattgttattcttcctaccatcctgcatttcctgtgtgaataaaatgaacactagctatgaacacaaaacactattaaatttctctttttttccctgattataattattgctaaaatmaccaaaaaagctataatttaaataacacttagtgtggacctggaagtatacgaatcattgtgcataaattaacttagctaaaattcataactaatgtatcaggtaaatatttttcctcccatcttacagaggaaaaatctacgaagtctaatggtgaagtgatatggccaagtctcactgtaactaaatgaattggagttgaaactctgaaatattagactccaaagttctttatcttaatcaaaatgaaacttaaactgaacgtaaaactttacatttttaattgactcttacaatattttaaagtttaaatttaaaaataattatg

SEQ ID NO: 42529 - DNA, 578 bp, Homo sapiens
ccgggttaggggctagtccaccattctcttggtgcttacgttaaaacctgcttgtgatattaaatcttaagatgttggtggagtccgtgatttttaattttgttttttgttatcactgattaggatataatgacacccagcataacctggaaaataagatacataggttctgggtcctgttctctgattaactgggtctgtgactttagttagtcactttaatctcccctggcctgttttctcaagcatgaaatgaggaaggtggaccagcaaatccccttccaaakctaactttaaaaaaaattatttaatagtatatatatatgtattatatatatatatatgtattttatatatatatatgtattttatatatatatatatgtattttatatatatatatatatatattttttttttttttttttgagacagggtctcaccatgctccccaggctggtcttgaacccctgggctcaagccatcctctcgcctcagcctcccaaagtgctgggattacaggcataagacaccacacctggccacagttttttttttggcgggggggagggggtggt

SEQ ID NO: 42530 - DNA, 578 bp, Homo sapiens
ccgggttaggggctagtccaccattctcttggtgcttacgttaaaacctgcttgtgatattaaatcttaagatgttggtggagtccgtgatttttaattttgttttttgttatcactgattaggatataatgacacccagcataacctggaaaataagatacataggttctgggtcctgttctctgattaactgggtctgtgactttagttagtcactttaatctcccctggcctgttttctcaagcatgaaatgaggaaggtggaccagcaaatccccttccaaagctaactttaaaaaaaattatttaatagtatatatatatgtattatatatatatatatgtattwtatatatatatatgtattttatatatatatatatgtattttatatatatatatatatatattttttttttttttttttgagacagggtctcaccatgctccccaggctggtcttgaacccctgggctcaagccatcctctcgcctcagcctcccaaagtgctgggattacaggcataagacaccacacctggccacagttttttttttggcgggggggagggggtggt

SEQ ID NO: 42531 - DNA, 578 bp, Homo sapiens
ccgggttaggggctagtccaccattctcttggtgcttacgttaaaacctgcttgtgatattaaatcttaagatgttggtggagtccgtgatttttaattttgttttttgttatcactgattaggatataatgacacccagcataacctggaaaataagatacataggttctgggtcctgttctctgattaactgggtctgtgactttagttagtcactttaatctcccctggcctgttttctcaagcatgaaatgaggaaggtggaccagcaaatccccttccaaagctaactttaaaaaaaattatttaatagtatatatatatgtattatatatatatatatgtattttatatatatatatgtattttatatatatatatatgtattttatatatatatatatatatattttttttttttttttttgagacagggtctcaccatgytccccaggctggtcttgaacccctgggctcaagccatcctctcgcctcagcctcccaaagtgctgggattacaggcataagacaccacacctggccacagttttttttttggcgggggggagggggtggt

SEQ ID NO: 42532 - DNA, 443 bp, Homo sapiens
aaacctctgggggcaggaaaatcaattcttttaaacatttctttcctccagatgatgaatttctaaagaaaaagcaaggggttaaaaagaaccaagtctttttgtgcaaatgagaatcaatccagcagagcaagataagatacataaaggtgaaatacagcaatccaacagaacagggtaaaatacatgaagatagttttgtgttaaaaccagaactatagakcctggaagaagatgaaaatagtatttcaggagaccacttatttataaaaatggaatttgctctccattttttaaacttcctaatacttattcctagcatttaaaaatgattaaccacttctcaagactgagtaggagagacagaaacattggcacaccattgagcttccaagtttggagcatgaaggttgactcatggacaaggagctgttgcaggaagt

SEQ ID NO: 42533 - DNA, 608 bp, Homo sapiens
tattgaagcatcgagtaataattttctcattaaagatatggcatatagtttctgaacatttgccaagcatatcttctgcatatattagtaatccaaaaccagggagatttttagaatagttattgctagctgttatgactttagccagtacagaaatgtattctcttctttatttctgtaagaagaataaatacctgttcactccctagttagaaatgtcttaaactatagtattagacagtatcacattctgatacatgacagatcatagggcaaaaccagtctccttctgttcctcaggggctttctggatttcaaaagtcattgctgtgatagaactcatcacagctcagttctcagaacttcataatatttgcttccattttcagataagttctaaaaagaaacaaagaaaaataagrgtgtttcataataaggatgctttttagaagccatctgaattctaagtggctaaaggtaatgcttcattgggatgggacacacctgtggaccatgagggttccatgtgtacaaaatcattatcttcacatttctttccttgctgtttcagcttcaaggtcagatatcactaagtattgtgatgaaat

SEQ ID NO: 42534 - DNA, 608 bp, Homo sapiens
tattgaagcatcgagtaataattttctcattaaagatatggcatatagtttctgaacatttgccaagcatatcttctgcatatattagtaatccaaaaccagggagatttttagaatagttattgctagctgttatgactttagccagtacagaaatgtattctcttctttatttctgtaagaagaataaatacctgttcactccctagttagaaatgtcttaaactatagtattagacagtatcacattctgatacatgacagatcatagggcaaaaccagtctccttctgttcctcaggggctttctggatttcaaaagtcattgctgtgatagaactcatcacagctcagttctcagaacttcataatatttgcttccattttcagataagttctaaaaagaaacaaagaaaaataagagtgtttcataataaggatgctttttagaagccatctgaattctaagtggctaaaggtaatgcttcattgggatgggacacacctgtggaccatgagggttccatgtgtacaaaatcattatcttcacatttctttccttgctrtttcagcttcaaggtcagatatcactaagtattgtgatgaaat

SEQ ID NO: 42535 - DNA, 441 bp, Homo sapiens
  misc_feature (1)...(441): n = A,T,C or G
acacatgatatgtaatacaccacagcaattaaaaagaccgaggcagatatatatgtgtgtgtgtgtgtgtgtngtgtgtgtataaaatgcatatatataatgcatatatatatgtattgacataaaagttttcacagataagtggaaaaaaggcaggtcatttaataggatatgatcacatttttggaaaaagcagcattttatatttgaactgtgtgtgtgtgtgtgtgtgtgtgtgtgtgtgctgatgtctargaaaatgtttggaaagcacaaacagtgctcacatatggtcagggaagtggaatcgaaagaagatatggaaggaaagaaagtgtaactgggtgctcaaggaggttattttaacttaaaaaaatctagacgttaaatatttgatataaatatatatattattctcccatagaatgtatttatatcaaa

SEQ ID NO: 42536 - DNA, 532 bp, Homo sapiens
tgtcgaaactcttatttactgaatattttactttcagtgactaacttctttaaattaaatgtctactttaacctcacacaaaattaatctctgcaaaagtattagttttttatgtattttctgcaataaatcgttatctaataaaaagctttcctggtgatcaccaaaattatcatgagaagatgctacttgactcagtccttgggaaatgcggagataaataatcacttgatgtttatcattccccttctttgcatgtctctaaattgyacctattagaattatttatctctgtgtttatcttcatcattaactgggatgtctaagggcaaggactgtgactgtaaattctactgccggtgattactaagatactttcccagaacagaggctcaataaatatttgctaaatgaattaaacagtttttgaatgcctacattgattaagaaatatgctagacatgttggcaggactcaaagaataatcagagattctcaatcaagaagttagcaagttataaaagaaatatgt

SEQ ID NO: 42537 - DNA, 809 bp, Homo sapiens
cattttgactttagtagggaaggagtgagacatagaacatcttgggctctggagtctttagtatctagtcatcccagccgcagattcctctaaaacaggggttctcccaaaccccaggccgtggactggtaccagtccgtggcctgttaggagctgggctacacagcaggaagtgagcagcggtgagcattactgcctgagttccacctcctatcacatcagtggtggcatcagattctcaggagcgcattgtgaagtatgcatgcaaggttgtgcactccttatgagaatctaatgcctgatgatctaaggtagaacagtttcaacccaaaaccgtcccctaatccccggtccatggaaaaattaccttccacgaaaccagtccttagtgccaaaaaggttggggactgttctagaactcccaccccaatcctaataaccatctggtggataaggccccacctaaaccccaattctagcacctgtctaccaaacacatctctaagtccacatgttgtttcctgcccctggggcctcccaccaggacctgaaatctaagccagaacccaagctcttccctgtgacctgttgccaatcctctctwacaggccttgtcaagtttctccagagccctgcgcatccagagccaaagtcctgctttatccaggcacattcatgatcaacaaaggcagttagaatagccaacatcatcttcacttcaccctggaggacctgggcggatgactcaggggtaagagaaggaaacatttcttactggagacgactgctccataattactcctaaatga

SEQ ID NO: 42538 - DNA, 1516 bp, Homo sapiens
tgtcctttgtcttatgctaccagcgtggataggaaaggaccatcaggtgcgggtgaggctaggcatgtctgagctcagactctccttgggcaagtcttgctgaggctgctggggggaaatgggagtgagattcccaggtcactggagttgtgcacctaggaggattatggctgtctccgctgagtcatgcaggttgtcaggcaagtaggggaaagccggcagtcacaagcctcacccagctcccccacaaaccgaagggcttgtctcactcccaccctgcccacctcaacagccctgagtctgtttccaggcagagggcaagatgggcttgaaaacttgcccaaggctatcctcctcccagctgggagagaaaagggctttagttcttcctctgcctgtgaagtctgtacgcccgatttgcaccctcccccgagttccggccaggaagcttcttgcccctttcaaattgttacaaagttcagctagagatttccttctccctgtggagttttaccccctgctcctctggccaccctccctatggatccctgtggtgccaggcaggaatgggctgcttggggactcagcgagctcccagggcctttctgctgcttcctccacccctgtttttgctcagctctctaacttgactcagcttgaggtaaagtcagaaacttctcccgcaagcaaaacttcagctgctccagtgggactgcgcattcggtagaggagggtctccctgtaccacttccgcatttggggcaactcacaatatttggggtgtctccccggtcctgcaggagaagtccacttccatcagagggtctgtgggtcctctcaggatctggagctaaaattcacaatgcaagctgctgcatgctgctctgtcctgagctgcaatctagtcttgcctctcatatgccatgatcttctgaatccctccttggaggtttaactccaaagaagtatgcttccagctgcaggctacttgaatttggataaggagttatattggaatagggtgctatattctgattattaacaacataatcaattttcattatccgtgagctcaaaataaggtgagttgtaccatttttttaaattcctaaagtcacttgcttcagtatgcttcagaacacaaaacccacattctctcacacttaccacattgtatttcttccaatcctattttgaagaccatgattcctgggcaatgtggagcagagactagaaaactgcatgtaatgtgcaaagccagtgattcacgtgcagatgctcaagaacttatgtatcaatcctatctgaagacttcagctcaacatcaatttatttctgcacaccctttggcctagcaatttcatttgtagaaatccattctacaaaacacatttttgtatgcaaatatgtatgttgcaaaaatgttcatgaaatcattttaatagcaaagaactggaaactrtaaatccattttacaagaccatgattgcataaattatggtacatttacataatg

SEQ ID NO: 42539 - DNA, 570 bp, Homo sapiens
cattgtgcttgcaatctcatgtcctattatttaaggtacttagtgmatcactgcatacatgaccttaggtcttgccattattttgtaatccctgtactggaagaagagagacattctgactggcattaactcaacattttgtgtgatgaactattacatgtggctcagaatgcatttttgtttgctatacagaaatgatctgttaattatatgtgataaacaatactgctaaaaatctcagaattaatcaaacttaccatcaattaatttcaaatgttcactaattattagcgagagaggagtgttgaattatctaatcataattgtacatttgttgatttcttcttttagttcaattaatgtttgccttttgccaaatttgggtaatttttcctgttaggttttcaaaattctttcagcactgcgctccttttcattttctccttctgagactcagatgacatgtatgttggaactttagttattgttcctcaagtctctaaggctctaatcgagactttttcatctttctttctctctattgttcagattagataattcctgttgatt

SEQ ID NO: 42540 - DNA, 570 bp, Homo sapiens
cattgtgcttgcaatctcatgtcctattatttaaggtacttagtgaatcactgcatacatgaccttaggtcttgccattattttgtaatccctgtactggaagaagagagacattctgactggcattaactcaacattttgtgtgatgaactattacatgtggctcagaatgcatttttgtytgctatacagaaatgatctgttaattatatgtgataaacaatactgctaaaaatctcagaattaatcaaacttaccatcaattaatttcaaatgttcactaattattagcgagagaggagtgttgaattatctaatcataattgtacatttgttgatttcttcttttagttcaattaatgtttgccttttgccaaatttgggtaatttttcctgttaggttttcaaaattctttcagcactgcgctccttttcattttctccttctgagactcagatgacatgtatgttggaactttagttattgttcctcaagtctctaaggctctaatcgagactttttcatctttctttctctctattgttcagattagataattcctgttgatt

SEQ ID NO: 42541 - DNA, 1164 bp, Homo sapiens
ttcatcaaaattaaacatttttgcacttcaaaggacaccatcaagaaagtgaaaagacaactcacaagatggaagaaaatacttgtaaatcatgtgtagcactttttgatgataaacttgaggaagacttttttattttttatttttattatactttaagttctagggtacatgtgcacaatgtgcaggtttgttacatatgtatacatgtgccatgttggtgtgccgcacccactatctcatcatttacattaggtatatctcctaatgctatccctcctccctccccccaccccacgacaggccccggtgtgtgatgttccctatcctgtgtccgagtgttctcattgttcaatttccacctatgagcgagaacatgtggtgtttggttttctgtccttgcgatattttgctcagaatgatggtttccatatatatatatgtcagttgccaggactgctgggcaagcctgggaaagagagtacctggggaaagcagcctcctgctcccccgtgccttctttgagcctgatgttcatttgatgtggtactatataatcacatccagtttaccctttgaaattccttgattgttcttttctatttccttgacactgtccttttacagaccacataatcttatctggaatactacaacagttttcttttctcagtgmttttagaataacctgtcaaaaactcatctgactatagtagtacctgcttacaaccttttaattactccccattccctaccaggctgtgtagctcacttgagctctgctaggtggtgagggaatctgggtcctttttctggtatttgaattcagtgctacataggttactggctgggttgacaatctgaaattgtaaatcatgagtattctatgtagatagactgtcacgatttacaataaaacattgacatgtcaaagatcatggtgatgtgaggttgggtactgtctgtgagaattaattgaggaaattaaaattatatggttttatttacatagagtgtataacaactagttaagggatagatgtcttcttatctgactttcaagtatctaagagtggattattgtgcttgttaaagttctgggaaccatggctattttctgaaaatacctcagtgatgacaaatgaatgactaccagcctcttgt

SEQ ID NO: 42542 - DNA, 1164 bp, Homo sapiens
ttcatcaaaattaaacatttttgcacttcaaaggacaccatcaagaaagtgaaaagacaactcacaagatggaagaaaatacttgtaaatcatgtgtagcactttttgatgataaacttgaggaagacttttttattttttatttttattatactttaagttctagggtacatgtgcacaatgtgcaggtttgttacatatgtatacatgtgccatgttggtgtgccgcacccactatctcatcatttacattaggtatatctcctaatgctatccctcctccctccccccaccccacgacaggccccggtgtgtgatgttccctatcctgtgtccgagtgttctcattgttcaatttccacctatgagcgagaacatgtggtgtttggttttctgtccttgcgatattttgctcagaatgatggtttccatatatatatatgtcagttgccaggactgctgggcaagcctgggaaagagagtacctggggaaagcagcctcctgctcccccgtgccttctttgagcctgatgttcatttgatgtggtactatataatcacatccagtttaccctttgaaattccttgattgttcttttctatttccttgacactgtccttttacagaccacataatcttatctggaatactacaacagttttcttttctcagtgattttagaataacctgtcaaaaactcatctgactatagtagtacctgcttacaaccttttaattactccccattccctaccaggctgtgtagctcacttgagctctgctaggtggtgagggaatctgggtcctttttctggtatttgaattcagtgctacataggttactggctgggttgacaatctgaaattgtaaatcatgagtattctatgtagatagwctgtcacgatttacaataaaacattgacatgtcaaagatcatggtgatgtgaggttgggtactgtctgtgagaattaattgaggaaattaaaattatatggttttatttacatagagtgtataacaactagttaagggatagatgtcttcttatctgactttcaagtatctaagagtggattattgtgcttgttaaagttctgggaaccatggctattttctgaaaatacctcagtgatgacaaatgaatgactaccagcctcttgt

SEQ ID NO: 42543 - DNA, 1164 bp, Homo sapiens
ttcatcaaaattaaacatttttgcacttcaaaggacaccatcaagaaagtgaaaagacaactcacaagatggaagaaaatacttgtaaatcatgtgtagcactttttgatgataaacttgaggaagacttttttattttttatttttattatactttaagttctagggtacatgtgcacaatgtgcaggtttgttacatatgtatacatgtgccatgttggtgtgccgcacccactatctcatcatttacattaggtatatctcctaatgctatccctcctccctccccccaccccacgacaggccccggtgtgtgatgttccctatcctgtgtccgagtgttctcattgttcaatttccacctatgagcgagaacatgtggtgtttggttttctgtccttgcgatattttgctcagaatgatggtttccatatatatatatgtcagttgccaggactgctgggcaagcctgggaaagagagtacctggggaaagcagcctcctgctcccccgtgccttctttgagcctgatgttcatttgatgtggtactatataatcacatccagtttaccctttgaaattccttgattgttcttttctatttccttgacactgtccttttacagaccacataatcttatctggaatactacaacagttttcttttctcagtgattttagaataacctgtcaaaaactcatctgactatagtagtacctgcttacaaccttttaattactccccattccctaccaggctgtgtagctcacttgagctctgctaggtggtgagggaatctgggtcctttttctggtatttgaattcagtgctacataggttactggctgggttgacaatctgaaattgtaaatcatgagtattctatgtagatagactgtcacgatttacaataaaacattgacatgtcaaagatcatggtgatgtgaggttgggtactgtctgtgagaattaattgaggaaattwaaattatatggttttatttacatagagtgtataacaactagttaagggatagatgtcttcttatctgactttcaagtatctaagagtggattattgtgcttgttaaagttctgggaaccatggctattttctgaaaatacctcagtgatgacaaatgaatgactaccagcctcttgt

SEQ ID NO: 42544 - DNA, 605 bp, Homo sapiens
aagtatctaagatagccaaattaattagaatcacagattagaatggtgatagccctttaagttgaaatcaattttgcattcctgggttttgtagttttgctatcaggattctgactcataaaacaagtttggaatttcccccttcttctgaaataatttaaaaattttatttttttaaaacgtttgaaagaattcaccagyaaaactctttggatgtggagtttgcttattttttaatttctttagttttatgtttttatgtgcaggtatttgacaatttaattactttaataaatgtcaattacttcatatattccatttaatcttgtgaatttttttataagtttcttttcaaggaattcaccctttcatccaagtaatgaaaattagtataaaatgtttcacaatattccattatcttgttaatgtctcttgtgtctacaactgtacaatcttattaatccctgatatttataatttgcgttttctttctttctcacagaactaacttttggccatgttaattttctcctgtgtctgttttctgtctcattgatttctaatttctgttttattttctttcttctacttgttttggacttaat

SEQ ID NO: 42545 - DNA, 605 bp, Homo sapiens
aagtatctaagatagccaaattaattagaatcacagattagaatggtgatagccctttaagttgaaatcaattttgcattcctgggttttgtagttttgctatcaggattctgactcataaaacaagtttggaatttcccccttcttctgaaataatttaaaaattttatttttttaaaacgtttgaaagaattcaccagtaaaactctttggatgtggagtttgcttattttttwatttctttagttttatgtttttatgtgcaggtatttgacaatttaattactttaataaatgtcaattacttcatatattccatttaatcttgtgaatttttttataagtttcttttcaaggaattcaccctttcatccaagtaatgaaaattagtataaaatgtttcacaatattccattatcttgttaatgtctcttgtgtctacaactgtacaatcttattaatccctgatatttataatttgcgttttctttctttctcacagaactaacttttggccatgttaattttctcctgtgtctgttttctgtctcattgatttctaatttctgttttattttctttcttctacttgttttggacttaat

SEQ ID NO: 42546 - DNA, 605 bp, Homo sapiens
aagtatctaagatagccaaattaattagaatcacagattagaatggtgatagccctttaagttgaaatcaattttgcattcctgggttttgtagttttgctatcaggattctgactcataaaacaagtttggaatttcccccttcttctgaaataatttaaaaattttatttttttaaaacgtttgaaagaattcaccagtaaaactctttggatgtggagtttgcttattttttaatttctttagttttatgtttttatgtgcaggtatttgacaatttaattactttaataaatgtcaattacttcatatattccatttaatcttgtgaatttttttataagtttcttttcaaggaattcaccctttcatccaagtaatgaaaattagtataaaatgtttcacaatattccattatcttgttaatgtctcttgtgtctacaactgtacaatctyattaatccctgatatttataatttgcgttttctttctttctcacagaactaacttttggccatgttaattttctcctgtgtctgttttctgtctcattgatttctaatttctgttttattttctttcttctacttgttttggacttaat

SEQ ID NO: 42547 - DNA, 877 bp, Homo sapiens
agaaatacaaccagcaaaaaacaaacatatctgtaggaaatcagcctcataatagagtttcatttgagttgtatgtagcaaagttgatttgacagttttgctggtgataacaccctgtaggtagagttcaaagagaaaattccacatagtaagcaaaagtattagatgttcccctatcccaattccgagctgcctctcacatacactaggaaaaaacaacaacaaacaaacaaacaaaacaaaacaaaacaaacaaagaagggcttagcaatggttctacaagtagttgagagggaktttttaaacaccctaactgctagtcaacagttagattaagtttcaaaataatagactcaatgacaatgccatcaccaagcaaatataaatatttgttgcatgaaattactgaattaaatgatagtgaacagtggacatttggaggggcatttcaacccgtgaacgaaatttctaatcgttttttcatttgctttgagaaaaatcagagccagagaagacaccgctaatgaactattcatgagttaaaaccgacttcacagcgggcgcgatggctcatgcctataatcccagcactttgggaggccgaggcgggtggatcacgagattaggagttcgagaccagcctggccaacatggtgaaaccctgtctctactaaaaatacaaaaattagctgggtgtggtcatgggcgcctgtaatcccagctactcaggaggctgaggcaggagaatcatttgaacccagaaggtggaggttgcagtgagccaagatcccgctattggaagaaaaaaaaaaaaaactgactcctaaggaatcccttggtatctctagcaaaagagtagtgagataacagttaagga

SEQ ID NO: 42548 - DNA, 1311 bp, Homo sapiens
gttaattataaggcaaaagatctgtaaaatactagataaaacagggaagtatgggtggctagcagtgtctctgatacacagtgagaacttaataagtattaaccaaagaatggcaagttgagcaaatgattaaataaaggtctatataccataccccacccagagcaactactcttgacattttagtgtgtacatttccagatgttttcctatatatatggttatacacttttttattcttttacaaaagcaaggtcatattgtacataattatttgtaaatcactttttattcccactcacctatttattgtggtcatcttttcatttattgcagtcatcttttcttggtagcaactatggtagaaagactatactgtgattttgaattctccagtgttgactatatcagagtagacccaaggaaaagagatgtttttaattcacagagttattaactgtctagytaaaaatgagactataaaatttaagttttaaaaacctcaaagaagcatatatcagtgattatttggtggtacttgaattaagatacagataacacacacacacacacacacacacacacacacacacacaatgggtattaacatctttgaatatctgcatgctgtttgaataaatggatgtgctgtattatactgaattcctgcttgatggatacttaggttatttcaaaagtgtgaccaatttgattgacaagcctcaagtcattgaggtaaaaccagaaaaatgtattcttttccaatagctgctgttaactctgccctttcaaatttttcctatcctgttacctagcaggcttcctcaaggaaatcactagtgtggttcagacagatacatcctagtattaaaagtctctgtttgagcttggttctgaagattcagtcttgatcattggacaatgtcaatttcacacgctatttagagtgccctttcccctcatccatcttccattccacttgcaaagctgggacttgaaagaaagtggtccttgtctcctatcagccttgtggtcagtctgcaccattattgtgtcccaatgccttcttaattagctcaggaagcactaaactggtcagcaagcagagagagagagtctggcagccccttcttataaatgcctcccaacttagtgagctatttgctttgtgcatccctcattttgcaacgaggagtagaacctctggggaagtaagcggaagtagggagaatctctctgcaccaacgctgcgcctctccaaaggataacttcactctccctccctgacttatatgtgctgtggagcatgca

SEQ ID NO: 42549 - DNA, 1311 bp, Homo sapiens
gttaattataaggcaaaagatctgtaaaatactagataaaacagggaagtatgggtggctagcagtgtctctgatacacagtgagaacttaataagtattaaccaaagaatggcaagttgagcaaatgattaaataaaggtctatataccataccccacccagagcaactactcttgacattttagtgtgtacatttccagatgttttcctatatatatggttatacacttttttattcttttacaaaagcaaggtcatattgtacataattatttgtaaatcactttttattcccactcacctatttattgtggtcatcttttcatttattgcagtcatcttttcttggtagcaactatggtagaaagactatactgtgattttgaattctccagtgttgactatatcagagtagacccaaggaaaagagatgtttttaattcacagagttattaactgtctagttaaaaatgagactataaaatttaagttttaaaaacctcaaagaagcatatatcagtgattatttggtggtacttgaattaagatacagataacacacacacacacacacacacacacacacacacacacaatgggtattaacayctttgaatatctgcatgctgtttgaataaatggatgtgctgtattatactgaattcctgcttgatggatacttaggttatttcaaaagtgtgaccaatttgattgacaagcctcaagtcattgaggtaaaaccagaaaaatgtattcttttccaatagctgctgttaactctgccctttcaaatttttcctatcctgttacctagcaggcttcctcaaggaaatcactagtgtggttcagacagatacatcctagtattaaaagtctctgtttgagcttggttctgaagattcagtcttgatcattggacaatgtcaatttcacacgctatttagagtgccctttcccctcatccatcttccattccacttgcaaagctgggacttgaaagaaagtggtccttgtctcctatcagccttgtggtcagtctgcaccattattgtgtcccaatgccttcttaattagctcaggaagcactaaactggtcagcaagcagagagagagagtctggcagccccttcttataaatgcctcccaacttagtgagctatttgctttgtgcatccctcattttgcaacgaggagtagaacctctggggaagtaagcggaagtagggagaatctctctgcaccaacgctgcgcctctccaaaggataacttcactctccctccctgacttatatgtgctgtggagcatgca

SEQ ID NO: 42550 - DNA, 507 bp, Homo sapiens
  misc_feature (1)...(507): n = A,T,C or G
tnnnnnnnnnnnnnnnnnnnnnnnnnnnnnnnnnnnnnnnnnnnnnnnnnnnnnnnnnnnnnnnnnnnnnnnnnnnnnnnnnnnnnnnnnnnnnnnnnnnnttgtgggtgactcagacggtcagagaaaaaggtaatgtaacgcagacaaatgtgagataataagtctgaagccaatgaaacaaaggagagggagagcacatactaaataaaaagtcatgagtccctgcagcctggaaagggatttagagtttactgttaaaaaaaaamaaaaaaaaacaaaaaaaacaaaaaaaaaacaacaacaacaaaaagaaaaccctcccttgaaattgtcagcactttgtactatcagagtacacttgggaatcgaggggctcctgtgtccatgcctgtggcatctttatccactgatggaggccaggaaggagggggtctggtcattccatcctgctggggtcaggctgggagcaggagagctgtttctgagcctcggtgtgtccacggt

SEQ ID NO: 42551 - DNA, 507 bp, Homo sapiens
  misc_feature (1)...(507): n = A,T,C or G
tnnnnnnnnnnnnnnnnnnnnnnnnnnnnnnnnnnnnnnnnnnnnnnnnnnnnnnnnnnnnnnnnnnnnnnnnnnnnnnnnnnnnnnnnnnnnnnnnnnnnttgtgggtgactcagacggtcagagaaaaaggtaatgtaacgcagacaaatgtgagataataagtctgaagccaatgaaacaaaggagagggagagcacatactaaataaaaagtcatgagtccctgcagcctggaaagggatttagagtttactgttaaaaaaaaacaaaaaaaaamaaaaaaaacaaaaaaaaaacaacaacaacaaaaagaaaaccctcccttgaaattgtcagcactttgtactatcagagtacacttgggaatcgaggggctcctgtgtccatgcctgtggcatctttatccactgatggaggccaggaaggagggggtctggtcattccatcctgctggggtcaggctgggagcaggagagctgtttctgagcctcggtgtgtccacggt

SEQ ID NO: 42552 - DNA, 2219 bp, Homo sapiens
ctacaaatgctaagtatctccatctgggaggcatttaacatttcaaacagctattgctgatctgtaggaggactcgccaagcatcaactgtctccccaaaataactccccttattgctgcatgagccgccaagatcaagcccaggcaggagaagaaaaatagtgtgtttgggaaagctcaaaaattagaggagagcaaggtcagccagctctcctgacctgtgtccaccaagtcttctctcttcagaagtatgctttgatgagacaaggtggagatgtcattgcatccccctcctggaagaatgtatttccaggaagaatttcattcatcaatttctaccctccccccccactcagatgatggtctcatgtttctcctgacactttaagttcattcggatacttatagtaaatcacacacatttcctggtaggccaagttaaaacacatcccataaaaaatggcaggaatggaaatatttgagttcctaataagatccaagagcttgtctttaccatatctccttctgttcaaatttgccaaatccagccatggaagaaatgaacaaagggctgacatctccaaggcactaatcctgcatgtgtccataataagtctattattaatttattgtctataatgtggtcactgggaggaggaccaggatagaggagacacatagtctctgacatcacagagtatatcaattaatggggaggggcatgtaaaaatatgtccatgaataacactaagtctgggtagaatgtgggaaattgataaagaactgtagtagttggaagagggggaagtcactgatggccgagaggccaggggagttttcctggagtagaaggcattcattctagaactttaaggatggaggttaggatttgaacatatggaaatgagttgagaaaagggcatctcagatgcatggaacagcttaagcaaaggcaaggaatgcaaggttgtaaaggtgtccagagatgaatttcatttattcattcttcattgattgaaagtgrtatatatttgccaagcacaaagtatgtctagaacacagagctaggaattggacctactgagatacataaaaaatgactacgaagagctttggtctggtcggtgaatcagagagggcaagaagaaagtagaatatagggtgtcaagaacagtaacaaaaggaccttaggagactgtgagaaaaaggaggatgggcatttgacccaggcttcctgtgggagaggagagagcagaatcagatgccccaaatggaagaagaccatttgaagaagttttggcaggtgcactgctctgtggttgcagactagaagacaacaccccagctaggggggtggcaaaagaacagaccccaataaaggtgtttgaatgtatttggttagcacggggagttcctcaagtcattcctctatttatactgctacgatggaaatagagttgattcacaccaccaccgggagttctgctggcagcccgtgatgggtgggaaggtgtaactctgaaaatgtgcaaaactactgtctaacacttgtttgtcagtgttcagattccattttgtgctgttggttttcttttctcaatgtgttggtctcggtggccaatgacctcatcaagggcagggactaagccctctgaacagctagctctgggctgagctacgtagtagatgctcagtgtgcatttggtgaccaattgctattgtcgtgtgtgtgtgtgtgtgtgtgtgtgtaagtgaaggggtgctagatgtttaattgtgtgggggctgagatatgggcttgttcttatattaatgagagtaaaatatttctccagattttaccatcattgctgattcttttttaatgtgctcaattctttgctctcttcggtaggaataacattttaccagtcagaaagataaatttttgaaagaagacaattctaggtaatatatatatatatatttatatgtggtcagcatcaatgaccagccacctaaacacctgtcacctgatgttaaaaaaaaattgaaaagtatctattttaagtgttttaaaaatttagatatttggcaaatccctatcatttaaagaagaaatactgtttgtttatgttaaatatttaaaagcattaatgaatatgagaaagaaaatttaaataataaaaatctagtattactgttaatatattgatgagtatctttttatcttttatgca

SEQ ID NO: 42553 - DNA, 2219 bp, Homo sapiens
ctacaaatgctaagtatctccatctgggaggcatttaacatttcaaacagctattgctgatctgtaggaggactcgccaagcatcaactgtctccccaaaataactccccttattgctgcatgagccgccaagatcaagcccaggcaggagaagaaaaatagtgtgtttgggaaagctcaaaaattagaggagagcaaggtcagccagctctcctgacctgtgtccaccaagtcttctctcttcagaagtatgctttgatgagacaaggtggagatgtcattgcatccccctcctggaagaatgtatttccaggaagaatttcattcatcaatttctaccctccccccccactcagatgatggtctcatgtttctcctgacactttaagttcattcggatacttatagtaaatcacacacatttcctggtaggccaagttaaaacacatcccataaaaaatggcaggaatggaaatatttgagttcctaataagatccaagagcttgtctttaccatatctccttctgttcaaatttgccaaatccagccatggaagaaatgaacaaagggctgacatctccaaggcactaatcctgcatgtgtccataataagtctattattaatttattgtctataatgtggtcactgggaggaggaccaggatagaggagacacatagtctctgacatcacagagtatatcaattaatggggaggggcatgtaaaaatatgtccatgaataacactaagtctgggtagaatgtgggaaattgataaagaactgtagtagttggaagagggggaagtcactgatggccgagaggccaggggagttttcctggagtagaaggcattcattctagaactttaaggatggaggttaggatttgaacatatggaaatgagttgagaaaagggcatctcagatgcatggaacagcttaagcaaaggcaaggaatgcaaggttgtaaaggtgtccagagatgaatttcatttattcattcttcattgattgaaagtggtatatatttgccaagcacaaagtatgtctagaacacagagctaggaattggacctactgagatacataaaaaatgactacgaagagctttggtctggtcggtgaatcagagagggcaagaagaaagtagaatatagggtgtcaagaacagtaacaaaaggaccttaggagactgtgagaaaaaggaggatgggcatttgacccaggcttcctgtgggagaggagagagcagaatcagatgccccaaatggaagaagaccatttgaagaagttttgscaggtgcactgctctgtggttgcagactagaagacaacaccccagctaggggggtggcaaaagaacagaccccaataaaggtgtttgaatgtatttggttagcacggggagttcctcaagtcattcctctatttatactgctacgatggaaatagagttgattcacaccaccaccgggagttctgctggcagcccgtgatgggtgggaaggtgtaactctgaaaatgtgcaaaactactgtctaacacttgtttgtcagtgttcagattccattttgtgctgttggttttcttttctcaatgtgttggtctcggtggccaatgacctcatcaagggcagggactaagccctctgaacagctagctctgggctgagctacgtagtagatgctcagtgtgcatttggtgaccaattgctattgtcgtgtgtgtgtgtgtgtgtgtgtgtgtaagtgaaggggtgctagatgtttaattgtgtgggggctgagatatgggcttgttcttatattaatgagagtaaaatatttctccagattttaccatcattgctgattcttttttaatgtgctcaattctttgctctcttcggtaggaataacattttaccagtcagaaagataaatttttgaaagaagacaattctaggtaatatatatatatatatttatatgtggtcagcatcaatgaccagccacctaaacacctgtcacctgatgttaaaaaaaaattgaaaagtatctattttaagtgttttaaaaatttagatatttggcaaatccctatcatttaaagaagaaatactgtttgtttatgttaaatatttaaaagcattaatgaatatgagaaagaaaatttaaataataaaaatctagtattactgttaatatattgatgagtatctttttatcttttatgca

SEQ ID NO: 42554 - DNA, 2219 bp, Homo sapiens
ctacaaatgctaagtatctccatctgggaggcatttaacatttcaaacagctattgctgatctgtaggaggactcgccaagcatcaactgtctccccaaaataactccccttattgctgcatgagccgccaagatcaagcccaggcaggagaagaaaaatagtgtgtttgggaaagctcaaaaattagaggagagcaaggtcagccagctctcctgacctgtgtccaccaagtcttctctcttcagaagtatgctttgatgagacaaggtggagatgtcattgcatccccctcctggaagaatgtatttccaggaagaatttcattcatcaatttctaccctccccccccactcagatgatggtctcatgtttctcctgacactttaagttcattcggatacttatagtaaatcacacacatttcctggtaggccaagttaaaacacatcccataaaaaatggcaggaatggaaatatttgagttcctaataagatccaagagcttgtctttaccatatctccttctgttcaaatttgccaaatccagccatggaagaaatgaacaaagggctgacatctccaaggcactaatcctgcatgtgtccataataagtctattattaatttattgtctataatgtggtcactgggaggaggaccaggatagaggagacacatagtctctgacatcacagagtatatcaattaatggggaggggcatgtaaaaatatgtccatgaataacactaagtctgggtagaatgtgggaaattgataaagaactgtagtagttggaagagggggaagtcactgatggccgagaggccaggggagttttcctggagtagaaggcattcattctagaactttaaggatggaggttaggatttgaacatatggaaatgagttgagaaaagggcatctcagatgcatggaacagcttaagcaaaggcaaggaatgcaaggttgtaaaggtgtccagagatgaatttcatttattcattcttcattgattgaaagtggtatatatttgccaagcacaaagtatgtctagaacacagagctaggaattggacctactgagatacataaaaaatgactacgaagagctttggtctggtcggtgaatcagagagggcaagaagaaagtagaatatagggtgtcaagaacagtaacaaaaggaccttaggagactgtgagaaaaaggaggatgggcatttgacccaggcttcctgtgggagaggagagagcagaatcagatgccccaaatggaagaagaccatttgaagaagttttggcaggtgcactgctctgtggttgcagactagaagacaacaycccagctaggggggtggcaaaagaacagaccccaataaaggtgtttgaatgtatttggttagcacggggagttcctcaagtcattcctctatttatactgctacgatggaaatagagttgattcacaccaccaccgggagttctgctggcagcccgtgatgggtgggaaggtgtaactctgaaaatgtgcaaaactactgtctaacacttgtttgtcagtgttcagattccattttgtgctgttggttttcttttctcaatgtgttggtctcggtggccaatgacctcatcaagggcagggactaagccctctgaacagctagctctgggctgagctacgtagtagatgctcagtgtgcatttggtgaccaattgctattgtcgtgtgtgtgtgtgtgtgtgtgtgtgtaagtgaaggggtgctagatgtttaattgtgtgggggctgagatatgggcttgttcttatattaatgagagtaaaatatttctccagattttaccatcattgctgattcttttttaatgtgctcaattctttgctctcttcggtaggaataacattttaccagtcagaaagataaatttttgaaagaagacaattctaggtaatatatatatatatatttatatgtggtcagcatcaatgaccagccacctaaacacctgtcacctgatgttaaaaaaaaattgaaaagtatctattttaagtgttttaaaaatttagatatttggcaaatccctatcatttaaagaagaaatactgtttgtttatgttaaatatttaaaagcattaatgaatatgagaaagaaaatttaaataataaaaatctagtattactgttaatatattgatgagtatctttttatcttttatgca

SEQ ID NO: 42555 - DNA, 2219 bp, Homo sapiens
ctacaaatgctaagtatctccatctgggaggcatttaacatttcaaacagctattgctgatctgtaggaggactcgccaagcatcaactgtctccccaaaataactccccttattgctgcatgagccgccaagatcaagcccaggcaggagaagaaaaatagtgtgtttgggaaagctcaaaaattagaggagagcaaggtcagccagctctcctgacctgtgtccaccaagtcttctctcttcagaagtatgctttgatgagacaaggtggagatgtcattgcatccccctcctggaagaatgtatttccaggaagaatttcattcatcaatttctaccctccccccccactcagatgatggtctcatgtttctcctgacactttaagttcattcggatacttatagtaaatcacacacatttcctggtaggccaagttaaaacacatcccataaaaaatggcaggaatggaaatatttgagttcctaataagatccaagagcttgtctttaccatatctccttctgttcaaatttgccaaatccagccatggaagaaatgaacaaagggctgacatctccaaggcactaatcctgcatgtgtccataataagtctattattaatttattgtctataatgtggtcactgggaggaggaccaggatagaggagacacatagtctctgacatcacagagtatatcaattaatggggaggggcatgtaaaaatatgtccatgaataacactaagtctgggtagaatgtgggaaattgataaagaactgtagtagttggaagagggggaagtcactgatggccgagaggccaggggagttttcctggagtagaaggcattcattctagaactttaaggatggaggttaggatttgaacatatggaaatgagttgagaaaagggcatctcagatgcatggaacagcttaagcaaaggcaaggaatgcaaggttgtaaaggtgtccagagatgaatttcatttattcattcttcattgattgaaagtggtatatatttgccaagcacaaagtatgtctagaacacagagctaggaattggacctactgagatacataaaaaatgactacgaagagctttggtctggtcggtgaatcagagagggcaagaagaaagtagaatatagggtgtcaagaacagtaacaaaaggaccttaggagactgtgagaaaaaggaggatgggcatttgacccaggcttcctgtgggagaggagagagcagaatcagatgccccaaatggaagaagaccatttgaagaagttttggcaggtgcactgctctgtggttgcagactagaagacaacaccccagctaggggggtggcaaaagaacagaccccaataaaggtgtttgaatgtatttggttagcacggggagttcctcaagtcattcctctatttatactgctacgatggaaatagagttgattcacaccaccaccgggagttctgctggcagcccgtgatgggtgggaaggtgtaactctgaaaatgtgcaaaactactgtctaacacttgtttgtcagtgttcagattccattttgtgctgttggttttcttttctcaatgtgttggtctcggtggccaatgacctcatcaagggcagggactaagccctctgaacagctagctctgggctgagctacgtagtagatgctcagtgtgcatttggtgaccaattgctattgtcgtgtgtgtgtgtgtgtgtgtgtgtgtaagtgaaggggtgctagatgtttaattgtgtgggggctgagatatgggcttgttcttatattaatgagagtaaaatatttctccagattttaccatcattgctgattcttttytaatgtgctcaattctttgctctcttcggtaggaataacattttaccagtcagaaagataaatttttgaaagaagacaattctaggtaatatatatatatatatttatatgtggtcagcatcaatgaccagccacctaaacacctgtcacctgatgttaaaaaaaaattgaaaagtatctattttaagtgttttaaaaatttagatatttggcaaatccctatcatttaaagaagaaatactgtttgtttatgttaaatatttaaaagcattaatgaatatgagaaagaaaatttaaataataaaaatctagtattactgttaatatattgatgagtatctttttatcttttatgca

SEQ ID NO: 42556 - DNA, 1314 bp, Homo sapiens
ggaaggcattattattctcattctactgatgcagaaactgaggcccagagaaattaaataaaatttacctgaagtctcatagctagtaagtagaggcagtatctcagcccaggcagactgatttctgagccaagttattaaggctgtgatatcccagaggcttgcctcaggggttctaccgtatgggaaggaagggagtttacagaaacagtttaggaatcagacgtaccaccttgccatttactagctgtgtgctcttaagcaggtgccttaagcccactccgtttctccaacgttcatatgggagtgatattttctatctcacacggataatatgtaggagtaacatggtgcccaagacaacacgaaataactgttagttcctctttctctatcactatgtaagtcaggagagaaatgaagaatggtcgttggaaatgacctaacctcccatctcctcgccatgagagaatgttcttggaataatgccaagctaaaagctgaaatgcaatgtaacatgactgtgtggaaagaaaatacccttccagtatgcttgtttttctttaatagatgagatcatattgggtataaagttttgcagtttgctcttctcactaaataatgtgacataagcatttccctgtgataatgacaatctctttgtaatcatcattaaatgctgggtaatgtttcattatatctatcatgatttacttacttccataatgtttctaaatttctcactattatagaaacactaaaatgaccatgattttagccataaaaactttattcgaatttcaagccatttccctaaggcatggacatttaaaaattcttctgataggcactgccaaattgctttcccaaaatgtttaaccgagttatacccccaccaagagaataggatttttcatcgcactcatgctaacartgagaattatgagatctagaatctttgttaatttgattattaatcaattttcatctcattatttaaatttacggttctttgatccaaaatattgttgattattgattcaaattacctcatggtttaaatttttctttatgtctgtattttttgtttttcagttttattttgacacatatcaaaataaatatgtgtacgtataatttaaataataattagtaaatattaatctatgtaccactcagctaaggaaatagagcacttctgtaccttagaaatctcctggatatctctcttaactattttcctcccgccttctggtgtagctacagttctgacatttgtggtcattgttttcttgattttttagttttaataca

SEQ ID NO: 42557 - DNA, 1314 bp, Homo sapiens
ggaaggcattattattctcattctactgatgcagaaactgaggcccagagaaattaaataaaatttacctgaagtctcatagctagtaagtagaggcagtatctcagcccaggcagactgatttctgagccaagttattaaggctgtgatatcccagaggcttgcctcaggggttctaccgtatgggaaggaagggagtttacagaaacagtttaggaatcagacgtaccaccttgccatttactagctgtgtgctcttaagcaggtgccttaagcccactccgtttctccaacgttcatatgggagtgatattttctatctcacacggataatatgtaggagtaacatggtgcccaagacaacacgaaataactgttagttcctctttctctatcactatgtaagtcaggagagaaatgaagaatggtcgttggaaatgacctaacctcccatctcctcgccatgagagaatgttcttggaataatgccaagctaaaagctgaaatgcaatgtaacatgactgtgtggaaagaaaatacccttccagtatgcttgtttttctttaatagatgagatcatattgggtataaagttttgcagtttgctcttctcactaaataatgtgacataagcatttccctgtgataatgacaatctctttgtaatcatcattaaatgctgggtaatgtttcattatatctatcatgatttacttacttccataatgtttctaaatttctcactattatagaaacactaaaatgaccatgattttagccataaaaactttattcgaatttcaagccatttccctaaggcatggacatttaaaaattcttctgataggcactgccaaattgctttcccaaaatgtttaaccgagttatacccccaccaagagaataggatttttcatcgcactcatgctaacaatgagaattatgagatctagaatctytgttaatttgattattaatcaattttcatctcattatttaaatttacggttctttgatccaaaatattgttgattattgattcaaattacctcatggtttaaatttttctttatgtctgtattttttgtttttcagttttattttgacacatatcaaaataaatatgtgtacgtataatttaaataataattagtaaatattaatctatgtaccactcagctaaggaaatagagcacttctgtaccttagaaatctcctggatatctctcttaactattttcctcccgccttctggtgtagctacagttctgacatttgtggtcattgttttcttgattttttagttttaataca

SEQ ID NO: 42558 - DNA, 1314 bp, Homo sapiens
ggaaggcattattattctcattctactgatgcagaaactgaggcccagagaaattaaataaaatttacctgaagtctcatagctagtaagtagaggcagtatctcagcccaggcagactgatttctgagccaagttattaaggctgtgatatcccagaggcttgcctcaggggttctaccgtatgggaaggaagggagtttacagaaacagtttaggaatcagacgtaccaccttgccatttactagctgtgtgctcttaagcaggtgccttaagcccactccgtttctccaacgttcatatgggagtgatattttctatctcacacggataatatgtaggagtaacatggtgcccaagacaacacgaaataactgttagttcctctttctctatcactatgtaagtcaggagagaaatgaagaatggtcgttggaaatgacctaacctcccatctcctcgccatgagagaatgttcttggaataatgccaagctaaaagctgaaatgcaatgtaacatgactgtgtggaaagaaaatacccttccagtatgcttgtttttctttaatagatgagatcatattgggtataaagttttgcagtttgctcttctcactaaataatgtgacataagcatttccctgtgataatgacaatctctttgtaatcatcattaaatgctgggtaatgtttcattatatctatcatgatttacttacttccataatgtttctaaatttctcactattatagaaacactaaaatgaccatgattttagccataaaaactttattcgaatttcaagccatttccctaaggcatggacatttaaaaattcttctgataggcactgccaaattgctttcccaaaatgtttaaccgagttatacccccaccaagagaataggatttttcatcgcactcatgctaacaatgagaattatgagatctagaatctttgttaatttgattattaatcaattttcatctcattatttaaatttacggttctttgatccaaaatattgttgattattgattcaaattacctcatggtttaaatttttctttatgtctgtattttttgtttttcagttttattttgacacatatcaaaataaatatgtgtacrtataatttaaataataattagtaaatattaatctatgtaccactcagctaaggaaatagagcacttctgtaccttagaaatctcctggatatctctcttaactattttcctcccgccttctggtgtagctacagttctgacatttgtggtcattgttttcttgattttttagttttaataca

SEQ ID NO: 42559 - DNA, 1314 bp, Homo sapiens
ggaaggcattattattctcattctactgatgcagaaactgaggcccagagaaattaaataaaatttacctgaagtctcatagctagtaagtagaggcagtatctcagcccaggcagactgatttctgagccaagttattaaggctgtgatatcccagaggcttgcctcaggggttctaccgtatgggaaggaagggagtttacagaaacagtttaggaatcagacgtaccaccttgccatttactagctgtgtgctcttaagcaggtgccttaagcccactccgtttctccaacgttcatatgggagtgatattttctatctcacacggataatatgtaggagtaacatggtgcccaagacaacacgaaataactgttagttcctctttctctatcactatgtaagtcaggagagaaatgaagaatggtcgttggaaatgacctaacctcccatctcctcgccatgagagaatgttcttggaataatgccaagctaaaagctgaaatgcaatgtaacatgactgtgtggaaagaaaatacccttccagtatgcttgtttttctttaatagatgagatcatattgggtataaagttttgcagtttgctcttctcactaaataatgtgacataagcatttccctgtgataatgacaatctctttgtaatcatcattaaatgctgggtaatgtttcattatatctatcatgatttacttacttccataatgtttctaaatttctcactattatagaaacactaaaatgaccatgattttagccataaaaactttattcgaatttcaagccatttccctaaggcatggacatttaaaaattcttctgataggcactgccaaattgctttcccaaaatgtttaaccgagttatacccccaccaagagaataggatttttcatcgcactcatgctaacaatgagaattatgagatctagaatctttgttaatttgattattaatcaattttcatctcattatttaaatttacggttctttgatccaaaatattgttgattattgattcaaattacctcatggtttaaatttttctttatgtctgtattttttgtttttcagttttattttgacacatatcaaaataaatatgtgtacgtataatttaaataataattagtaaatattaatctatgtaccactcagctaaggaaatagagcayttctgtaccttagaaatctcctggatatctctcttaactattttcctcccgccttctggtgtagctacagttctgacatttgtggtcattgttttcttgattttttagttttaataca

SEQ ID NO: 42560 - DNA, 1314 bp, Homo sapiens
ggaaggcattattattctcattctactgatgcagaaactgaggcccagagaaattaaataaaatttacctgaagtctcatagctagtaagtagaggcagtatctcagcccaggcagactgatttctgagccaagttattaaggctgtgatatcccagaggcttgcctcaggggttctaccgtatgggaaggaagggagtttacagaaacagtttaggaatcagacgtaccaccttgccatttactagctgtgtgctcttaagcaggtgccttaagcccactccgtttctccaacgttcatatgggagtgatattttctatctcacacggataatatgtaggagtaacatggtgcccaagacaacacgaaataactgttagttcctctttctctatcactatgtaagtcaggagagaaatgaagaatggtcgttggaaatgacctaacctcccatctcctcgccatgagagaatgttcttggaataatgccaagctaaaagctgaaatgcaatgtaacatgactgtgtggaaagaaaatacccttccagtatgcttgtttttctttaatagatgagatcatattgggtataaagttttgcagtttgctcttctcactaaataatgtgacataagcatttccctgtgataatgacaatctctttgtaatcatcattaaatgctgggtaatgtttcattatatctatcatgatttacttacttccataatgtttctaaatttctcactattatagaaacactaaaatgaccatgattttagccataaaaactttattcgaatttcaagccatttccctaaggcatggacatttaaaaattcttctgataggcactgccaaattgctttcccaaaatgtttaaccgagttatacccccaccaagagaataggatttttcatcgcactcatgctaacaatgagaattatgagatctagaatctttgttaatttgattattaatcaattttcatctcattatttaaatttacggttctttgatccaaaatattgttgattattgattcaaattacctcatggtttaaatttttctttatgtctgtattttttgtttttcagttttattttgacacatatcaaaataaatatgtgtacgtataatttaaataataattagtaaatattaatctatgtaccactcagctaaggaaatagagcacttctgtaccttagaaatctcctggatatctctcttaactattttcctcccgccttctggtrtagctacagttctgacatttgtggtcattgttttcttgattttttagttttaataca

SEQ ID NO: 42561 - DNA, 326 bp, Homo sapiens
ctcatgcttcactggacaaaacaagtcacatgctcatgtctaacatcaaaagagtgaagaagtacaattctgtatgtgcccttaggaggatccaacatcatttgatagagtactaccttactaacctgttatactgttgtaaacatgagactcagacctatttctcmttgtcatgactagatggtgtatagataaccaaccttatattaagtgtcctatgtataagtgcaggacacataacactgggaaaagagtgattaaaccataatgcccattcattgcattttctagggctgggggaatacgtaatagcattatagttatac

SEQ ID NO: 42562 - DNA, 777 bp, Homo sapiens
aggatatgttgacgtggacgcatcgactgtcacacgtgccacctggtgcagggcgttggtggtgggggaggctgggcgtaggtatatgtgtgtgtggcagggggcatatgggaactttctgtattttccactcaggaaaattttgctgtaaacccaaaactgctctaaaaagcaaattttattatttaaaagatgattttaaaattaatatatttaaatttttaaaagaattaagcacacatggcactaacggggcggctagggagccaaccatccatcagttgtgaggaagggggaggcctgcaggcatgaaggagctggtgagaccgccctcacctggctgccagaatcccaattccatgaggaccttgtcatgtgactcaaagtcagagacagcagaaggtccaaaagttacaacttacctgaaacccaccaggcactattggcaaaggattcacccccaccatggaaggcacgtgagcgctgtgggtgccctgtgtcatcaactgcggagaaaggaaaccagaaagagcaaaagcaaagcagcgagtggggagcagaaccgccccaaacccaaggtccctcctcccctgtccaccttcacacactaagcaatggagggagcgggaggacagagcctgtgtttgatggacagctcctcccgaggcagaggagaggcccaatacctgggagaaggctgggagcttgctacccctgaaggagacccgcagattggagggaagagaggagccagggaccstcgtgggagaggatgca

SEQ ID NO: 42563 - DNA, 1520 bp, Homo sapiens
tttgggaggccgaggtgggtggatcacctgaggtcaggagttcgagaccagactgaccaacctggtgaaaccccatctctactaaaaatacaaaaattagccaggcgtggtggcaggcgcctgtaatcccagctactcaggtggttgaggcaggagaactgcttgaatccaagaggcagaggttgtagtgagctgagatcgctgagatcgctgagatcgctgaggtcgcaccactgcactccagccggggcgacaagagcaaaactccatataaaaaaaaaaaaaaaaagatgttccagtgtagagcagactccaaatatggctggatcctaggataaaaataaaataacataaaattggtcttattgccagggtccatgcagcaagatgactgtaaacttaaagtaagtcagctttcctagtagctgtaatgaagtcatgtgcccattcttgaaacagctgttgttgtctagggaatgtgaagttctggttggctaggctaggtcacaagtcacccctagagttggtcacaagtcactgctagagctaagaatggagtcatacctgcagagccccatggactaagagtgagggagaatggattctcaaataaaaatgagtatatctctgaaagtagagtgaatggatgttaggtagtcaaggacaaatgtccatcacatacatattacttgtatttgggtatttcagtgaaactcttagtttagaacacattatcattatgatatctggtcacatagcttctttttagagttatcgtcacaaagaatgccwatagtccactactatgcattatctccttattctgaagtcagagaattagtatccaggaacatggctagtcagaataatccttatgtttcccacttcccctactgataggtgtggccatgtggcaaagttataaccaatgagacgtgagtagaagtgattcatgtaactttcagcttgtatccttaataggaaagtgggttgggccactccttcatatacagtagtgccccttatccaagagaaataggttccaagaccccagtggattcctggaaccacaggtagcactatatactatgtttttttcctatatgtacatatctatgataaagtttagtttataaattaggcatagtaagagatgaacaccactaacataataaaatagaataattatagataagtttctgagtaaatttaaatagagcaatttaaaacttacgtattatttctggaatttaatattttcatttagtattttcagactgtggttaacgatgggtaactgatatcactggaaacaaaactgtgaatgaagagagactgctttgattcctgagttttctctgtcttcatcttatcttcccttttctagggactttttttttttttaatcatcatcttcatgcttcaggtccttcactaacatctgcccttggaaaatgggctcataaactcagtaaagtttgtgattgacagatttaatgtgctgactcctaggagtgttc

SEQ ID NO: 42564 - DNA, 1520 bp, Homo sapiens
tttgggaggccgaggtgggtggatcacctgaggtcaggagttcgagaccagactgaccaacctggtgaaaccccatctctactaaaaatacaaaaattagccaggcgtggtggcaggcgcctgtaatcccagctactcaggtggttgaggcaggagaactgcttgaatccaagaggcagaggttgtagtgagctgagatcgctgagatcgctgagatcgctgaggtcgcaccactgcactccagccggggcgacaagagcaaaactccatataaaaaaaaaaaaaaaaagatgttccagtgtagagcagactccaaatatggctggatcctaggataaaaataaaataacataaaattggtcttattgccagggtccatgcagcaagatgactgtaaacttaaagtaagtcagctttcctagtagctgtaatgaagtcatgtgcccattcttgaaacagctgttgttgtctagggaatgtgaagttctggttggctaggctaggtcacaagtcacccctagagttggtcacaagtcactgctagagctaagaatggagtcatacctgcagagccccatggactaagagtgagggagaatggattctcaaataaaaatgagtatatctctgaaagtagagtgaatggatgttaggtagtcaaggacaaatgtccatcacatacatattacttgtatttgggtatttcagtgaaactcttagtttagaacacattatcattatgatatctggtcacatagcttctttttagagttatcgtcacaaagaatgccaatagtccactactatgcattatctccttattctgaagtcagagaattagtatccaggaacatggctagtcagaataatccttatgtttcccacttcccctactgataggtgtggccatgtggcaaagttataaccaatgagacgtgagtagaagtgattcatgtaactttcagcttgtatmcttaataggaaagtgggttgggccactccttcatatacagtagtgccccttatccaagagaaataggttccaagaccccagtggattcctggaaccacaggtagcactatatactatgtttttttcctatatgtacatatctatgataaagtttagtttataaattaggcatagtaagagatgaacaccactaacataataaaatagaataattatagataagtttctgagtaaatttaaatagagcaatttaaaacttacgtattatttctggaatttaatattttcatttagtattttcagactgtggttaacgatgggtaactgatatcactggaaacaaaactgtgaatgaagagagactgctttgattcctgagttttctctgtcttcatcttatcttcccttttctagggactttttttttttttaatcatcatcttcatgcttcaggtccttcactaacatctgcccttggaaaatgggctcataaactcagtaaagtttgtgattgacagatttaatgtgctgactcctaggagtgttc

SEQ ID NO: 42565 - DNA, 1520 bp, Homo sapiens
tttgggaggccgaggtgggtggatcacctgaggtcaggagttcgagaccagactgaccaacctggtgaaaccccatctctactaaaaatacaaaaattagccaggcgtggtggcaggcgcctgtaatcccagctactcaggtggttgaggcaggagaactgcttgaatccaagaggcagaggttgtagtgagctgagatcgctgagatcgctgagatcgctgaggtcgcaccactgcactccagccggggcgacaagagcaaaactccatataaaaaaaaaaaaaaaaagatgttccagtgtagagcagactccaaatatggctggatcctaggataaaaataaaataacataaaattggtcttattgccagggtccatgcagcaagatgactgtaaacttaaagtaagtcagctttcctagtagctgtaatgaagtcatgtgcccattcttgaaacagctgttgttgtctagggaatgtgaagttctggttggctaggctaggtcacaagtcacccctagagttggtcacaagtcactgctagagctaagaatggagtcatacctgcagagccccatggactaagagtgagggagaatggattctcaaataaaaatgagtatatctctgaaagtagagtgaatggatgttaggtagtcaaggacaaatgtccatcacatacatattacttgtatttgggtatttcagtgaaactcttagtttagaacacattatcattatgatatctggtcacatagcttctttttagagttatcgtcacaaagaatgccaatagtccactactatgcattatctccttattctgaagtcagagaattagtatccaggaacatggctagtcagaataatccttatgtttcccacttcccctactgataggtgtggccatgtggcaaagttataaccaatgagacgtgagtagaagtgattcatgtaactttcagcttgtatccttaataggaaagtgggttgggccactccttcatatacagtagtgccccttatccaagagaaataggttccaagaccccagtggattcctggaaccacaggtagcactatatactatgtttttttcctatatgtacatatctatgataaagtttagtttataaattaggcatagtaagagatgaacamcactaacataataaaatagaataattatagataagtttctgagtaaatttaaatagagcaatttaaaacttacgtattatttctggaatttaatattttcatttagtattttcagactgtggttaacgatgggtaactgatatcactggaaacaaaactgtgaatgaagagagactgctttgattcctgagttttctctgtcttcatcttatcttcccttttctagggactttttttttttttaatcatcatcttcatgcttcaggtccttcactaacatctgcccttggaaaatgggctcataaactcagtaaagtttgtgattgacagatttaatgtgctgactcctaggagtgttc

SEQ ID NO: 42566 - DNA, 1520 bp, Homo sapiens
tttgggaggccgaggtgggtggatcacctgaggtcaggagttcgagaccagactgaccaacctggtgaaaccccatctctactaaaaatacaaaaattagccaggcgtggtggcaggcgcctgtaatcccagctactcaggtggttgaggcaggagaactgcttgaatccaagaggcagaggttgtagtgagctgagatcgctgagatcgctgagatcgctgaggtcgcaccactgcactccagccggggcgacaagagcaaaactccatataaaaaaaaaaaaaaaaagatgttccagtgtagagcagactccaaatatggctggatcctaggataaaaataaaataacataaaattggtcttattgccagggtccatgcagcaagatgactgtaaacttaaagtaagtcagctttcctagtagctgtaatgaagtcatgtgcccattcttgaaacagctgttgttgtctagggaatgtgaagttctggttggctaggctaggtcacaagtcacccctagagttggtcacaagtcactgctagagctaagaatggagtcatacctgcagagccccatggactaagagtgagggagaatggattctcaaataaaaatgagtatatctctgaaagtagagtgaatggatgttaggtagtcaaggacaaatgtccatcacatacatattacttgtatttgggtatttcagtgaaactcttagtttagaacacattatcattatgatatctggtcacatagcttctttttagagttatcgtcacaaagaatgccaatagtccactactatgcattatctccttattctgaagtcagagaattagtatccaggaacatggctagtcagaataatccttatgtttcccacttcccctactgataggtgtggccatgtggcaaagttataaccaatgagacgtgagtagaagtgattcatgtaactttcagcttgtatccttaataggaaagtgggttgggccactccttcatatacagtagtgccccttatccaagagaaataggttccaagaccccagtggattcctggaaccacaggtagcactatatactatgtttttttcctatatgtacatatctatgataaagtttagtttataaattaggcatagtaagagatgaacaccamtaacataataaaatagaataattatagataagtttctgagtaaatttaaatagagcaatttaaaacttacgtattatttctggaatttaatattttcatttagtattttcagactgtggttaacgatgggtaactgatatcactggaaacaaaactgtgaatgaagagagactgctttgattcctgagttttctctgtcttcatcttatcttcccttttctagggactttttttttttttaatcatcatcttcatgcttcaggtccttcactaacatctgcccttggaaaatgggctcataaactcagtaaagtttgtgattgacagatttaatgtgctgactcctaggagtgttc

SEQ ID NO: 42567 - DNA, 704 bp, Homo sapiens
gaaaccaataaagaacagtgtaagattatttgtaatctgctatcttttcttagctattgaatttgcagacaaaatcaatttgtgagttgaatacagaaatccttctaccaattttcacataaaccttaaaaccactctgacrataaaggggaacagaaacagctttttaactgtattagtccattttcacactgctgataaagacgtacccaagactgggcaatttacaaaaggaagaggtttaattggatttacagttctatgtggcagggaaagcctcacaattgtggcagaaggcaaggaggagcaagtcacatcctacatggatggcaataggcaaagggagggctcatgcaggggaacacccctttttaaaaccatcagatctcatgagacttattcactatcacgagaacatgacaggaaagatttgcccccatgattcaattacctcccaccaggtccctctctcacgtgggaattcaagatgagatgtgggtgggcacacagccaaaccataccattctgcccccggcccctcccaaatctcatgtcctcacgtttcaaaaccaatcatgccttcccaacagtcccccaaagtgttaactcatttcagcattaactcaaaagtccacagtccaacatctcatctgagacaaaggcaagtcccttccaccaatgagcctgtaaaatcaaaagcaggt

SEQ ID NO: 42568 - DNA, 743 bp, Homo sapiens
ggtgtggtggctcacacctgtaatgccagcactttggtaggcygaagcaggtggatcacttgaggtcaggagttcgagaccagcctggccaaaatggtgaaaccccgtctctactaaaaatacaaaaaaaaaaaaaaaatagctgggcatggtggcgagcacctttaatcccagctaattgggaggctgaggcaggagaattgcttgaacccgggatgcagaggctgcagtgagctgagattgtgccattgcactccagcctgggcaacaagagtgaaatgctgtttcaaaaaaaaaaaaaaaaaaaaaaagcgatccaggaaaggaagcactcacctgaaaagttactgtgggatccagaagagctaggaatggtgcttgttaagtccctgggcaatgtggcacaaccatggggccaccccattgagccatgtgggtgcaagggccacctgccaacgagtttctggacagcccaaggaagtatggtatggcttgtgtgtgcagacaccaacttggtgctatctccaaaggtctgctgcattgcagagagataacactctctttataaaacaagctccaaagaataaaaagacaagggaaggtcacacactattgcttttagcaatgaacatgagttccatagtaatgggaattgacctttataacaagcagatgtagataataataacaaaaggcaacatggactgctcaccaggcactgtttacacacttttcatatattg

SEQ ID NO: 42569 - DNA, 743 bp, Homo sapiens
ggtgtggtggctcacacctgtaatgccagcactttggtaggccgaagcaggtggatcacttgaggtcaggagttcgagaccagcctggccaamatggtgaaaccccgtctctactaaaaatacaaaaaaaaaaaaaaaatagctgggcatggtggcgagcacctttaatcccagctaattgggaggctgaggcaggagaattgcttgaacccgggatgcagaggctgcagtgagctgagattgtgccattgcactccagcctgggcaacaagagtgaaatgctgtttcaaaaaaaaaaaaaaaaaaaaaaagcgatccaggaaaggaagcactcacctgaaaagttactgtgggatccagaagagctaggaatggtgcttgttaagtccctgggcaatgtggcacaaccatggggccaccccattgagccatgtgggtgcaagggccacctgccaacgagtttctggacagcccaaggaagtatggtatggcttgtgtgtgcagacaccaacttggtgctatctccaaaggtctgctgcattgcagagagataacactctctttataaaacaagctccaaagaataaaaagacaagggaaggtcacacactattgcttttagcaatgaacatgagttccatagtaatgggaattgacctttataacaagcagatgtagataataataacaaaaggcaacatggactgctcaccaggcactgtttacacacttttcatatattg

SEQ ID NO: 42570 - DNA, 743 bp, Homo sapiens
ggtgtggtggctcacacctgtaatgccagcactttggtaggccgaagcaggtggatcacttgaggtcaggagttcgagaccagcctggccaaaatggtgaaaccccgtctctactaaaaatacaaaaaaaaaaaaaaaatagctgggcatggtggcgagcacctttaatcccagctaattgggaggctgaggcaggagaattgcttgaacccgggatgcagaggctgcagtgagctgagattgtgccattgcactccagcctgggcaacaagagtgaaatgctgtttcaaaaaaaaaaaaaaaaaaaaaaagygatccaggaaaggaagcactcacctgaaaagttactgtgggatccagaagagctaggaatggtgcttgttaagtccctgggcaatgtggcacaaccatggggccaccccattgagccatgtgggtgcaagggccacctgccaacgagtttctggacagcccaaggaagtatggtatggcttgtgtgtgcagacaccaacttggtgctatctccaaaggtctgctgcattgcagagagataacactctctttataaaacaagctccaaagaataaaaagacaagggaaggtcacacactattgcttttagcaatgaacatgagttccatagtaatgggaattgacctttataacaagcagatgtagataataataacaaaaggcaacatggactgctcaccaggcactgtttacacacttttcatatattg

SEQ ID NO: 42571 - DNA, 743 bp, Homo sapiens
ggtgtggtggctcacacctgtaatgccagcactttggtaggccgaagcaggtggatcacttgaggtcaggagttcgagaccagcctggccaaaatggtgaaaccccgtctctactaaaaatacaaaaaaaaaaaaaaaatagctgggcatggtggcgagcacctttaatcccagctaattgggaggctgaggcaggagaattgcttgaacccgggatgcagaggctgcagtgagctgagattgtgccattgcactccagcctgggcaacaagagtgaaatgctgtttcaaaaaaaaaaaaaaaaaaaaaaagcgatccaggaaaggaagcactcacctgaaragttactgtgggatccagaagagctaggaatggtgcttgttaagtccctgggcaatgtggcacaaccatggggccaccccattgagccatgtgggtgcaagggccacctgccaacgagtttctggacagcccaaggaagtatggtatggcttgtgtgtgcagacaccaacttggtgctatctccaaaggtctgctgcattgcagagagataacactctctttataaaacaagctccaaagaataaaaagacaagggaaggtcacacactattgcttttagcaatgaacatgagttccatagtaatgggaattgacctttataacaagcagatgtagataataataacaaaaggcaacatggactgctcaccaggcactgtttacacacttttcatatattg

SEQ ID NO: 42572 - DNA, 743 bp, Homo sapiens
ggtgtggtggctcacacctgtaatgccagcactttggtaggccgaagcaggtggatcacttgaggtcaggagttcgagaccagcctggccaaaatggtgaaaccccgtctctactaaaaatacaaaaaaaaaaaaaaaatagctgggcatggtggcgagcacctttaatcccagctaattgggaggctgaggcaggagaattgcttgaacccgggatgcagaggctgcagtgagctgagattgtgccattgcactccagcctgggcaacaagagtgaaatgctgtttcaaaaaaaaaaaaaaaaaaaaaaagcgatccaggaaaggaagcactcacctgaaaagttactgtgggrtccagaagagctaggaatggtgcttgttaagtccctgggcaatgtggcacaaccatggggccaccccattgagccatgtgggtgcaagggccacctgccaacgagtttctggacagcccaaggaagtatggtatggcttgtgtgtgcagacaccaacttggtgctatctccaaaggtctgctgcattgcagagagataacactctctttataaaacaagctccaaagaataaaaagacaagggaaggtcacacactattgcttttagcaatgaacatgagttccatagtaatgggaattgacctttataacaagcagatgtagataataataacaaaaggcaacatggactgctcaccaggcactgtttacacacttttcatatattg

SEQ ID NO: 42573 - DNA, 575 bp, Homo sapiens
ggggtagcatgctccttgctgtccaggacagtcaccgtggctccacagcactcttcctgggaggccctggctgaaccrtcccgaataacccccaggcaggggccacctgccgatggggctgggctgccaggagcagtgagacaggtcagctgggcccctctgggtccttcaaacaagcctgccacatagctttggacacagacctactcccctgggggctgagggaggtcactgggaggtgatctttttccacctcggattgagcaagagaaggctgccagtggcccagactttgaaacaggccaggcagaggccaggctgagtcctccaccctcattgcaggagtccagcgtctggcctggggacttccctcaccagatctgttgaccaacttctagaaacccctgctttggggttgtgaattagaagggctgttttgaccctgaatatcaggcttcccttcctcccaggcatttctttcccgaggaggaaggtttccagtccctttcccaacccccaccctcagcaagccacaaagcctccaccgtcttcagctggttacaggtcaggatcca

SEQ ID NO: 42574 - DNA, 510 bp, Homo sapiens
cacacacacacacacacacccttgtgcgcccgcccgctctccctccccagcatctccagctcggtgctgccctttttatagatgctcttgacagtaagccataaataatccctcttggagcgctctcctactgactggagccaattaaacattaagcaagaacatacttgaaaacaaaacaaaaacaaagaatatatactatgctctggaggttatcccaggtcctactgtcaggctgggaagctaggggcaaagttcaggggtcagtggctcaccagattggggctggtgccctgcccacacaggtaccatttcccaggagaggcctgggggggtggaaactggggggtgctggaagaggcggtctttgttctctctttgtctgccagggcaggaggactgggcgggggcctctccacagggttctcastggacaggggaataaaaacctagtgtgcagaaaggagccagcacgggctggacttggattacttcagtggccccgtcagc

SEQ ID NO: 42575 - DNA, 1192 bp, Homo sapiens
gattatatattcatcagtctatttagaaaaacttactgagtagctactatgtgtcagacactgttctatgcactggtaatatccagaactctggatgcagatatgatatcaagaacattgggtacaggggtgatatccagattgctgggtgccggggtgatatccagaacactgggtgcaggggtgatatccagattgctgggtgcagaggtgatatccaaaacactgggtgcaggagtgttattgagatcactgggtacagggtgatagccaggatacttgacaaccagtgtccctagagcattagtcagaactgacagtggtggtgctcaaacagtatcctggaggtgctcttctctgccaggtatgagccttctgccaggtgatgcctctctgaagcttctagtaccaagaaggggctggagcagtaggagatcatttggaggagtcacaatagcagctatccatgaactagtcagaaataacttaatattttgaaacttttgctttaataagctgagcaaactctcgcttctggcwgtgaccaagatagataaggtcccttatcacagggcttccttttggaggtaaacttggtggcatcagagggtttctgtcctgggggagctttgagtttgttccagtctcagaagccaagttcctcagctccacagcctggtgctttgatagtgcccaaatcttcatgcctaaacccatactcggcaagcattttttatccttagcacctttcagacttttttgaatcttatatttacatacaatatataattttccataagtttcttctcaggaagaaaaccattataaatatgtgggtctttctaagttattccattcttaaggcctttttggttgtgagaacaccctgccactagtaccccccaaaaaagatagcagccaatttgtcgccacacattgaccctctgtgctgttcctttgagaactcttattatggaaaaaaaagatgatttaacttgcctttatagggaggtaagcaataagttctttgttcaatctgtatttagaaaaattgtaaatgcttccacgtcaaagactaaactgagtattatccttctttggtatccagagtgaaaattcagggaggtatatgggcaatcagaagtgcagatgttttaaccagaatataatcagggtaaatgtggcttgctga

SEQ ID NO: 42576 - DNA, 701 bp, Homo sapiens
cagctgggaaagtggaggagcccgaccccagcgaggccgccccaccccgcccttgtggttagagggcggagggaaagttgttccttccccgcctccgctgctgcctgtggcccagggcgcatttctcagatctcagcccaggcgcgccgcaaaggckcaaatccgagaaggtgctgctttcgagacagtggaagcgcgttccgccccaatccagagcgtccagtggttggttccagaggatttcaatctctagccaaaggcgttggggctgggccgctgctagggcagtgggaggggatcggggcacctttggtaggcggaaagctgagattctggggtccacaagtttccaagggcgggagggcaggctagtcgccaaaaagagaacgaagatgcaaataacgaggaagccttatgacgttgcctggaaatagtagtgtggtggttcactccggaatgaacgtggagttctggctttgagtaccgctccaagtttaaatcccaagtcccctttcttcattgtagaaaaagaggactcagacgacgcaacacagatacggctagagcacagttcctgcttccacgtcccagagaacaagtggcttaggatggtcccgagttcccctgtgggtgcgcttgttgggttgcaggcggccctgtttccctgcacaagtcagatgcttacacattgtgttcattct

SEQ ID NO: 42577 - DNA, 535 bp, Homo sapiens
tgaaatatgtcagttatctgaaggataacttagccaagagcctaaattttggtaaattttctatttcataaaaggcctttgcatctagtagagagtagagctgacaatcttttctatccaaaacataattttcatgagacccatgatcactgagccacaaaataagtgtcacaatgtaaattccttggagtatacgygctttacctgtatttttacttggcttttttttcatccaattatagttggtttacacatatgtttgaaagcttggaatacgactgaagttataatttaaaagtagatatgcctatagcaagaattgtaataataataatgagagctaccagaacctgatattagcaaattccagactaaaatgccccagccctcactcccttacaaattcaatgatttaacaactgccgatggaaacaaatagccctgaaagaactccagtatataatcaagaatatgtttcaactcagtggagcacaaaaaccatggatggtgacatagaaaagtataaaaaacattt

SEQ ID NO: 42578 - DNA, 535 bp, Homo sapiens
tgaaatatgtcagttatctgaaggataacttagccaagagcctaaattttggtaaattttctatttcataaaaggcctttgcatctagtagagagtagagctgacaatcttttctatccaaaacataattttcatgagacccatgatcactgagccacaaaataagtgtcacaatgtaaattccttggagtatacgtrctttacctgtatttttacttggcttttttttcatccaattatagttggtttacacatatgtttgaaagcttggaatacgactgaagttataatttaaaagtagatatgcctatagcaagaattgtaataataataatgagagctaccagaacctgatattagcaaattccagactaaaatgccccagccctcactcccttacaaattcaatgatttaacaactgccgatggaaacaaatagccctgaaagaactccagtatataatcaagaatatgtttcaactcagtggagcacaaaaaccatggatggtgacatagaaaagtataaaaaacattt

SEQ ID NO: 42579 - DNA, 529 bp, Homo sapiens
tgctgtgcatcctctggtacctgcagggacacttgcgcctggaactgacattcttatatgcccctgggaccagcatccctgtgcattcctggatctgactttggacctggcattaacactaacccaactcagctggtgaccttgtatccaccagtagatgaaggtatttttccactgaacccagtacgtaaacactgtaagaggtgatgactcctttaaaagtgcagacaccaacacagcacaacaacaaacacaaaattcaaggaaatatgacaccaccaaaggaatacaaatttccagaaactgactccaaagaaatgaagatctacaaattgcctaacaataatttyaaaacaattgtttcaaagaatctcagtgaagaatgagagaaaacatttgtaacactcaataagatgagaaaaaaaatccataaacaaaatgagaagttcaacaaaagggtagaaataattacaaaagaaccaaacaaattctggatatgaaaaatgtgataaatgaagtgaaaaatgca

SEQ ID NO: 42580 - DNA, 462 bp, Homo sapiens
  misc_feature (1)...(462): n = A,T,C or G
aagtatattaccaaaaataaagaaaaagacrtcatctcaacacatcctagcaatcttttaagtacagagattaagaaaaatgaattcactaaaaagatacagaataatatgataccatttatacaaagaaaacacataccccttcaaaataagtgttttgaaactatatataatatatataattatatatatattattatatagatatatatataggatttataaatatgtatgcaaaattataaagaaatggcctaaaaagttacattttaaattctaatagtggttgttcttgagtggtcgtagaggagactggtgagtggaataaaaagtgctggttaaaggttaaagggcactttannnnnnnnnnnnnnnnnnnnnnnnnnnnnnnnnnnnnnnnnnnnnnnnnnnnnnnnnnnnnnnnnnnnnnnnnnnnnnnnnnnnnnnnnnnnnnnnnnnngg

SEQ ID NO: 42581 - DNA, 462 bp, Homo sapiens
  misc_feature (1)...(462): n = A,T,C or G
aagtatattaccaaaaataaagaaaaagacgtcatctcaacacatcctagcaatcttttaagtacagagattaagaaaaatgaattcactaaaaagatacagaataatatgataccatttatacaaagaaaacacatacmccttcaaaataagtgttttgaaactatatataatatatataattatatatatattattatatagatatatatataggatttataaatatgtatgcaaaattataaagaaatggcctaaaaagttacattttaaattctaatagtggttgttcttgagtggtcgtagaggagactggtgagtggaataaaaagtgctggttaaaggttaaagggcactttannnnnnnnnnnnnnnnnnnnnnnnnnnnnnnnnnnnnnnnnnnnnnnnnnnnnnnnnnnnnnnnnnnnnnnnnnnnnnnnnnnnnnnnnnnnnnnnnnnngg

SEQ ID NO: 42582 - DNA, 862 bp, Homo sapiens
ctacaagagagcccacaacccccagagacatttgaattggcagaggagccgcctggagagtaggcaaaggcaggggctcaaacctgtgcagtgtccaggaggttttctctgtggcaggtgcggtaaaaagcaatcatggtgcccatcccccaaggctctctgtcttgctctgagtgactctatcccctgctgaaagctgggctgggagagagtagggctacctttcccctgggagaggtgagcatctgatctgtgtagccccttgtcccctggtcccttccaaggctcctgcctgactgctcctgcaagagtatgcacggagcacagcctccacttccctgcctaattgttttgccagcagcctgggagtagtttacatcccccaccccacccaaagcacaaagtacagagctcaacctcaaggaaccagaggacaaagctgccacagcctggtcccaaccttctagggttcaagcacactgcactcaggggtatccagcctgggtgtgggagaagtctccaatctcagaacaccgagaagagtgaggtgcaagtttaagtgctggcatgagagctgagtgtttctccctccacaagactggtccaagaagggtgtagcctactggccagctgcagcctctacccaagaatgccccatggccctgaacacctaatagcccagcgatctggacaaaactagcttgggaaaaaactagmaagttgggcctgctcctgggacagacaccagagggaggcctggttggggaagcatgagctgggcagtccccaaggagctgtctgctgggcaaaaatctccggcccatggctgcaaacctatagcaccaccaccctgcctgtggat

SEQ ID NO: 42583 - DNA, 862 bp, Homo sapiens
ctacaagagagcccacaacccccagagacatttgaattggcagaggagccgcctggagagtaggcaaaggcaggggctcaaacctgtgcagtgtccaggaggttttctctgtggcaggtgcggtaaaaagcaatcatggtgcccatcccccaaggctctctgtcttgctctgagtgactctatcccctgctgaaagctgggctgggagagagtagggctacctttcccctgggagaggtgagcatctgatctgtgtagccccttgtcccctggtcccttccaaggctcctgcctgactgctcctgcaagagtatgcacggagcacagcctccacttccctgcctaattgttttgccagcagcctgggagtagtttacatcccccaccccacccaaagcacaaagtacagagctcaacctcaaggaaccagaggacaaagctgccacagcctggtcccaaccttctagggttcaagcacactgcactcaggggtatccagcctgggtgtgggagaagtctccaatctcagaacaccgagaagagtgaggtgcaagtttaagtgctggcatgagagctgagtgtttctccctccacaagactggtccaagaagggtgtagcctactggccagctgcagcctctacccaagaatgccccatggccctgaacacctaatagcccagcgatctggacaaaactagcttgggaaaaaactagaaagttgggcctgctcctgggacagacaccagagggagrcctggttggggaagcatgagctgggcagtccccaaggagctgtctgctgggcaaaaatctccggcccatggctgcaaacctatagcaccaccaccctgcctgtggat

SEQ ID NO: 42584 - DNA, 456 bp, Homo sapiens
ttggaatatagagagggaagtcactatatttgagctgagacttgagtgatgagcagaaacagccttatttcaatctgaagaaagagagaaagtcttccaagtagaaggaacatcagtgacaatggcttgaaatctttgaggaaaataaaggctagcgtggctggggtatcgtgaacaagggggattcgacagctcaagtagacaatggctggaggtagtgtcttttgagctaagcctctatccaagttatgaactttcatctaaacccagaatcttttgacagtaaaagwttaacttttagttaaaaaactaaacttttagtaaaaaaacttttactaaaaaactaactaaactaacttttagttacttttttactaaactaacttttagtaaaaaaataacttcgttattgagtatgctgcgacagaaggtagaaacctggctagtctcaggcat

SEQ ID NO: 42585 - DNA, 259 bp, Homo sapiens
cctattttttttcttgtgtgtcagtatgaagttgcctaatattctttgtttgaaagtttgtccttcatttcaagattatattctactatcttttttwaaaaaaaaatgaaacggtgatggtagttgagttattttgtttctgatgtaaaatcaaaagcttttatagctcacccatcctgcccttatagctcacacatcctgatttggtgagcctgaatgttctgcaggcatccttgttcctcttctttgattgcaatta

SEQ ID NO: 42586 - DNA, 647 bp, Homo sapiens
tcagatcacacttcatatatacatatagattttttttgctgtcagctgtgaaaggtcctaccggtctgctaataattgagcaagcatgttttagtgctgcatgtatgcattgaaatgaaccaagtgtaattataggcctctccctttgaacatcaaagggcacagcgctgtcaatatgcccgcatcaagccagcagcctaatttactatttaataatacatttgtgtgtcagacctctctttgcccagggctgttacagttcaactagttcctctgctgttaaaaaattgatcatctttctttcctgatatttggaaaaggaacaataaaatttatctctgtcaattgaaaggtctgttcactttaaccttgacctstttatttcagaagtgtaagagggcttaaacacatgaagaagcagtaaagtaaaagaaaccttaaaattagtgatttaggaaatagctgaaagtagaagatggtttctatacaaaacatttgctctggagtgatatctatacaaactgggtcacaaaacctgacttttttaaagtgttgttgaaccaaatacgttagaatctcttgaaatgaatcagaatcctgggtaggaggaggctggagctggacaaagaggaaagacaactgggaat

SEQ ID NO: 42587 - DNA, 539 bp, Homo sapiens
tgcatggttgtggtaatggtttcatggtgttcacatatgccagcgtctcaaattatatgctttaaatacatgctttttattgtatgtaaattattcctcaatagagctgctaaaaatcaacaacaaaagtaagaaaaagcttcaccaataatctagagactttagatgtcaggaaggctgacatggtgaactggataagaaaaaaaattcaatattcaaagagcatgatattcccttaagtaagaacacaagggggttattagaaacaacaatrtttgatcaaactgaagtaatgaagtctgctgtgagactgctgaaagagaactgccaatgatgaagcccccttaacacctcttcaaggtttttcttgctcttattcttccctttctttttgttttatttatttatgagttttaccttgtattaatattaaagttaaggaggaaaaagtggaacactttgtgactaatggattacaagatgcaaactgtaggaggcttccccactgctgataaagtaaagatgcccctgtggagaaa

SEQ ID NO: 42588 - DNA, 550 bp, Homo sapiens
atccaagmaaggcttaaagtattactatttcaaacgttttagcttccattctacttgaaactccatgaaactccatttgtcctcattcaaatgcacattaaaagtccatctacttcactttataggtaattagactgaaagcaattaactggcatgcccagagtcccatggtggagacagaccttgaatctaattttcctgattcctgggttaatattcttcccctcacatgacactcatttttcaaaagagtgagccataaatcctaacattttcccattaattcactaacttccagccaatgaacacgaatgagtacaattcactaatctggaaatacttcgatgagtaaacattttatctttcaacagctttttggactagggaggcagagaggggaagacactttagagagatgctgctctaatacattcatcctgcattgtggaagacctcagagagtaaaaccccattcctggttcagatttacaacctgaaagtgtacaaacccttattgttttatttcttatttcctgccacctttattctt

SEQ ID NO: 42589 - DNA, 1242 bp, Homo sapiens
ctgcgagaggtttctggactagctagcatcagaggaccagctggggaaaatctctcttgggcagtaggtttatagtaggttcatagaactgtaaattcataatctttcaaggctaaagaaaatgctggcattgatagttcacctacctggcctcctccagaatggcctgtgtacctctcaggacaggaccctcaccacctgttcagaggtgtttactgggcascttccaagactgagctacagctactgtggctgcaaatcagttgaatgataaataacaattttgtgggtacttatttttggccccacgagaaggacagagggcaaatcagtgggaccctagcatatgctgggcccacaacgggtggatgcatggtcagcctaactggtcatccttgcctcccaagttccaggggtctttcatcctccttccacaccccaagggcacttggcttgggctgtgatagttccccataccacagctggaaaccaagatgtgtcagcaggtcagaggaagggggactagagatggcccataaaaatcttgggctccctgtaaacagagagggtctttgaaagcccaaagcacttttatgtgctagttaaagggccttcctgttgtgtcgccaggatttatagggacgtgggctggggaatgggggaaggtgagccacgtgcagcctctacctgcagatatagctcactccctgggctttttggagctgctactctctgggttccaggggagaagggaggaaggggatatcttagtaacttcttggccgtcacactccatttaccaaggagggactgtgaggctcctccttgatgctttaagatcctgaaccacccccctggggccacgttcatgaccaaggcagcaagcacatattccaggccagcagtgtctacagctagggggaaagaggtgtcaagacagaagcagaactctcgaggcggaggccaggctaccgtatgcattgtaagcgtgcaggactaggagaatccaactgttccatggcaagtctttcccgtgccctgtgcctgatgctagcaccaagggatcacagggagtgaccaggtgtcagtcccatctcgattctgtgagttagggatgcccatccatcgacctgcctcatcgtgacaccctgtaagaatgtgatatccattaatttaaacttacaaaagctgggcacagtggctcagacttgtaatcccagcactttgggaggctgaggctgg

SEQ ID NO: 42590 - DNA, 907 bp, Homo sapiens
aattgtttgttatgtgaccttcagaagatcagttagccttttaaagcctattttcccctctataaaattgaatatgatcacctctatttgcagattgtattgaagaatgtgaaacacttggcacagggaaggggcatcaccaattcatgaaagtatgtygtagtcatttgggtgtcagtatttggtagagttttaagcatacatttttaaaatgtgttatgtttccagacaagtagaggaaggatgaaacattcctacattccttgtttattttcaaatagccagattttagataaaccatttggattatggggcagattgataatttgatgatctggcattctgtggcatacagctttgaaacataatgttaaataaaaggtagttcacatcaaaagtccagtatgatccctttagttaccatgtaagtctgcttttatttggttttatataccagtgaaaactgaacctgatcttaatagcctttcaggttttttgtttttttgagacagggtctcactctgccacacaggctggggtgcagtggttgcaaccaaagcccactgtaacctggaactgctgggctcaagtgaccctcctgcctcagcctactgagtagctagaagcacaggcatgtggcaccatgcctggctaagttttttagaaaagggttttgtagaggcagggtctcactatgttgcctagactggtctcaaactcctgggcttaagtcatcctcctactttggccttgcaaagtgctgggattataagtgtgagccaccatgcccagctgtctttccgttttaaaataagttgttcaccttctaggaaggtgggtgaatggacacttttgttacatttgttacaatgactgtttcctttttatttagactaagcaacctggg

SEQ ID NO: 42591 - DNA, 907 bp, Homo sapiens
aattgtttgttatgtgaccttcagaagatcagttagccttttaaagcctattttcccctctataaaattgaatatgatcacctctatttgcagattgtattgaagaatgtgaaacacttggcacagggaaggggcatcaccaattcatgaaagtatgtcgtagtcatttgggtgtcagtatttggtagagttttaagcatacatttttaaaatgtgttatgtttccagacaagtagaggaaggatgaaacattcctacattccttgtttattttcaaatagccagattttagataaaccatttggattatggrgcagattgataatttgatgatctggcattctgtggcatacagctttgaaacataatgttaaataaaaggtagttcacatcaaaagtccagtatgatccctttagttaccatgtaagtctgcttttatttggttttatataccagtgaaaactgaacctgatcttaatagcctttcaggttttttgtttttttgagacagggtctcactctgccacacaggctggggtgcagtggttgcaaccaaagcccactgtaacctggaactgctgggctcaagtgaccctcctgcctcagcctactgagtagctagaagcacaggcatgtggcaccatgcctggctaagttttttagaaaagggttttgtagaggcagggtctcactatgttgcctagactggtctcaaactcctgggcttaagtcatcctcctactttggccttgcaaagtgctgggattataagtgtgagccaccatgcccagctgtctttccgttttaaaataagttgttcaccttctaggaaggtgggtgaatggacacttttgttacatttgttacaatgactgtttcctttttatttagactaagcaacctggg

SEQ ID NO: 42592 - DNA, 907 bp, Homo sapiens
aattgtttgttatgtgaccttcagaagatcagttagccttttaaagcctattttcccctctataaaattgaatatgatcacctctatttgcagattgtattgaagaatgtgaaacacttggcacagggaaggggcatcaccaattcatgaaagtatgtcgtagtcatttgggtgtcagtatttggtagagttttaagcatacatttttaaaatgtgttatgtttccagacaagtagaggaaggatgaaacattcctacattccttgtttattttcaaatagccagattttagataaaccatttggattatggggcagattgataatttgatgatctggcattctgtggcatacagctttgaaacataatgttaaataaaaggtagttcacatcaaaagtccagtatgatccctttagttaccatgtaagtctgcttttatttggttttatataccagtgaaaactgaacctgatcttaatagcctttcaggttttytgtttttttgagacagggtctcactctgccacacaggctggggtgcagtggttgcaaccaaagcccactgtaacctggaactgctgggctcaagtgaccctcctgcctcagcctactgagtagctagaagcacaggcatgtggcaccatgcctggctaagttttttagaaaagggttttgtagaggcagggtctcactatgttgcctagactggtctcaaactcctgggcttaagtcatcctcctactttggccttgcaaagtgctgggattataagtgtgagccaccatgcccagctgtctttccgttttaaaataagttgttcaccttctaggaaggtgggtgaatggacacttttgttacatttgttacaatgactgtttcctttttatttagactaagcaacctggg

SEQ ID NO: 42593 - DNA, 594 bp, Homo sapiens
cagattttcattwctatcgaatatattatatgtagaaactagggccttaaataattaagctgacttttcctattagttattccttaagataaaattatgctggtgaaaatgactgttgaatttctcaagaaattaagctctatagaggcataagtaatcgaaagactttttcccctgaataagtacaaataccaagaagccaaaactcatataaagattttcgtattataattccatactgtaagacataaaattatgaaaaagccaaaacattttccttaaaatgctccctagaaattgtaattccatcttaattgctccaaagatctagatttacatggaaatataaagagtccttctgagaaaaggaaatgctgtgaatagtggaaatcgtctgggccttctaatgatgcctcagtcaccaccaaagagtgttttattcattcatccgtgttttcatgtgaccacatactcaattcatgttttggcccatgtaaaaactgtgatatgttttagcttattccatagtgttactaagctaattgtacaatgctgtagtttaataaatactctgctgtttttttcacccctaaa

SEQ ID NO: 42594 - DNA, 594 bp, Homo sapiens
cagattttcatttctatcgaatatattatatgtagaaactagggccttaaataattaagctgacttttcctattagttattccttaagataaaattatgctggtgaaaatgactgttgaatttctcaagaaattaagctctatagaggcataagtaatcgaaagactttttcccctgaataagtacaaataccaagaagccaaaactcatataaagattttcgtattataattccatactgtaagacataaaattatgaaaaagccaaaacattttccttaaaatgctccctagaaattgtaattccatcttaattgctccaaagatctagatttacatggaaatataaagagtccttctgagaaaaggaaatgctgtgaatagtggaaatcgtctgggccttctaatgatgcctcagtcaccaccaaagagtgttttattcattcatscgtgttttcatgtgaccacatactcaattcatgttttggcccatgtaaaaactgtgatatgttttagcttattccatagtgttactaagctaattgtacaatgctgtagtttaataaatactctgctgtttttttcacccctaaa

SEQ ID NO: 42595 - DNA, 964 bp, Homo sapiens
tcacctttcctgccatggtctgactcctgaagacacccccaggctcaccccctctcccttctccctttcagtggtactgctggactttgctgcagctggaggggagctcggctggctcacacacccgtatggcaaaggggtatgtaagccttcggggtggggagaggtgtgagaatggggctgctggtcccctgtagagatggagaaactgaggcccagggagcgtggggcctggcttcaattcagcagctcagccaggtctcaggctcagggtccagcttctcacaccaggctcagagtcagccggcccaggccagggctggatgggcgtgggaaggtacgagggtgtgggtgtaagcctgagaggtggggggaactggggagacagagaaggccctagcggagctgggccttccatgttccagaagggctgacagtcagagggatctctggcaccacccatccacctcttgggagggaaggggttaaagatgccccctgtcttgaggtctcagcccaggaggtgaggggtgaagaagagacagggaacaggaaaacctgatcaagttccttcctgcccgcccctttcccacctctagctgttgcttccccttcctgtggggggctgcatttctctgcctcattctcacccaggtcttcccctctatgcsgtcctgatgtgaccaggaatgggggcaggggctgggggttcttcccctggctgtgtgtgtctgctgtgtgatcttggggaagatgtggctctcggggcctcagtttccctctctatacaatgggcccttgctgagtttgtcctgggaccctgagctgagaaagggggctgtctcccaggggctacttggaatagttcccagagctggccagatctgcatgagtcgagttcttgtccccggtcaccctagctctgggcaggcttggctggggtgtagccctgagcaggtttcta

SEQ ID NO: 42596 - DNA, 1430 bp, Homo sapiens
tggaacagaaaaggacattagtgggaaaactggtgaaatccgaatcaagtctggagttgagttaatagcagtgtaccagtgttggtttcttagttttgactactgtaccgtagtcacgtaagacgctaacaatgggggaagttgtgaaaggggtggatggaactttctgtaccattgttgcaactgttctataaacctaaaagtattccaaaacaaaaagttcatttcttaaaatcacatgggatatagatgtcagaagcagaattcaaattcaaggctggaggctgggcgcagtggctcacgcctgtaatctcagcactttgggaggctaaggtgggtggatcacctgaggtcaggagttcgagaccagcttggctaacatggtgaaaccctgtctttactaacaatacaaaaagtagccaggtacggtggcacacgcctgtaatccccrctactcgggaggctgaggcaggagaatcacttgaacctgggaggcaggggttgcagtgagctgagattgcaccactgcactacagcctgggtgacagagcaagactccgtctcgagaaaaaaaaaaatcaaaaaaacaaaaaacaaaaaaattcaaggctgggcatgatggctcacacctgttttcccagcactttgggaggctgaggcaggaggatcacttgaacccatgagttcaagaccagcctgggcaacacatggcaaaatttcaacttaaaaaaaatttaattagctgggcagggcggtgcacacctgtagttcccgctactcaggaggctgaggcgggaggattgcttgagcctgggaggctgcagtgagccatgatcacactactgcactccagcctgggcaacagagcaagaccctgtctaaaaaataaaaaaataataaaaaaatttaaaaaattccaatgtgtctgcttcctaagcccacatgctcctccgtccctatactacaccatgatagaaagtcattcccagagacttcctcatggatctgagcttctccccacctgtcccacgtttgccctctggatcaccctgactcacctgttttctttgccccatgacctcccttggagggttgaaggatgctcccagccccacaggtgttcacatctccaagttcattattcccaggcccttccactcttttgggtgatgtaataagcattggcctctctagcacccacccctcctttgcagcagccaccacgttccacttggggatccacgggattccagggaagacaactccccagcctggctccagggatagagcacaggacttaggctaggcccatccgcaccgccatgatcagcccagaggtagccatgtgagccaagctgatccaaccagagagaatcccaggactctgggaaggctgagacaaggacaattctcttattccatgtttgatg

SEQ ID NO: 42597 - DNA, 1430 bp, Homo sapiens
tggaacagaaaaggacattagtgggaaaactggtgaaatccgaatcaagtctggagttgagttaatagcagtgtaccagtgttggtttcttagttttgactactgtaccgtagtcacgtaagacgctaacaatgggggaagttgtgaaaggggtggatggaactttctgtaccattgttgcaactgttctataaacctaaaagtattccaaaacaaaaagttcatttcttaaaatcacatgggatatagatgtcagaagcagaattcaaattcaaggctggaggctgggcgcagtggctcacgcctgtaatctcagcactttgggaggctaaggtgggtggatcacctgaggtcaggagttcgagaccagcttggctaacatggtgaaaccctgtctttactaacaatacaaaaagtagccaggtacggtggcacacgcctgtaatccccgctactcgggaggctgaggcaggagaatcacttgaacctgggaggcaggggttgcagtgagctgagattgcaccactgcactacagcctgggtgacagagcaagactccgtctcgagaaaaaaaaaaawcaaaaaaacaaaaaacaaaaaaattcaaggctgggcatgatggctcacacctgttttcccagcactttgggaggctgaggcaggaggatcacttgaacccatgagttcaagaccagcctgggcaacacatggcaaaatttcaacttaaaaaaaatttaattagctgggcagggcggtgcacacctgtagttcccgctactcaggaggctgaggcgggaggattgcttgagcctgggaggctgcagtgagccatgatcacactactgcactccagcctgggcaacagagcaagaccctgtctaaaaaataaaaaaataataaaaaaatttaaaaaattccaatgtgtctgcttcctaagcccacatgctcctccgtccctatactacaccatgatagaaagtcattcccagagacttcctcatggatctgagcttctccccacctgtcccacgtttgccctctggatcaccctgactcacctgttttctttgccccatgacctcccttggagggttgaaggatgctcccagccccacaggtgttcacatctccaagttcattattcccaggcccttccactcttttgggtgatgtaataagcattggcctctctagcacccacccctcctttgcagcagccaccacgttccacttggggatccacgggattccagggaagacaactccccagcctggctccagggatagagcacaggacttaggctaggcccatccgcaccgccatgatcagcccagaggtagccatgtgagccaagctgatccaaccagagagaatcccaggactctgggaaggctgagacaaggacaattctcttattccatgtttgatg

SEQ ID NO: 42598 - DNA, 995 bp, Homo sapiens
gatcctaattttgtaaaaaacagagaaaaccagcaaaagaaattataactggaaggaaatacatcaaagtggtttgcagttatcactcatgaaattgaggtgaacttgatttttttccttttatatccatccgtgttttaataccacagacatgctttagatctgcccgtatattgtggctttcagagggtaataaaccattgtgactcagaaatagctaagaatttttatctctcaagaacaaattttcactcccttggggtgtcattatctgttgagaatgcatgcaatagttcaagagccaaaagactctgattcagtaagtttagggtagaaaaaaattaagtacatttttaaaatagagctctggtgtttcaaaggcaatgtgcaaatatacctacttaatattattctaattttttcaggatagctgaaatataaacatctatttttagtaataacacaaatgatggaatgcttttacatatttataaatcattaaggatttgctttttgtttctactgtctggaacatataaatttgaacacaatttagaacaacattcaggaaatatgatttatttattaccttcttgacctttattttatttttaccatctacttttatgtaagtcttttttttcaatcattgtttatttctttacttttccttccacatagaattaaagggagattcgggcttagtgtccttaattcatagttccattgtggctattaaaaggtgaactgaaagcttgcaaacacgtggtaccttgtagataattttctccagtcagacagttagayaaaggcctctgaggtttctggggtcattgttgaagctatgttttaaaatcctatatccttctctcattgttggttccttttcacaacacagaagttttcttttttttaatttcaacttttagatacagaaggtgcatgtgcagatttgtcacgtgggagtattgcatgatgctgaggtttggagtacg

SEQ ID NO: 42599 - DNA, 968 bp, Homo sapiens
tctgtccaaggtgcctccagatagagggagccttttcacagcactgagctctccagccctaggtgctcagcgtggccgcagcagttcctggggctcccgctcacagtcacccgacacccagccacgaggacaacagcagccaggggccacgcatccctcagaggcacacaacagcaaatcggctaggtaggtaggacagtatttaagactaagctcttcctcgggtgtttcaccttttatttttcttttctcagagacaggcaatatctgcagtttattgtaaatcagcttttttggagaaagcacatatttccatttaaaagatgctacaggacttcgcaacatccttgatgctttcacaaagtcattgctacttgagggtaaaagcaagtaacccagagacctggggactctgcagggaaaggaggtgggcagagcatcctgctggggcagggtccgcagggcccaagggcaggggaggtgtttgggctggaaggagggcactgctggtagacaggagtgggtgcagaatgtccaggcccccggatgcctcaaggtgggcacttggtctgtggatcaggagccagcagacatttgtccggatgggatggtggctccgcttactcagccagagatggggaaagaataactttggaagagcagggtcatgaggtgtgggacaccatggcacccacagggtcatgcagcaggggctggggacatcagcctgaaaaggaggagctgcctctgagggaggaggagtgaagggagagtgcagtccatcctcaggcagcttcccygtcccccaggagcctctattatacttgggcagctcccaagaccactcagacacagtctgtctcctctgtgctctctgaggtcactgaagcctgagtatggagccacttgaactctggacaatgaaggaagcctttggaaccaagaattggtttaaacaaattctgaag

SEQ ID NO: 42600 - DNA, 3137 bp, Homo sapiens
gatcctctggccccgtgagtcagctcagggagaggagccggtaggagacccacatctccagaattcaaggttgtcactgaccacgagagtgttcttctgcatctcagctttgtttctgtctcactcgattggaattccatctgttcagcagaattcagcccaccccattaggtggatgagatgctgtgatgtaaaaagaaacaagacaatttccgaaagtttggggttatgagaatgatctgggcctaggtgcggatggtccccatcagaagcaacaaaaacgtgtgctattatctctcacaaggtttttagccttccttgccaaaagttacttagcgagttgctgggtcacagggggtagcactgatccggagaagatccgtgagccttttgaccactgccactttgcaggtatacatactgaccctcaggctgcgggtccagacaaaccccaactcagccaagacaaacccctcccacctccagtgctgataacgacctttcaatagtctcatgctggagatgctttgggtctagatttattattattgttaataataatcaaaataaagattgtttgtttccccccacagtcctccacaaagattgattttcctgaggtccgcatgggtgcgcaaagccttccttttcttgagtctgcaaggtggatggatattttattgcatctatttcttagattctgaatgaatgattggtatcttattgatacactcacaagaggatggttttaaaatcacatatctttatctaatacctttatgagtccatcaattacatttattgggcaggccctttgatttttatgaagaaattccttttaagtaaggagaatggccatatatggaaatgcctttcctttcagtccatcaaagtcctgccttttccaagcaagtttcctacctagctctaagtcactcgttgtggaggttgctctgggtggcagagttggtgacagtggcttttcccagccatggttttcctgcagagggcttctgtcgggaagtgtagcctcccattattaaacaataattaagttctccaggctcagttccttacgcttgctaatcttggtgactgtttacatgctactatttgttaaatggcaaagtttattgatttggcaaattcagtcccacattgtggattttctctcagtctgtgttcctacatgtggttcagcatttttaaatgtcaactgcaaagtattattgattggtaattaaaagtgtagagaaaaattagcatagtagaagtttgcggtcattagtacaagtaccgttgggcaattatttagcgtgttttaacatgtattttccttcctggtattgacacagagtatcatgctcatcaaacagttcctgttttgctaaaaaggaaagttttagcatcaataagaattgaagacacgtatttctgttggaaaatttgcttgtcggtttccctgatgcataaacaagctgatccaaagggctacctgggctctggcaggagtgaaggggcagaatctgagctccatgggccatcctgagggggcttccctggcttccttcccaggacccagcaatgagggtcccatgttgaaactgaacaaggaaagtacaaacctggcttaggcagggaaaaaataaattgtttgtattaagcagttattttgtgtttgggaaatgtttatcccagattttctcagacataggacagatttcaatattttgcacaatttatttgaaagttacctatagtaatcaagtcatatgaacagatttttgttctgaaagcacgatcagaacattattattattgcttttggcatagactgagcaggacagtgacacattcaagatggaaggaaacttcgtaggtgtctgctctgtacaattgttggttttattgctttactcactagcactcactcccttacttgtacctgttatcttttttagcatatggttggtgttctgggactattatttgaatttttggattcctgaatgctgaagagagagcccacaggtggatggcatgaggtgatggaagtgggcgtatcaaatttacacttggaccaagccctgcaggcagtgtggtgtaatagtcaagaatgggatccttgattccctgagacggcatcctccccacatcccttatcagttggtgactattgaccaattacagttattgtagcctcccttggcctcaacgtgctcatattgaaatgtgatactaatacccagctggtaaagcttgtggtgaggactcaatgagataagaagctcaaggtgactgtaagatgactggatggcacctggcatttggtaaacacataacacatgtcagctgtttcatcccattgttgctgggagcgttaagcccctgggggctgtcaaggatctgcagcacatcaaaaaagaaagatgaaattcatagaagtcagcatgcatccactaagggaaatcccgtgcctaacaaagcatgtttcctctttattgatagaattttctgttaggatgataacataaatttgatctcttttggtttgagcaggcattggacagagtatcttatgaacaagagaggaaaacgcagactgrgcaaggattaagttaggtgagttaaacaaatgatgaaggggagggttaccgatgatcaccgcttacccagaagacatactctagggatcaaataaggccaggctggggctggtggtgattagtattaatacatccacaggactgtcaagattcccgtagcaatcagaccagcacgatgggccagaaatttacacaatgaaactaagatgggtggatgtactgtgaggtattttcagtaagattttgaaactattagagttggccctcatatccacaggttcggcatccttggagtcaaaaatattcagaaagaaaacaataaaaagcagttatatacagtaaaaagtaatacgaacaaaacaatcccaatacagtataacaactatctacctagcatttgcattgcactaagttttatatgtaatctagagatgatttcaggtatccgggaagatgtgaacaggttgtatgccaatactatgtcattttgtatcagggacttcagcatttgcagattttggcatccgtgat

SEQ ID NO: 42601 - DNA, 3137 bp, Homo sapiens
gatcctctggccccgtgagtcagctcagggagaggagccggtaggagacccacatctccagaattcaaggttgtcactgaccacgagagtgttcttctgcatctcagctttgtttctgtctcactcgattggaattccatctgttcagcagaattcagcccaccccattaggtggatgagatgctgtgatgtaaaaagaaacaagacaatttccgaaagtttggggttatgagaatgatctgggcctaggtgcggatggtccccatcagaagcaacaaaaacgtgtgctattatctctcacaaggtttttagccttccttgccaaaagttacttagcgagttgctgggtcacagggggtagcactgatccggagaagatccgtgagccttttgaccactgccactttgcaggtatacatactgaccctcaggctgcgggtccagacaaaccccaactcagccaagacaaacccctcccacctccagtgctgataacgacctttcaatagtctcatgctggagatgctttgggtctagatttattattattgttaataataatcaaaataaagattgtttgtttccccccacagtcctccacaaagattgattttcctgaggtccgcatgggtgcgcaaagccttccttttcttgagtctgcaaggtggatggatattttattgcatctatttcttagattctgaatgaatgattggtatcttattgatacactcacaagaggatggttttaaaatcacatatctttatctaatacctttatgagtccatcaattacatttattgggcaggccctttgatttttatgaagaaattccttttaagtaaggagaatggccatatatggaaatgcctttcctttcagtccatcaaagtcctgccttttccaagcaagtttcctacctagctctaagtcactcgttgtggaggttgctctgggtggcagagttggtgacagtggcttttcccagccatggttttcctgcagagggcttctgtcgggaagtgtagcctcccattattaaacaataattaagttctccaggctcagttccttacgcttgctaatcttggtgactgtttacatgctactatttgttaaatggcaaagtttattgatttggcaaattcagtcccacattgtggattttctctcagtctgtgttcctacatgtggttcagcatttttaaatgtcaactgcaaagtattattgattggtaattaaaagtgtagagaaaaattagcatagtagaagtttgcggtcattagtacaagtaccgttgggcaattatttagcgtgttttaacatgtattttccttcctggtattgacacagagtatcatgctcatcaaacagttcctgttttgctaaaaaggaaagttttagcatcaataagaattgaagacacgtatttctgttggaaaatttgcttgtcggtttccctgatgcataaacaagctgatccaaagggctacctgggctctggcaggagtgaaggggcagaatctgagctccatgggccatcctgagggggcttccctggcttccttcccaggacccagcaatgagggtcccatgttgaaactgaacaaggaaagtacaaacctggcttaggcagggaaaaaataaattgtttgtattaagcagttattttgtgtttgggaaatgtttatcccagattttctcagacataggacagatttcaatattttgcacaatttatttgaaagttacctatagtaatcaagtcatatgaacagatttttgttctgaaagcacgatcagaacattattattattgcttttggcatagactgagcaggacagtgacacattcaagatggaaggaaacttcgtaggtgtctgctctgtacaattgttggttttattgctttactcactagcactcactcccttacttgtacctgttatcttttttagcatatggttggtgttctgggactattatttgaatttttggattcctgaatgctgaagagagagcccacaggtggatggcatgaggtgatggaagtgggcgtatcaaatttacacttggaccaagccctgcaggcagtgtggtgtaatagtcaagaatgggatccttgattccctgagacggcatcctccccacatcccttatcagttggtgactattgaccaattacagttattgtagcctcccttggcctcaacgtgctcatattgaaatgtgatactaatacccagctggtaaagcttgtggtgaggactcaatgagataagaagctcaaggtgactgtaagatgactggatggcacctggcatttggtaaacacataacacatgtcagctgtttcatcccattgttgctgggagcgttaagcccctgggggctgtcaaggatctgcagcacatcaaaaaagaaagatgaaattcatagaagtcagcatgcatccactaagggaaatcccgtgcctaacaaagcatgtttcctctttattgatagaattttctgttaggatgataacataaatttgatctcttttggtttgagcaggcattggacagagtatcttatgaacaagagaggaaaacgcagactgggcaaggattaagttaggtgagttaaacaaatgatgaaggggagggttaccgatgatcaccgcttacccagaagacatactctagggatcaaataaggccaggctggggctggtggtgattagtattaatacatccacaggactgtcaagattcccgtagcaatcagaccagcacgatgggccagaaatttacacaatgaaactaagatgggtggatgtactgtgaggtattttcagtaagattttgaaactattagagttggccctcatatccacaggttcggcatccttggagtcaaaaatattcagaaagaaaacaataaaaagcagttatatacagtaaaaagtaatacgaacaaaacaatcccaatacagtataacaactatctacctagcatttgcattgcactaagttttatatgtaatctagagatgatttcaggtatcygggaagatgtgaacaggttgtatgccaatactatgtcattttgtatcagggacttcagcatttgcagattttggcatccgtgat

SEQ ID NO: 42602 - DNA, 552 bp, Homo sapiens
attctataggtgtgataggatttactgtaaagtttatttgtaaaagatgtacacagtagaaataaaacgtgatggaagaacttgagtacttcagaagtggaaacaaatttgatatttatttttataatgatataaagcttctagtaatttatgcaagttgtattgcaatggaatctaaactttttgtaaataaattctgcctggtttttatttgaacattgctggttatacaatctttgttggttgtttaacacgaattctttactaatttatatcttaaattgtaaataaaaacagactagtctacaataatatgatgtttggggcttatttttcctagaagaatgatttggggtagagckctagtgaataacctccaggtgatctgacctcacctttttaatgaaaacctgtgtgaaataaactctcctttctctcctgagcattgaaaaaaaaaaaaaaaggcagatggaagagaagtatataatcgggagaaacatgtgctgtagatgatttctatacaggtattgcaaaaaaaccaaaaaacataag

SEQ ID NO: 42603 - DNA, 580 bp, Homo sapiens
gggcattaagctctggtggagatccctgggcaattcaccagatgttctcctgaacccctttctttacctttgacagggggtaccgctatgctcctgackgtcccactttcgtctaccaatgggaaatagccaatgcttgctcgtggcatatggtcaggctcagcaaacaatcctttcatctggatttggggcatctccatgggggagcatgatggagaaggcgcatgagccctggagcaagcagttcagagcagaatcctgagctccaccgcctatcagccgtgcaagccaggccaatggtcagccactgctgcaccccagccatctcatctgaaatacagcagtataagttttacaaggttgttgtgcgactgcaatgccataaccttagaaaacactgaccgcaggttctgtacacaggaggagctccgtaagtgttgattttttaaaaaaagtcagcctgccttatgcagtagaaaaatgtaaagcattgaactggtacttatctcaagtatttaaccaacaaaggaacatgtgttctaaatgtaattattcaataggcaagacacgcatgtgttca

SEQ ID NO: 42604 - DNA, 877 bp, Homo sapiens
tctggagtaaatggaaaatgcctcctacaggaactagggctggaaccaggccttaatagatgggaaaaccctgaagtttggaggaccctgaaaacaggtaggatttgsaaaccatcaaaaggcattgtgcagagtgacataatgaaagcagtatcttagcactatgtctacagtgatgtctacaatatgtctaaactcgttcaagtgatatgcggaatcaactgaaaaggtttaaggctagaatcaggaagccagctaggaagctgttacagaatgcaagtatacaatgctgcaagggcagtctgaaccagtctggaagaggatatagtacagtggaataaaaacatctccagaaaacaaaatgaaaacagggtgaggcgactttttaaatagtcgtaaaggagacagagaagaaaagattccaagaatttgagcctgaaatatcctgagaatgctagtagcatgttatgaaaataatgtcatcaggagaggcagcaggctggaacacttggtttggaacaagttgacatcgaggtgtggatgaaaaaatccaagtagaaatgccaggaaacagttgaaactcagacgaggtcaaagctagaagcatcagtctcctcacagaaatgctaactgaaatcatgaatgttgattagtcactgtggcagacattgtgatttgcccaccaaaaagctattcctcatttcttccttgcgtatagaatctcaattttctcctatagcagtcactccggttcttaaagggagactgggagctcttccctctccagagacacaaatcagagggattggtctaaaccaatagttctcaaccttggctgcacaggggaatcagatggggagtttttaaaatgtggatc

SEQ ID NO: 42605 - DNA, 621 bp, Homo sapiens
gagtgatggattcgtcgtggctgctgatggtaacggtgggcactggccagcctgttgctcatgcagcgtgggaggtgagcgggcacagtgcccgtggagaggtggtgctgcctgatgagcttagggaaacccggtaaacaccgatgtgctctcccagatgcaaactgagtcacatccctgtcaggaaactgcaaataaatcgtgtgcaaaacggaacaaggatcctattmattaatttgggataactttattttattttttattttttttagagacagggtctctctccattgcccaggctggagtgccgtggtgtgattatggctcactgcagccttgactgcctggattcaagggaccctcccacctcagcctcttgagtagctgggagtacagatatacaccatcacactcagcaaatcttttcattttttttttgtagagctggggtcttgccttgttgcctgggctggtcttgaactcctggcctcccatctcagcctctcccatctcatcctcccatctcagcctctcaaagtgctgggatgacaggcatgagccactatgcctggccctgacatgagactcttaaccaggccattttacaaccaatttcatgca

SEQ ID NO: 42606 - DNA, 546 bp, Homo sapiens
gctcacgcatcagctccaagtcccagctaaaccaagccaccaagaggtgggccctgtgacaaggctctgagtccaaaggccatcagtaaagccccctaagtcttccgtggacccagctccaggctgggatgcacgctaggagatgatacacaccgggtgagggagcccagaggagagggcagctagctgtgcatggaggcctgatctctcagacttgagggcacaagcgtgtcccctcatcctgaagrcttctgcgatggggcagcagagggtctgggtctgctgcccctcaagtccccagccccatcctagcccatgaggattgtaaatccctcgtcctctcccctctctcctctgtcagccactcccctttccccctaccccactctctttctatttctgcctctgattttttttccttttctgcctttgttcctctgtgtgtgtgtttctctatgcctctctgatctctttgtacttccatcttgatctcgctaaggctctgatccctctctcctctccctcttcatgtgttactgtccccct

SEQ ID NO: 42607 - DNA, 546 bp, Homo sapiens
gctcacgcatcagctccaagtcccagctaaaccaagccaccaagaggtgggccctgtgacaaggctctgagtccaaaggccatcagtaaagccccctaagtcttccgtggacccagctccaggctgggatgcacgctaggagatgatacacaccgggtgagggagcccagaggagagggcagctagctgtgcatggaggcctgatctctcagacttgagggcacaagcgtgtcccctcatcctgaagacttctgcgatggggcagcagagggtctgggtctgctgcccctcaagtccccagccccatcctagcccatgaggattgtaaatccctcgtcctctcccctctctcctctgtcagccactcccctttccccctaccccactctctttctatttctgcctctgattttttttccttttctgcctttgttcctctgtgtgtgtgtttctctatgcctctctgrtctctttgtacttccatcttgatctcgctaaggctctgatccctctctcctctccctcttcatgtgttactgtccccct

SEQ ID NO: 42608 - DNA, 1116 bp, Homo sapiens
tccatctcatgaggatgaccaggacaaaggagcaacaaaagaccttaaaatgccagtctcaccagtctcagtgaacgcaagcggcatcctaaaaggggccagcgtggacggaatatttagaaaaccttagtttggtagagaaaggaggaagaacaagagagagtgggagggaggaaaaatagaagcaagtgatgatcccctgttactgttataaatgggtgctgtttgcagtgacagagacaaaagtgtccacaattcactcctggccttcacaaagtggaatggggaggaaaaggcagcaaccacagccacagaattcactccaaccagagcaagcccagtgcacaaggcccagcttggaggcccctaaaactgcccttagggagtcggccccccagaaggaatgatcctaagctcttcttcccaggagtgtggggtcacatgctcagatccactccctccacttcacagccctcattctgcaatgacggcctcgcctggggcccaactgtatttacgactttcacatggtgtcagggagctgccctcccycaaagagtaaggtttactcagcaagaacaggtgccaaaaacccctgtgtgcctgaacccatgagcagcctgcaggacccctgccctacatgcccgtgactcaaatcccacccctgccagggaacagaccccaatcagaacagaacctggcgtgagagagggtgattttcatggaacctcccacacacacacacagaaaacactccccgtcctaccatccagggagtaaacctcctccactcaaaaaagcatcctcctctttctcctctcctccagctccagctcatcagaaagcacccacagcagacagtgacacaaaagcaaagagcaggtcccacgtctcctcgaaaggtgcagaaatgcgatatcgtcaagcatgcttgatctcggtggtggggacaatggcaactgaggtgaggctgagaccgaacaggacaccatgggcatttgccaggggttcaccgtgtgcccccagcactgtgcattttctcgtttatcccagcaacagccctgtgaggtgggatgatggtgatcttcatctgacatctgaggaaacggggttggg

SEQ ID NO: 42609 - DNA, 1093 bp, Homo sapiens
aacagcctctgaccctgagtagctaggtgactttggacaagagttttcacccctctaaatggtgcatcatcacatacagtgtgggtatagaactggcagtcacaggggccctttgggaggactgggctagggcaggagaggtgttgtctgcacagagctggcccagtgcccacatctatgttagatattattattgttattattagatctgcaacatttattatttcagtactaacgacgggcaggcacctcgccaagttctgtgcatgcaaagacaaacacgctgtctctgcctgtggggagacaagtgaatagacaattatgattcagggtgatgttagcttttgcagctgtcttgcttcaaatgggattaaggcggtccattttatcttgacataccttccgctgtgtcaagggcttggactgtgatgagcccaggtgctgtgagagcactgagacgggctgaatctcttkgtggagggaagtcaggggaggcttcctggaggaggtgctgatgaatgtctcttctgccatgagaagccacctctcccctgttcccattgggatcgggggctggagctctttaggctgcagactgagcctgtttcatctccgggttgtgtgaaatcatcatgggttcaggagcgtgggacaccctccagctgtggccccatctcccggagcagccatgcctcctactgactttgtggtccccctgcagtgggaactcagtcacatagggtccctggggagcaggggtttggcccgtgaactgacagagatgtggggcctgcacctccatggcatcaggggaaggagggctcctacctcagggaacggagagagaggatgtgctaggggagtctgggaacaaacaagtcggggggctggcctctgaccccaggccaagtgtagagaaggttgtgagaccacttgaggtcattgccagaagcaacaccactgctgcctctttttgggtttctgagggagacagatctgggattgcatcttggccaaccctgggcactgctcctagcctttgtggacctccgtttgatctctttaaagtgggaagagttgcacctatttctta

SEQ ID NO: 42610 - DNA, 1093 bp, Homo sapiens
aacagcctctgaccctgagtagctaggtgactttggacaagagttttcacccctctaaatggtgcatcatcacatacagtgtgggtatagaactggcagtcacaggggccctttgggaggactgggctagggcaggagaggtgttgtctgcacagagctggcccagtgcccacatctatgttagatattattattgttattattagatctgcaacatttattatttcagtactaacgacgggcaggcacctcgccaagttctgtgcatgcaaagacaaacacgctgtctctgcctgtggggagacaagtgaatagacaattatgattcagggtgatgttagcttttgcagctgtcttgcttcaaatgggattaaggcggtccattttatcttgacataccttccgctgtgtcaagggcttggactgtgatgagcccaggtgctgtgagagcactgagacgggctgaatctctttgtggagggaagtcaggggaggcttcctggaggaggtgctgatgaatgtctcttctgccatgagaagccacctctcccctgttcccattgggatcgggggctggagctctttaggctgcagactgagcctgtttcatctccgggttgtgtgaaatcatcatgggttcaggagcgtgggacaccctccagctgtggccccatctcccggagcagccatgcctcctactgactttgtggtccccctgcagtgggaactcagtcacrtagggtccctggggagcaggggtttggcccgtgaactgacagagatgtggggcctgcacctccatggcatcaggggaaggagggctcctacctcagggaacggagagagaggatgtgctaggggagtctgggaacaaacaagtcggggggctggcctctgaccccaggccaagtgtagagaaggttgtgagaccacttgaggtcattgccagaagcaacaccactgctgcctctttttgggtttctgagggagacagatctgggattgcatcttggccaaccctgggcactgctcctagcctttgtggacctccgtttgatctctttaaagtgggaagagttgcacctatttctta

SEQ ID NO: 42611 - DNA, 1093 bp, Homo sapiens
aacagcctctgaccctgagtagctaggtgactttggacaagagttttcacccctctaaatggtgcatcatcacatacagtgtgggtatagaactggcagtcacaggggccctttgggaggactgggctagggcaggagaggtgttgtctgcacagagctggcccagtgcccacatctatgttagatattattattgttattattagatctgcaacatttattatttcagtactaacgacgggcaggcacctcgccaagttctgtgcatgcaaagacaaacacgctgtctctgcctgtggggagacaagtgaatagacaattatgattcagggtgatgttagcttttgcagctgtcttgcttcaaatgggattaaggcggtccattttatcttgacataccttccgctgtgtcaagggcttggactgtgatgagcccaggtgctgtgagagcactgagacgggctgaatctctttgtggagggaagtcaggggaggcttcctggaggaggtgctgatgaatgtctcttctgccatgagaagccacctctcccctgttcccattgggatcgggggctggagctctttaggctgcagactgagcctgtttcatctccgggttgtgtgaaatcatcatgggttcaggagcgtgggacaccctccagctgtggccccatctcccggagcagccatgcctcctactgactttgtggtccccctgcagtgggaactcagtcacatagggtccctggggagcaggggtttggcccgtgaactgacagagatgtggggcctgcacctccatggcatcaggggaaggagggctcctacctcagggaacggagagagaggatgtgctaggggagtctgggaacaaacaagtcggggggctggsctctgaccccaggccaagtgtagagaaggttgtgagaccacttgaggtcattgccagaagcaacaccactgctgcctctttttgggtttctgagggagacagatctgggattgcatcttggccaaccctgggcactgctcctagcctttgtggacctccgtttgatctctttaaagtgggaagagttgcacctatttctta

SEQ ID NO: 42612 - DNA, 592 bp, Homo sapiens
taaaaattatacatatttctctgatgaattcagatcagaaatacagcaatataagtatagtttatccagttaattcattctcttcaaacaatagaaatcgtgaaaaatatcaattcccttttcttggtgacctaaacttgtaattagattttatacttttcaaaacaaaaatggcaaacaaaaataagtgtccagtaaaaataatggaaataaagtaaatctaaccgttcagaacaggaaaaaaagaaagcaaatgggagggagagggatgggggaagagagaggtagagagagatagaggaagagagagcacaatgaaataatcaatttttaggcacattaaatatggaggaactgaaaataatattaaaatgcctttcttattattgtaccttatgtcactagagaaaacaaattttgaagagagaaaattataagatgttaacagtcaatattttcttttactctttgtataaattctackgaatttttactaaatggcaattcaataaataatcagagatgacatactatactccaagttactacctgtttcattattctattataaatttatatacagttacatatg

SEQ ID NO: 42613 - DNA, 1030 bp, Homo sapiens
tctaaccaggcattctaccgttcttcctttgctatgtccagaaggagaagagggagggctctcattctttatggcttagaggtagacctcagaccatgggctgaaagttgtgaaaaggcaaattcaagttcaataattaggaaaaacattttaatgwtggctccttaaaatagactacatggtgaggtaatgaattccgtggcaatcagcgacttgcccaagcattcaaagctagttaggccagcattagaatgcacacctacggggtcccgactgcaaaatacagtgttctttttaccacctagaagctgggtgttgctcctacaaaacaccacagaattctgagcctaggactagacctgagcagctggaaatatacagacttgctgagtgccttgcttattactgtcatcataacaaatagttgtcattgaacaaacagcaagccatgtcaggtatttccttttattagctcttacaagattcctgttggaaagctgagaggtcatggaaacatttgtctacaacctccttgaagaatgtggtgagaaaaatatacatacatatatgtgtgtgtatatgtctactttgtgatgagtctgaggttgtttcctgctctgaaggggctcagaagtgcttctggagggcagactggatattcttcagcaggccccacttagctcggttcttcccatgtccatctggtgttaccacctgcaatcagaagcgaagagtcatgacacccaatagacaacagctcccagtagcctgggcccttctgcatgtcagacactacacacatcatttcattaactcctcacgaccaccacagtggctgttggtgccactttatagatgaagaagctgaggctcagaaggaccaggaaggtttcccaaagccccacagctatagtgtcctgggattgtgattccataggccagatcctacttccctttagggtagctcatgtgactaagtgctgatgacagtgatggggctggaccgcaggtgagcttcaccatagaggat

SEQ ID NO: 42614 - DNA, 1030 bp, Homo sapiens
tctaaccaggcattctaccgttcttcctttgctatgtccagaaggagaagagggagggctctcattctttatggcttagaggtagacctcagaccatgggctgaaagttgtgaaaaggcaaattcaagttcaataattaggaaaaacattttaatgttggctccttaaaatagactacatggtgaggtaatgaattccgtggcaatcagcgacttgcccaagcattcaaagctagttaggccagcattagaatgcacacctacggggtcccgactgcaaaatacagtgttctttttaccacctagaagctgggtgttgctcctacaaaacaccacagrattctgagcctaggactagacctgagcagctggaaatatacagacttgctgagtgccttgcttattactgtcatcataacaaatagttgtcattgaacaaacagcaagccatgtcaggtatttccttttattagctcttacaagattcctgttggaaagctgagaggtcatggaaacatttgtctacaacctccttgaagaatgtggtgagaaaaatatacatacatatatgtgtgtgtatatgtctactttgtgatgagtctgaggttgtttcctgctctgaaggggctcagaagtgcttctggagggcagactggatattcttcagcaggccccacttagctcggttcttcccatgtccatctggtgttaccacctgcaatcagaagcgaagagtcatgacacccaatagacaacagctcccagtagcctgggcccttctgcatgtcagacactacacacatcatttcattaactcctcacgaccaccacagtggctgttggtgccactttatagatgaagaagctgaggctcagaaggaccaggaaggtttcccaaagccccacagctatagtgtcctgggattgtgattccataggccagatcctacttccctttagggtagctcatgtgactaagtgctgatgacagtgatggggctggaccgcaggtgagcttcaccatagaggat

SEQ ID NO: 42615 - DNA, 1030 bp, Homo sapiens
tctaaccaggcattctaccgttcttcctttgctatgtccagaaggagaagagggagggctctcattctttatggcttagaggtagacctcagaccatgggctgaaagttgtgaaaaggcaaattcaagttcaataattaggaaaaacattttaatgttggctccttaaaatagactacatggtgaggtaatgaattccgtggcaatcagcgacttgcccaagcattcaaagctagttaggccagcattagaatgcacacctacggggtcccgactgcaaaatacagtgttctttttaccacctagaagctgggtgttgctcctacaaaacaccacagaattctgagcctaggactagacctgagcagctggaaatatacagacttgctgagtgccttgcttattactgtcatcataacaaatagttgtcattgaacaaacagcaagccatgtcaggtatttccttttattagctcttacaagattcctgttggaaagctgagaggtcatggaaacatttgtctacaacctccttgaagaatgtggtgagaaaaatatacatacatatatgtgtgtgtatatgtctactttgtgatgagtctgaggttgtttcctgctctgaaggggctcagaagtgcttctggagggcagactggatattcttcagcaggccccacttagctcggttcttcccatgtccatctggtgttaccacctgcaatcagaagcraagagtcatgacacccaatagacaacagctcccagtagcctgggcccttctgcatgtcagacactacacacatcatttcattaactcctcacgaccaccacagtggctgttggtgccactttatagatgaagaagctgaggctcagaaggaccaggaaggtttcccaaagccccacagctatagtgtcctgggattgtgattccataggccagatcctacttccctttagggtagctcatgtgactaagtgctgatgacagtgatggggctggaccgcaggtgagcttcaccatagaggat

SEQ ID NO: 42616 - DNA, 1030 bp, Homo sapiens
tctaaccaggcattctaccgttcttcctttgctatgtccagaaggagaagagggagggctctcattctttatggcttagaggtagacctcagaccatgggctgaaagttgtgaaaaggcaaattcaagttcaataattaggaaaaacattttaatgttggctccttaaaatagactacatggtgaggtaatgaattccgtggcaatcagcgacttgcccaagcattcaaagctagttaggccagcattagaatgcacacctacggggtcccgactgcaaaatacagtgttctttttaccacctagaagctgggtgttgctcctacaaaacaccacagaattctgagcctaggactagacctgagcagctggaaatatacagacttgctgagtgccttgcttattactgtcatcataacaaatagttgtcattgaacaaacagcaagccatgtcaggtatttccttttattagctcttacaagattcctgttggaaagctgagaggtcatggaaacatttgtctacaacctccttgaagaatgtggtgagaaaaatatacatacatatatgtgtgtgtatatgtctactttgtgatgagtctgaggttgtttcctgctctgaaggggctcagaagtgcttctggagggcagactggatattcttcagcaggccccacttagctcggttcttcccatgtccatctggtgttaccacctgcaatcagaagcgaagagtcatgacacccaatagacaacagctcccagtagcctgggcccttctgcatgtcagacactacacacatcatttcattaactcctcacgaccaccacagtggctgttggtgccactttatagatgaagaagctgaggctcagaaggaccaggaaggtttcccaaagccccacagctatagtgtcctgggawtgtgattccataggccagatcctacttccctttagggtagctcatgtgactaagtgctgatgacagtgatggggctggaccgcaggtgagcttcaccatagaggat

SEQ ID NO: 42617 - DNA, 533 bp, Homo sapiens
tatttctgcaagctgagaaatattctaatcttaatattggtttagaagcccagatagtttcctcagcttctccaattgtagaaacaagttgctcagttggaaattctcaatgctttatacatttacttcttcaccctcattctcacttgccctagacaatgcctccattctacacagagccacatatttcttttttttcctttttctttcttctttttttttttytttttttgagatgcagttttgctcttgttgcccaggctggagtgcaatggcacaatctccactcactgcaacctctgcttcctgggttcaagcgattctcctgcctcagcctccctagtagttgggattacagggatgcgtcacctcgcctggctcattttgtatttttagtagagacggggtttctccatgttggtcaggctggtcttgagctccccaactcaggtgatctgcctgcctcggcctcccaaagtgctgggattacaggcgtgagccagcacacctggctgagccacatatttcttatc

SEQ ID NO: 42618 - DNA, 533 bp, Homo sapiens
tatttctgcaagctgagaaatattctaatcttaatattggtttagaagcccagatagtttcctcagcttctccaattgtagaaacaagttgctcagttggaaattctcaatgctttatacatttacttcttcaccctcattctcacttgccctagacaatgcctccattctacacagagccacatatttcttttttttcctttttctttcttctttttttttttttttttttgagatgcagtttygctcttgttgcccaggctggagtgcaatggcacaatctccactcactgcaacctctgcttcctgggttcaagcgattctcctgcctcagcctccctagtagttgggattacagggatgcgtcacctcgcctggctcattttgtatttttagtagagacggggtttctccatgttggtcaggctggtcttgagctccccaactcaggtgatctgcctgcctcggcctcccaaagtgctgggattacaggcgtgagccagcacacctggctgagccacatatttcttatc

SEQ ID NO: 42619 - DNA, 533 bp, Homo sapiens
tatttctgcaagctgagaaatattctaatcttaatattggtttagaagcccagatagtttcctcagcttctccaattgtagaaacaagttgctcagttggaaattctcaatgctttatacatttacttcttcaccctcattctcacttgccctagacaatgcctccattctacacagagccacatatttcttttttttcctttttctttcttctttttttttttttttttttgagatgcagttttgctcttgttgcccaggctggagtgcaatggcacaatctccactcactgcaacctctgcttcctgggttcaagcgattctcctgcctcagcctccctagtagttgggattacagggatgcgtcacctcgcctggctcattttgtatttttagtagagacggggtttctccatgttggtcaggctggtcttgagctccccaactcaggtgatctgcctgcctcggcctcccaaagtgctgggattacaggcgtgagccagcrcacctggctgagccacatatttcttatc

SEQ ID NO: 42620 - DNA, 1183 bp, Homo sapiens
tgcatatgttatatgtccatatccaaattgtgaataatgtattccagttattattccgtcttcaggtatcaaacatttactctggtaatacagtactttaccattctcagtttccatccattccacttgtttggaaaggaaaaaaaaaaacttaaagtatatttaaatcttttttttggtggttgttgttgtttggttttatttgtttgactgtttattttgacttatcagacccaatcactatattgaaacaggtggattttctcattaatatgattggaaaatgggaaacaaacttatttgtttcagacaagagactgaaaatcctgtgattattttggaaaccgtaaaaatgtaaaagcaacatctgccccgcagcagaatgaaatcactactcagtaacaagttctcaaaggaagaatggtttgtaatrattaaggccagattattaattagagagagaaatagaggcattagaagataattttcaaggcacctattatggagggagatctagaattactttcaaattttatttttggaacatcagtgaacccttacgtttctctgtgaaacccaagaggaatcttggaatctggtgatttttttaaattgctgctagcgtcttggtaggcctattaagctttcttcgttaggaaggggagcattaacaatagtttccagtttctttccttttctttgccttattttcctgaacttcttttggaaggtaaatgcttaacacatcacgctgtcatgtagcaaatgtcgtaagatctacaaagcaagtctctaaagtaagtaaaacaccagccaaatctacactgtcagcagcttatcaaaaagcttttttttgggtggagggcggtggctggtgggaagcggttggtcttgttttcctctacactgtgtttggaaggagagttttccatttgaaagagtaaatgaacgcttggataccaattggtcgtctctatcacatccctgctggatatgcaccctctcatttttcaatagggcagcaagggctccgatttctcagtcttggcagagatccccaaggattgagtatggcaaaaagctgacaaacctttgttacacagagctctggccatcgaaggcagggccagcaatggggcagattcttcctctcttgctctttccctgatcttccagataaatt

SEQ ID NO: 42621 - DNA, 930 bp, Homo sapiens
ttttttaaattcccacctgcttttatttcatctttgcatgaatttttaaaaacaatttctgttttattttgggggcatcatttcttcatttatctttgaaataccctaaacatattcagtttaaagtttgtggagttttgttgttgttgttgttgttgtttgtttgtttgtttgcagactatttaatcatttccatattggagtgagttgatcacctaattgtcatttttcaatttttttatgttgttattttttctgaatgagttttggaatttgggctttaagtttcttcttcaatggaaacatcccttgaaccctacaacattcatccctctaacaggtctcttgagctccctggtccaaaaccaagtccttacagtcttatagccatagcttgggattcctattgctgtgatgttcacatctatgtagtcatgaaaccagtgggcagcccagcacagacttggcttggggactgtgactgttcttgccttttaaatttcactttatgtaagctgtaattgcaggcatcacattttgtttcccagacaaagaaggggtgccccaacctgtagttttaaaataactttgagctgggcatggtggctcatgcctgtaatcccagcactttgggaggcygaggcaagtggctcacttgaagccaggagtttgagactagcctcgccaacatggtgaaacctggtctctactaaaaatacaaaaaattagctggtgtggtggtgcatgcctgtagtcccacctgtagtcccagggaggctgaggcattagaattgcttgaaccagggaggcagaggttgcagtgagtagagatggcaccagggcactccatcctgggcaatagggcgagactccatctaaaaaaaaagacctttggtttagtctccatgaggtatgggacaattttcaccc

SEQ ID NO: 42622 - DNA, 597 bp, Homo sapiens
cgagaccatcctggccaacatggtgaaaccccatctctactaaaaatacaaaaaattagctgagcgtggtggcgtgtacctgtaatcccagcgattcgggaggctgagatgggagaatcacttgaaccagggagtcagaggttgcagtgagccaagacagtgccactgcactccagcctggaaagtgagcaagactccgtctaaaaaaaaaaaaaaaaattagctgggcatggtggcacatgcctgtaatcccagctactcaggagkctgaggcaggagaatcacctgaacctgggaggcggaggttgcagtaagccgagattgtgccattgtactccagcctgagtgacagagtgagactcaatctcaaaaaatatatatatgtatatatttatatatatgtatatatttatatatatatatatacacacatatatatatatggaggtgaataggggaaaactgtataaatgactgaaagtggttgcctctggggtaggaactagaaggtaaggaatggagactggagaggatatttttcattttatttggttgtaatagtgttggacccattttatgtcattgtcaatttgtaaa

SEQ ID NO: 42623 - DNA, 728 bp, Homo sapiens
tatggggggtgatttcagaagcaggagagtttgaaaatgcatactgactcttgtccattatttggagctgtggcamatatctaaatcttttgaagactgagtgtttctcccaaaaaaagggctcttcctttgaaactaaacctccttaacacaactggtcttcaacatattctttctcctttttttgccagtagaaatgaatatgcctcacaataattcagtttggaacctgaaaatctaagtctctaattcaagtgcaggttacacagatagtggaagacagtacccttgattaaatcccggctccatcacttcttatagtgtgacttagaggaagttacttatttttcccagtgtatttttttaattgagggaaaacacacatagcataacctttaccatcttatgccatcttagccatgtttaagtatacaatttagttgtattaagtataattaaaatgttgtacagtcacgttaccaacatccatttctataactcttttaatcttgtaaaactgaaactgtattcctattaacaaaaacttccaaatttccccttccacctgccactggtaacgaccgttctactgtctgtctctgtgagtatgactactataagtacctcatataagtggaatcatagtcttttgtgactggctcatttcacttagcatagtgtcttcaaggttcattcatgcagcatatgtcaaaatttccttctttcat

SEQ ID NO: 42624 - DNA, 1235 bp, Homo sapiens
gagatgtcagacttcctgatctgctgcagggaaggctagaagccacaggtggcctcttagggcccaaactgatggcttctggcttgaacggttatccagacggcacagagaggtaacttcacattgccggttcaaacaatagaattggcaaatctccctaaacaaatatatctaaattccgaatataacttcatttcaacttcatatcccaaacttaygtgtttacttcagggaggaagtgctattttatggtttccaggacaatgcagttcataattttttcacacctttcagagcaggtgacagcttgcttacaaaacctaatttattcccatgcagggcttggagttgcactttaatacacgcaccaataacatatcacaataaggttagagacaggcactccctccctccatcccaaataggcactttctggatccagccatccaagaagagagctaaaccaagtagacacctcaagtgaggcctccgaaaaccagcaataggaagcctcccagtgtaatttcgtcttggaccaagtaccaccacctcatccccctccccagcttaattgcaggaagaattgttatgctaattagcattattcaccgagttaacagagcacagggtctaaatttagatcccctgctgcagagggctctgaattcattggaagctggcaaagatgctggtggggttggggaggtccccgggctgggctgcaggacagtggaggggaggtcacggggtcgttctccctctcatcccatcttcagacctcctttaacttagaacagaaggcctgtgactcctggtaggaaagactccgaggaggcaaaatcctctcccaaaggaaggttgagccaaaggaaagggaagggcccgagggctgagtggccatcatgtgcccggcaagacacccaggtcactggtaagagcccagtgccgtggagcggctctggcttcatgtcacacaccctggggtccaggcctgactcttcggcatataagctgagtgaccttaggaaaagttactctgcctgtctggacctcagtgtcttcatccatagaggggatcatgacatcttctttgcagggctgctgtgaaggttgaatgagatactgcatgccaagtggtctcacagagctgggatttgtacccagacatgtctgagtaaaatggctgcgtggttctccccaccctccctggcttcaccccactgtcatgcatgcca

SEQ ID NO: 42625 - DNA, 1235 bp, Homo sapiens
gagatgtcagacttcctgatctgctgcagggaaggctagaagccacaggtggcctcttagggcccaaactgatggcttctggcttgaacggttatccagacggcacagagaggtaacttcacattgccggttcaaacaatagaattggcaaatctccctaaacaaatatatctaaattccgaatataacttcatttcaacttcatatcccaaacttatgtgtttacttcagggaggaagtgctattttrtggtttccaggacaatgcagttcataattttttcacacctttcagagcaggtgacagcttgcttacaaaacctaatttattcccatgcagggcttggagttgcactttaatacacgcaccaataacatatcacaataaggttagagacaggcactccctccctccatcccaaataggcactttctggatccagccatccaagaagagagctaaaccaagtagacacctcaagtgaggcctccgaaaaccagcaataggaagcctcccagtgtaatttcgtcttggaccaagtaccaccacctcatccccctccccagcttaattgcaggaagaattgttatgctaattagcattattcaccgagttaacagagcacagggtctaaatttagatcccctgctgcagagggctctgaattcattggaagctggcaaagatgctggtggggttggggaggtccccgggctgggctgcaggacagtggaggggaggtcacggggtcgttctccctctcatcccatcttcagacctcctttaacttagaacagaaggcctgtgactcctggtaggaaagactccgaggaggcaaaatcctctcccaaaggaaggttgagccaaaggaaagggaagggcccgagggctgagtggccatcatgtgcccggcaagacacccaggtcactggtaagagcccagtgccgtggagcggctctggcttcatgtcacacaccctggggtccaggcctgactcttcggcatataagctgagtgaccttaggaaaagttactctgcctgtctggacctcagtgtcttcatccatagaggggatcatgacatcttctttgcagggctgctgtgaaggttgaatgagatactgcatgccaagtggtctcacagagctgggatttgtacccagacatgtctgagtaaaatggctgcgtggttctccccaccctccctggcttcaccccactgtcatgcatgcca

SEQ ID NO: 42626 - DNA, 1257 bp, Homo sapiens
ttcttgtcgagggggagacggttgaaggagacactggtggaaatgtgtgtggttcactcatactgcaatctcaaaggggaaaaggagaacccctccactgacgtgagttggattcagtgacttggtgtttggggagaaaggaggagagttgctgcagaccagtctgtgataaactcagccctcagtatgagggaacttgagtgcaggaaaggagacagcgtcatcaaggcaagaggacaccgatggtttccaggaagataacaaagcaagaaaaatggtgcatgacgacttccattgcccgacattttcttatccctaagatgctctcctttgccctctttccatctacctcagtcttctccctctacctacaggtctgaatcttcattcatgtattttaggcttgaaaggaatagggctgtcggtgagaatcccaatctttctacattgtttcttcgagggctcttgaagttctccttctttagggagcttattgcagtgggatatttcattctaggcagctcagcatctcttcgctttcttttggaagtagcacacgaatttcctcgttgagaacaactgatttaccgagtgatgcagttcagcatccctgtaaacccagtgattgttaacccgttctttccaagtcttttgggagatgaccttccccggaatccaaatcctgaactctttgataaaaagaccaagagaggccaacgttcattcattccagaaagtccctggaacgatgatcaaatattcgctgctcccgggtcctccgggggtgactgtccatacgatgtgcccagtcttcccgctggtcctgcaggcatcccctgatgcctgttccccggactcagtgtactctccctggcacacccttctttatggacaacaggaggaggtagggagtggagcaggagcgggagaaagccacgctgaatggggtctcattagacttccaggtgtcgagatggatgattagaaaatgagtccactgtcagtgtcaagcgttccctcatcaggcaccatgacagtgcagcaaagaggcaaagggaaaatcgtgctggctgctcaaaggtccatccctcaccgaaatgcacctgcgaggctcagctgggtcagctcaggagccccaaacgaaaggctcccagctctttcattyggacccagggtttgaggagagggagacagggaagggttagaagtggaaaaagactggattcaaaggagggaaaagtggtctgctggtgagag

SEQ ID NO: 42627 - DNA, 553 bp, Homo sapiens
tacactcccaatgctgtaaagtgttgtacttccccataaatgaacatgcacagtcttcaaagcctctgaatcttccactctattaacttgttgcttcctatttcagataagaaccagcccttttgttatattttaatttcaaatatccactctccttatcagctggcccaccactgtcctctgaggctccagctcaatcatttgtggtggctgagcttccttatgtacagccaggaaaatggagctgggacacaataggaggaaagttaaggagtgggtttcaattatacttgaaacttctcaaactgttgtctcgttaagtttcagtggaccttgaaactgtgtttatgtgaaagtttttggaacattcagcatttttaaatatacactgtaagtactttaacagaatgttgrgtggttacagacctgcccagaatttaacctcccttcctcccagtgtgacagtttctgttgcccttactttttctgtgtcctcatcaatatgttctgaccctgcctggtgaccaggtcagcttctggtggctccttgcat

SEQ ID NO: 42628 - DNA, 553 bp, Homo sapiens
tacactcccaatgctgtaaagtgttgtacttccccataaatgaacatgcacagtcttcaaagcctctgaatcttccactctattaacttgttgcttcctatttcagataagaaccagcccttttgttatattttaatttcaaatatccactctccttatcagctggcccaccactgtcctctgaggctccagctcaatcatttgtggtggctgagcttccttatgtacagccaggaaaatggagctgggacacaataggaggaaagttaaggagtgggtttcaattatacttgaaacttctcaaactgttgtctcgttaagtttcagtggaccttgaaactgtgtttatgtgaaagtttttggaacattcagcatttttaaatatacactgtaagtactttaacagaatgttgggtggttacagacctgcccagaatttaacctcccttcytcccagtgtgacagtttctgttgcccttactttttctgtgtcctcatcaatatgttctgaccctgcctggtgaccaggtcagcttctggtggctccttgcat

SEQ ID NO: 42629 - DNA, 1731 bp, Homo sapiens
cccatgtttcttccagccttgataaaaaaaattcctcaccccaccttccccttgccttttagaatactctgcacgacacaggcccgtgagactcagccagtgttcaaacagctcatgccagaggctgctctgggcaccaggaagcaagaaacttataaggcaccaaccctggctttgaggagcccccaatttaatgagaagttggagcagtaaagaaatgttacagtccatgtaggaagtgctatgrtagaagcagctggagcaccttaccgagctcaggagaccggggggatgggggggcttgcccagagggcacagcattgcaagcagggcaatgacccagttctaagacagactcgtcacatggcaagcagagtcggtcagactttggacaagtttattgacttctttggaacctcagttttctcatttgacaaaactagatggtcaagaagcgtctaggattattgggacacgtaaattacataattctgacacagcccccccaactctgggttcctggtatggggtaagtttttagtaaatgtgagatgctgtgattagtactgtgaatatgatggctatttcaacagaagaattataaagaaagggcttcaggaagggattgggagtgactcaagcaggcaaccatcaaagcactttgtgcaaagatcaggtccttttctgagcactgaaaatttgcctatttagagatgcggcaagctgaagtgacatttactccccgcggaaggacacaggaggcagacgagtggtgaagctcattatctggtgatgcagccgcagacgtaatggtcaaagaacaagacttccaggggctgccccaagttcgccacacacgcctcttgattagaaagaatagtccatgcaaaggtagggcattttacacagcactgcagacatgcagagaaggtgctcagaaaatatctgtcgaaagtctggttagaggagatgagaaggaatatctaagagaaaagcacaaagatttagcaaatacatggatcctcatttctcagcctccttacccccacccaaatcaatgggttggctttattatgtgctgctgctctccttctcctttcctgcattgcctctttctcttaaaattggctctggtgcaccccaatagctacaaacccttagatacccagagagcacgtcctcctccccagtagagccggaagcatctgtcccaaactgagcttcactgtgaaagagacattatttccactcatgagagctacaaggtatgtgaaatagtgaatttcatgtaaatatatgcacactcaagtgtataaaaaagaaattattctacaaagactgaagaggaacactcactgtcaaaagacatttttaattcttgagcatttgcagggaaaattgactttaagcttggctaaatcatgtagaaactgtgttttcttataaacatgggaaagaaacattcaagaagttttatcaaagaatgggaaatctagcctattgcccaggcctaggctcaccactgtccccaccacctcaagcagcacccccttccctccgttctgagctcactaagccttgttgaggagtggaagatggcagctgtgtgtgtccattggccactgcagctgcctcagtgtccacacctcacctcccacccgtagactccctccacctcttctaataagctccttgccctctggttttgattcggagctccagctactggct

SEQ ID NO: 42630 - DNA, 1731 bp, Homo sapiens
cccatgtttcttccagccttgataaaaaaaattcctcaccccaccttccccttgccttttagaatactctgcacgacacaggcccgtgagactcagccagtgttcaaacagctcatgccagaggctgctctgggcaccaggaagcaagaaacttataaggcaccaaccctggctttgaggagcccccaatttaatgagaagttggagcagtaaagaaatgttacagtccatgtaggaagtgctatgatagargcagctggagcaccttaccgagctcaggagaccggggggatgggggggcttgcccagagggcacagcattgcaagcagggcaatgacccagttctaagacagactcgtcacatggcaagcagagtcggtcagactttggacaagtttattgacttctttggaacctcagttttctcatttgacaaaactagatggtcaagaagcgtctaggattattgggacacgtaaattacataattctgacacagcccccccaactctgggttcctggtatggggtaagtttttagtaaatgtgagatgctgtgattagtactgtgaatatgatggctatttcaacagaagaattataaagaaagggcttcaggaagggattgggagtgactcaagcaggcaaccatcaaagcactttgtgcaaagatcaggtccttttctgagcactgaaaatttgcctatttagagatgcggcaagctgaagtgacatttactccccgcggaaggacacaggaggcagacgagtggtgaagctcattatctggtgatgcagccgcagacgtaatggtcaaagaacaagacttccaggggctgccccaagttcgccacacacgcctcttgattagaaagaatagtccatgcaaaggtagggcattttacacagcactgcagacatgcagagaaggtgctcagaaaatatctgtcgaaagtctggttagaggagatgagaaggaatatctaagagaaaagcacaaagatttagcaaatacatggatcctcatttctcagcctccttacccccacccaaatcaatgggttggctttattatgtgctgctgctctccttctcctttcctgcattgcctctttctcttaaaattggctctggtgcaccccaatagctacaaacccttagatacccagagagcacgtcctcctccccagtagagccggaagcatctgtcccaaactgagcttcactgtgaaagagacattatttccactcatgagagctacaaggtatgtgaaatagtgaatttcatgtaaatatatgcacactcaagtgtataaaaaagaaattattctacaaagactgaagaggaacactcactgtcaaaagacatttttaattcttgagcatttgcagggaaaattgactttaagcttggctaaatcatgtagaaactgtgttttcttataaacatgggaaagaaacattcaagaagttttatcaaagaatgggaaatctagcctattgcccaggcctaggctcaccactgtccccaccacctcaagcagcacccccttccctccgttctgagctcactaagccttgttgaggagtggaagatggcagctgtgtgtgtccattggccactgcagctgcctcagtgtccacacctcacctcccacccgtagactccctccacctcttctaataagctccttgccctctggttttgattcggagctccagctactggct

SEQ ID NO: 42631 - DNA, 1731 bp, Homo sapiens
cccatgtttcttccagccttgataaaaaaaattcctcaccccaccttccccttgccttttagaatactctgcacgacacaggcccgtgagactcagccagtgttcaaacagctcatgccagaggctgctctgggcaccaggaagcaagaaacttataaggcaccaaccctggctttgaggagcccccaatttaatgagaagttggagcagtaaagaaatgttacagtccatgtaggaagtgctatgatagaagcagctggagcaccttaccgagctcaggagaccggggggrtgggggggcttgcccagagggcacagcattgcaagcagggcaatgacccagttctaagacagactcgtcacatggcaagcagagtcggtcagactttggacaagtttattgacttctttggaacctcagttttctcatttgacaaaactagatggtcaagaagcgtctaggattattgggacacgtaaattacataattctgacacagcccccccaactctgggttcctggtatggggtaagtttttagtaaatgtgagatgctgtgattagtactgtgaatatgatggctatttcaacagaagaattataaagaaagggcttcaggaagggattgggagtgactcaagcaggcaaccatcaaagcactttgtgcaaagatcaggtccttttctgagcactgaaaatttgcctatttagagatgcggcaagctgaagtgacatttactccccgcggaaggacacaggaggcagacgagtggtgaagctcattatctggtgatgcagccgcagacgtaatggtcaaagaacaagacttccaggggctgccccaagttcgccacacacgcctcttgattagaaagaatagtccatgcaaaggtagggcattttacacagcactgcagacatgcagagaaggtgctcagaaaatatctgtcgaaagtctggttagaggagatgagaaggaatatctaagagaaaagcacaaagatttagcaaatacatggatcctcatttctcagcctccttacccccacccaaatcaatgggttggctttattatgtgctgctgctctccttctcctttcctgcattgcctctttctcttaaaattggctctggtgcaccccaatagctacaaacccttagatacccagagagcacgtcctcctccccagtagagccggaagcatctgtcccaaactgagcttcactgtgaaagagacattatttccactcatgagagctacaaggtatgtgaaatagtgaatttcatgtaaatatatgcacactcaagtgtataaaaaagaaattattctacaaagactgaagaggaacactcactgtcaaaagacatttttaattcttgagcatttgcagggaaaattgactttaagcttggctaaatcatgtagaaactgtgttttcttataaacatgggaaagaaacattcaagaagttttatcaaagaatgggaaatctagcctattgcccaggcctaggctcaccactgtccccaccacctcaagcagcacccccttccctccgttctgagctcactaagccttgttgaggagtggaagatggcagctgtgtgtgtccattggccactgcagctgcctcagtgtccacacctcacctcccacccgtagactccctccacctcttctaataagctccttgccctctggttttgattcggagctccagctactggct

SEQ ID NO: 42632 - DNA, 1731 bp, Homo sapiens
cccatgtttcttccagccttgataaaaaaaattcctcaccccaccttccccttgccttttagaatactctgcacgacacaggcccgtgagactcagccagtgttcaaacagctcatgccagaggctgctctgggcaccaggaagcaagaaacttataaggcaccaaccctggctttgaggagcccccaatttaatgagaagttggagcagtaaagaaatgttacagtccatgtaggaagtgctatgatagaagcagctggagcaccttaccgagctcaggagaccggggggatgggggggcttgcccagagggcacagcattgcaagcagggcaatgacccagttctaagacagactcgtcacatggcaagcagagtcggtcagactttggacaagtttattgacttctttggaacctcagttttctcatttgacaaaactagatggtcaagaagcrtctaggattattgggacacgtaaattacataattctgacacagcccccccaactctgggttcctggtatggggtaagtttttagtaaatgtgagatgctgtgattagtactgtgaatatgatggctatttcaacagaagaattataaagaaagggcttcaggaagggattgggagtgactcaagcaggcaaccatcaaagcactttgtgcaaagatcaggtccttttctgagcactgaaaatttgcctatttagagatgcggcaagctgaagtgacatttactccccgcggaaggacacaggaggcagacgagtggtgaagctcattatctggtgatgcagccgcagacgtaatggtcaaagaacaagacttccaggggctgccccaagttcgccacacacgcctcttgattagaaagaatagtccatgcaaaggtagggcattttacacagcactgcagacatgcagagaaggtgctcagaaaatatctgtcgaaagtctggttagaggagatgagaaggaatatctaagagaaaagcacaaagatttagcaaatacatggatcctcatttctcagcctccttacccccacccaaatcaatgggttggctttattatgtgctgctgctctccttctcctttcctgcattgcctctttctcttaaaattggctctggtgcaccccaatagctacaaacccttagatacccagagagcacgtcctcctccccagtagagccggaagcatctgtcccaaactgagcttcactgtgaaagagacattatttccactcatgagagctacaaggtatgtgaaatagtgaatttcatgtaaatatatgcacactcaagtgtataaaaaagaaattattctacaaagactgaagaggaacactcactgtcaaaagacatttttaattcttgagcatttgcagggaaaattgactttaagcttggctaaatcatgtagaaactgtgttttcttataaacatgggaaagaaacattcaagaagttttatcaaagaatgggaaatctagcctattgcccaggcctaggctcaccactgtccccaccacctcaagcagcacccccttccctccgttctgagctcactaagccttgttgaggagtggaagatggcagctgtgtgtgtccattggccactgcagctgcctcagtgtccacacctcacctcccacccgtagactccctccacctcttctaataagctccttgccctctggttttgattcggagctccagctactggct

SEQ ID NO: 42633 - DNA, 1731 bp, Homo sapiens
cccatgtttcttccagccttgataaaaaaaattcctcaccccaccttccccttgccttttagaatactctgcacgacacaggcccgtgagactcagccagtgttcaaacagctcatgccagaggctgctctgggcaccaggaagcaagaaacttataaggcaccaaccctggctttgaggagcccccaatttaatgagaagttggagcagtaaagaaatgttacagtccatgtaggaagtgctatgatagaagcagctggagcaccttaccgagctcaggagaccggggggatgggggggcttgcccagagggcacagcattgcaagcagggcaatgacccagttctaagacagactcgtcacatggcaagcagagtcggtcagactttggacaagtttattgacttctttggaacctcagttttctcatttgacaaaactagatggtcaagaagcgtctaggattattgggacacgtaaattacataattctgacacagcccccccaactctgggttcctggtatggggtaagtttttagtaaatgtgagatgctgtgattagtactgtgaatatgatggctatttcaacagaagaattataaagaaagggcttcaggaagggattgggagtgactcaagcaggcaaccatcaaagcactttgtgcaaagatcaggtccttttctgagcactgaaaatttgcctatttagagatgcggcaagctgaagtgacatttactccccgcggaaggacacaggaggcagacgagtggtgaagctcattatctggtgatgcagccgcagacgtaatggtcaaagaacaagacttccaggggctgccccaagttcgccacacacgcctcttgattagaaagaatagtccatgcaaaggtagggcattttacacagcactgcagacatgcagagaaggtgctcagaaaatatctgtcgaaagtctggttagaggagatgagaaggaatatctaagagaaaagcacaaagatttagcaaatacatggatcctcatttctcagcctccttacccccacccaaatcaatgggttggctttrttatgtgctgctgctctccttctcctttcctgcattgcctctttctcttaaaattggctctggtgcaccccaatagctacaaacccttagatacccagagagcacgtcctcctccccagtagagccggaagcatctgtcccaaactgagcttcactgtgaaagagacattatttccactcatgagagctacaaggtatgtgaaatagtgaatttcatgtaaatatatgcacactcaagtgtataaaaaagaaattattctacaaagactgaagaggaacactcactgtcaaaagacatttttaattcttgagcatttgcagggaaaattgactttaagcttggctaaatcatgtagaaactgtgttttcttataaacatgggaaagaaacattcaagaagttttatcaaagaatgggaaatctagcctattgcccaggcctaggctcaccactgtccccaccacctcaagcagcacccccttccctccgttctgagctcactaagccttgttgaggagtggaagatggcagctgtgtgtgtccattggccactgcagctgcctcagtgtccacacctcacctcccacccgtagactccctccacctcttctaataagctccttgccctctggttttgattcggagctccagctactggct

SEQ ID NO: 42634 - DNA, 416 bp, Homo sapiens
ccttgttattcagaaaattaagtgcatcctatgtgactccacaaggagaatattctggggagtttgtatctgatttcccttgttgattttgctttctaccttttcagtctaccatatcttagccatgaatgtgactacctgctgaaccccatgaatccttctatccaatcgttgaacctgggagagctctgacaaaggctagcatgggaaaataygttgtcttcctcattaacagacccttcttagttatatctcactttctaagttcctgccttccacttcctaggagagaaaaaactacacagcattacctgaacatcatcccagggtaatcacagaacagccatctccgcaaaagaaggaaaaatgaactgtgtaatgttgcaatatttttaactgcaaataattttgcatac

SEQ ID NO: 42635 - DNA, 416 bp, Homo sapiens
ccttgttattcagaaaattaagtgcatcctatgtgactccacaaggagaatattctggggagtttgtatctgatttcccttgttgattttgctttctaccttttcagtctaccatatcttagccatgaatgtgactacctgctgaaccccatgaatccttctatccaatcgttgaacctgggagagctctgacaaaggctagcatgggaaaatacgttgtcttcctcattaacagacccttcttagttatatctcactttctaagttcctgccttccacttcctaggagagaaaaaactacacagcattacctgaacatcatcccagggtaatcacagarcagccatctccgcaaaagaaggaaaaatgaactgtgtaatgttgcaatatttttaactgcaaataattttgcatac

SEQ ID NO: 42636 - DNA, 670 bp, Homo sapiens
ctgtaacctcaaactcctgggctcaagcgatccttccacctgtgcctcctaaagtgctgggattacaggtatgagccactgtgcctggttaagtcctttagctccccttgctatttccattgtgccatgggagtgtaacgaagcctgaaatctaatttttaccccctgatagagccttcagccttttgcctcttttttcctcctgcctttygcttctccgtaacatacatgatgcttcagcctcatcctttgtagcttttattctgtcctgccttcctccacattcataaatcacaacacattttgttacttaatgatgtgggctagatgatttaattaccctacattttctatcctgttgaccatcctggctgaatttttgaaatttaataatttgaagccacacagaatgcagttatagatactaggcttcctcattacttgaatctcctcaattagctcctctcatgtccagtgttcttcttgtttgtttatactgtaaagccctgattatctgaaactcctttatgcagaaactctgttatctgaaataaggttgtattactggatgtgttttatttactttgaaaactgtctggctcacctgaacctttgcttatctgatttaattcaatgcttacctggattcttcagatcagcagggccttgg

SEQ ID NO: 42637 - DNA, 670 bp, Homo sapiens
ctgtaacctcaaactcctgggctcaagcgatccttccacctgtgcctcctaaagtgctgggattacaggtatgagccactgtgcctggttaagtcctttagctccccttgctatttccattgtgccatgggagtgtaacgaagcctgaaatctaatttttaccccctgatagagccttcagccttttgcctcttttttcctcctgcctttcgcttctccgtaacatacatgatgcttcagcctcatcctttgtagcttttattctgtcctgccttcctccacattcataaatcacaacacattttgttacttaatgatgtgggctagatgatttaattaccctacattttctatcctgttgaccatcctggctgaatttttgaaatttaataatttgaagccacacagaatgcagttatagatactaggcttcctcattacttgaatctcctcaattagytcctctcatgtccagtgttcttcttgtttgtttatactgtaaagccctgattatctgaaactcctttatgcagaaactctgttatctgaaataaggttgtattactggatgtgttttatttactttgaaaactgtctggctcacctgaacctttgcttatctgatttaattcaatgcttacctggattcttcagatcagcagggccttgg

SEQ ID NO: 42638 - DNA, 521 bp, Homo sapiens
attatgcaaacatattaaattaataggaaaattctctatgaggagggagggggaaagaaaaattggcctttggggcccaagcaggtatcccccttgctgtggtaccctagcccaaaccagtgcttgggacccaagaggaagagtttcctccagtggaaaagtatgagcccaggaagtcrtgaggccagtataaggttttgtaggtggtagtggttgcggcacagttgcaaggcgagtggtctaagtgaatggtggggagcacattgtgtcaggcattgttggtcagagcatcaaaagggctaagaaggatgatgtacagaggagggggaagcagcctgaactctatgtgagtcacctatttccccatccaccagggccttccaaagagagataggaaagtagaagggatgagaaggctatcattcagtgagtggggtcattgatttggcagactataggtcacagtattacagtgacctaagccaagattttcaaatgttgaacctacaggaaattcaggc

SEQ ID NO: 42639 - DNA, 521 bp, Homo sapiens
attatgcaaacatattaaattaataggaaaattctctatgaggagggagggggaaagaaaaattggcctttggggcccaagcaggtatcccccttgctgtggtaccctagcccaaaccagtgcttgggacccaagaggaagagtttcctccagtggaaaagtatgagcccaggaagtcgtgaggccagtataaggttttgtaggtggtagtggttgcggcacagttgcaaggcgagtggtctaagtgaatggtggggagcacattgtgtcaggcattgttggtcagagcatcaaaagggctaagaaggatgakgtacagaggagggggaagcagcctgaactctatgtgagtcacctatttccccatccaccagggccttccaaagagagataggaaagtagaagggatgagaaggctatcattcagtgagtggggtcattgatttggcagactataggtcacagtattacagtgacctaagccaagattttcaaatgttgaacctacaggaaattcaggc

SEQ ID NO: 42640 - DNA, 521 bp, Homo sapiens
attatgcaaacatattaaattaataggaaaattctctatgaggagggagggggaaagaaaaattggcctttggggcccaagcaggtatcccccttgctgtggtaccctagcccaaaccagtgcttgggacccaagaggaagagtttcctccagtggaaaagtatgagcccaggaagtcgtgaggccagtataaggttttgtaggtggtagtggttgcggcacagttgcaaggcgagtggtctaagtgaatggtggggagcacattgtgtcaggcattgttggtcagagcatcaaaagggctaagaaggatgatgtacagaggagggggaagcagcctgaactctatgtgagtcacctatttccccatccaccagggccttccaaagagagataggaaagtagaagggatgagaaggctatcattcagtgagtggggtcattgatttggcagactataggtcacagtattacagtgacctaagccargattttcaaatgttgaacctacaggaaattcaggc

SEQ ID NO: 42641 - DNA, 521 bp, Homo sapiens
attatgcaaacatattaaattaataggaaaattctctatgaggagggagggggaaagaaaaattggcctttggggcccaagcaggtatcccccttgctgtggtaccctagcccaaaccagtgcttgggacccaagaggaagagtttcctccagtggaaaagtatgagcccaggaagtcgtgaggccagtataaggttttgtaggtggtagtggttgcggcacagttgcaaggcgagtggtctaagtgaatggtggggagcacattgtgtcaggcattgttggtcagagcatcaaaagggctaagaaggatgatgtacagaggagggggaagcagcctgaactctatgtgagtcacctatttccccatccaccagggccttccaaagagagataggaaagtagaagggatgagaaggctatcattcagtgagtggggtcattgatttggcagactataggtcacagtattacagtgacctaagccaagatttkcaaatgttgaacctacaggaaattcaggc

SEQ ID NO: 42642 - DNA, 1095 bp, Homo sapiens
tgtctctggctcagttgagctccagtgttagctttagttttgctgtggtggttgcctggttctaaacagacagtggaatctgctttcacgtacaaatttggasggccagataaggttttaagcaccctttaaaatacccagaagaaggtataggagctgcctaatgcatctgaagctatcaagtcttacaacaacccctgctgactacttgtgatggttaattttatgtgtcgactgggtcgcagggtgcccagattaaacatgatttctgggtgtgtctgggtgagtgtttccttatgaggttagcgtttgaattcgaatttgtagactcagtaaagtagattgctatccccagtgtggatgggcatcatccaatctgttgagggcctgagtagaacaaaaagcagaggaagggaggattaattcccttcctgcctgccagtgtgagctgagacatgagtcttctcccattcttggtctgggatttacaccattgtctcccttgttctcaggcctttagaactggactggaattgtactttcctgggtctccagcttgcagatggcagattgtggaacttctcagcctgcataatcgtgtgagtcaattcttcataatctgtctctctctttttctctttctgctgccccccataagccctctcttctatgagcctgccaaatacaccactgtatctggaatccaacttctataggtgggctgaatatttaaattccaaatggtattatttctccttgtgaaaaaaaggactttgatgagttttttttgttaaacttccggattttatcttaggcctcagccaagaacaccattgcatttagcaggaggacaccatgtctagcaaccattttgaactgcagtgaaggatattacaatgaagcttctgcttatttccttgagttcataatttaaggctacagagatatttttgaatcttaattctataatccagttatcacatagccctcctagttttatgtcacccaagaatgtggtaactattctcactcttgcttcataggaatcatttgataaagaattaataccaaacgcagttgaagatccttacagca

SEQ ID NO: 42643 - DNA, 1095 bp, Homo sapiens
tgtctctggctcagttgagctccagtgttagctttagttttgctgtggtggttgcctggttctaaacagacagtggaatctgctttcacgtacaaatttggacggccagataaggttttaagcaccctttaaaatacccagaagaaggtataggagctgcctaatgcatctgaagctatcaagtcttacaacaacccctgctgactacttgtgatggttaattttatgtgtcgactgggtcgcagggtgcccagattaaacatgatttctgggtgtgtctgggtgagtgtttccttatgaggttagcgtttgaattcgaatttgtagactcagtaaagtagattgctatccccagtgtggatgggcatcatccaatctgttgagggcctgagtagaacaaaaagcrgaggaagggaggattaattcccttcctgcctgccagtgtgagctgagacatgagtcttctcccattcttggtctgggatttacaccattgtctcccttgttctcaggcctttagaactggactggaattgtactttcctgggtctccagcttgcagatggcagattgtggaacttctcagcctgcataatcgtgtgagtcaattcttcataatctgtctctctctttttctctttctgctgccccccataagccctctcttctatgagcctgccaaatacaccactgtatctggaatccaacttctataggtgggctgaatatttaaattccaaatggtattatttctccttgtgaaaaaaaggactttgatgagttttttttgttaaacttccggattttatcttaggcctcagccaagaacaccattgcatttagcaggaggacaccatgtctagcaaccattttgaactgcagtgaaggatattacaatgaagcttctgcttatttccttgagttcataatttaaggctacagagatatttttgaatcttaattctataatccagttatcacatagccctcctagttttatgtcacccaagaatgtggtaactattctcactcttgcttcataggaatcatttgataaagaattaataccaaacgcagttgaagatccttacagca

SEQ ID NO: 42644 - DNA, 1095 bp, Homo sapiens
tgtctctggctcagttgagctccagtgttagctttagttttgctgtggtggttgcctggttctaaacagacagtggaatctgctttcacgtacaaatttggacggccagataaggttttaagcaccctttaaaatacccagaagaaggtataggagctgcctaatgcatctgaagctatcaagtcttacaacaacccctgctgactacttgtgatggttaattttatgtgtcgactgggtcgcagggtgcccagattaaacatgatttctgggtgtgtctgggtgagtgtttccttatgaggttagcgtttgaattcgaatttgtagactcagtaaagtagattgctatccccagtgtggatgggcatcatccaatctgttgagggcctgagtagaacaaaaagcagaggaagggaggattaattcccttcctgcctgccagtgtgagctgagacatgagtcttctcccattcttggtctgggatttacaccattgtctcccttgttctcaggcctttagaactggactggaattgtactttcctgggtctccagcttgcagatggcagattgtggaacttctcagcctgcataatcgtgtgagtcaattcttcataatctgtctctctctttttctctttctgctgccccccataagccctctcttckatgagcctgccaaatacaccactgtatctggaatccaacttctataggtgggctgaatatttaaattccaaatggtattatttctccttgtgaaaaaaaggactttgatgagttttttttgttaaacttccggattttatcttaggcctcagccaagaacaccattgcatttagcaggaggacaccatgtctagcaaccattttgaactgcagtgaaggatattacaatgaagcttctgcttatttccttgagttcataatttaaggctacagagatatttttgaatcttaattctataatccagttatcacatagccctcctagttttatgtcacccaagaatgtggtaactattctcactcttgcttcataggaatcatttgataaagaattaataccaaacgcagttgaagatccttacagca

SEQ ID NO: 42645 - DNA, 764 bp, Homo sapiens
tatcattagaatctttaatttctgaattcatttagattcattcaagatagctgtatggaaagcttaaaatgtaaaatgttttaagtcccgaaaactgcatctttagaagatttgtgctctatcctcattttatccttttacattgaatgaaaatgcatctaaatacgtcccatgtggtattcctgagcctgaccttaacgtttttagaatggarcgttgtcttactgtgaccttccttttgaaagtttataattggtacagatatgaggttcagaataaattgcatcagcttagctatgctgaagctcctggatattgtccaatagaggatatacacccaaatgcctataaggggccaggcgcggtggctcatgcctgtaatcccaacactttgagaggcccagggcgggtggatcacttaaggtcaggagtttgagaccagcctggccaacatggtgaaaccccatctccactaaaaatagaaaagttagccagctgtggtggcacccacctgtaatcccagctactctggaggctgaggcaggagaatcacttgaacccaggaggtggaggttgcagtgagccaagatcatgccactgcactccatcctgggcgacagaacgagactcgtctcaaaaaagaaaaaaaaaaaaggcctataagggctgggccaacaacataaaaacataaaagagtaaaagaggccaggtgaaagaaaaatagtgaatagtagagactggtgacctggaatgaatttgcccca

SEQ ID NO: 42646 - DNA, 927 bp, Homo sapiens
ttaagaaggtatcaagtgtggcacctgcagtattaggtcagcacgtgtatcctggagtgtgggttcaaaccctgactccaccaataacttctggtgtgacttttggaaaattactaatctctctgagccttgaccttggctcacagagattagtaatttataaagttcacactaacaataacactaatctcattggcctkttctgaaaatgcaaatgaaacaatctttggaaagtgtttaatacagtatctgacataaaccaaaaactcaataaatcttagctattatcattgagtttaggcagggttctgtgaaacgtggcctctagtagcaaagtaagaatagcttgcaagccttgaatacttaaaatagttggtcattctcactgtggtcactagaagttgcttctgctttggactcataaatgcttctggcaccttttttttttttttttttttttttgggacagggtcccgctctgtcgcccaggctggagtgcagtggtgcaatctcggctcactgcaagctccacctcccaggttcatgccattctcctgcctcagcctcctgagtagctgggactacaggcgcccaccaccatgcctggctaattttttgtactttttaggagagacagggtttcaccatgttagccaggatggtctccatctcctgacctcgtgatccacctgcctcagcctcccaaagtgctggggttacgggtgggagataccgtgcctggcacttctggtatctttttttttttttttcctttttaaaaatttttattttataaatagggacaggatctcactatgtcacctaggctgatctcaaactcctgccctcaagcaatcctcccgccttggcctcccaaagtgctgagattacaggtgtgagccactgtgaccagcctggtctcttaag

SEQ ID NO: 42647 - DNA, 573 bp, Homo sapiens
ctcctcctttgtctgcctgaagaatttatccttgtgttggattcccaccctacccacactctcatagtatctggggatttgataaagacacttgtcagtcgggcacagtggccaatgcctgtaatcccagcactttgggagtctgaggyaggcagatcacttaatcctaggagtttgaaaccagactgggcaacatggtgagactgtacaaaaaatgcaaaaattagcttgacatggtggcacatgcctgtagtcgcagctactggaaaggctgaggtgggaggatcgcttgaacccaggaagctgaggctacagtgagccctgagcatgccactgcactccatcctgggtgacagagtgagaccctgtctcaaggagaaaaaaaaaacaaaaacaaagacaaaaaaaaacacttgtcacactgagaagtgtggtttactcatgtgtctgcctcacagggcccctgagaacaaagacctacccccagtgcctggtacagagcctgcctgagaggagacccgtacatactgttgagtggtgtggcagggaaaccaaccaaaggctgtctgggaa

SEQ ID NO: 42648 - DNA, 1130 bp, Homo sapiens
agccaaaggaaaagtgtttccaacttctaagacctcagacaaggctgggcacagtggctcacgcctgtaatcccagcactttgggaggccatggcgggcagattgcctgagctcaggagttcgagaccagcctgggcaacacggtgaaaccctgtctctactgaaatacaaaaaattagccaggcatggtggtgtgtgcctgtagtcgcagctacttgggaggctgaggcaggagaatcgcttgaacctggaagrtggaggttgcagtgagctgagattgcaccactacactccagcctgggcaacagagcaagactccatctcaaaaaaaaaaaaaaaaaaaaaactgaaaaaacaaaactcaggcaagaattgctctgtgctcttgatgtggcccccacacattcccttcataacctggaatccctgctgtagtgtttcctcttacctggagcacctaaaagatgagggagagtcagaagtggtatgtgttagtctgttctcatgctgtcaataaagacatacctgcaactggataatttataaaggaaagaggtttaatggactcacagttccacatggctggggaggcctcacaatcatggcaggaggtgaaggagaagcaaaggcgtgtcttacatgacagcaagcaggagagcctgtgcaggggaactgctctttataagaccatcagatctcgtgagactttactatcacaagaacagcacgggaaaaacctgcccccatgattcagttacctcccgccgggtccctcccaccacacatggggattatgggagctacaattcaagatgaaatttgcttgtggacacagccaaaccatatcgtggtagaactttacaattggaattagaaaaacaaacacttcagctccaacatgtaaagagcttgaaagttatcagtcatatccaaaaagcaagaaaaaggctaaacaaaatgaaagtcagtggttttagaaccatcagagaattgaggccatggggcaagccttcactctaaaatctggacaagcatgcaagtatagtgagtcacagccagatcagtttacctgctggagccctaacacttgcatgggaattttgaaaaatggctgaggctaagtgtgggcc

SEQ ID NO: 42649 - DNA, 1130 bp, Homo sapiens
agccaaaggaaaagtgtttccaacttctaagacctcagacaaggctgggcacagtggctcacgcctgtaatcccagcactttgggaggccatggcgggcagattgcctgagctcaggagttcgagaccagcctgggcaacacggtgaaaccctgtctctactgaaatacaaaaaattagccaggcatggtggtgtgtgcctgtagtcgcagctacttgggaggctgaggcaggagaatcgcttgaacctggaaggtggaggttgcagtgagctgagattgcaccactacactccagcctgggcaacagagcaagactccatctcaaaaaaaaaaaaaaaaaaaaaactgaaaaaacaaaactcaggcaagaattgctctgtgctcttgatgtggcccccacacattcccttcataacctggaatccctgctgtagtgtttcctcttacctggagcacctaaaagatgagggagagtcagaagtggtatgtgttagtctgttctcatgctgtcaataaagacatacctgcaactggataattyataaaggaaagaggtttaatggactcacagttccacatggctggggaggcctcacaatcatggcaggaggtgaaggagaagcaaaggcgtgtcttacatgacagcaagcaggagagcctgtgcaggggaactgctctttataagaccatcagatctcgtgagactttactatcacaagaacagcacgggaaaaacctgcccccatgattcagttacctcccgccgggtccctcccaccacacatggggattatgggagctacaattcaagatgaaatttgcttgtggacacagccaaaccatatcgtggtagaactttacaattggaattagaaaaacaaacacttcagctccaacatgtaaagagcttgaaagttatcagtcatatccaaaaagcaagaaaaaggctaaacaaaatgaaagtcagtggttttagaaccatcagagaattgaggccatggggcaagccttcactctaaaatctggacaagcatgcaagtatagtgagtcacagccagatcagtttacctgctggagccctaacacttgcatgggaattttgaaaaatggctgaggctaagtgtgggcc

SEQ ID NO: 42650 - DNA, 564 bp, Homo sapiens
gcattaaggtaataatagttatgtagtagctcatttttaagctagcttagaacatattttgtttytgtgagtgacttaaaaatgcattattttatttcaacatattattaatattggatttttaaatagatatttataatgcaaatgagaacaataacatgaaattgtacacaataaatttctttttttctttgaacccaatttgttgtccatccccctttttatctccttaaaaattctatcctagaacttaacaaatatgtcacttcaactatccaataccaactagaacgttttcagttgctaagaaactaaaataaaagatcctcctggatttttcctagataaacttcactagttgacctgtgtcttcttttccttaattatgtttggtagagagtttgagtatttatttttattatctgaggacatagattataccactgaaatgcttaaactttcaataacaagctattattacaaaaattgaaataattagaatacaaccacatgcttaaaagtcaagattacagaccattcccagagtgggtcataaaagcctca

SEQ ID NO: 42651 - DNA, 564 bp, Homo sapiens
gcattaaggtaataatagttatgtagtagctcatttttaagctagcttagaacatattttgtttctgtgagtgacttaaaaatgcattattttatttcaacatattattaatattggatttttaaatagatatttataatgcaaatgagaacaataacatgaaattgtacacaataaatttctttttttctttgaacccaatttgttgtccatccccctttttatctccttaaaaattctatcctagaacttaacaaatatgtcacttcaactatccaataccaactagaacgttttcagttgctaagaaactaaaataaaagatcctcctggatttttcctagataaacttcactagttgacctgtgtcttcttttccttaattatgtttggtagagagtttgagtatttatttttattatctgaggacatagattataccactgaaatgcttaaactttcaataacaagctattattacaaaaattgaaataattagaatacaaccacatgcttaaaagtcaagattacaraccattcccagagtgggtcataaaagcctca

SEQ ID NO: 42652 - DNA, 588 bp, Homo sapiens
tatgtatctctcttttcttgaagaggccaaagagctaaaagccatattcccaggctcctttcatggtacacactggatatgactaggttctgccattccaatgcaatcacatgagactggaagccaaagtgagacagatagcatccttctgagatatcttttgtctttgctggagacactgtcagaaaggcctttgatttctcttctaaacgtgagtgttgtactagtgtctagtaaacttggtaggtattgagaagcagggcacagggaagccactggtaggtgtattaggctgttattgcattcctataaatacctgaaactgggtagtttataaagaaaagaggtttaattagctgatgtttctgcaggatgtacaggaagcatagtggcttctgttcctgtggaggcctcaggaaacatgctatcatggtggaaggcaaagggggagcaaagtgtctcacatggtgggagcaggagcaagagagagaggagggaggtgctacacacttttaaacaaccagatgttgccagaactcacccwctatcatgagagcagcaccaatgggatggtgctaaaccactcat

SEQ ID NO: 42653 - DNA, 540 bp, Homo sapiens
ttcttttttttttttggagatgaagtctcgctctgtcacccaggctggagtgcagtggctcgatctcagctcactgcaacttccacctcctgggttcaagcaattctcctgcctcagcttcccgagtagctgggattacaggcatgtgccaccacgcctggctagttttttttttttttcttttagcagagatggggtttcactgtgttgcccagggtggtctcgaactcctaaccttgagacctgcccgccttggcctcccaaagtgctgggattacaggcgtgagcccctgcgtgctgggattacaggcgtragccaccgcgcccggccctagctattccaattctatccaaagaactggcccactactgttgatttaaaggcctgcctgtgccccacccctggtccaaacccatctgccgctccctactgcccttcctgccacactcttcaatacttttctccactttccagctcagatctttattcttgtcacatcgacttggaaagcttcctcccagtttcctctctgctaatgg

SEQ ID NO: 42654 - DNA, 865 bp, Homo sapiens
ttatattaataattattggtagccatagcaacattgtgtccaatgtgctctttgtgtttctgtgagttctaatcatttaaattactgcggagtgcaagttgactcctgatatccattcttcccttcctccattgtaatagaatatcaaatatttagctggcatatgactgcccagaacaactttatttgccatctctctgcagttgagtgtggctacaggctgagatctagccaaagggaaccaagtcaagaatgtaggcaacayacaatatcctaaagacagcattaaagagacaaggaatgcccttctttccttctcattgccttctgctggaatacaatggccagaccaatagcactatcttaaaacattagataatattggaaattaaatttactcacaatacaggagaaagccagaaggagactgagtctctcatactataatgcattgtatcgccttgaaataaaaaaaaaaaagaaatacctacccctagacttcacataagcaacagatattcttctatctaattgaagtgacagtgacttgacattttccaccatacatatacagtcaaaattaatccaaactaacatagctttttgttatataataacctgagttaaacccattttttaatctcaatgtttaagtgaggaatactggcacagttatatcaagggaatactgctttgaaagcacagagtaaatccttttatttttgagaagtcagcatgtatacctgggatgtccccaagggtcccaatcctgtatgtgtatccttgaagggatctgtttctcatcagtctttgtgtggttcttatcactattaatcttaggtctcctaaattacagatgcacatg

SEQ ID NO: 42655 - DNA, 865 bp, Homo sapiens
ttatattaataattattggtagccatagcaacattgtgtccaatgtgctctttgtgtttctgtgagttctaatcatttaaattactgcggagtgcaagttgactcctgatatccattcttcccttcctccattgtaatagaatatcaaatatttagctggcatatgactgcccagaacaactttatttgccatctctctgcagttgagtgtggctacaggctgagatctagccaaagggaaccaagtcaagaatgtaggcaacatacaatatcctaaagacagcattaaagagacaaggaatgcccttctttccttctcattgccttctgctggaatacaatggccagaccaatagcactatcttaaaacattagataatattggaaattaaatttactcacaatacaggagaaagccagaaggagmctgagtctctcatactataatgcattgtatcgccttgaaataaaaaaaaaaaagaaatacctacccctagacttcacataagcaacagatattcttctatctaattgaagtgacagtgacttgacattttccaccatacatatacagtcaaaattaatccaaactaacatagctttttgttatataataacctgagttaaacccattttttaatctcaatgtttaagtgaggaatactggcacagttatatcaagggaatactgctttgaaagcacagagtaaatccttttatttttgagaagtcagcatgtatacctgggatgtccccaagggtcccaatcctgtatgtgtatccttgaagggatctgtttctcatcagtctttgtgtggttcttatcactattaatcttaggtctcctaaattacagatgcacatg

SEQ ID NO: 42656 - DNA, 865 bp, Homo sapiens
ttatattaataattattggtagccatagcaacattgtgtccaatgtgctctttgtgtttctgtgagttctaatcatttaaattactgcggagtgcaagttgactcctgatatccattcttcccttcctccattgtaatagaatatcaaatatttagctggcatatgactgcccagaacaactttatttgccatctctctgcagttgagtgtggctacaggctgagatctagccaaagggaaccaagtcaagaatgtaggcaacatacaatatcctaaagacagcattaaagagacaaggaatgcccttctttccttctcattgccttctgctggaatacaatggccagaccaatagcactatcttaaaacattagataatattggaaattaaatttactcacaatacaggagaaagccagaaggagactgagtctctcatactataatgcattgtatcgccttgaaatwaaaaaaaaaaagaaatacctacccctagacttcacataagcaacagatattcttctatctaattgaagtgacagtgacttgacattttccaccatacatatacagtcaaaattaatccaaactaacatagctttttgttatataataacctgagttaaacccattttttaatctcaatgtttaagtgaggaatactggcacagttatatcaagggaatactgctttgaaagcacagagtaaatccttttatttttgagaagtcagcatgtatacctgggatgtccccaagggtcccaatcctgtatgtgtatccttgaagggatctgtttctcatcagtctttgtgtggttcttatcactattaatcttaggtctcctaaattacagatgcacatg

SEQ ID NO: 42657 - DNA, 715 bp, Homo sapiens
cagacacatgttactgccccagcctgaggccatcaaagaaaacatctcaaagattctcttttaccaaaaagattcatgtcagattttcagactaaggcccttggtactaatgaattttgagttggagtggtagccttggcaaaataatgatgrcaattcaatttaggcctcctaatatgtggatgttcctggaggtggaggaagaaaacttggacacaactggaatgtgtgttagacagcagaaatagaggccatgaccagcttaggccctaggttcctgagatacaataattcttctgaaatggtgtccttttactctgtcttcctagaagaactcagctctacaagttttaaaacattgctgggaagaatgatctccattttaaattctggatacacggagctcaagatggcaacaaatccaacactaaagaaaccgatactccttaggcacttactttatgcctaacattgctatgtgtgattcacatgttatctccattaatccccataattacagggacacactagtatgacccccactttataggtgaagaaattgaggctcagaaaatggttaagccacttactcaaggttgcccagcaagtgatggagtcaagatgaaaataggcaacccgattccatagcccacatgctccatggccctggtgctccatgctctgtgcacagactggctgaggcagagctgcaaca

SEQ ID NO: 42658 - DNA, 547 bp, Homo sapiens
agaaaaaatttactctatcgaaagcattgaacagatacagagtcaggttaagaaatgagaatttggccttagaaatctagtagcttaaaatatagtcacattttaaattgtaaagtaccatgtttaaaagttattttgatgagtgtagtatagttttcatttcacagaaaccttaggttgactcagatttttttctttttaaaattattatactttaagttctggagtacatgtgcagaatgtgcaggtttgttacataggcgtacatgtgccatggtggtttgatgcacccatcaacccgtcatttacaccaggtatttctcctaatgctctccctcccctagccctgcacccccacgacaggccccatcgtgtgatrctcccctgcctgtgtccatgtgttctcattgttcagctcccacttatgagtgagaacatgcagtgtttggttttctgttcttgtgctagtttgctgagaatggtggtttccagcttcatccatgtccctgcaaaagtcaagaactcatccttttttatggctgcattg

SEQ ID NO: 42659 - DNA, 1074 bp, Homo sapiens
gcctgatggctgcatcaccatgaaaaggttattcctatcccgacacagatgacrtttgctggacaggagagctcctcctgatcagagcagagacataacgccaagtctgcctctgtgaccttgctaacttccgtcactaatcatctacttccttttctcattgacatgatttttcttactaaatattaattcaacatacttcataatagctttttgacatgctaatatagccagttgcatattgtacttcctgtttctggaccctagcaacatttatatttgtcatgtttttgcatctgtctaaactcattattatgtttttattttacaaataattaccagaaacttaagagtaccttgttttcactgttgtctacactagaattataaaaacaatttctgaagtcaggaaagtaaataatccgtattaggaaaagttcctttctaaataatattttttaatgtaaatgctttagaacttgtaacagagacccagcttgaatctatcatgtattcatctcaaatttaatgtatttgtacattgcaaaagtactggtggggcaggctcaccaggaatctttttaattatgatcaaactcttcctaggatagagctcatccaaaaaaagagtcaatgtcctcttgaagcttggaagagagaagtaaatgagagtatagcatggggactgtcattcagactctcctccagcccacactcatgacaggttgtgccaggggagccaaaacactttcttctctgaagcctgcatgggacctttagagtttatcagcaacattggtactagcagtggctgggtgatggtggcagcagctttgtgcacattgtcaccatgggtagtaatagcttcaatgttcaggtgtcaagggcacagaagtcatgccctcactgccagtcatcaagtaacttacattaagtatctcatcatggacattggcagttgtggttttgtgggtggacactggtaatgcagctgcacttggcatctgtgggaaccagggttattattatagctatccaggagaggagatgtttttgaagttacataacacatcc

SEQ ID NO: 42660 - DNA, 576 bp, Homo sapiens
gcctcccccgccgggactggggctgcggcgctgcgcttcaggggccgggggcgaggttgggaggctccccgggcgggaatccaccttgcggtaaggacttttaaaagcgcggggcaggacattgggtcagtaaagagttttaagcggaaaggagtctcgaaaatccgtgtttacctggcccaaggcagaacgagcggggacaggacccgtcgccgagcgattttaacacacagggaagcgagcgccggactctcacggagacgcctgaatttacacggggtggagggagcggtgcggggatttcaaggtctgtgttgactctcagatcccgggtacagaagcgcgggggagctgggaagcccagaytgaatctaaacaaagggaaactgacgcgctgcggtgtgaccttctacccacgcgatccgcttccgggtctgcaaaaaactgcgcgcgcgcagcatagagagcggaccgggacgggacggggcggggcttccctaggccacgcctccagtgcctctgttttccgggttttgctggcagtgaggctggagcagctcagccctctgcaaactg

SEQ ID NO: 42661 - DNA, 546 bp, Homo sapiens
aataggaaagcaggaaagaatgagtgctaagatagaaagctcttctgatgtgttctattttctctgtaaaataggcactgaatacagtttgaggctaggaactcaaaacatgtgtgttccgtttgtgaatcagtgaattctgctgrtattgggcagcagggcgaatttaagggttggaggagagttgaatgttctaaacagacactgaagaatgagaataagcaaggataagtttgtattgagggctcagctgaagtatgaagccatgaatttataatggactgcctacacagcctatggtttctcttcaaggattcattcaaggagaaggtatgccagctgagtgtgatgaagaagaataatgcaagagagttgagaatggtggtgagagagcagttgatggggaagaccatggcctgggttcttcctcactccttaaaaatcactaacatgtctttcttctggtttccttctcaaataattttgtggtcttatttcttttttcttccagccctgaaacactcagggattcaccctcactcttcc

SEQ ID NO: 42662 - DNA, 1154 bp, Homo sapiens
ccaatagtgatatttatttttatttatttaatttatttattcatttattttgagacagagtttcgctctgttgcccaggctgaaatgtagtggcgcaatctttgctcactgcaacctccgcctcctgggttcaagcaattctcctgcctcagccccctgagtagctgggattacaggcatgtgccaccatgcctggctaattttgtatttttagtagagatggggtttctccatgttggtcaggctggtctcgaactcctgacctcaggcgatccgtctgtctcagcttcccaaagtgctgggattacaggcgtgagcctccgcgcctggcatwtatttatttatttatttatttatttatttatttatttagagatggagtttcgctctgttgcccaggctggagtgcagtggggtgacctcagctcactgcaacctctgcctcctgggttcaagcgattctcagcgattcattccttagcctcctgagtagctgggactacaggtgtgtgccaccacacctggctaatttttgtatttctttttttaatagtagagacagggtttcaccatgttggctaggctggtcttgaatgtctgacctcaagtgatcatcctgcctcagcttcccaaagtgctgggattacaggtgtgagccactgcatctggccccagtagtgatatttaaatgccttgatatgtaaaggtttgagcttccaaatggagatcacgattattgtaaaagtgaccacttttctgaccatgcccgatgaaaaagatgttagcatatattctaaacgccattaagtgtcttaaaaagaacataaatgtcttctggagggatatattgatgtttttagtaattctcatattgccactttcttagagatcattatttcgacctagaaaatatcttttttttttttttttttttttgagatagggtctggctctgttgtctaggctggagtgcagtggcacaatctcagctcactgcagcctccacctcctgggatcagttgatccgccagccttagcctcctgagtagctaggactacaggtatgcaccaccgtgcctggctaatttttgcatttttcgtagagacaggattttgccatgttgcccaggctggtctcgaactcctgggctcaa

SEQ ID NO: 42663 - DNA, 584 bp, Homo sapiens
gagaacaaaagtttgctatcagttagtcaagaaatttaaaamatttctacgtctgtaaagcactgagttgagacctttaatcattcccacaagagaaagaagaaaggttagaaaataaattgtaaagataaaggagacaggaaataaacaattcacagaaagttcatggcctttctcttggatcatttgcttttttcccaacctgccagggtgcccttcagctctatctgcccagcctcctctccagggcacctaccaggctctgtcttctataaccactggaacttctggctttgctctgtgcagagagctgcatccccagcaatggggcaggacttggaaatcaatggatgagcaagcctgcacgggctgctgtcaaatctgggcttgaaataagtgcttttgacaaaagtccacccttaaatgtcactgacctttcaaatgacagcttttatgtcgtattatgtaggaagggccctaactctgaaaatccaggtttttgctgagatgcagtttctcttcttcctcacctgtgaataacatcagctgaaggaaatgaatacatttttaagttttggaattta

SEQ ID NO: 42664 - DNA, 397 bp, Homo sapiens
  misc_feature (1)...(397): n = A,T,C or G
tnnnnnnnnnnnnnnnnnnnnnnnnnnnnnnnnnnnnnnnnnnnnnnnnnnnnnnnnnnnnnnnnnnnnnnnnnnnnnnnnnnnnnnnnnnnnnnnnnnnncagatgatccacccgccttggcctcccaaagtgctgggattacaggtgtgagccatggcccctggtctccatntgattcctgaccacttcaagttcattctcacgtctggttcattgcacttgctatttcttttgccagcttctctcttctcagtccctcatcaggcaggttccttatcctcactcagaytgcagacgaattcttcttgcagcactgagctctttcaaaaaattgtcttggccaggtgcagtggctcatgcctgtaatctcagcactgtgggaggctgaagcagga

SEQ ID NO: 42665 - DNA, 717 bp, Homo sapiens
gggtgtggtggtgcacacctgcaatcccaactactcaggggactgaggcaggagaatcacttgaaactgggaggtggaggttgcagtgagctgagattgtgccactgcactctagcttgggcgacagagtgagactctgtttcaaaaataaataaataaataaataagaaagataagcttttggctgggcactgtgtctcatgtctgtaatcccagactttgggtggctgaggcaggaggatcacttgaggccaggagttcgagaccagcctcgccaacacagggaaaccccgtctctaccaaaaaatataaaaattagccaggcgtggtggcgggcgcctgtaatcccagctactcaggaggctgaggcaaragaatcacttgaacccaggaggcagaggttgcagtgagtggagatcacgccctgcactccagcctgggtgacagaatgagaccctgtctcaaaaataaataaatgaatgaatgaataaataaataaataaataaataagcaagcttttaaatcaagcccatgaacactgtagaaaaaaaaaaaaaaagaaaagaaaacattcccttgtttgcagtctctgttgactcctttatttcctgccttctccactacaatgtagcctctcctaaccctgtgttccccaatccctggcagggtgcccgacacagggttgacgtccggcaaatatttgttagatgaaggaa

SEQ ID NO: 42666 - DNA, 717 bp, Homo sapiens
gggtgtggtggtgcacacctgcaatcccaactactcaggggactgaggcaggagaatcacttgaaactgggaggtggaggttgcagtgagctgagattgtgccactgcactctagcttgggcgacagagtgagactctgtttcaaaaataaataaataaataaataagaaagataagcttttggctgggcactgtgtctcatgtctgtaatcccagactttgggtggctgaggcaggaggatcacttgaggccaggagttcgagaccagcctcgccaacacagggaaaccccgtctctaccaaaaaatataaaaattagccaggcgtggtggcgggcgcctgtaatcccagctactcaggaggctgaggcaaaagaatcacttgaacccaggaggcagaggttgcagtgagtggagatcacgccctgcactccagcctgggtgacagaatgagaccctgtctcaaaaataaataaatgaatgaatgaataaataaataaataaataaataagcaagcttttaaatcaagcccatgaacactgtagaaaaaaaaaraaaaagaaaagaaaacattcccttgtttgcagtctctgttgactcctttatttcctgccttctccactacaatgtagcctctcctaaccctgtgttccccaatccctggcagggtgcccgacacagggttgacgtccggcaaatatttgttagatgaaggaa

SEQ ID NO: 42667 - DNA, 174 bp, Homo sapiens
ggttatttccatctccaagtcayttttcttctcttttcacctttttctttagcccgtatgttctaactctgcttcttcagtgtgtacacatatgtttctccttgctcgctctccatttagctttttaacacagtccagaggcaatatttgatagtaattaagaatgcatacttt

SEQ ID NO: 42668 - DNA, 640 bp, Homo sapiens
tgcataatactaaatatggtagggacacccaccaattcaaagttccttgacttaatgagtgacctgtaaacaaatggatgtcttcaacattgaactaagcatcagacctatgcctaatggcacactggactcataaaaaaatcatgtatcctctctactattcacatggaagacaaacatcctacaaaattagttacatataatattatgaaattgtatttattttatttaaatatatatttgtgcacatgggtttatgtgactgtatgcctctctatgtatatcactatatctttctaaaaatatataattttagttgtatatatccatrttaatctattcattgaaaaattatttttaaaatatacatcaagcattaataatggttactgtttaagagtaaatctcaagtcacattctatgttttatatgtctacatttttataataaattttaaatgtggataatatgaggaaggatggaaataagaaaaaaattgaggctgtattcataatcttaaattacatatttcaaattttagatttgaaaatattagaaatttagatgttcactttcatccatgaaaataatatagcagagaatattaacctttcttgtagatgatttttcaccacgctag

SEQ ID NO: 42669 - DNA, 466 bp, Homo sapiens
tgagtaggcaactgccagctccagtttggatgctctacagataaatcccctccttttgctttgataatgaatggttttcaattggtaggtgttttactagatccctaacacagtactgtggaagatcttgccagtaaactgagagacgagggctatattatcatatgctaacatttttgggacaaraggaaatgaaaactgagagatagtataaatgttgaggttgaagacaaatttcactttaattttcttcagatgatcctttaatataaataataaataaataaagatactggttcttctctataattgcttctactattatattttgggagtttgtatatgtgtgggttgtagggagggagcattcactctggttattctatatgcttggagtagtttctagtgtttaaagcctccgagaagtaaaatgagaacagtttgatttaagaaggtaccagtttta

SEQ ID NO: 42670 - DNA, 584 bp, Homo sapiens
attgaccattttcatttcccttcctatgtattgcccagtcacrtcctttctgcatatttctattgggtaagtttttttccttatcagttccaagagctccttatatattacagatattaactcagaaatcaagaatgttgcagatattttccccaatctgttcttgtgttttaacttttattactttttatttatttatttatttgagacaaggtcttgctctgttgcccaggctggagtgcagtggcccaatcacgaactcctgggctcagacaattctcccacttctgcctccatgcctggctaatttataaattttttttgtaaagacagggtctccctaggttgccctggcttctcttggcgtcctcaagtgatcctcccaccttggcctggcaaagtgttgggattacagtcatgagtcactgcacctggccatgttttaactttttatagtcaagcttgtcttttctcttctggattctagatttcctgttatgcataagcaataccccccacccatgccatgctccaatcttgaaattatacacattttctcctaaatttattccatttttttattt

SEQ ID NO: 42671 - DNA, 577 bp, Homo sapiens
atagtggagagaaaaataacatcaatttagaattgtgacattgtttcacccagtgaaacaattcctaggggacctgggagaaaataaatgcattttctgmcaaacaaaaacctaagtcatttgccaataaactctgaatggaggaaattcctcagaatatgtttttggaggaacagagaatacctcagctggaaagctcaaaacacaagaaggaatgtcaacaaaaatatggaaaatatataggtaaatctaagaaaaagtatgacttgcataaaacaataatattgataatgactgatttgtgaggtataaaccatatgttaaaactaagattcaggacaaaaacattatataaattgggaggagcatgattagaatgaaagaatccttcaggttttatttaagatggagggtgtggtaagtggtgtgcaaacaggctcccctggctccaatgagccacacatcctgtcacttacgcctttgtgtagtctgttctcacaaagaatcatggctcgccttatgcagccaatggaaagcagcagaagtgagactctatttgacttcaagtctaagtcat

SEQ ID NO: 42672 - DNA, 576 bp, Homo sapiens
gaaatatctatttatgtcctttgctcagtttttaactgggttgttatcttttgtttcttataatgaatgaggtatgctacacttattttaggtctgtttaagattttatctataaaatatgggatagttagaatgaactgaaatgtaaaagaaatgtgggaagctgatttcttctttcgttagctgtatttgacacctagaaatgtgaaaaaaaatttcctgtatatgtgaattccagaagctcctcttggttatttgttcttttatttattattattattattttttttwtttttttgagaccgagttttgctcttgtcatccaggctagagtgcaatggtgaaccttggctcactgcaacctctgcttcctggattcaagcaattctcctgcctctcgagcagctgggattacagggatgtgccactatgcccggctaattttgtatttttagtagagatgaggtgtctccatgttggtcaggctggtcttgaactcctgacctcaggtgatccacccgcctgggcctcgtatcaagacagttaagtcttgaatgtatttgcacagtttaagtt

SEQ ID NO: 42673 - DNA, 563 bp, Homo sapiens
cagaagaacaggagaacatgctaatgaggcataaacaacagaagcccaatatagtaaacttctttaaaagaaggaaaattaagaaatgaaggaagttccagatttccaggctgaggttgaggaatatgaccccctctttccagtactagtcatgacgtatgacattgaagaaactgtctgggtgcagtggtccaggcctgtagtcccagcaatttgggaggctgaggcaggcagatcacttgagcccagaagttcaagaccagcctgggcaatgttgtgaaaccccatctctacaaaaaatacaaaaattagctgggcatggtggtgtgcatctgtagtcccagctacttgagaaactgaggccggagaatcacttgagcctgggaggttgggtgacagagtgagaccctgtctcaaaaaaaagaaaagaaaagaaaagaaactgaaggaactaaaaccaaaggcttgaaagagtttaatgtccaccartaaaaactactttttatattccaaggaaactaagaccttaaactaaaacttatagaagggaaaatatttgaagc

SEQ ID NO: 42674 - DNA, 434 bp, Homo sapiens
tttttttwaattacaccttaagttctagggtacatgtgcacaacgtgcaggtttgatacataggtatacatgtgccatgttggtttgttgcacccattaactcatcatttaccttaggtatttctcctaatgctatacctcccccatccccccaccacctgacaggccccggtgtgtgatgttccccaccctgtgtccaagtgttctcattgttcaattcccatctatgagggagaacatgcagtgtttggttttctgtctttgtgatagtttgctgagaatgatggttggatgaaactggaaaccatcattctcagcaaatgaaaatttttttaatctttaagttcacctttgaaacaaagcagttgatcggtttcagttatttcatttcctctcccctttcctgtctggcttcccttttccttccccaccct

SEQ ID NO: 42675 - DNA, 572 bp, Homo sapiens
tttgttaaaagaatgtttgctttttggtgtcttcaggtattttcaaatagaatgaataaaaccattgtgtgctggtctcctagtccttcatctcatttccctccatactccatgactcaattagtttctggggttgggattaagtgcaccttatgctaattagaactataggttttactccttaaataactcccattggcctagctttgattctttaatgtaacaaagatagatgtgggaaaaaagtgacctatcaaaatatataactcagaaagctttttgggataaacatatttaatacaggatttctcagttatatattctttttttacttagataaaacccccaagggaaaaataggtatctaatgatatatcctccattcaaaactgtgtattgctattgagaagttttatgtactattttaaataataattattaataaacatatacaagcaatgccaaataataaaaaatgtctgtctttttcctgtggrgatactcagctcatgccaatttggttccctaaacaactagaactggagaaagctgtgctgtgacgtttgaaatcg

SEQ ID NO: 42676 - DNA, 620 bp, Homo sapiens
ctctaagaaaagtacttctgatttaagtataacttttcacaaacttaagttttatcctgattttaataatgctaaaatgtgaaaaataaaaagccaccttaaagttgttgaaatatagtactgcttttattttattaagagtgctgctggcttggaggtaaagcttaaatattatttttggaaggctgtttcaggttgacacagacatttcctgcrgggaatgagaggtcagagactatatccctcccattagcacattagagagagaaatgtcagaatattagacttaatttggcagggtccttgggatttctgcctctgtttctttgtcttcctatatttagttgctgtcaatgagttttggtatgtacaaatagatttaagaacatacatcagtgtctcatatattcattattattttgttaatatagtatttctttaattctaaatttatttaaattaagcagtgaatttgaaaccaaccccctataattcttgtagattgctgtactaaaatgtatttctagaaacctggttatcaaacaaaacaaccaaatactctgttcttaacatttcatcgtcttccaaaacgacactttcttagcaacttcaaagtggca

SEQ ID NO: 42677 - DNA, 514 bp, Homo sapiens
ctcaaatttggccaggtgcgatggctcacgcctctaatcccagcacttcgggaggctgaggtgggcggatcacctgatgtcaggagttcaaaaccagcctggccaacatggcaaaaccctgtctctactaaaaaatacaaaaattagctgggcatggtggcgggcacctgtaatcacagctactcgggaggctgaggcaggagaattgcttgaacaggggaggtggaggttgcagtgagccaagatcttgccactgcactccagcctgggccacagagcaggactcagtctcggagagaaaaaaaaaaaaaaaaatctcgaattctggaatacaagtttcttgaaggtaggaataaagtatgcttatgtatagattcatataatcatagtgytacagtaactttaaatatgatacctttatgatttttcatttgaccatgtaagctgtccatgttttcccagctaattaattgaaagacagtctgttgaatactgcagctgttattaagtttga

SEQ ID NO: 42678 - DNA, 562 bp, Homo sapiens
cttatggtaaaataatatacatttatattttttgaatgaatgatggaatagttaataatggtatctatatttctttcccttaaaagcatttattatgaaatctaagagttgtattattagaatgcaatcttttacatgtatctgtttttgcaaatgtttacatttgtaaggacataatatatatatataaattttcaaagttaattttaaacactaaatatttttattactttttttaaaatccccagattgattttccaatcttatacactttaactttatttaaaatgtgatctcgataggtccagtcacaacgacccctcagccagattgcctgggtttgaatctctgtttttctatttaaaaacttatgtgactttcggcaagttaattaacctccccatgtctcagtttactcatgtgtgacatggagggggtaaaaataattwaaaaatattcaaagaaatggctctgaaaatgaaatagaaaattatgttttaaaatttgtgggaaagaaacaataagacttataatttttctttggaaaacaaaggaaataaaa

SEQ ID NO: 42679 - DNA, 795 bp, Homo sapiens
tcgcaccactggcgaacccgcctggctgggcgacagagcgaaagagtgagactgtctcaaaaaaaaaaaaaaaaaaaaaaaaggaaggagggatggaagtaaggaaaaaaaaaagctccgggaggattctgatgcgagcccctgtcaggatgaaggcgggagggagaagccctaaccatcccagggcttcctgtgactcgggtgaagcagtgcctcctggtggtgagaaggcagaactactggtataaactggtcgtaacgtgcagactgggtgtgaatgtggggccaggacaatgtgtgtcgtggaggttgactagtggggaagctaggcaagcctcttggcagtcaggcccacgaacgtttggattataccacaaacccctttgtcagtcyagtgaactctctggagtctcaggataaaggcgtaaattacatgggattacaaagctaaccaatcatagtgaaatacaatgattgaaatacttgataaagccaaatttggtatagcgtgtagatatgacagtagtagtatgtcacagtagatagcagtaatgtgccaatgggagtattagcacattaagtaatatccaataacaactggtctaataactataacttaaaaagtagtgaggagaattcatgatattttgcaacaactccaacatataaaaaatctgcaatttatattgttaaaagaatcatacgtactactagaacaaacaacaaaaacctcccaaagaccaggcatgatggctcacacctgtggtcccagcactttgggaggccgaggcagga

SEQ ID NO: 42680 - DNA, 581 bp, Homo sapiens
gaaggatctgccaaccaaggcaaatttcagagctagacaagaaaacttccttgttttcatgtgatattcattaccaagtatcacgagttgatcttcagtctcacccgctttcttgcaatttctccaatgcaccaaacacagggcctttgcacttactaacccttctgcctgaaaagccgtccccctcatccttctgtaggtttctcctcaatgactcattgcgtatagcaaggactctgtaaatatttgtcgcatgaatgaatgagtcccgcctagttattttcttatgcacagatctgataacctctagctggaggtagtgtatcctataaccaagggcagcatcttgttcatccttgcatcctcctacacccccyggcccagggaccagttacaagggcaggtgtagggctgggttggcaattaggtgacacaatcaatgggaagcactgcatggatgctatgatcagaaagacctgggggcctgtctaggtttagcattattgatttgcgatgtgtgccaagggcaggggtggggtgcaaaagtgcagtcctcatggccaccacaccagctagccaag

SEQ ID NO: 42681 - DNA, 529 bp, Homo sapiens
aagtaggtttgctctcaataatrtatgaagccccatgctggggagagggatccttggaaaagcggctccgcggcaatctgttctttcatctggagccagcgttcaagcaaaggtgctgccccaaatcagaagcacaattgctcacttgtgagcagatgtccttcacgcggcgggcagtgctctttcaacacagagctgaacaaatgcgtgctgtgagacaggctcccctccccattacccaaagaacacagtatacattaatttagtatgttgtggaataacgtttgaaaggggagttggtgcagtagaaaaatcacgcagtgaggcaaaataactttccaaccaaacgggaggaagaaagagagtttggttcctatggaagttgagggggaaagagtctgaaatatcttcaacctcaaaagaaacccaaaacagggttccttagggagtcaaaaggacctcactgggcaggcccaacacagagccaaaatcgaacatcaaccacccaaaagatcattttcaatgaaca

SEQ ID NO: 42682 - DNA, 1799 bp, Homo sapiens
ttctgagcccttgaaatccagacctagacatcaaagtcaaggaaagtcagagagattcaaagcaggaggggactccatgcacaagagagtttctgttgctggctttgagatgcagggggccaaaagtcaaggaatgtgggttgcctctgggarctgagggcagccaccagcagaagtcagtaggaaacaggggccctagtcttacaacttcaaggatctgaatcctgccagcatcctgaatgagcttggcagtggattcttccacagagcatgcaggaaaggatgttcctccagcggacacctttattttgtccccaagagaccctgagcagagaagccagtcacattgtgtctaggcttctgatctagagaattgtagttaataaacaagatgtgaatgtgaactgctaagtgtgtggtcatttgttacacagcaatagcaaaagaaaaaaaaattctgcagcatgcaacaatcccagctttcaaataaaattttctcctgttcatttctttggcattcacaatgaccatgccttcagagtataaaattcataacacaaaaactcaatcaccatagctgcttttttttaattgcttaagaactggtttcaaaatgatatgtatcactaacattattattattgtaacattattatcattaatttttttgagacagagtttcactcttgttgcctagactggagtataatggcgtgatctcagctcactgcaacctccacctcccaggttcaagggattctcctgcctcagcctcccaagtagctgggattacaggcatgcaccgccacacccggctaatttttgtatttttagtagagacgggggtttcaccatgttggccaggctggttttgaactcctgacctcaagtgatccacccacctcggcctcccaaagtgctgggattacaggcgtgagccaccgcacctggccactaatgttattcttgatggtaataatattctattctaaccagtaaatacagaccagcagctagtgtaattgtttttctctgccgtatcttactcaaaggcaagaaagaaagatttcagatccaaacagatttcagaatcaattccacaaaaggtacctgtttcagtagtactgacttattctgagctactagctggagaaaagccctactatgcatattttttgtatagaatattttctaatataatctcctgaactgcagagacgggagaaaaaaatggccttgtaaatttctcctaacaaccaaaagtacactaaaaaagacaacagcctttcaatgtcactaatttctctgaagcaatataacagcaaactccagagaccttggctagttcagacaaaatagaaaaacgtagattcaggagaagctggggagctaggctttctgcaacggattgtaagccaagtcataaattgaggtaaagtatgagatagaggggggaaggagggtggagcctgttgttttgtgcctgttcacttgaggtctgtaagatgaatgggctgagaattgtcctgtccatttctgcaatacattcacacgattaaagtcattagttagaactttctaccaggaagctattgtgagaagaatgtttcccttgaggaggaggattaaaaagaaaaagaaaagaaaatcctcccggaatacacaaaaatatatgcacaggaaaaatgaagccagtggccatttgctaatagtgttgctttaaaagcatacgcacttagagcctcttttttccagcacgtttaataagaaaccatattaacaaggtgatccaggcaatg

SEQ ID NO: 42683 - DNA, 1799 bp, Homo sapiens
ttctgagcccttgaaatccagacctagacatcaaagtcaaggaaagtcagagagattcaaagcaggaggggactccatgcacaagagagtttctgttgctggctttgagatgcagggggccaaaagtcaaggaatgtgggttgcctctgggagctgagggcagccaccagcagaagtcagtaggaaacaggggccctagtcttacaacttcaaggatctgaatcctgccagcatcctgaatgagcttggcagtggattcttccacagagcatgcaggaaaggatgttcctccagcggacacctttattttgtmcccaagagaccctgagcagagaagccagtcacattgtgtctaggcttctgatctagagaattgtagttaataaacaagatgtgaatgtgaactgctaagtgtgtggtcatttgttacacagcaatagcaaaagaaaaaaaaattctgcagcatgcaacaatcccagctttcaaataaaattttctcctgttcatttctttggcattcacaatgaccatgccttcagagtataaaattcataacacaaaaactcaatcaccatagctgcttttttttaattgcttaagaactggtttcaaaatgatatgtatcactaacattattattattgtaacattattatcattaatttttttgagacagagtttcactcttgttgcctagactggagtataatggcgtgatctcagctcactgcaacctccacctcccaggttcaagggattctcctgcctcagcctcccaagtagctgggattacaggcatgcaccgccacacccggctaatttttgtatttttagtagagacgggggtttcaccatgttggccaggctggttttgaactcctgacctcaagtgatccacccacctcggcctcccaaagtgctgggattacaggcgtgagccaccgcacctggccactaatgttattcttgatggtaataatattctattctaaccagtaaatacagaccagcagctagtgtaattgtttttctctgccgtatcttactcaaaggcaagaaagaaagatttcagatccaaacagatttcagaatcaattccacaaaaggtacctgtttcagtagtactgacttattctgagctactagctggagaaaagccctactatgcatattttttgtatagaatattttctaatataatctcctgaactgcagagacgggagaaaaaaatggccttgtaaatttctcctaacaaccaaaagtacactaaaaaagacaacagcctttcaatgtcactaatttctctgaagcaatataacagcaaactccagagaccttggctagttcagacaaaatagaaaaacgtagattcaggagaagctggggagctaggctttctgcaacggattgtaagccaagtcataaattgaggtaaagtatgagatagaggggggaaggagggtggagcctgttgttttgtgcctgttcacttgaggtctgtaagatgaatgggctgagaattgtcctgtccatttctgcaatacattcacacgattaaagtcattagttagaactttctaccaggaagctattgtgagaagaatgtttcccttgaggaggaggattaaaaagaaaaagaaaagaaaatcctcccggaatacacaaaaatatatgcacaggaaaaatgaagccagtggccatttgctaatagtgttgctttaaaagcatacgcacttagagcctcttttttccagcacgtttaataagaaaccatattaacaaggtgatccaggcaatg

SEQ ID NO: 42684 - DNA, 1799 bp, Homo sapiens
ttctgagcccttgaaatccagacctagacatcaaagtcaaggaaagtcagagagattcaaagcaggaggggactccatgcacaagagagtttctgttgctggctttgagatgcagggggccaaaagtcaaggaatgtgggttgcctctgggagctgagggcagccaccagcagaagtcagtaggaaacaggggccctagtcttacaacttcaaggatctgaatcctgccagcatcctgaatgagcttggcagtggattcttccacagagcatgcaggaaaggatgttcctccagcggacacctttattttgtccccaagagaccctgagcagagaagccagtcacattgtgtctaggcttctgatctagagaattgtagttaataaacaagatgtgaatgtgaactgctaagtgtgtggtcatttgttacacagcaatagcaaaagaaaaaaaaattctgcagcatgcaacaatcccagctttcaaataaaattttctcctgttcatttctttggcattcacaatgaccatgccttcagagtataaaattcataacacaaaaactcaatcaccatagctgcttttttttaattgcttaagaactggtttcaaaatgatatgtatcactaacattattattattgtaacattattatyattaatttttttgagacagagtttcactcttgttgcctagactggagtataatggcgtgatctcagctcactgcaacctccacctcccaggttcaagggattctcctgcctcagcctcccaagtagctgggattacaggcatgcaccgccacacccggctaatttttgtatttttagtagagacgggggtttcaccatgttggccaggctggttttgaactcctgacctcaagtgatccacccacctcggcctcccaaagtgctgggattacaggcgtgagccaccgcacctggccactaatgttattcttgatggtaataatattctattctaaccagtaaatacagaccagcagctagtgtaattgtttttctctgccgtatcttactcaaaggcaagaaagaaagatttcagatccaaacagatttcagaatcaattccacaaaaggtacctgtttcagtagtactgacttattctgagctactagctggagaaaagccctactatgcatattttttgtatagaatattttctaatataatctcctgaactgcagagacgggagaaaaaaatggccttgtaaatttctcctaacaaccaaaagtacactaaaaaagacaacagcctttcaatgtcactaatttctctgaagcaatataacagcaaactccagagaccttggctagttcagacaaaatagaaaaacgtagattcaggagaagctggggagctaggctttctgcaacggattgtaagccaagtcataaattgaggtaaagtatgagatagaggggggaaggagggtggagcctgttgttttgtgcctgttcacttgaggtctgtaagatgaatgggctgagaattgtcctgtccatttctgcaatacattcacacgattaaagtcattagttagaactttctaccaggaagctattgtgagaagaatgtttcccttgaggaggaggattaaaaagaaaaagaaaagaaaatcctcccggaatacacaaaaatatatgcacaggaaaaatgaagccagtggccatttgctaatagtgttgctttaaaagcatacgcacttagagcctcttttttccagcacgtttaataagaaaccatattaacaaggtgatccaggcaatg

SEQ ID NO: 42685 - DNA, 1799 bp, Homo sapiens
ttctgagcccttgaaatccagacctagacatcaaagtcaaggaaagtcagagagattcaaagcaggaggggactccatgcacaagagagtttctgttgctggctttgagatgcagggggccaaaagtcaaggaatgtgggttgcctctgggagctgagggcagccaccagcagaagtcagtaggaaacaggggccctagtcttacaacttcaaggatctgaatcctgccagcatcctgaatgagcttggcagtggattcttccacagagcatgcaggaaaggatgttcctccagcggacacctttattttgtccccaagagaccctgagcagagaagccagtcacattgtgtctaggcttctgatctagagaattgtagttaataaacaagatgtgaatgtgaactgctaagtgtgtggtcatttgttacacagcaatagcaaaagaaaaaaaaattctgcagcatgcaacaatcccagctttcaaataaaattttctcctgttcatttctttggcattcacaatgaccatgccttcagagtataaaattcataacacaaaaactcaatcaccatagctgcttttttttaattgcttaagaactggtttcaaaatgatatgtatcactaacattattattattgtaacattattatcattaatttttttgagacagagtttcactcttgttgcctagactggagtataatggcgtgatctcagctcactgcaacctccacctcccaggttcaagggattctcctgcctcagcctcccaagtagctgggattacaggcatgcaccgccacacccggctaatttttgtatttttagtagagacgggggtttcaccatgttggccaggctggttttgaactcctgacctcaagtgatccacccacctcggcctcccaaagtgctgggattacaggcgtgagccaccgcacctggccactaatgttattcttgatggtaataatattctattctaaccagtaaatacagaccagcagctagtgtaattgtttttctctgccgtrtcttactcaaaggcaagaaagaaagatttcagatccaaacagatttcagaatcaattccacaaaaggtacctgtttcagtagtactgacttattctgagctactagctggagaaaagccctactatgcatattttttgtatagaatattttctaatataatctcctgaactgcagagacgggagaaaaaaatggccttgtaaatttctcctaacaaccaaaagtacactaaaaaagacaacagcctttcaatgtcactaatttctctgaagcaatataacagcaaactccagagaccttggctagttcagacaaaatagaaaaacgtagattcaggagaagctggggagctaggctttctgcaacggattgtaagccaagtcataaattgaggtaaagtatgagatagaggggggaaggagggtggagcctgttgttttgtgcctgttcacttgaggtctgtaagatgaatgggctgagaattgtcctgtccatttctgcaatacattcacacgattaaagtcattagttagaactttctaccaggaagctattgtgagaagaatgtttcccttgaggaggaggattaaaaagaaaaagaaaagaaaatcctcccggaatacacaaaaatatatgcacaggaaaaatgaagccagtggccatttgctaatagtgttgctttaaaagcatacgcacttagagcctcttttttccagcacgtttaataagaaaccatattaacaaggtgatccaggcaatg

SEQ ID NO: 42686 - DNA, 739 bp, Homo sapiens
cattcaatgctaagtaaatacaattaattgcccaataatttaaagkgataaaatgggttttggtgaacacgtttaattctactcaacacatttttaaaatcagaaacactcaaaactcagtattatttttccctcaaacctcttacaaattgaattctggaaataaatatacttttaaaagtatattatcatcatagtgcatttctgcatgaacaatccataagagtaattgcttttataatgtgatccataaatgcaaatttacaggaaccagcaattgataatattaaatatcgggagtttcttctccatgtatatggctttttccttttctgtaatacaccattctgaggaaacaccacagggctgctatacttgatcacacaatctttatcattatttttccagcgttttaaaattaagtgcaagttgcattgctaagtttagaatcttggatggaataacttgtgtttgaagccagtgtctctaaaaccctttatttctgatgcccagcaagtttgatacaacttcttttcatatgtaaagtggatctatgagatgctatcttacccattcaacgcagaagaatgtgtaaacagaagtagctgggtattttagcagtaaacggataatgtcataaacagcatgttgtatttaatattcagatcaagacatctctgtctcattccagcagacccttctgacaaaagccatcccatgtctgccagaagtatcgagt

SEQ ID NO: 42687 - DNA, 739 bp, Homo sapiens
cattcaatgctaagtaaatacaattaattgcccaataatttaaagtgataaaatgggttttggtgaacacgtttaattctactcaacacatttttaaaatcagaaacactcaaaactcagtattatttttccctcaaacctcttacaaattgaattctggaaataaatatacttttaaaagtatattatcatcatagtgcatttctgcatgaacaatccataagagtaattgcttttataatgtgatccataaatgcaaatttacaggaaccagcaattgataatattaaatatcgggagtttyttctccatgtatatggctttttccttttctgtaatacaccattctgaggaaacaccacagggctgctatacttgatcacacaatctttatcattatttttccagcgttttaaaattaagtgcaagttgcattgctaagtttagaatcttggatggaataacttgtgtttgaagccagtgtctctaaaaccctttatttctgatgcccagcaagtttgatacaacttcttttcatatgtaaagtggatctatgagatgctatcttacccattcaacgcagaagaatgtgtaaacagaagtagctgggtattttagcagtaaacggataatgtcataaacagcatgttgtatttaatattcagatcaagacatctctgtctcattccagcagacccttctgacaaaagccatcccatgtctgccagaagtatcgagt

SEQ ID NO: 42688 - DNA, 739 bp, Homo sapiens
cattcaatgctaagtaaatacaattaattgcccaataatttaaagtgataaaatgggttttggtgaacacgtttaattctactcaacacatttttaaaatcagaaacactcaaaactcagtattatttttccctcaaacctcttacaaattgaattctggaaataaatatacttttaaaagtatattatcatcatagtgcatttctgcatgaacaatccataagagtaattgcttttataatgtgatccataaatgcaaatttacaggaaccagcaattgataatattaaatatcgggagtttcttctccatgtatatggctttttccttttctgtaatacaccattctgaggaaacaccacagggctgctatacttgatcacacaatctttatcattatttttccagcgttttaaaattaagtgcaagttgcattgytaagtttagaatcttggatggaataacttgtgtttgaagccagtgtctctaaaaccctttatttctgatgcccagcaagtttgatacaacttcttttcatatgtaaagtggatctatgagatgctatcttacccattcaacgcagaagaatgtgtaaacagaagtagctgggtattttagcagtaaacggataatgtcataaacagcatgttgtatttaatattcagatcaagacatctctgtctcattccagcagacccttctgacaaaagccatcccatgtctgccagaagtatcgagt

SEQ ID NO: 42689 - DNA, 559 bp, Homo sapiens
aagctccatattatccttagtacaatcatgctaacaagaaagaaagcagagagagttggtggagcacaattcagcaggggttctagaagggagtttccagtcaactgagaagctcccatgttcttaagtaatggtacctctacacttatgaatagagaagactgcaactctgatctggcttctgttcttgatcacaggagttttaaccagttccatttctgaacttggccagttcacctctccttaggcaacctggtagtccctggctcctgagaggtcaccatattgatgccaaacttagtgcggcacccgatgagcacagctcactacagcccagaactcctgggctcmagccctcctcccactttagcctcctgaatagctgggattccaggcatgccccaccacacacagcccaggttctgtttcttgcagagacaagtctaggattctaactcaacttcactttgcccaggactctaatacagcttcttacaaacagaaaaatcaagggctctacccacagcttctgaagtatactcacgatgttaagaataga

SEQ ID NO: 42690 - DNA, 1338 bp, Homo sapiens
cttattcacttaatttacattttccaaagttgtttttactctcattactttttaaaaatttttaatttttttgaattatattttaagttctgggatacatgtgctgaatgtgcaggtttgttagataggtatacgtgtgccatggtggtttgctgcatcctctcctcactacttttaatgtctgcatcattggttgtgatgttccctttttcattctattacttatttgtttcatttctcctttattttcttcgtcagtctcaaaaaaggtttatctttttttattagtcttttccccgaactaaatttgttgattaactttattgctgttactttgctgattatttcctattcttgatcattctctttctkatatgtattattagttttctagtgttgctgtaataagttactacaaatttagtagcttaaagtaacacaaatttattatcttacagtctgaaggttagaagaccaatacaggtcccactaggccaaaagcaaggtgtcagcagggctttgatccttttggaagttctaaggaaaaatctgtttccctcccctttccagcttctcgaagatctgtggcatccttactttattgtcagaatcagcaatggcaggtcaaatcctcacattgcatgttggtgatttcagtttctgcctcccccttccactggtaaagaaaccttgtgattacattcaacctgctcagacaatcccacataatttccctattttaagatcagcttgttagcatcttaactccatcttcaatcgtcattctctattgccatgtaaattaatgcattcgcagattctggtgattaagatggatttctttggggagccataattctgcctgccacctacttatttggtcttatttttttcttttactatctgtttgagataaaggtttaactcattagctttcagtgcttcacagaatctgaaaatgccatcaagtttataatctttccttaagtactacatgagctgcatcctcttttatttagaatacattataattcagaccaaatttttctttttttcctctaactcatggattacatagacatgtatttcttgatttataaatatggggcattttgctagtttcctttttgtaattgctattaattcatagtgataagaaaacatggtaatgcagtcattggaaagtgttccaagttgctagaaaatactggatattttgaacttattttgtgtggtgtttatgtacgtccattgtggaaagctatttaatcatgttgttaaaatattttgaatattttgttgttctaccaattactgaaaaagttgtcttttaaaaac

SEQ ID NO: 42691 - DNA, 1338 bp, Homo sapiens
cttattcacttaatttacattttccaaagttgtttttactctcattactttttaaaaatttttaatttttttgaattatattttaagttctgggatacatgtgctgaatgtgcaggtttgttagataggtatacgtgtgccatggtggtttgctgcatcctctcctcactacttttaatgtctgcatcattggttgtgatgttccctttttcattctattacttatttgtttcatttctcctttattttcttcgtcagtctcaaaaaaggtttatctttttttattagtcttttccccgaactaaatttgttgattaactttattgctgttactttgctgattatttcctattcttgatcattctctttctgatatgtattattagttttctagtgttgctgtaataagttactacaaatttagtagcttaaagtaacacaaatttattatcttacagtctgaaggttagaagaccaatacaggtcccactaggccaaaagcaaggtgtcagcagggctttgatccttttggaagttctaaggaaaaatctgtttccctcccctttccagcttctcgaagatctgtggcatccttactttattgtcagaatcagcaatggcaggtcaaatcctcacattgcatgttggtgatttcagtttctgcctcccccttccactggtaaagaaaccttgtgattacattcaacctgctcagacaatcccacataatttccctattttaagatcagcttgttagcatcttaactccatcttcaatcgtcattctctattgccatgtaaattaatgcattcgcagattctggtgattaagatggatttctttggggagccataattctgcctgccacctacttatttggtcttatttttttcttttactatctgtttgagataaaggtttaactcattagctttcagtgcttcacagaatctgaaaatgccatcaagtttataatctttccttaagtactacatgagctgcatcctcttttatttagaatacattataattcagaccaaatttttctttttttcctctaactcatggattacatagacatgtatttcttgatttataaatatggggcattttgctagtttcctttttgtaattgctattaattcayagtgataagaaaacatggtaatgcagtcattggaaagtgttccaagttgctagaaaatactggatattttgaacttattttgtgtggtgtttatgtacgtccattgtggaaagctatttaatcatgttgttaaaatattttgaatattttgttgttctaccaattactgaaaaagttgtcttttaaaaac

SEQ ID NO: 42692 - DNA, 1290 bp, Homo sapiens
ggtataaaaatgtggataataagtataactttttgcacaatgcaaaatttaaatatttagctgagtaagttggaagaggaaggtgggaggaaagttatgttagtacacagatttatctcttaacagatgagagttaaagacaaattgataaatcaaataaatgagctttacatatatttaacaataaaaatacatcttttaaaataacataatcttaaattgaatgaagaagcagaaggagggaaaattaaaaatgctaatttttatttttgctttaaaaaaagatgtaataggtgctgtaaaagcagtataggattctgatacacaaagttatggttacagaggtaaataggtaataacacttaaaactgctatagaacaaaaatgtgatgtggttgtaagtaaatgctttacttcatctaatcttcatttttaaaagaagaaaaaagtaaaccaaaaatgagcaaaaaaaaatttataatatgttatcatatttctagtttgcttagaaatactccaaggcatagaaggttaagtaagttgtacaaagtcacatagccaatgagagccaactaggtggcaaataagcagcatgtgaacagacattcttcctacaaagggtagagtttgtatttttcttttaaatattggaatatataaatgcaattcttgtctgtgttcaacttttagctttttattaaatataaacattttaatatacatgaacttaatattttgcctttctacttaatggatatgatctttctaatgcaattactctgtattttaaagtttctagtatacttcagatatgcacacttttaacacagtaaccttgtaatatttgaaattatggaaatgatactgtgcaaaaatgaatttaatctcaatttgaaattgatctttacaacaaaaatatttttggtaaaaaccaaaaatgtagtgacacagtgcgtttatatcaaaatcaatattcttaaccaataagctacactgtctttcataatacaaagcctcaagctgggctttgaatggcacatctataagcaattaatctggaaaaaataaataaataaatgaaatgataggctaagttttatgaggtagatgcaaacaaacaaaaaagtaagagatcatgatattaataccagacaagattaaatttagaaaaacaaaatcattaaacataatacacacattaatatggtgtaattaatttagctgattacttcattttgggaaatgcatttgccrgttttaaatgtgtctgctattaaaacttaaagtata

SEQ ID NO: 42693 - DNA, 639 bp, Homo sapiens
tttgaacagagaaaataatatttgcctcaaaggaactgtaaacaatttactgaggaaaatggtaattaatgatgttgaactcaagccagtaccttaaattatccagatgaaaaatgttctgaactcatcattgcctccatggttatcctgactttgcctcactatatacaacagatttgcacattctaagccatttttttccagggctagacctaaattacacatgtaaacttcctagttggccatgaacttctcatttatgcagaaacaactttgcagttatttgttacacaaacctattgagagcacactagcctgttggcttctgtgaacatttgctgaacagctgctctggctttaaattttggattttccaagtactgtttgaaataccaatggaaaaatgtagacggtacaaaaaagaatgactactagaataacattatttcttgaaatttrtatttttttcaattatgcattaagatgatggacaatcaatttagaaaacaaaatgaaagatatctagaaacatttgactttataaacttccaaaggtacaaaaagatgtgtatatgtgtaaaaatggtaaagttgtaacaattttaaacaaaaggattacaataacgtaatttaaagttt

SEQ ID NO: 42694 - DNA, 1107 bp, Homo sapiens
agccctttcctcactgtccccttcacctgacccaggaagaataacattctaaaggaagtccagctgttctatcaacataaaaatcgtggtgactttgacacaatacaagyttataacctgctcccatggaagtccagcgtggtgtggtgttcctggtcaggttgttcctggaaggctccctttcaacagcagctcacgcctcccaggggctcaggatgagctggcctgtgggcgctctccacccagtcctcagctggaaatgggaaacctgaggcttgcacggcaggacttctctggggagggccaggccaggacacggtcctcctgcccacattccttcagcctggctcagccccatgcccccacactgaagaccacactcaagtccagggcacatggagtctggccatgtgccaccacacacgtgatagactgagctcagccaactcgtgcagttcataacacagaaaccctcctctctcttctaccataaactgccaagcttgcctcatttccttccttcagaggatacgagacgtagatgtccacaggttactgtcatgttttctaccctagtccttgcctttcgaatgtctttgaagactcaccaagcaatataagatcaaaattcctgggtctcatcaataccagatcaccagccccggttttcagtccccaatcctaaaccgggctccgggagctggatgttccatctgtgccccgaggcgtccctgctctgacctctgccttggcaaaccagcacccagcattctggctcctggatgcctgtgaacgacaggaacctggcaggagaaaggagaaagaggatggggcaggtggcgggagcagatgtgccactggttggaaggccacctgtcctttcagtcaccctctgcactggaggggagtctgcccttgattttcctcctccaggccctcgggtgggaggacctctgcagcctgcagctccccccatgctgtgtcctgtgtttccacaggaccttctctcacctctgcaaacagccacctttttaaaccattgctgaattctccgagtttatgggtaccatcggatggattcctggtgagatgttgcctgggattcct

SEQ ID NO: 42695 - DNA, 1107 bp, Homo sapiens
agccctttcctcactgtccccttcacctgacccaggaagaataacattctaaaggaagtccagctgttctatcaacataaaaatcgtggtgactttgacacaatacaagcttataacctgctcccatggaagtccagcgtggtgtggtgttcctggtcaggttgttcctggaaggctccctttcaacagcagctcacgcctcccagggsctcaggatgagctggcctgtgggcgctctccacccagtcctcagctggaaatgggaaacctgaggcttgcacggcaggacttctctggggagggccaggccaggacacggtcctcctgcccacattccttcagcctggctcagccccatgcccccacactgaagaccacactcaagtccagggcacatggagtctggccatgtgccaccacacacgtgatagactgagctcagccaactcgtgcagttcataacacagaaaccctcctctctcttctaccataaactgccaagcttgcctcatttccttccttcagaggatacgagacgtagatgtccacaggttactgtcatgttttctaccctagtccttgcctttcgaatgtctttgaagactcaccaagcaatataagatcaaaattcctgggtctcatcaataccagatcaccagccccggttttcagtccccaatcctaaaccgggctccgggagctggatgttccatctgtgccccgaggcgtccctgctctgacctctgccttggcaaaccagcacccagcattctggctcctggatgcctgtgaacgacaggaacctggcaggagaaaggagaaagaggatggggcaggtggcgggagcagatgtgccactggttggaaggccacctgtcctttcagtcaccctctgcactggaggggagtctgcccttgattttcctcctccaggccctcgggtgggaggacctctgcagcctgcagctccccccatgctgtgtcctgtgtttccacaggaccttctctcacctctgcaaacagccacctttttaaaccattgctgaattctccgagtttatgggtaccatcggatggattcctggtgagatgttgcctgggattcct

SEQ ID NO: 42696 - DNA, 1107 bp, Homo sapiens
agccctttcctcactgtccccttcacctgacccaggaagaataacattctaaaggaagtccagctgttctatcaacataaaaatcgtggtgactttgacacaatacaagcttataacctgctcccatggaagtccagcgtggtgtggtgttcctggtcaggttgttcctggaaggctccctttcaacagcagctcacgcctcccaggggytcaggatgagctggcctgtgggcgctctccacccagtcctcagctggaaatgggaaacctgaggcttgcacggcaggacttctctggggagggccaggccaggacacggtcctcctgcccacattccttcagcctggctcagccccatgcccccacactgaagaccacactcaagtccagggcacatggagtctggccatgtgccaccacacacgtgatagactgagctcagccaactcgtgcagttcataacacagaaaccctcctctctcttctaccataaactgccaagcttgcctcatttccttccttcagaggatacgagacgtagatgtccacaggttactgtcatgttttctaccctagtccttgcctttcgaatgtctttgaagactcaccaagcaatataagatcaaaattcctgggtctcatcaataccagatcaccagccccggttttcagtccccaatcctaaaccgggctccgggagctggatgttccatctgtgccccgaggcgtccctgctctgacctctgccttggcaaaccagcacccagcattctggctcctggatgcctgtgaacgacaggaacctggcaggagaaaggagaaagaggatggggcaggtggcgggagcagatgtgccactggttggaaggccacctgtcctttcagtcaccctctgcactggaggggagtctgcccttgattttcctcctccaggccctcgggtgggaggacctctgcagcctgcagctccccccatgctgtgtcctgtgtttccacaggaccttctctcacctctgcaaacagccacctttttaaaccattgctgaattctccgagtttatgggtaccatcggatggattcctggtgagatgttgcctgggattcct

SEQ ID NO: 42697 - DNA, 1107 bp, Homo sapiens
agccctttcctcactgtccccttcacctgacccaggaagaataacattctaaaggaagtccagctgttctatcaacataaaaatcgtggtgactttgacacaatacaagcttataacctgctcccatggaagtccagcgtggtgtggtgttcctggtcaggttgttcctggaaggctccctttcaacagcagctcacgcctcccaggggcycaggatgagctggcctgtgggcgctctccacccagtcctcagctggaaatgggaaacctgaggcttgcacggcaggacttctctggggagggccaggccaggacacggtcctcctgcccacattccttcagcctggctcagccccatgcccccacactgaagaccacactcaagtccagggcacatggagtctggccatgtgccaccacacacgtgatagactgagctcagccaactcgtgcagttcataacacagaaaccctcctctctcttctaccataaactgccaagcttgcctcatttccttccttcagaggatacgagacgtagatgtccacaggttactgtcatgttttctaccctagtccttgcctttcgaatgtctttgaagactcaccaagcaatataagatcaaaattcctgggtctcatcaataccagatcaccagccccggttttcagtccccaatcctaaaccgggctccgggagctggatgttccatctgtgccccgaggcgtccctgctctgacctctgccttggcaaaccagcacccagcattctggctcctggatgcctgtgaacgacaggaacctggcaggagaaaggagaaagaggatggggcaggtggcgggagcagatgtgccactggttggaaggccacctgtcctttcagtcaccctctgcactggaggggagtctgcccttgattttcctcctccaggccctcgggtgggaggacctctgcagcctgcagctccccccatgctgtgtcctgtgtttccacaggaccttctctcacctctgcaaacagccacctttttaaaccattgctgaattctccgagtttatgggtaccatcggatggattcctggtgagatgttgcctgggattcct

SEQ ID NO: 42698 - DNA, 1107 bp, Homo sapiens
agccctttcctcactgtccccttcacctgacccaggaagaataacattctaaaggaagtccagctgttctatcaacataaaaatcgtggtgactttgacacaatacaagcttataacctgctcccatggaagtccagcgtggtgtggtgttcctggtcaggttgttcctggaaggctccctttcaacagcagctcacgcctcccaggggctcaggatgagctggcctgtgggcgctctccacccagtcctcagctggaaatgggaaacctgaggcttgcacggcaggacttctctggggagggccaggccaggacacggtcctcctgcccacattccttcagcctggctcagccccatgcccccacactgaagaccacactcaagtccagggcacatggagtctggccatgtgccaccacacacgtgatagactgagctcarccaactcgtgcagttcataacacagaaaccctcctctctcttctaccataaactgccaagcttgcctcatttccttccttcagaggatacgagacgtagatgtccacaggttactgtcatgttttctaccctagtccttgcctttcgaatgtctttgaagactcaccaagcaatataagatcaaaattcctgggtctcatcaataccagatcaccagccccggttttcagtccccaatcctaaaccgggctccgggagctggatgttccatctgtgccccgaggcgtccctgctctgacctctgccttggcaaaccagcacccagcattctggctcctggatgcctgtgaacgacaggaacctggcaggagaaaggagaaagaggatggggcaggtggcgggagcagatgtgccactggttggaaggccacctgtcctttcagtcaccctctgcactggaggggagtctgcccttgattttcctcctccaggccctcgggtgggaggacctctgcagcctgcagctccccccatgctgtgtcctgtgtttccacaggaccttctctcacctctgcaaacagccacctttttaaaccattgctgaattctccgagtttatgggtaccatcggatggattcctggtgagatgttgcctgggattcct

SEQ ID NO: 42699 - DNA, 491 bp, Homo sapiens
tcagcccctgcctgtgttccatggggcttctttggttttctttgtaaaaagacacaattagagtaaccccagagcttgattcccacctcacttcataaacacaacagggaaatgccggtgacacacaagcgttcctcaaaccaccttgtttttgagctctgcaatggaaacacaccacttccttccactgagkcaggcccacgcctcccggcgcggcaccgccccccagctgcctgtgccatcccagccagagcccagatcattctttccactaagacgcctgagtctcctggtggaacccaaccctttcaaagactgtgggttggtgtggggtttttttgctgttgttgtttggtttttggtttttcttaaattgcataagacactaaataggttaaatgaggttagtggggtgtgctcacctgcagtccacattcccagtgacaccccccagcaccccccactgaagagactcctctgtgtggctgttt

SEQ ID NO: 42700 - DNA, 651 bp, Homo sapiens
caggtccaccaggcgggcatgcaggtaggtgggcaggtcctgggcctgaggaagcaacaagaagtgtgagggacaggcacctgatatttccataaaaagtgtgactcagcactgagccaggacccctagcagacaagccgaggggcttcctgctaggtcacagctggactcaggagaagcagccgagctcagggcagagatggctgtgcacgctgggcagggtggcagctctgagatccccaccaggctggctgcccagttccctctcctagctttgtccctcagtcctcctgcccggccaccccgccccttctgttcaccacagcctccagccccacctaggcacttcctgaaagcccacagtgaccccagtattttcacatcaccagcacataggatgagcattgcttcatttggaaattgcagtgtcttctcctagaggagtggacacagtaagaccacatctagctttcagcatgactctcagagacccactctggccccaagcttcctgtgacactggtgacctggagtcatgggctctagagcttcacagaaacagcccatcatgggccggagacagagtgaccgccccctgtccccccacctcccagattccctagctgccccastgggggctcctccactctg

SEQ ID NO: 42701 - DNA, 776 bp, Homo sapiens
ataaaattagttttctagtagtaaaaagtaattaaactctttaaattattattacccctagtatactggggaatgagtgtgtgttccaaatgaaaaaaacttgggatgtctaatgagatgctgttttctgtcgcagaaaatctatgtaaaatgttttttctcacgtgtacactgttgatatttgagacagcacatgttaacacttcaagaagtaaaataaatgtgttgattatatccacagttttcatatttattaactatatattttgtttttaatgtaatgcctattgaaaaacctgtaaatagttgtttcttaaaattgataaatactgcctaagatttttctgtatattttcatatttcaattttcctgtgaggttagaatgaacacttttagctaagacatttgggcctccaaatcctaaacctttcagaatgttagtttattatttggyttttacctaaattattttctgcttattcaagatccttaggtctatccagttacgtttttatttttttatttttatttttttattttgaaacaaagtctcactctgttgccaaagctggagtgcattggcatgatctgggctcactgcaacctctgcctcccaggttcaagtgattctcctgcctcaacctcccgagtagctgggattacaggggcataccaccacacccagctaatttttgcatttttagtagagatggggtttcaccatgctggccaggctggtctcaaactcctgacttcaggtgatctgcccacctca

SEQ ID NO: 42702 - DNA, 542 bp, Homo sapiens
gaaaatcactatgcgctaagatttttatatacagatatttatcacaatatttataacaaggaaaaactggaaaccacctaaatgtccaacagtcaacttattaacaactcatatgacaaaccagcattcaccacgaacttattaacaactcatatgacaaaccagttttcgccatgagaagagtgttgacctaatcatatgggaaagtgcccagaaatcggcaggcaaaggaagctggacacgaaatacacacacacgacagaatcgtcatctgatgcttaaagctgtgcctccgtgcgctgtacacagaaggcaggcggccaatcatcacaatggcttcagtggttttccctacagaaagggttagtttctttcygtttttcttaatttttatagtgaacacatgttaatttcatatttaaaaacaggtttaaaaacatttatatatgcggccgggcgcggtggctcacacctgtaatcccagcactttgggaggccaaggtgggaggatcacttgaggtcaggagttcgagaccagcctg

SEQ ID NO: 42703 - DNA, 626 bp, Homo sapiens
tgattttttctttttttcttttttgagatggtgtctcgatctgtcatccaggctggagtgcaatggcacaatcttggctcaccgcaacctccacctcctgggctcaagcaattctcccacctcagcctcccgagtagctgggattacaggcgtcagccagcacacccggctaattttttgtataatagtagagatggggtttcaccatgtttgccaggctagtcttgaactcctgacctcaagtgatccaacacctcagcctcccaaagtgctgggattataggtgtgacccaccacgcccrgacctgattatatcttttgaaagtttctatttgccaatgagttctaggtacctggtgctgattttaaaatatgattcttaatttgttaaaaatttatctgctcccattttcattcgttaatacaaaacctaattcattaactctctcacctaaacaaataacctcctaaatgatcacaccttcatttccattctacacttgcctacattaacctttctgacattcacctccagccaagacaattccctgctcaaaaaaacaagtacctacaaactaaacttctttccccaactttcacagtcctctaacattacactgaccatc

SEQ ID NO: 42704 - DNA, 499 bp, Homo sapiens
taagccatctagtccgtggtaatttgttgggcagccataacaaactaatactaaagttgcttggccactttagtggccactgttgcttggccactgttagtcatgggaaactaggacagaaatccaaatctaagaaaccccagtctagtgcttatgctgattcatacatgcagcagtaaayccggggcatgtatattatgagaatcacagatattattccaagcagtcctgtagctaatgatgtgactgagtagcatgtcatttaaagtttccaattatgtttaccaatctgtaaaaatggctctgagatggaatacaggaatatgacgatccacatactaatattcacacaaaaaacggctcccgattttcaaactcccaagtcatatgacttccaaaacaatctattaaatttggatagagacttgtttttcaagacccacattctggagtatgattcagtgtgtcttaagaaaagaccacactcaactgtgatttc

SEQ ID NO: 42705 - DNA, 1702 bp, Homo sapiens
tattactttgtcgtatgattgggttcctgctgaatctcaccaaatcgcaccaaaagggtgacaaaacaacttcctgtaagcaaaggacaaacagttaagtaaggtaagtaaagggcaaaagacatgtgccaggggcaaggaattggggagggccaggggcatgtagggcactccagggcagaccccggatttaaaaatacatttttaaatttgtataaaaatttaatgtagttggaggaatagaaaaagcacaaggacctgagaaagggcctttgcaggcaaaatttattgaatttttaagctaaagagagtgagaaaaaaaaacctctaagcaatacaaacaaattaaggtactgtgtatgttagaatgttaagaagtgcaaaggatttggaaaacattgctgcagagcctgagaagcatttgcaggttgaggttacttgtgtctcagaatccattgtaaacaaaacataggaaagataacagagtcatggatctctatggctctgtgactttaggcaatttcaacctctcagatccttaatttccttattcacatgaagggttggataataatagttgatagattgataataataatacttgccttataaaattgttataagggttagaaatagttaatgcatgtgaaagacttagctcaacctggcatgtaatgaacattcgtcacatgttatctgttgtgaatgacaagaattagtgagaaaaatctcaaaattgcctttgtgattctggaactgaaacagagggcaggttttgacttagttctatggtgattaaaagctaaatgcttctacctttgtttaccatcaacagctatatctctttctcatttttttatctgtcaaaattcaatgaaaatatgcaagttcctttctcactgagtctttttttttttcctgtgtgtgtgtgcttagggaaacaatatatttacaagcatttgtctttctcctcaattacatacttaaacatttatcttttaaagaaacgaacagtaaacacacatacacacacacacacacatgcacacacactaatggcaatactcttggacaaatgatagttgctttttttttttttttttcatggaaagaaggaggtttagtttacagatgtttgaaccagcttaagctcccccaggtctcaacctctgtaagtcttctgttttcttcctctttaccttagagtcttttccaatgatacagttagacatattaactttattttttaaatccatgcctaattggtatgattgtaaaagcaacagtaattagttatttctttgaaggaggagattagaataaaaagttatttgtaaagggaatgaaaacaattgttttatcactgctattgttatttaggggtggtgaaatcraataaaattttgttcttggagaaagaatggagtctcttcagaagtgccaggaactttataggaattttaagaaagcctgacccaaattacttctagatctaaaatatttgttcttttctatgtaacattaaagtgaaagtgataaaatattgtaaaggctgacataataactgatgttcagagcagtaactgtaagtgacaaggagctgtggctcatggaaaataaaagcaaaacagctttcccaatgctctgatgatattgactaactagcaacgaggggtctcatgatatatttatgatattttct

SEQ ID NO: 42706 - DNA, 1702 bp, Homo sapiens
tattactttgtcgtatgattgggttcctgctgaatctcaccaaatcgcaccaaaagggtgacaaaacaacttcctgtaagcaaaggacaaacagttaagtaaggtaagtaaagggcaaaagacatgtgccaggggcaaggaattggggagggccaggggcatgtagggcactccagggcagaccccggatttaaaaatacatttttaaatttgtataaaaatttaatgtagttggaggaatagaaaaagcacaaggacctgagaaagggcctttgcaggcaaaatttattgaatttttaagctaaagagagtgagaaaaaaaaacctctaagcaatacaaacaaattaaggtactgtgtatgttagaatgttaagaagtgcaaaggatttggaaaacattgctgcagagcctgagaagcatttgcaggttgaggttacttgtgtctcagaatccattgtaaacaaaacataggaaagataacagagtcatggatctctatggctctgtgactttaggcaatttcaacctctcagatccttaatttccttattcacatgaagggttggataataatagttgatagattgataataataatacttgccttataaaattgttataagggttagaaatagttaatgcatgtgaaagacttagctcaacctggcatgtaatgaacattcgtcacatgttatctgttgtgaatgacaagaattagtgagaaaaatctcaaaattgcctttgtgattctggaactgaaacagagggcaggttttgacttagttctatggtgattaaaagctaaatgcttctacctttgtttaccatcaacagctatatctctttctcatttttttatctgtcaaaattcaatgaaaatatgcaagttcctttctcactgagtctttttttttttcctgtgtgtgtgtgcttagggaaacaatatatttacaagcatttgtctttctcctcaattacatacttaaacatttatcttttaaagaaacgaacagtaaacacacatacacacacacacacacatgcacacacactaatggcaatactcttggacaaatgatagttgctttttttttttttttttcatggaaagaaggaggtttagtttacagatgtttgaaccagcttaagctcccccaggtctcaacctctgtaagtcttctgttttcttcctctttaccttagagtcttttccaatgatacagttagacatattaactttattttttaaatccatgcctaattggtatgattgtaaaagcaacagtaattagttatttctttgaaggaggagattagaataaaaagttatttgtaaagggaatgaaaacaattgttttatcactgctattgttatttaggggtggtgaaatcaaataaaattttgttcttggagaaagaatggagtctcttcagaagtgccaggaactttataggaattttaagaaagcctgacccaaattacttctagatctaaaatatttgttcttttctatgtaacattaaagtgaaagtgataaaatattgtaaaggctgacataataactgatgttcagagcagtaactgtaagtgacraggagctgtggctcatggaaaataaaagcaaaacagctttcccaatgctctgatgatattgactaactagcaacgaggggtctcatgatatatttatgatattttct

SEQ ID NO: 42707 - DNA, 663 bp, Homo sapiens
caagataatttaccattcatgactcttactgaaatagttaataagggaagtagttcaaaacgaagaaaagcaaatcatcacagaagaaatggaatataggaaacaatgaaaagaacagaaattttcaaatatgctggcaaaaataataacagaatgtcatatgttttgaaaaatataaaaccagaggaaaaaaactaataaatagtttaggaactattatctgtctatatgcaaatagtttgaccaattgatgtttgacttttaattcgttattgtggctttttttttttttttttttttttgkgagttggcgtctcactcttgttgcccatgctggagtacagtggtgtgatctcagctcactgcaacttccgcctcccaggttcaagtgctgcctcccgagttcaagcgattctcctgcctcagcctcccaagtagctgggattacaggcacccaccaccacacccggctaatttttgtatttttagtagagacggggtttaaccatgttggccagacttgtcttgaactcctgacctcagatgatctgcccacctcggcctcccaaagtgctgggattacaggcgtgagccaccacacccggcctactgtgtttttgactacactaacactccacatttttgtagggtaaatctaccaac

SEQ ID NO: 42708 - DNA, 1264 bp, Homo sapiens
agtactttaaacaaggttgccagaggcagagaaacgtctgggaaagaggtctgggaaagagaacaggctcctgaaggacttgcgctgcttcctgttgcttatagattggtgtagataatgcataaagtcctttccttagaacttataagtttagactcattagagttactggtaagaccctgaacacataaagtgtgcatgtaaaaattacactctgtgatgctaattatatatatatataccttcaaatatatatacagtcagaatctaatctgacacacacayatatatatatatatatatatatatatatatatatatatatatacaccttcaaattagcattacagaatgtaatttttatatatatgacaattctacaggcaatctcagctggacatagtcaaaactgaagtcatttgttttcctcctgctttgctggctgatttgtttttccatctcctttactagtctttcctcttctttataacccatatgtgtttgccgaattcagagactggttctcagtattcatgcttctcaggtgaactcactcagatttatggctttagtggtagatatactcttactgccaaattaatatctgcatcgctgacccaattcctgagttttgggtttatatgtttaactgcttactgaacgtccctactttacggtttccaatcttttcagtatctaatagatactgtgttacatgtatctattagatacaagtgttacatgttcagagaactcttgagtgtaaacttgatgatgtttggggaagatttttttctagagaagtgctagagatgtagtcaaaacttgctacatatgtggtgaattaataaatatcctgatttactcccaaacctgtcttttgtccagtattttttaaattttagttaattttacagctgtatatctagctgcctaagctagaaaacttggaggcattctcaactcttcctgtacctcaccttccatgtcagatcaatcattaaattatcttaatctacattagaaaattatctgtaatccatttttttcctatcaccaccatcactgcatattcttgtcttctctaacaaaggcattataccttttgctatggactggattgtgttctccttaaaattaatatgtgaagtcccaactcccaatacttcaacatgtaactgtacttgaaaatagggcctttaaagaggccaatgggggggcctgaatctaatctgactgatgtccttatgaaaaaagaaaattt

SEQ ID NO: 42709 - DNA, 1264 bp, Homo sapiens
agtactttaaacaaggttgccagaggcagagaaacgtctgggaaagaggtctgggaaagagaacaggctcctgaaggacttgcgctgcttcctgttgcttatagattggtgtagataatgcataaagtcctttccttagaacttataagtttagactcattagagttactggtaagaccctgaacacataaagtgtgcatgtaaaaattacactctgtgatgctaattatatatatatataccttcaaatatatatacagtcagaatctaatctgacacacacatatatatatatatatatatayatatatatatatatatatatatacaccttcaaattagcattacagaatgtaatttttatatatatgacaattctacaggcaatctcagctggacatagtcaaaactgaagtcatttgttttcctcctgctttgctggctgatttgtttttccatctcctttactagtctttcctcttctttataacccatatgtgtttgccgaattcagagactggttctcagtattcatgcttctcaggtgaactcactcagatttatggctttagtggtagatatactcttactgccaaattaatatctgcatcgctgacccaattcctgagttttgggtttatatgtttaactgcttactgaacgtccctactttacggtttccaatcttttcagtatctaatagatactgtgttacatgtatctattagatacaagtgttacatgttcagagaactcttgagtgtaaacttgatgatgtttggggaagatttttttctagagaagtgctagagatgtagtcaaaacttgctacatatgtggtgaattaataaatatcctgatttactcccaaacctgtcttttgtccagtattttttaaattttagttaattttacagctgtatatctagctgcctaagctagaaaacttggaggcattctcaactcttcctgtacctcaccttccatgtcagatcaatcattaaattatcttaatctacattagaaaattatctgtaatccatttttttcctatcaccaccatcactgcatattcttgtcttctctaacaaaggcattataccttttgctatggactggattgtgttctccttaaaattaatatgtgaagtcccaactcccaatacttcaacatgtaactgtacttgaaaatagggcctttaaagaggccaatgggggggcctgaatctaatctgactgatgtccttatgaaaaaagaaaattt

SEQ ID NO: 42710 - DNA, 1264 bp, Homo sapiens
agtactttaaacaaggttgccagaggcagagaaacgtctgggaaagaggtctgggaaagagaacaggctcctgaaggacttgcgctgcttcctgttgcttatagattggtgtagataatgcataaagtcctttccttagaacttataagtttagactcattagagttactggtaagaccctgaacacataaagtgtgcatgtaaaaattacactctgtgatgctaattatatatatatataccttcaaatatatatacagtcagaatctaatctgacacacacatatatatatatatatatatatayatatatatatatatatatatacaccttcaaattagcattacagaatgtaatttttatatatatgacaattctacaggcaatctcagctggacatagtcaaaactgaagtcatttgttttcctcctgctttgctggctgatttgtttttccatctcctttactagtctttcctcttctttataacccatatgtgtttgccgaattcagagactggttctcagtattcatgcttctcaggtgaactcactcagatttatggctttagtggtagatatactcttactgccaaattaatatctgcatcgctgacccaattcctgagttttgggtttatatgtttaactgcttactgaacgtccctactttacggtttccaatcttttcagtatctaatagatactgtgttacatgtatctattagatacaagtgttacatgttcagagaactcttgagtgtaaacttgatgatgtttggggaagatttttttctagagaagtgctagagatgtagtcaaaacttgctacatatgtggtgaattaataaatatcctgatttactcccaaacctgtcttttgtccagtattttttaaattttagttaattttacagctgtatatctagctgcctaagctagaaaacttggaggcattctcaactcttcctgtacctcaccttccatgtcagatcaatcattaaattatcttaatctacattagaaaattatctgtaatccatttttttcctatcaccaccatcactgcatattcttgtcttctctaacaaaggcattataccttttgctatggactggattgtgttctccttaaaattaatatgtgaagtcccaactcccaatacttcaacatgtaactgtacttgaaaatagggcctttaaagaggccaatgggggggcctgaatctaatctgactgatgtccttatgaaaaaagaaaattt

SEQ ID NO: 42711 - DNA, 1264 bp, Homo sapiens
agtactttaaacaaggttgccagaggcagagaaacgtctgggaaagaggtctgggaaagagaacaggctcctgaaggacttgcgctgcttcctgttgcttatagattggtgtagataatgcataaagtcctttccttagaacttataagtttagactcattagagttactggtaagaccctgaacacataaagtgtgcatgtaaaaattacactctgtgatgctaattatatatatatataccttcaaatatatatacagtcagaatctaatctgacacacacatatatatatatatatatatatatayatatatatatatatatatacaccttcaaattagcattacagaatgtaatttttatatatatgacaattctacaggcaatctcagctggacatagtcaaaactgaagtcatttgttttcctcctgctttgctggctgatttgtttttccatctcctttactagtctttcctcttctttataacccatatgtgtttgccgaattcagagactggttctcagtattcatgcttctcaggtgaactcactcagatttatggctttagtggtagatatactcttactgccaaattaatatctgcatcgctgacccaattcctgagttttgggtttatatgtttaactgcttactgaacgtccctactttacggtttccaatcttttcagtatctaatagatactgtgttacatgtatctattagatacaagtgttacatgttcagagaactcttgagtgtaaacttgatgatgtttggggaagatttttttctagagaagtgctagagatgtagtcaaaacttgctacatatgtggtgaattaataaatatcctgatttactcccaaacctgtcttttgtccagtattttttaaattttagttaattttacagctgtatatctagctgcctaagctagaaaacttggaggcattctcaactcttcctgtacctcaccttccatgtcagatcaatcattaaattatcttaatctacattagaaaattatctgtaatccatttttttcctatcaccaccatcactgcatattcttgtcttctctaacaaaggcattataccttttgctatggactggattgtgttctccttaaaattaatatgtgaagtcccaactcccaatacttcaacatgtaactgtacttgaaaatagggcctttaaagaggccaatgggggggcctgaatctaatctgactgatgtccttatgaaaaaagaaaattt

SEQ ID NO: 42712 - DNA, 1264 bp, Homo sapiens
agtactttaaacaaggttgccagaggcagagaaacgtctgggaaagaggtctgggaaagagaacaggctcctgaaggacttgcgctgcttcctgttgcttatagattggtgtagataatgcataaagtcctttccttagaacttataagtttagactcattagagttactggtaagaccctgaacacataaagtgtgcatgtaaaaattacactctgtgatgctaattatatatatatataccttcaaatatatatacagtcagaatctaatctgacacacacatatatatatatatatatatatatatayatatatatatatatatacaccttcaaattagcattacagaatgtaatttttatatatatgacaattctacaggcaatctcagctggacatagtcaaaactgaagtcatttgttttcctcctgctttgctggctgatttgtttttccatctcctttactagtctttcctcttctttataacccatatgtgtttgccgaattcagagactggttctcagtattcatgcttctcaggtgaactcactcagatttatggctttagtggtagatatactcttactgccaaattaatatctgcatcgctgacccaattcctgagttttgggtttatatgtttaactgcttactgaacgtccctactttacggtttccaatcttttcagtatctaatagatactgtgttacatgtatctattagatacaagtgttacatgttcagagaactcttgagtgtaaacttgatgatgtttggggaagatttttttctagagaagtgctagagatgtagtcaaaacttgctacatatgtggtgaattaataaatatcctgatttactcccaaacctgtcttttgtccagtattttttaaattttagttaattttacagctgtatatctagctgcctaagctagaaaacttggaggcattctcaactcttcctgtacctcaccttccatgtcagatcaatcattaaattatcttaatctacattagaaaattatctgtaatccatttttttcctatcaccaccatcactgcatattcttgtcttctctaacaaaggcattataccttttgctatggactggattgtgttctccttaaaattaatatgtgaagtcccaactcccaatacttcaacatgtaactgtacttgaaaatagggcctttaaagaggccaatgggggggcctgaatctaatctgactgatgtccttatgaaaaaagaaaattt

SEQ ID NO: 42713 - DNA, 999 bp, Homo sapiens
aattgaatgtttggccagcatctccagtttcctgtggtttcagggacagaaccaataagccctgatgttcatcttttgttagccaccgacttattttgttaagaaaacagaagtgcctgtaaactggaattagaacaagagagtagaaaatttcatttcaaatttgctgagcataaaagttgagggttgggcaacagccaagagaacaaatctgtaaagtagagtaaagcattaaggaatcttttgtactttgggagagaaaataaagtataaaaaacactgtcagaaagataattttgatcttccctaaattacggacttttgtaactgtgcataaagatgttacaaaaattgtttcatccaagcgacttccctcagagtccaaacaaacagtagcgtagaaacattatttgaatgtttttgattcaaaaatacaattaaagaggagctaagattgctttcagaagggtcaagatacattagatcagtgtctcctttagggctttccttcaacaggaagatttgctgtttccaagcagtctggccaccacttctgatgacagctccttctgaacaaaaaaagttccatttcccttttcttccttttccctagtgtttcaaactctccattcatttttaactctattttcaatgacaaaaattaagaaatgatgaggctgtctctaaacatgactctgggataaggtaaagaatgtatacagtcagccctttgtatctgtgagytctatatccacggatttaaccaataaaaaatattcagaaaaaaacaaaattgtatctgtactgacacgtacagacttttcttttcttgtcattattccataaacaatataacagccagtcacataacatttacattgtgttcagcattacaagtaattagagatgacttacagtatacaagaggatgtgcataagttatatgaaaatactgtatctttttctgtaagggacttgagcctctgtggattttggtac

SEQ ID NO: 42714 - DNA, 557 bp, Homo sapiens
ttatccttttccttatatcaaggcaataatggcctcatagaatgaattgagaaattctctgggagaccttgtatatcattagaataattttttttttttttgcatttacatggtaaatagtagtaaaactctttgatgttctctgtgtggggaactgtgtgtgaagtagttaatcactgctttgatatctatattttgtatcaggctactcaagcatgctacatatgttagatttggaacatcctatttttctagaaatatgttcatttattcaattgttcaaawatattggcataaattagttgataatattatcatatcttttaaaatttgtgcattaactctggctatgtttccatcacttatttctgaagttgccattaagtaggaaaaatactgcctcttttaggacctactgtgatattcctgaattaaggatttaacaggatctctaagcaaaacagaatcttggggtgggcaaatcacagaactcaccagggggaacaaacaggaataggaggggtgtgtgtgtgtgtgtgtgtgtgtgtgtgtgtgtg

SEQ ID NO: 42715 - DNA, 1097 bp, Homo sapiens
atcccagcacatatggccttttgatcctctgaggccaatttaacttctcactttccttggcttaatcagtacaaagcatcactaagcctgctaccaaccttgaatatccttcatgcttccccttttattttcatatatgcatggcactatctttctgttaaatatacatatgtgtgtgtcttttttggtcatattaattcaatcggtgaataaccacaaattgagctagtaatatagaccaggctgtgatggaaggtatggcagattttattcttcgaagctcagctcaaagattattacctttggaaaatttctttccaggtctgctattctttggaatggtagtgttcctgtacccagagtttataggctgataagaaaagttaaatgacctccttattccatccagaaagtgatggagaatatttcctgcattaccctaaccttctcctctaatgctgagatagtgatatcatgtagaaatttttctagatatatactaggagaatgggggaaaaggaaatcaaaacttcttgacagcccaaagaaaaatatcttcctaccagagcagctgttgctaagtttagttaatgtgtgtcctgtcactgaggaaataggagctttcctttaaatgtctttttgttgttgtttgattgcttgcccattcgagtactgattagcttgttttacaagtgcataatttgcaaggtgtgtgtgtgtgtgtccatgtgtacatgcacrtgtgcatgtgtgtgtccatgtgtacatgcacgtgtgcatgtgtgtgtgcacatgtgcttggggggggaacggggaaagacattgtcattctcatagttgtgactctagctaggctccttcagtgcccttactacatttctccactggtattggaataatattatggatagtaatacaatagagtgtagagagaatctagcctcttgtctgtcctgtcttttaagcatcaagtgtcttttcgtggttcccctagagaagaaaatgtaaatcctgagaccactccatgacagtcttgcaaaggtcaaacacaggttcagtaaagacatcctagagagggacactcacttcaaaatgaa

SEQ ID NO: 42716 - DNA, 1097 bp, Homo sapiens
atcccagcacatatggccttttgatcctctgaggccaatttaacttctcactttccttggcttaatcagtacaaagcatcactaagcctgctaccaaccttgaatatccttcatgcttccccttttattttcatatatgcatggcactatctttctgttaaatatacatatgtgtgtgtcttttttggtcatattaattcaatcggtgaataaccacaaattgagctagtaatatagaccaggctgtgatggaaggtatggcagattttattcttcgaagctcagctcaaagattattacctttggaaaatttctttccaggtctgctattctttggaatggtagtgttcctgtacccagagtttataggctgataagaaaagttaaatgacctccttattccatccagaaagtgatggagaatatttcctgcattaccctaaccttctcctctaatgctgagatagtgatatcatgtagaaatttttctagatatatactaggagaatgggggaaaaggaaatcaaaacttcttgacagcccaaagaaaaatatcttcctaccagagcagctgttgctaagtttagttaatgtgtgtcctgtcactgaggaaataggagctttcctttaaatgtctttttgttgttgtttgattgcttgcccattcgagtactgattagcttgttttacaagtgcataatttgcaaggtgtgtgtgtgtgtgtccatgtgtacatgcacgtgtgcatgtgtgtgtccatgtgtacatgcacgtgtgcatgtgtgtgtgcacatgtgcttggggggggaacggggaaagacattgtcattctcatagttgtgactctagctaggctccttcagtgcccttactacatttctccactggtattggaataatattatggatagtaatacaatagagtgtagagagaatctagcctcttgtctgtcctgtcttttaagcatcaagtgtcttttcgtggttcccctagagaagaaaatgtaaatcctgagaccactccatgayagtcttgcaaaggtcaaacacaggttcagtaaagacatcctagagagggacactcacttcaaaatgaa

SEQ ID NO: 42717 - DNA, 667 bp, Homo sapiens
ggctgacctggccctgcaggcacacaggttggccagcagatggcatctttgtgtgaattggaaaaaccatggcacaaggcttcgtcagccccgtgctgaattttagattcccctggtgccttcagcagagcatccttgttcagggtggacctgcgcaattatacagaacagtcttgtctacacccctgagacccaccttgtaaaccttctccccattctctggacacatcagcccccttcacaactccataatcttaatacgttctrttcttgtcttcctctttgcaaatttcaactcatatctccagagtcagctcaagtgtcccgccgtcggcaacacttctgggcttgatgaggtagagtggaggctctgagttcctgcatcacagcagtgaggggcactgctcatccaccaacacacacacacacgcacacacacatgtctttttctgaaactaaactttttcaaagcagtgtcttcactaacaatgtgcaatacactaatactttctattcaattccattctgcttttattaatttctttttaaattttattttaagtccctaggtacatgtgcaggatgtgcaggtttgttacataggtaaacatgtgccatggtggtttgctgcacctatcagcccatcaccgaagtattaagcccagaa

SEQ ID NO: 42718 - DNA, 1028 bp, Homo sapiens
ggatccggaactaccattcaccatcccctagggcttcaccacactcacctctgtcatcaccagaatcccacaagctcccatttccctgtcctcaccgtgatgggcaatcaatgaagccattgggctctgccgtgtcctcctctgaggactcctcagagtccccacgttcatcaataatataccacatgttcttactgccatcacccagcagctcacccccagctctcggggggtctcctgtgtctcccagctactctccaaacaaccccagatttcagctggagtcagccccccacacccaggaatcacctacaaactcacgagcctcacgctgctccacccctgtgtcttgcatctcttcacccccaggcctcagggaccctcctgtggctcccagttactctccagccatccccaggttcctgcgggagycagccccatgcacccaggagtcccccagagactcacaggtctcgggagaatatgagcggtcccccagccctgactcctcaagattcatgcctgcctcacccagcttctccctctcccctcccagaaactcagacccaaggggcagctcctcaccagggatgtggaagtcctctacatcatcccgcagggcttcaccactctcacatccatcatcaacagaattccacaactttacgtttccctttcctaaccaagcaggacagtcactcatgtcattgtgttctcccgtgtcctcctctggagattcttcacagtcacctcattcatcaataatgtaccatatgttcttactgccatcatccagcagctcacccccagccacccatgactctcctgtctgtcccagctactctccaactacgcccagatttcagcgggagtctgtaccccacaccccagaaacacctacaaactcacagacctcagtgagatcctcgccagtctctctcacgtcttcacccccagcccttacggaccctccagtctgtcccagctactctccaaccacgcccacatttcagcgcgggtcagttcca

SEQ ID NO: 42719 - DNA, 1028 bp, Homo sapiens
ggatccggaactaccattcaccatcccctagggcttcaccacactcacctctgtcatcaccagaatcccacaagctcccatttccctgtcctcaccgtgatgggcaatcaatgaagccattgggctctgccgtgtcctcctctgaggactcctcagagtccccacgttcatcaataatataccacatgttcttactgccatcacccagcagctcacccccagctctcggggggtctcctgtgtctcccagctactctccaaacaaccccagatttcagctggagtcagccccccacacccaggaatcacctacaaactcacgagcctcacgctgctccacccctgtgtcttgcatctcttcacccccaggcctcagggaccctcctgtggctcccagttactctccagccatccccaggttcctgcgggagtcagccccatgcacccaggagtcccccagagactcacaggtctcgggagaatatgagcggtcccccagccctgactcctcaagattcatgcctgcctcacccagcttctccctctcccctcccagaaactcagacccaaggggcagctcctcaccagggatgtggaagtcctctacatcatcccgcagggcttcascactctcacatccatcatcaacagaattccacaactttacgtttccctttcctaaccaagcaggacagtcactcatgtcattgtgttctcccgtgtcctcctctggagattcttcacagtcacctcattcatcaataatgtaccatatgttcttactgccatcatccagcagctcacccccagccacccatgactctcctgtctgtcccagctactctccaactacgcccagatttcagcgggagtctgtaccccacaccccagaaacacctacaaactcacagacctcagtgagatcctcgccagtctctctcacgtcttcacccccagcccttacggaccctccagtctgtcccagctactctccaaccacgcccacatttcagcgcgggtcagttcca

SEQ ID NO: 42720 - DNA, 1028 bp, Homo sapiens
ggatccggaactaccattcaccatcccctagggcttcaccacactcacctctgtcatcaccagaatcccacaagctcccatttccctgtcctcaccgtgatgggcaatcaatgaagccattgggctctgccgtgtcctcctctgaggactcctcagagtccccacgttcatcaataatataccacatgttcttactgccatcacccagcagctcacccccagctctcggggggtctcctgtgtctcccagctactctccaaacaaccccagatttcagctggagtcagccccccacacccaggaatcacctacaaactcacgagcctcacgctgctccacccctgtgtcttgcatctcttcacccccaggcctcagggaccctcctgtggctcccagttactctccagccatccccaggttcctgcgggagtcagccccatgcacccaggagtcccccagagactcacaggtctcgggagaatatgagcggtcccccagccctgactcctcaagattcatgcctgcctcacccagcttctccctctcccctcccagaaactcagacccaaggggcagctcctcaccagggatgtggaagtcctctacatcatcccgcagggcttcaccwctctcacatccatcatcaacagaattccacaactttacgtttccctttcctaaccaagcaggacagtcactcatgtcattgtgttctcccgtgtcctcctctggagattcttcacagtcacctcattcatcaataatgtaccatatgttcttactgccatcatccagcagctcacccccagccacccatgactctcctgtctgtcccagctactctccaactacgcccagatttcagcgggagtctgtaccccacaccccagaaacacctacaaactcacagacctcagtgagatcctcgccagtctctctcacgtcttcacccccagcccttacggaccctccagtctgtcccagctactctccaaccacgcccacatttcagcgcgggtcagttcca

SEQ ID NO: 42721 - DNA, 1028 bp, Homo sapiens
ggatccggaactaccattcaccatcccctagggcttcaccacactcacctctgtcatcaccagaatcccacaagctcccatttccctgtcctcaccgtgatgggcaatcaatgaagccattgggctctgccgtgtcctcctctgaggactcctcagagtccccacgttcatcaataatataccacatgttcttactgccatcacccagcagctcacccccagctctcggggggtctcctgtgtctcccagctactctccaaacaaccccagatttcagctggagtcagccccccacacccaggaatcacctacaaactcacgagcctcacgctgctccacccctgtgtcttgcatctcttcacccccaggcctcagggaccctcctgtggctcccagttactctccagccatccccaggttcctgcgggagtcagccccatgcacccaggagtcccccagagactcacaggtctcgggagaatatgagcggtcccccagccctgactcctcaagattcatgcctgcctcacccagcttctccctctcccctcccagaaactcagacccaaggggcagctcctcaccagggatgtggaagtcctctacatcatcccgcagggcttcaccactctcacatccrtcatcaacagaattccacaactttacgtttccctttcctaaccaagcaggacagtcactcatgtcattgtgttctcccgtgtcctcctctggagattcttcacagtcacctcattcatcaataatgtaccatatgttcttactgccatcatccagcagctcacccccagccacccatgactctcctgtctgtcccagctactctccaactacgcccagatttcagcgggagtctgtaccccacaccccagaaacacctacaaactcacagacctcagtgagatcctcgccagtctctctcacgtcttcacccccagcccttacggaccctccagtctgtcccagctactctccaaccacgcccacatttcagcgcgggtcagttcca

SEQ ID NO: 42722 - DNA, 1028 bp, Homo sapiens
ggatccggaactaccattcaccatcccctagggcttcaccacactcacctctgtcatcaccagaatcccacaagctcccatttccctgtcctcaccgtgatgggcaatcaatgaagccattgggctctgccgtgtcctcctctgaggactcctcagagtccccacgttcatcaataatataccacatgttcttactgccatcacccagcagctcacccccagctctcggggggtctcctgtgtctcccagctactctccaaacaaccccagatttcagctggagtcagccccccacacccaggaatcacctacaaactcacgagcctcacgctgctccacccctgtgtcttgcatctcttcacccccaggcctcagggaccctcctgtggctcccagttactctccagccatccccaggttcctgcgggagtcagccccatgcacccaggagtcccccagagactcacaggtctcgggagaatatgagcggtcccccagccctgactcctcaagattcatgcctgcctcacccagcttctccctctcccctcccagaaactcagacccaaggggcagctcctcaccagggatgtggaagtcctctacatcatcccgcagggcttcaccactctcacatccatcatcaacagaattccacaactttacgtttccctttcctaaccaagcaggacagtcactcatgtcattgtgttctcccgtgwcctcctctggagattcttcacagtcacctcattcatcaataatgtaccatatgttcttactgccatcatccagcagctcacccccagccacccatgactctcctgtctgtcccagctactctccaactacgcccagatttcagcgggagtctgtaccccacaccccagaaacacctacaaactcacagacctcagtgagatcctcgccagtctctctcacgtcttcacccccagcccttacggaccctccagtctgtcccagctactctccaaccacgcccacatttcagcgcgggtcagttcca

SEQ ID NO: 42723 - DNA, 1028 bp, Homo sapiens
ggatccggaactaccattcaccatcccctagggcttcaccacactcacctctgtcatcaccagaatcccacaagctcccatttccctgtcctcaccgtgatgggcaatcaatgaagccattgggctctgccgtgtcctcctctgaggactcctcagagtccccacgttcatcaataatataccacatgttcttactgccatcacccagcagctcacccccagctctcggggggtctcctgtgtctcccagctactctccaaacaaccccagatttcagctggagtcagccccccacacccaggaatcacctacaaactcacgagcctcacgctgctccacccctgtgtcttgcatctcttcacccccaggcctcagggaccctcctgtggctcccagttactctccagccatccccaggttcctgcgggagtcagccccatgcacccaggagtcccccagagactcacaggtctcgggagaatatgagcggtcccccagccctgactcctcaagattcatgcctgcctcacccagcttctccctctcccctcccagaaactcagacccaaggggcagctcctcaccagggatgtggaagtcctctacatcatcccgcagggcttcaccactctcacatccatcatcaacagaattccacaactttacgtttccctttcctaaccaagcaggacagtcactcatgtcattgtgttctcccgtgtcctcctctggagattcttcacagtcacctcattcatcaataatrtaccatatgttcttactgccatcatccagcagctcacccccagccacccatgactctcctgtctgtcccagctactctccaactacgcccagatttcagcgggagtctgtaccccacaccccagaaacacctacaaactcacagacctcagtgagatcctcgccagtctctctcacgtcttcacccccagcccttacggaccctccagtctgtcccagctactctccaaccacgcccacatttcagcgcgggtcagttcca

SEQ ID NO: 42724 - DNA, 564 bp, Homo sapiens
ttttacagagaatttctatctttccattaattccaagagtactcatttttacttcttagaatgtggcataatagttgctttaaagtctttgtctaataattctaacatttgaatcctctcagggttggcatttgttgattgcctttttcctcgagaattttttaggctttcctggttctttgtatgttggataattttggttcatatcctacagattttgaatattatgctgagacttggtccttctaaaattctcaaaaggttttgctgtgctcattctagtcagttttaygcatgtgcagctcagggatgagcccagaacttcatacacacatttaaaggatatctaactcagatgtctcctttctgtaatctccactcctcaaggttctatggctagaaagccaaggtttagcctctctgcactgtagcaccttcttgtgactgggaccacctcaggacagagtggcaagggaaaggagcctgcaggacccccaaccaccatacctgttgctgctgtctgtgctaatacgggggtatagcttcatttttgggtttctctgg

SEQ ID NO: 42725 - DNA, 529 bp, Homo sapiens
aatgtgccttcaaaggccagctttaaatcaggcccatcgagacacacttacccrtccagttctgctgtttccacatagcagaggctgttaggctcagagctagacagcaggagaatgtcagcctgtccaaaacaaaacacacaaataacaccgagaccctgagggaaaagccgagcacaggggctgggggagaacaaggaacaagagaagcagaatttgttcacttactggaacaaaatcattttttttcagacgaatgacgtctccaacttgaatttctttccacttagcaactttgaacctaaggattaaaaataatgaggatttattgacattttaagttacaggcaagggaattactattctttctggatgttatagattctggaaaatatgcaagtcacagagaaaatgctaaaattttgctctttaatggatgtaaacatattaaaggggggcatgaaaattgtattgacctctgaaggaagcaatgatgaatgactttgatacattcttttcatctaggtca

SEQ ID NO: 42726 - DNA, 529 bp, Homo sapiens
aatgtgccttcaaaggccagctttaaatcaggcccatcgagacacacttacccatccagttctgctgtttccacatagcagaggctgttaggctcagagctagacagcaggagaatgtcagcctgtccaaaacaaaacacacaaataacaccgagaccctgagggaaaagccgagcacaggggctgggggagaacaaggaacaagagaagcagaatttgttcacttactggaacaaaatcattttttttcagacgaatgacgtctccaacttgaatttctttccacttagcaactttgaacctaaggattaaaaataatgaggatttattgacattttaagttacaggcaagggaattactattctttctggatgttatagattctggaaaatatgcaagtcacagagaaaatgctaaaattttgctctttaatggatgtaaacatattaaaggggggcatgaaaatygtattgacctctgaaggaagcaatgatgaatgactttgatacattcttttcatctaggtca

SEQ ID NO: 42727 - DNA, 563 bp, Homo sapiens
cagtttcatttcactggctgtttaaggaccagtactcttcatatgacagctgagtatggcacatgatctcctcaattcaggtgggttcttcagacccactgccacctcctgtggggcccaggacaagggtatacttgaaggcacatatatggtatgtgggatatagcaagctaacaaactgggaaatatgttctgtcctcctatgttgacaaatagaccttgatcacaacctggaaggatgagctcttgaactctctgagttcctgcagaagtgtagaggcctttggagagttgcctctgactgacatgctttcctgcttctcttcttgccgcyggctctttctggccttgtggggagcctcacagacagcctggatggactctctggtcttcatgcccagttccactcttgcccctgcaaacagctatctatcccttggccaccattcaggtcaagacttgatccactgatggcacaacctccctcaggaggatggatctgaaaaaatgcctgcacagaccctgggagtgggtgtggagcttgggggacagggaatcctggg

SEQ ID NO: 42728 - DNA, 568 bp, Homo sapiens
caaaaattagccaagcgtggtggcgcacacctgtagtcccagctattcaggaggctaaggtaggaggacacytgagcccaggaggttgaggctgcagtgagccatgatcacgccactgcactccaacgtgggtaacagagtgagaccctatctcaaaaaaaagtcagaagtcttgatcacctaactttgcatttttaatcaatgcaatgtcaacaaatgtgctttttttccttatttgctcacttatgtaaatttgccttgtttcaaataatttaccttcccaattttgctttgcttagtctgattttaaaatgtctgttctttgagccataatggatattttggggaggccaatccagttgtaaaactttaccataaatgatctatttatagattatgaaatattaactatgttcttttttttattttattttttatttttgagacagagttttgctttatcacccaggctggagtgcggtggcacaatttcggctcactgcaacttccgccttccgggttcaagcaattctgctgtctcctgagtagctgggactacaggtgcaca

SEQ ID NO: 42729 - DNA, 1281 bp, Homo sapiens
tgaattaccctgtgggaggctgcccgaccaccaaggctgccattgggttgtgttgtgagtgagcaaataattttcactggcttaagccacttagaattcgggaatcatctgctatagcatctaacattaccttaaataataaaagctgtgttgggaaaatagtatttattaatttccttttatatgcccaacattgtactaggcgattttacatgtgctatcttatttaactataaagcaaccttgaaatttagttattattttaattttacagatgaagaayctgaaacttagaaaggttacatatttgtttgtttgtttttttctcttcacaagattacacagttaagaaaataaggtaggaatgaaacctggtctccctggctctagaaattatgctaacccaccttccagaaactaattatttcattaaaaattgtttaaataggccgggcgcagtggcttatgcttgtaatcccagcactttgggaggttgaggcaggtggatcacgaggtcaggagttcgagatcagcctgaccaatatggtgaaaccccgtctttactaaaaatacaaaaattagccaggtgtgttggtacgtgggaggctgaggcagaaaaatcacttgaacccgggaggtggagattgcagtgagctgagactgtgccactgcactccagcccgggtgacacagcaagactccatctcaaaaaaaaaaaaaatgcttaaataaatctggctcacttccagaatgccaggaatggttgaaaacaacgtcaatgatctccagcattcacactgattcccttcttgagttgtgtcctgatctgttactccttgcttcttaggcatttatcactgacccttggctccagataccggccttaattcctatctgggactttgatactttcctgatgggttagaaatggtcttctaggtctgttctgtggtcctagccttgtggctatggacataaagagcaataaatgtaggaaagccccacatttcactctggcgatctagggcctgtattcaccaagacaaccctatttcaccttctttcccacttgggagagagagtgacgctgatattgtgaaagtatatccaagctattttacattgcctgttttgcagtgcagtgccagactcttaaaaaagtgcaatataaaattttaagcccaacagtaaaatataagttgccacataatagaacacttaaattattgaggggatagcatcatcctgagatttctcaaaggagtacttgttgaagagcta

SEQ ID NO: 42730 - DNA, 1281 bp, Homo sapiens
tgaattaccctgtgggaggctgcccgaccaccaaggctgccattgggttgtgttgtgagtgagcaaataattttcactggcttaagccacttagaattcgggaatcatctgctatagcatctaacattaccttaaataataaaagctgtgttgggaaaatagtatttattaatttccttttatatgcccaacattgtactaggcgattttacatgtgctatcttatttaactataaagcaaccttgaaatttagttattattttaattttacagatgaagaatctgaaacttagaaaggttacatatttgtttgtttgtttttttctcttcacaagattacacagttaagaaaataaggtaggaatgaaacctggtctccctggctctagaaattatgctaacccaccttccagaaactaattatttcattaaaaattgtttaaataggccgggcgcagtggcttatgcttgtaatcccagcactttgggaggttgaggcaggtggatcacgaggtcaggagttckagatcagcctgaccaatatggtgaaaccccgtctttactaaaaatacaaaaattagccaggtgtgttggtacgtgggaggctgaggcagaaaaatcacttgaacccgggaggtggagattgcagtgagctgagactgtgccactgcactccagcccgggtgacacagcaagactccatctcaaaaaaaaaaaaaatgcttaaataaatctggctcacttccagaatgccaggaatggttgaaaacaacgtcaatgatctccagcattcacactgattcccttcttgagttgtgtcctgatctgttactccttgcttcttaggcatttatcactgacccttggctccagataccggccttaattcctatctgggactttgatactttcctgatgggttagaaatggtcttctaggtctgttctgtggtcctagccttgtggctatggacataaagagcaataaatgtaggaaagccccacatttcactctggcgatctagggcctgtattcaccaagacaaccctatttcaccttctttcccacttgggagagagagtgacgctgatattgtgaaagtatatccaagctattttacattgcctgttttgcagtgcagtgccagactcttaaaaaagtgcaatataaaattttaagcccaacagtaaaatataagttgccacataatagaacacttaaattattgaggggatagcatcatcctgagatttctcaaaggagtacttgttgaagagcta

SEQ ID NO: 42731 - DNA, 1281 bp, Homo sapiens
tgaattaccctgtgggaggctgcccgaccaccaaggctgccattgggttgtgttgtgagtgagcaaataattttcactggcttaagccacttagaattcgggaatcatctgctatagcatctaacattaccttaaataataaaagctgtgttgggaaaatagtatttattaatttccttttatatgcccaacattgtactaggcgattttacatgtgctatcttatttaactataaagcaaccttgaaatttagttattattttaattttacagatgaagaatctgaaacttagaaaggttacatatttgtttgtttgtttttttctcttcacaagattacacagttaagaaaataaggtaggaatgaaacctggtctccctggctctagaaattatgctaacccaccttccagaaactaattatttcattaaaaattgtttaaataggccgggcgcagtggcttatgcttgtaatcccagcactttgggaggttgaggcaggtggatcacgaggtcaggagttcgagatcagcctgaccaatatggtgaaaccccgtctttactaaaaatacaaaaattagccaggtgtgttggtacgtgggaggctgaggcagaaaaatcacttgaacccgggaggtggagattgcagtgagctgagactgtgccactgcactccagcccgggtgacacagcaagactccatctcaaaaaaaaaaaaaatgcttaaataaatctggctcacttccagaatgccaggaatggttgaaaacaaygtcaatgatctccagcattcacactgattcccttcttgagttgtgtcctgatctgttactccttgcttcttaggcatttatcactgacccttggctccagataccggccttaattcctatctgggactttgatactttcctgatgggttagaaatggtcttctaggtctgttctgtggtcctagccttgtggctatggacataaagagcaataaatgtaggaaagccccacatttcactctggcgatctagggcctgtattcaccaagacaaccctatttcaccttctttcccacttgggagagagagtgacgctgatattgtgaaagtatatccaagctattttacattgcctgttttgcagtgcagtgccagactcttaaaaaagtgcaatataaaattttaagcccaacagtaaaatataagttgccacataatagaacacttaaattattgaggggatagcatcatcctgagatttctcaaaggagtacttgttgaagagcta

SEQ ID NO: 42732 - DNA, 1281 bp, Homo sapiens
tgaattaccctgtgggaggctgcccgaccaccaaggctgccattgggttgtgttgtgagtgagcaaataattttcactggcttaagccacttagaattcgggaatcatctgctatagcatctaacattaccttaaataataaaagctgtgttgggaaaatagtatttattaatttccttttatatgcccaacattgtactaggcgattttacatgtgctatcttatttaactataaagcaaccttgaaatttagttattattttaattttacagatgaagaatctgaaacttagaaaggttacatatttgtttgtttgtttttttctcttcacaagattacacagttaagaaaataaggtaggaatgaaacctggtctccctggctctagaaattatgctaacccaccttccagaaactaattatttcattaaaaattgtttaaataggccgggcgcagtggcttatgcttgtaatcccagcactttgggaggttgaggcaggtggatcacgaggtcaggagttcgagatcagcctgaccaatatggtgaaaccccgtctttactaaaaatacaaaaattagccaggtgtgttggtacgtgggaggctgaggcagaaaaatcacttgaacccgggaggtggagattgcagtgagctgagactgtgccactgcactccagcccgggtgacacagcaagactccatctcaaaaaaaaaaaaaatgcttaaataaatctggctcacttccagaatgccaggaatggttgaaaacaacgtcaatgatctccagcattcacactgattcccttcttsagttgtgtcctgatctgttactccttgcttcttaggcatttatcactgacccttggctccagataccggccttaattcctatctgggactttgatactttcctgatgggttagaaatggtcttctaggtctgttctgtggtcctagccttgtggctatggacataaagagcaataaatgtaggaaagccccacatttcactctggcgatctagggcctgtattcaccaagacaaccctatttcaccttctttcccacttgggagagagagtgacgctgatattgtgaaagtatatccaagctattttacattgcctgttttgcagtgcagtgccagactcttaaaaaagtgcaatataaaattttaagcccaacagtaaaatataagttgccacataatagaacacttaaattattgaggggatagcatcatcctgagatttctcaaaggagtacttgttgaagagcta

SEQ ID NO: 42733 - DNA, 1281 bp, Homo sapiens
tgaattaccctgtgggaggctgcccgaccaccaaggctgccattgggttgtgttgtgagtgagcaaataattttcactggcttaagccacttagaattcgggaatcatctgctatagcatctaacattaccttaaataataaaagctgtgttgggaaaatagtatttattaatttccttttatatgcccaacattgtactaggcgattttacatgtgctatcttatttaactataaagcaaccttgaaatttagttattattttaattttacagatgaagaatctgaaacttagaaaggttacatatttgtttgtttgtttttttctcttcacaagattacacagttaagaaaataaggtaggaatgaaacctggtctccctggctctagaaattatgctaacccaccttccagaaactaattatttcattaaaaattgtttaaataggccgggcgcagtggcttatgcttgtaatcccagcactttgggaggttgaggcaggtggatcacgaggtcaggagttcgagatcagcctgaccaatatggtgaaaccccgtctttactaaaaatacaaaaattagccaggtgtgttggtacgtgggaggctgaggcagaaaaatcacttgaacccgggaggtggagattgcagtgagctgagactgtgccactgcactccagcccgggtgacacagcaagactccatctcaaaaaaaaaaaaaatgcttaaataaatctggctcacttccagaatgccaggaatggttgaaaacaacgtcaatgatctccagcattcacactgattcccttcttgagttgtgtcctgatctgttactccttgcttcttaggcatttatcactgacccttggctccagataccggccttaattcctatctgggactttgmtactttcctgatgggttagaaatggtcttctaggtctgttctgtggtcctagccttgtggctatggacataaagagcaataaatgtaggaaagccccacatttcactctggcgatctagggcctgtattcaccaagacaaccctatttcaccttctttcccacttgggagagagagtgacgctgatattgtgaaagtatatccaagctattttacattgcctgttttgcagtgcagtgccagactcttaaaaaagtgcaatataaaattttaagcccaacagtaaaatataagttgccacataatagaacacttaaattattgaggggatagcatcatcctgagatttctcaaaggagtacttgttgaagagcta

SEQ ID NO: 42734 - DNA, 584 bp, Homo sapiens
agagagagaaatcacatgtgaagtctgtaacagagaactcaggttcaaagtctggcatgtggccagagtttaaagatgctggatccaaaatatactcagatcaagactgatagtgttattccgttggctactggagtgttttcaaccttaaggtttttagatggaattgagaaagattacaaatttgtaacataaaatcaagttaatcactgagtagccaaattggtttttttgatgattgaaaattatgcaaactttgtttcatttctctttttttacttttttttttaaraaacaaagtctctgttctgtcactcaggctggagtgcagtggtgcgatcatagctcacttccacctgcaactctgggctgaagcaatcctcccacctcagtctccctggtagctggggttataggcacatgccatcacacctggctaatcctttcaatttcatagttatttatactcttcagactattttgaatgtatatatgtacagcattatatatctctaggattttattcattgatatatccctggaacattacctggcatatagtaggcattataagaattgttgag

SEQ ID NO: 42735 - DNA, 464 bp, Homo sapiens
ctcaaactcctgggttcaagcaatcctcctgccttggcatcccaaagtgctgggattacaggcatgagcaactgcacccggccaagagttggctgaattaaaagcctatattcaggctataattttttttaaagcttttctgctttttctcttttgaattctgtttctcttatgagaattttttcagtagctgaaagcccctatttttctcaagcctctgctaatgataagctcctctttagaagacttaaaatctccctaagtyggctcctctaagacctgatctttccatttgcgtctgctcctttcgccaaatttgctcttccagctagttcccagtaatcttacctcctccatttggtggtcaatggataaaaaattactaagggaaacagttttgggtactgcatacagggatataaaggagacgtgcaacaaccctgagacccttgaaggaacaatgg

SEQ ID NO: 42736 - DNA, 464 bp, Homo sapiens
ctcaaactcctgggttcaagcaatcctcctgccttggcatcccaaagtgctgggattacaggcatgagcaactgcacccggccaagagttggctgaattaaaagcctatattcaggctataattttttttaaagcttttctgctttttctcttttgaattctgtttctcttatgagaattttttcagtagctgaaagcccctatttttctcaagcctctgctaatgataagctcctctttagaagacttaaaatctccctaagttggctcctctaagacctgatctttccatttgcgtctgctcctttcgccamatttgctcttccagctagttcccagtaatcttacctcctccatttggtggtcaatggataaaaaattactaagggaaacagttttgggtactgcatacagggatataaaggagacgtgcaacaaccctgagacccttgaaggaacaatgg

SEQ ID NO: 42737 - DNA, 1288 bp, Homo sapiens
aatatatcaccaaaatatgaccatgtatgatgttattactcatagttttatgccatacaagtacatattatacaagtcatacatcaaacggaaaaatgtcaaacagtacagaaaggtaaaaaataaaacatccaaacttccttcctatccttcaccttaatgccagttgcagctgcaatgtctctcttttgataggttctatctgtaattctcatgattacctccataaacttaatattcttgatcttctatttcttcatttactcatttcactataaagataaggaatttaattatatttttctctcattctattcacaacttttctttagttaattttgtttgtttttgtttcgttttattttgttctgttttgtttttgagatggaatctggctctgtcaccaggctggagtgcaatggtgcratctcggctcactgcaaccttcaccttctgggttcaagtgattctcctgcctcagcctcccgagtagctgggattacaggcacccgccaccacacctggctaatttttatatttttagtagagacgaggtttcaccatgttggccaggatggtctcgatctcttgacttcatgatctgcccacttcagcctcccaaagtgctgggattacaggcgtgagccaccgtgcccagccagttaatttttattttattttaaataaataaatacatttttcttcacatttcttcctttcttacatttcctaaaactgtcagctataacattgcttgacattgtcaagatgtgaaatgttagcattttaccctgaaactatgattacatatgaggtccttggcctacattaattcagcaaatctaaagtcagtaaatattatttacaattttaaaaattatttgtatttatttatttatttttagagacagggtctcactctgtcacccaggctggagtacagtggtactatcatggctcactgcagcttccaactctcgggctcaagggttccttccacctcagcctcccaagtagctgggactacaggcatgtaccacacccggctaattttttattattttttaaattttatagagagatagggtcttgctatgttgcccaggctggtctcaaacttttgacatcaagtgatcctccagccttggcctcctaaaatgctgggattacaggcatgagccaatgtgcccagcctcaatcacaattttacaatcatataaataaatagtcactgcagatcataatggaactgaaaaattcttatcacctactaatctagccgtcataa

SEQ ID NO: 42738 - DNA, 1288 bp, Homo sapiens
aatatatcaccaaaatatgaccatgtatgatgttattactcatagttttatgccatacaagtacatattatacaagtcatacatcaaacggaaaaatgtcaaacagtacagaaaggtaaaaaataaaacatccaaacttccttcctatccttcaccttaatgccagttgcagctgcaatgtctctcttttgataggttctatctgtaattctcatgattacctccataaacttaatattcttgatcttctatttcttcatttactcatttcactataaagataaggaatttaattatatttttctctcattctattcacaacttttctttagttaattttgtttgtttttgtttcgttttattttgttctgttttgtttttgagatggaatctggctctgtcaccaggctggagtgcaatggtgcaatctcggctcactgcaaccttcaccttctgggttcaagtgattctcctgcctcagcctcccgagtagctgggattacaggcacccgccaccacacctggctaatttttatatttttagtagagacgaggtttcaccatgttggccaggatggtctcgatctcttgacttcatgatctgcccacttcagcctcccaaagtgctgggattacaggcgtgagccaccgtgcccagccagttaatttttattttattttaaataaataaatacatttttcttcacatttcttcctttcttacatttcctaaaactgtcagctataacattgcttgacattgtcaagatgtgaaatgttagcattttaccctgaaactatgattacatatgaggtccttggcctacattaattcagcaaatctaaagtcagtaaatattatttacaattttaaaaattatttgtatttatttatttatttttagagacagggtctcactctgtcrcccaggctggagtacagtggtactatcatggctcactgcagcttccaactctcgggctcaagggttccttccacctcagcctcccaagtagctgggactacaggcatgtaccacacccggctaattttttattattttttaaattttatagagagatagggtcttgctatgttgcccaggctggtctcaaacttttgacatcaagtgatcctccagccttggcctcctaaaatgctgggattacaggcatgagccaatgtgcccagcctcaatcacaattttacaatcatataaataaatagtcactgcagatcataatggaactgaaaaattcttatcacctactaatctagccgtcataa

SEQ ID NO: 42739 - DNA, 582 bp, Homo sapiens
tttacctacactgttycggcagcaggaaaagccctgacttttctactcctccaagagagcccaaatctcaaggcatgctaaaggaacaagcgaggaaaatgagaggacagcgaggaggaagggaaggagcaaagggaacactcaagtgtctaattctttgcatctgtaattagcttatttaatcacctaattatgaaatgaaattgtgctttgccagtaatttcgaatttcgggacttaaatgggaaaaggtgatatctttgcgccatctagtgttgtgtcttgaaatgacacacttcttgacgtctcagcccagaggagctgcaggcagccttacataaccagaaatagcaagattagcctctcctgttacataaccgtgagaagtgtttcaaagcagaagattatgcattcctagcaccaaatgaatcttctcgatagttagtaagataatccctaaatctagggcaaggcagcaattatgatcctattatcatctggaagttcaggtatagaagagaactctagcagggtgcagtggctcatacctgtgatcccagacctttgaaaggctgagatggga

SEQ ID NO: 42740 - DNA, 511 bp, Homo sapiens
tgcaggaaaagaacaatttcctcatattaaggtatgaaggtatgttctggaggcttcattcactttttttttttcttttttgagatgaagtctcgctctgtcactcaggctggagtgcaatggcgtgatcttggctcactgcaacctctgcttcctgggttcaggcaattcttctgcctcagcctccctagtagctgggattacaggtgccyaccaccacacctggctaatttttgtatttttggtagagacagggtttcaccattttggccaggctggtctcaaactcctgacctcaggtgatctacctgccttggcctcacaaagtgctgggattacaggtgagaaccattgcgcccagccttattttactttttagggtcacatatgtcttgtaaataatgttaagtaacctactcaagaaatcagacgtcacttctttgaaattctcataatcgcaatgaagttgggaccctctcaccaccccagatttctattttgtctaaatctt

SEQ ID NO: 42741 - DNA, 1310 bp, Homo sapiens
gcattttaatattttcctttgtctctatcagtgagtttgggaagagaggatgtaaatgcgtgtctttaggttgtcatttttccaagaagcataatttatcttgtttaagtgtttcatcatcaaacacagacatctattattggtttgcactacattaatacagtgacagtcccaggagctattgaggtttatgggactcttttatcttgctgtaaattgtcccagagcactgtgctttttttttttgcttctaggccgtcacttctcagtactctgtgtctccagtctcctcctactattttcctgattttaatgttctgaggaattatggaacagatgctacatttatcttgcttaaagtgacctccagaataaagagcattttatttaacatgaatttgtaacatctgtttctggtggttttaaaataatacattwatgttttgctttttttttttttacggctgttagcacatgaggttttgaccaagaatgaagacctagtttggggaggtgttattctataattcttaattatagtccagagcaactgggaagggctgttcaaagtctacttgtgacaagtgctgaaatagagaaagcagaaatgcttgaggaagttggcttaatactgacatgttcaacagggatgttcaaaccaacagtaataagtgaaggactttttacacataaataatctcattcagttgactaaacaatcttataattgtatattatattgtaattaaaccacattttgttagataatgtggttttattttatttatctttgttaaggataaatccatgttttacgaacagctcaaactatagtggacacctagcagttagacgcaatgcaatgggataagtactacaaatggcttatcccaccaccctctcactccttgagctcagtccctgacaaccactagtctactttctgtttttatagattttactcttctggacatatcatattaattggattatacagttgtggccttttgtgtctagtttattttattaagcataatggtttcagggtacactcatgatataacatgtataagtactttattccgttttgttgcttaatgataatattctattgtaagaatatatctcattttgtttattcattcacccatttatgctcattggaactattttcacattgtagtgattatcagcaaattttcttgaattctgttcatgaatcctgaacattcaagcacaagttcttgtttttttaatctttgcaattttgacagataaaaattccattgcagatttaactcgtatatgtt

SEQ ID NO: 42742 - DNA, 1310 bp, Homo sapiens
gcattttaatattttcctttgtctctatcagtgagtttgggaagagaggatgtaaatgcgtgtctttaggttgtcatttttccaagaagcataatttatcttgtttaagtgtttcatcatcaaacacagacatctattattggtttgcactacattaatacagtgacagtcccaggagctattgaggtttatgggactcttttatcttgctgtaaattgtcccagagcactgtgctttttttttttgcttctaggccgtcacttctcagtactctgtgtctccagtctcctcctactattttcctgattttaatgttctgaggaattatggaacagatgctacatttatcttgcttaaagtgacctccagaataaagagcattttatttaacatgaatttgtaacatctgtttctggtggttttaaaataatacatttatgttttgctttttttttttttacggctgttagcacatgaggttttgaccaagaatgaagacctagtttggggaggtgttattctataattcttaattatagtccagagcaactgggaagggctgttcaaagtctacttgtgacaagtgctgaaatagagaaagcagaaatgcttgaggaagttggcttaatactgacatgttcaacagggatgttcaaaccaacagtaataagtgaaggactttttacacataaataatctcattcagttgactaaacaatcttataattgtatattatattgtaattaaaccacattttgttagataatgtggttttattttatttatctttgttaaggataaatccatgttttacgaacagctcaaactatagtggacacctagcagttagacgcaatgcaatgggataagtactacaaatggcttatcccaccaccctctcactccttgagctcagtccctgacaaccactagtctactttctgtttttatagattttactcttctggacatatcatattaattggattatacagttgtggccttttgtgtctagtttattttattaagcataatggtttcagggtacactcatgatataacatgtataagtactttattccgttttgttgcttaatgataatattctattgtaagaatatatctcattttgtttattcattcacccatttatgctcattggaactattttcacattgtastgattatcagcaaattttcttgaattctgttcatgaatcctgaacattcaagcacaagttcttgtttttttaatctttgcaattttgacagataaaaattccattgcagatttaactcgtatatgtt

SEQ ID NO: 42743 - DNA, 602 bp, Homo sapiens
gcatcacttataggacataatgccatgagtaacccatatacagaaaattcacagcctgaactggcttcggggaagaccaaggcgcatttggaggagaaggccagccctaaaggctggaagtgacattcctgttgataaagggcagagcacgagcmaactgagagaggagatgcaaagacaaaaatttcatgcaaaggatgggtgtgttcagaggctgatgagctgcaggttgcagagaggccctatcatggccctctgttatttgtgctgtctgctcccttctctggtggtagcacacctgccactcctcatcatcctggtatggacgcggtttttctctgccctgaccccagtccgttctccaccctgctgtgccccactctgtgctcaaggagactgactcctgcagactgaatcccttggttccctggccagctggcttctgattgggccctgcaggatattgaggggaagaggagggagaggatgggctgtttgttccctgttccctccttgccttgcaaaggttgtgctgtgcccccaagaccacagcagccccacccacctggccccaggcctaatggctcctctaagggttctcc

SEQ ID NO: 42744 - DNA, 602 bp, Homo sapiens
gcatcacttataggacataatgccatgagtaacccatatacagaaaattcacagcctgaactggcttcggggaagaccaaggcgcatttggaggagaaggccagccctaaaggctggaagtgacattcctgttgataaagggcagagcacgagccaactgagagaggagatgcaaagacaaaaatttcatgcaaaggatgggtgtgttcagaggctgatgagctgcaggttgcagagaggccctatcatggccctctgttatttgtgctgtctgctcccttctctggtggtagcacacctgccactcctcatcatcctggtatggacgcggtttttctctgccctgaccccagtccgttctccaccctgctgtgccccactctgtgctcaaggagactgactcctgcagactgaatcccttggttccctggccrgctggcttctgattgggccctgcaggatattgaggggaagaggagggagaggatgggctgtttgttccctgttccctccttgccttgcaaaggttgtgctgtgcccccaagaccacagcagccccacccacctggccccaggcctaatggctcctctaagggttctcc

SEQ ID NO: 42745 - DNA, 852 bp, Homo sapiens
cttaggtattgtgctgttaaaattagtcactgacagactaagaagttctgggaagttttgtgaacaggaagaaggtcattatcatcagcatcataatatacattcactgggcatttcctatggcccaggaattgtgctagctctttgcatgcattatctctttcgtccccacaacacttctatatggtaggtattgtacttccctacattggtatggctttttttacaaaagaagaggaaagggaactccttggaaggttgagaatcttgcccaaaatcacacagctgacacttggcagagtgagcactgtttctcaggtctgtctcactccaaaggtggactctttattttttatttttattttatttatttatttatttattttgaaatggagtcttgctctgtggccaggctcgagtgcagtggcacgatctcagctcactgcaacctccgcctcctgggttcaagcaaatcccctgcttcagcctcctgagtagctgagactacaggtgcatgccaccatgcccagctaattttttgtattttagtagagacagggtttcaccatgttggccaggatggtcccgatcccctgacctcatgatccgcccgcctcagcctcccaaagcgctgggattacaggcrtgagtaaacgcacctggccaggtggactctttaaacaacgctaaagcactcccagcagtcctgccttggttttctgcttaaggttttcatttataatagtcatattcacttatcaactcattaatgcggcgaagacttataaggaactagtaagtgccagtcccaatgctcagcaatggggaaacatttacagacaaaaattagca

SEQ ID NO: 42746 - DNA, 386 bp, Homo sapiens
gttttcacatcttagaagatgacttggtttccgttacaaagtatccagtgttttttatatatccatctcccacattctcaagtacataaggtgagattgtggtgatagttccatgtttatgcatttggaagagaaccacagctttttcaggagccaagaaacaataccatagaagaagcgctatttacaaataattaaaatgcacacatgcatgtacacatacacacacacacacacacacacacacacacacacasagagagagagagagagagagagagagagaacagatgcagagaacagactcagccctcttagaagcatgtcaatggaggcatgtcaacactcaatgaacaggacggccaaaagccaggaaggtgaactca

SEQ ID NO: 42747 - DNA, 1090 bp, Homo sapiens
cagcgctgccccttactcaggacataatgccaggcagggaggcctggmtgtacgcagagtggctttgacgactcaactcatgcttcacaatctatgttgctgctttcacgtaacctcagaagttatctgtggtctccatcagtgacgatcacgtcccgttgggggcggaacgtgcagggagaacagaggctccactaagccacccccatgccacaccaacaacgaccctctggaaaactccctctggtccgcccagtccccttccttccccactcacccacacaccaccaccttccctccaggctcctgcacactgggaagtccagaagcatccagcatcctccaggcctccttccgttgtgccaagcaagggcccgggggagagcagagctcaaggctgagggaaggcggtcatcctggcgctggggattccgtgcccctccaaaactccacacggacggtgctcggcaaaacagcctcggagttctaggtggtttccatggcttggaacttataacctcattttctttttttcccaggcagagaaaatgccttggctcacagcagcactctggccagcagctgctaattacccacgtgtggagaagggtggcagggtggaggccatggggagcgcgctgagtcctgggaagcaggacaggaagctgggaaaccttcctcctccccatggcacagggaagctctgcagggaagcccaggccaatgcggggaggcctggacactctaacaaaggctgtgcccgctccattccctgctgcctggaagtgcagccctttagggcaagcaaggaccagcccctcccccacactgtgctagtccatgtgcccaccactgtgacaagcaggggggtcacacagtccaagtgtgcttctgctcaggacacagtccgggggccgctctgcagggagctccacacactcatgcaaggcccagaatggcccacaccgctcctgttcccattccttcagcaagtgaggcacctggcccacctagatgtgggagttggagcatagagacctcctggagccgggaaggagaggggtcgccgcactgtgagctgatcctatgg

SEQ ID NO: 42748 - DNA, 1090 bp, Homo sapiens
cagcgctgccccttactcaggacataatgccaggcagggaggcctggawgtacgcagagtggctttgacgactcaactcatgcttcacaatctatgttgctgctttcacgtaacctcagaagttatctgtggtctccatcagtgacgatcacgtcccgttgggggcggaacgtgcagggagaacagaggctccactaagccacccccatgccacaccaacaacgaccctctggaaaactccctctggtccgcccagtccccttccttccccactcacccacacaccaccaccttccctccaggctcctgcacactgggaagtccagaagcatccagcatcctccaggcctccttccgttgtgccaagcaagggcccgggggagagcagagctcaaggctgagggaaggcggtcatcctggcgctggggattccgtgcccctccaaaactccacacggacggtgctcggcaaaacagcctcggagttctaggtggtttccatggcttggaacttataacctcattttctttttttcccaggcagagaaaatgccttggctcacagcagcactctggccagcagctgctaattacccacgtgtggagaagggtggcagggtggaggccatggggagcgcgctgagtcctgggaagcaggacaggaagctgggaaaccttcctcctccccatggcacagggaagctctgcagggaagcccaggccaatgcggggaggcctggacactctaacaaaggctgtgcccgctccattccctgctgcctggaagtgcagccctttagggcaagcaaggaccagcccctcccccacactgtgctagtccatgtgcccaccactgtgacaagcaggggggtcacacagtccaagtgtgcttctgctcaggacacagtccgggggccgctctgcagggagctccacacactcatgcaaggcccagaatggcccacaccgctcctgttcccattccttcagcaagtgaggcacctggcccacctagatgtgggagttggagcatagagacctcctggagccgggaaggagaggggtcgccgcactgtgagctgatcctatgg

SEQ ID NO: 42749 - DNA, 568 bp, Homo sapiens
taatctattattaattgttgagaataattttacctgtaggtcatacttatgaggacataggataatgtcttcaatgatgttctcaacaatatcctcatagaatattcctcaatgtgtgtggatggtataatgccagcatgagtcagtaaaagcagttttcaaatttttctttggggaaagatggtgcatagrtaaaggtgccccatgtaaacaacttcgtagtggtgtggttcaaactgaggttaaattgttttggatgttagaggagtggctggactacttgtactttaggaattttccagaaatattatttcttttgactaaaatttggtaagtcctgagtgtcagtgagtttgaaatttttctgtctgataagcacctggactgaagatattctctcatacttatagctatagttttctgctgctctgagaataatagtgacatcctctcatgaaatttgaggacttgataggagagaactcctcctcacgaaggtgggttgacaaagtacccaaggtcaatgacatgattttccttggaaaagaaaatgaaatctactctaact

SEQ ID NO: 42750 - DNA, 1165 bp, Homo sapiens
tctgtttttacttaagctgcttcaattcaggagagactgtgctgtaggtcttagtgagccatgagtatcccagcccatcctgcagtcttgttttttttctttttctatcatgaacattaaacataatccaaaactctttattatggaaatattcagccaggctcacgcctgtaatcccagcactttgggaggccaaggcgggcagatcacttgaagtcaggagttggagaccagcctgggcaacatggtgaaaycctgtctctaaaaaaatacaaaaattagctgggtgtggtggtgtttgtctgtagtcccagctacccatggagccgaggcaggataatcagttgaacctgggaggtggaggctgcagtgagctgagatcatgccactgcactccagcctgggtgacagagtgagactctcaaaaaaaaaaaagaagaagaagaaaaaattgttcaagcatacacaaaagtagaatagtatagtgtatgcatctatagcaattgtccatattaatcatctatccctctacttttttttctggaaagttttaaaggaaattccagacatactccatttcacccacttcagtatgcacctctaattgataaggatttttttcttttttaacataaccataatgccattataatacctaaaagatgtaacaatacttccttaatatggggtatttaaatgaagtagagagataccaatcggatttgacaaaatgttgatgatttgttaaatttacttccaatattattattattactggtagaaggatttacttatgatgttttgtttttaagactttattttagagaagtttcaggttcacagcaaaattaagagaaaggtacagaggttttccatgtaccccttattcccacacctgcatagcctccttcattgtcaacatcttccaccagagtggtaaatttgttaaaattggtaaacatatactgacacatcataaacactcagagtcccaatgttcaaaaaatgaaccttagagttcacttttggtattgtatattctatgggtttggacaaatgtaatgacatgtatccatcattacagtatcatacagaggatttttactgccctaaaaatcttctctgctccatatattcaacccctgcctccataccctggcaatta

SEQ ID NO: 42751 - DNA, 1165 bp, Homo sapiens
tctgtttttacttaagctgcttcaattcaggagagactgtgctgtaggtcttagtgagccatgagtatcccagcccatcctgcagtcttgttttttttctttttctatcatgaacattaaacataatccaaaactctttattatggaaatattcagccaggctcacgcctgtaatcccagcactttgggaggccaaggcgggcagatcacttgaagtcaggagttggagaccagcctgggcaacatggtgaaaccctgtctctaaaaaaatacaaaaattagctgggtgtggtggtgtttgtctgtagtcccagctacccatggagccgaggcaggataatcagttgaacctgggaggtggaggctgcagtgagctgagatcatgccactgcactccagcctgggtgacagagtgagactctcaaaaaaaaaaaaraagaagaagaaaaaattgttcaagcatacacaaaagtagaatagtatagtgtatgcatctatagcaattgtccatattaatcatctatccctctacttttttttctggaaagttttaaaggaaattccagacatactccatttcacccacttcagtatgcacctctaattgataaggatttttttcttttttaacataaccataatgccattataatacctaaaagatgtaacaatacttccttaatatggggtatttaaatgaagtagagagataccaatcggatttgacaaaatgttgatgatttgttaaatttacttccaatattattattattactggtagaaggatttacttatgatgttttgtttttaagactttattttagagaagtttcaggttcacagcaaaattaagagaaaggtacagaggttttccatgtaccccttattcccacacctgcatagcctccttcattgtcaacatcttccaccagagtggtaaatttgttaaaattggtaaacatatactgacacatcataaacactcagagtcccaatgttcaaaaaatgaaccttagagttcacttttggtattgtatattctatgggtttggacaaatgtaatgacatgtatccatcattacagtatcatacagaggatttttactgccctaaaaatcttctctgctccatatattcaacccctgcctccataccctggcaatta

SEQ ID NO: 42752 - DNA, 1165 bp, Homo sapiens
tctgtttttacttaagctgcttcaattcaggagagactgtgctgtaggtcttagtgagccatgagtatcccagcccatcctgcagtcttgttttttttctttttctatcatgaacattaaacataatccaaaactctttattatggaaatattcagccaggctcacgcctgtaatcccagcactttgggaggccaaggcgggcagatcacttgaagtcaggagttggagaccagcctgggcaacatggtgaaaccctgtctctaaaaaaatacaaaaattagctgggtgtggtggtgtttgtctgtagtcccagctacccatggagccgaggcaggataatcagttgaacctgggaggtggaggctgcagtgagctgagatcatgccactgcactccagcctgggtgacagagtgagactctcaaaaaaaaaaaagaagaagaagaaaaaattgttcaagcatacacaaaagtagaatagtatagtgtatgcatctatagcaattgtccatattaatcatctatccctctacttttttttctggaaagttttaaaggaaattccagacatactccatttcacccacttcagtatgcacctctaattgataaggatttttttcttttttaacataaccataatgccattataatacctaaaagatgtaacaatacttccttaatatggggtatttaaatgaagtagagagataccaatcggatttgacaaaatgttgatgatttgttaaatttacttccaatattattattattactggtagaaggatttacttatgatgttttgtttttaagactttrttttagagaagtttcaggttcacagcaaaattaagagaaaggtacagaggttttccatgtaccccttattcccacacctgcatagcctccttcattgtcaacatcttccaccagagtggtaaatttgttaaaattggtaaacatatactgacacatcataaacactcagagtcccaatgttcaaaaaatgaaccttagagttcacttttggtattgtatattctatgggtttggacaaatgtaatgacatgtatccatcattacagtatcatacagaggatttttactgccctaaaaatcttctctgctccatatattcaacccctgcctccataccctggcaatta

SEQ ID NO: 42753 - DNA, 1301 bp, Homo sapiens
ccaacatagaataagccctcaacaaatgttagctaacaatattgttgttattattgtcgttattgttattattgccaactctattcttccagtgatatagatcctattttctattgagagaaatacagtagtgggagatggtactgtataatttggtgtaatcttactgcattgatggtaaaacacttctttcattattttattttgcatacaggtgggaattcgatgaccctagaattaaattttttgtgggcaacctttctctctttccatttccatcaatgtaaccatcccttagtaggctgtctttttatattatttaaaacatgaaaggagcatgtcatagacattactgctgttcatcaatatcccttttctttttgagtccgctgagctagcttgcataactttaggtaaggccaggtgaccaactggccaatgaaatgtatccatcccaggtggaggcaatgaaaagcccctggagcaacattctctagtcaawatttcttcaattctaatcatgaaaattatttgttgagagggcgaagcagcaaaattcaaacaggttagattgttatgttgccacacagaggacaactgcccaaaaggacaactgtcctgacctatagcacactttgcatgaaccaaaaataaattatagatgctaagccaccgagattttgtggttgtttgttacctagtctgtcttgactgatataaaatactactttatttttcatgcataactaatctggcattcttgacttaaaagagaagtagcacattcctcattttaatggactatcactgtgcttgtaccaaaaagatgaaaacttgagcaataatatttattgctgttaaagttcactttctattattcagtattctaatacttgtttccagatatttaagaacatataataaactgagctcattattttaccaacttaacacaataataccaataatcacaaaacaatttcttgcagagattagctggctatgaatatacacagataaacgttaatctcagatctctttgacattgcaaatgaagttatctagattatgatgatcgtgtcattaattataaaactaggacctcattttatatctaacatcaaacttaaccaggttagtttgtagatgatggattgttgtgggtggaaaagtgtatccaggactgagcaagccatagcaaatgctgattggacagaatttgtgtcaggcagcttaggctaagttatgctgcagtaacaaacagcctcaaagcaagtggcttataacaaattatttcctca

SEQ ID NO: 42754 - DNA, 655 bp, Homo sapiens
cacatttagactgtccattttatgtttttaagacataatttggcatttaaaaatattatactttctttgctcttccagtaaagtgtgatgatatagtcatatgtgtcaattaaaagattgcttgctacatcatttgctggcagggattcaatggagttacccagaaaagtgaatcttgaagcatttaccattcttttattgtgkgtcttttctatatttctgtcattatatttctttggacataaattaaagcagagttattttctattaaattgctcagctaaccattagtgattctggattttcagtgtcttttctcagaatacacatgcacacgaccatatccttcttttactggctttgattttaaaattctggcatgggtctggggtgtctctatatagcatttactgaaataattctgaatttccctcatgcttaggaaccactgtaggcttccattgacatcaagcttccaatgtcatatatgatatgaacttccatttttgttttaatagtatatgatagactaatattatatgactagcccactaaaatgcatgtacaaagactacattaattttctgataatttcaatgccaaactgttataataaagcgacatattttaagtactgaatatttgaaaattcttc

SEQ ID NO: 42755 - DNA, 655 bp, Homo sapiens
cacatttagactgtccattttatgtttttaagacataatttggcatttaaaaatattatactttctttgctcttccagtaaagtgtgatgatatagtcatatgtgtcaattaaaagattgcttgctacatcatttgctggcagggattcaatggagttacccagaaaagtgaatcttgaagcatttaccattcttttattgtgtgtcttttctatatttctgtcattatatttctttggacataaattaaagcagagttattttctattaaattgctcagctaaccattagtgattctggattttcagtgtcttttctcagaatacacatgcacacgaccatatccttcttttactggctttgattttaaaattctggcatgggtctggggtgtctctatatagcatttactgaaataattctgaatttccctcatgcttargaaccactgtaggcttccattgacatcaagcttccaatgtcatatatgatatgaacttccatttttgttttaatagtatatgatagactaatattatatgactagcccactaaaatgcatgtacaaagactacattaattttctgataatttcaatgccaaactgttataataaagcgacatattttaagtactgaatatttgaaaattcttc

SEQ ID NO: 42756 - DNA, 591 bp, Homo sapiens
ataattactatcagatttactgctatatacatcagcatactttaaaaaatatgtgtattttggccaggtgcggtggctcatgcctgtaatcccagcaccttgggaagccgaggcaggtggatcacttaaggtcaggagttcgagaccagactggccaacatggtgaaaccccatctctactaaaaatacaaaaattagccgggtgtggtggtgcatgcctgtaatctcagctacttgggaagctgaggcaggagaatcatttgagccgaggaggcggaggttgcagtgagccaagatcacgctactgcactccagcctgggcgacagagtgagagtctgtctcaaaaaaaaaaaaaaaaaaaagtgtagtttttaaaatgtgtacatacatacacacacgtattcagcaaaatagtaatctataatgctattttttccttgctttaaaggaattttaataatacatctgatagcattagattaattcacaaaattttattactttrtccttatctttaatatattgcaccaaaattaatgaaatatccccttgaggcacttccagtctatagagagttatctgaccactat

SEQ ID NO: 42757 - DNA, 726 bp, Homo sapiens
cgctaggccagtcaagccttttttttggtattctccgtgttgtctatttgcacaagcaaactttgtcaccccaggtcttaaataatttatgttctaaaggggtctactctttcttggtatttccacttctagagacttccctttaagtttccacrtgattttcaaacctgaatgctaatttctggcatattttattaataaagctgtggttttcctactgcaatgtctgattcctcaatgctgtttccttctgctataagtcagggattaggcagctcacgagccagaaagctgcaaaatctcttccagttctgtcattggacactttcttgtgtgcttaaatttacatttttctccactttttataattttttacatattaaaagttcatgggaccatttgacaccatttgttgaacaatagctgaatctctgatgcaattattgtttagcgttcatgggctagatatagaatttctagtggtcttctctgtgcttacaaagttttatttggaaaccagtggtgttccacaggtagtgttaatattttttctgatatgaactaaataaggacatatttgtgatttttaaaaattagatacacatctttgatcatttttataaagcctcttaattttgatatgtttgttattgtgctaatcagagttgtcaggtgaatgaaaccctgcaagaatcaagaaacttaagtcaactttcgatttagtca

SEQ ID NO: 42758 - DNA, 726 bp, Homo sapiens
cgctaggccagtcaagccttttttttggtattctccgtgttgtctatttgcacaagcaaactttgtcaccccaggtcttaaataatttatgttctaaaggggtctactctttcttggtatttccacttctagagacttccctttaagtttccacatgattttcaaacctgaatgctaatttctggcatattttattaataaagctgtggttttcctactgcaatgtctgattcctcaatgctgtttccttctgctataagtcagggattaggcagctcacgagccagaaagctgcaaaatctcttccagttctgtcattggacactttcttgtgtgcttaaatttacatttttctccactttttataattttttacatattaaaarttcatgggaccatttgacaccatttgttgaacaatagctgaatctctgatgcaattattgtttagcgttcatgggctagatatagaatttctagtggtcttctctgtgcttacaaagttttatttggaaaccagtggtgttccacaggtagtgttaatattttttctgatatgaactaaataaggacatatttgtgatttttaaaaattagatacacatctttgatcatttttataaagcctcttaattttgatatgtttgttattgtgctaatcagagttgtcaggtgaatgaaaccctgcaagaatcaagaaacttaagtcaactttcgatttagtca

SEQ ID NO: 42759 - DNA, 590 bp, Homo sapiens
taaatatagaaaatggggcttaaaagaggatgacaaaagtgagaccaaacttaagactttaaataaaaattggcaaacctattcaataattttaaaaactaaaaatcaccaattgggtgaaaaacaattctaactatattttacctaaaaataatatacctcaaactgaaaaagtagaaagtaaaagactaggcaagttacatcaaataaatggaaacaaatcacaaaatgaaagcagtatagctatattaatgacaaagtaaaagtcagttgaaagcattagagacaaaatgagctctaatgctcaytttagatagtcactgtagactatttaaatatcatgtgtatttatggactgtataacataacaatacattttgaaatattacataaaataatatgtacagtgacatatttaaatatgtgtatttatggactgtataacataacaatacattttattgcgactacagtgactatttaaatatcatgtgtatttatggactgtataacataacaatacattttgaaatattacacaagataatacatgttgaaatcttctgaaattacaaaatctttttaaaaga

SEQ ID NO: 42760 - DNA, 590 bp, Homo sapiens
taaatatagaaaatggggcttaaaagaggatgacaaaagtgagaccaaacttaagactttaaataaaaattggcaaacctattcaataattttaaaaactaaaaatcaccaattgggtgaaaaacaattctaactatattttacctaaaaataatatacctcaaactgaaaaagtagaaagtaaaagactaggcaagttacatcaaataaatggaaacaaatcacaaaatgaaagcagtatagctatattaatgacaaagtaaaagtcagttgaaagcattagagacaaaatgagctctaatgctcactttagatagtcactgtagactatttaaatatcatgtgtatttatggactgtataacataacaatacattttgaaatattacataaaataatatgtacagtgacatatttaaatatgtgtatttatggactgtataacataacaatacattttattgygactacagtgactatttaaatatcatgtgtatttatggactgtataacataacaatacattttgaaatattacacaagataatacatgttgaaatcttctgaaattacaaaatctttttaaaaga

SEQ ID NO: 42761 - DNA, 543 bp, Homo sapiens
attgaaagatataaaaatattatagcttacatttctgactatactgcagtattagaaatgtatcaaaaactagtaaaaggcaaataaaaaaatactcaaacccatcagacacccccttgtttccatttgctttcttcctcccacrtggatgccaatattgcgtatcacttatggctagtgatgattctgtttcactttactgatgttgatggatatgcatattattttaaacatcactgaaatgtgacaaacattcttgtggatacattgttttgtaaatttataaaagataaattaatatagttgaaatttttgtatatcttgccaaattcttgttcagaaaagttttaccaaactatatattaatcaatactgaataagaatacctgacaggtatatttatataatttttaagaaattgatactcactagattatttatactgttccaggaaatatttttaaaaaagaaagttcctcaaggtttttaaaaccagcaaagttcttgacaaaactaacactcaaatggagcactatagcacaa

SEQ ID NO: 42762 - DNA, 543 bp, Homo sapiens
attgaaagatataaaaatattatagcttacatttctgactatactgcagtattagaaatgtatcaaaaactagtaaaaggcaaataaaaaaatactcaaacccatcagacacccccttgtttccatttgctttcttcctcccacatggatgccaatattgcgtatcacttatggctagtgatgattctgtttcactttactgatgttgatggatatgcatattattttaaacatcactgaaatgtgacaaacattcttgtggatacattgttttgtaaatttataaaagataaattaatatagttgaaatttttgtatatcttgccaaattcttgttcagaaaagttttaccaaactatatattaatcaatactgaataagaatacctgacaggtatakttatataatttttaagaaattgatactcactagattatttatactgttccaggaaatatttttaaaaaagaaagttcctcaaggtttttaaaaccagcaaagttcttgacaaaactaacactcaaatggagcactatagcacaa

SEQ ID NO: 42763 - DNA, 1627 bp, Homo sapiens
gcagaattgctgggactccattaaatatttttacagttttactggtgcacttttgattaaataacctttgaatgaaaacatgtagggattatgtaataaagcagatgaacacacattattttgaccaacacaagccatcctagggatcttttgcattacaaaagcatcttatgtaatttgaaacacaactggacacaattagtagtacagaacaaatgagcactgaaagaaaatactatcctcatacttttaacacggaatcgattactttaaaaagcaaatccacagcggcaaagcatcggagaaaccgttctaaagaaaatctgcaaattaaaaccagggcatcagaaagttcttgcttgaactaacaaatgatgctcttcttaattcaagtctgcacaaatatgggctgcaggaggcatttaaattgatgtaacaatattggcccggttaatgctgtgttcatttaatgcatggcttaagcttctgtaaagtcatttttcaaatttcaacatcggacagaattagcaccctcatttttatgataatattgttaatttaatgcatggcttgaagttagacttcaaagtgaatcagaaaaatatgccttttctcttgtcagagacatctctcttcatgcaccagtggtttgaccttaaaattttaacttcaactgcacaaaattactctcatatttcaactattctttcataattcaatcagttagtttgtccattttagatagatcttgtaataccttgcccatgagagctaaaacaatttttaacattatctctttatgtttatactctggatagatcaagatcagaaacttttcagtataatattaaacatgcagttcacaatgaacttaataaaacctgcaaaaccgaaagacgaacttaagtggccaagggaagtctttcccactatttaaatctctttcctccgacctccattatggcactgaaaatcaagaggcaatgatgaattagatttgcacaaacaaaaacctacagtacacgagggcttccggcactgaaaatattgtattctttacttttcctctaaaacagtgagctatctccacaaacatctacccggcaagcaaaggaaggctgacagtgtaatggagggtgaaatgataatgtcctctttcgtaaatggaatccagccgatgataacaatgcactcacacagatttgcagggcgttctggatggcgtttcaaatatcccattcccctgcactttaagaacctgcagttgggtcgccctctacacaggagacaagtgaccattttaaacagactgagggaaaacctacaccatattactagagcaattatgtcagggcagaaacagaaggaggtgatggaggaaaaaaraataagaattcaacgaggcaaaattcgcagaacacacttaggattgggagagacaattcaagggaatgcaaatgaaaattagccagctaggaatctcctattatttagaagcctcaaactgttggtaactgtgtaaacattatgccctgtttggtagacattctggtaggtgcctgtgtgtataccctttggtgcataaatttcacttctagattttattcaatagaagcacacccaacct

SEQ ID NO: 42764 - DNA, 799 bp, Homo sapiens
atcctataccttacatctgaactttgtgaattttatttgtattcyatggcaagcaaaatgtatgtttgctaatttttattaaaaaatctcatttctcttttggctgggagtccctctctggagctctcctgtcctgtctcctttgtgattttctccttcccaaccctggagacacacaccctcccctccccgctgcaggtaggtctggctagagagggtccttgctggactctgctgcctgcaacctgcccacctgcccttcgaaagctcaggctcattctgtggctcaggggggctgtttattcactcgctctcatgataaagctgcatgtaaagcaagtgacaagaagctgatggacggggagtgacccaggaaacgtgtctcagctctttccttctctccacgtccttctcagggattcctagtttctcccctaagactgtctttttttctcctgattttgcttagtttgaggattttctttcgaactcatgtctgccaatttaattccaccattttagctcctaattggggtggagggtgaatcggtctcctgtgctcagagttggaattgggatctgcattctggcatcccttgatctctttattaagcacagccagcccttacagctcatctgggcacaattaacgtcatccagaatgtttgcatttagtttgggtgggactcttgcaggggcctggggaaagagaaagagtaaaatgcaattctttatctcccgagagaccaatatgcaaggagaggcttagagagaagaaggaaccaccaacctgactggg

SEQ ID NO: 42765 - DNA, 600 bp, Homo sapiens
aaaagaaaaaacttgactagaaagggggcatggrtgaggacacgctctgaagccctggagctacttcatcgtccagtaaccttcttgggcacgtgggatggtcttagattagaagacaatttatatccattttactctcgagacacttatttactaactgttgatgcaagtctcaggaacgctaatttctcttggcagcttaataaggtgtttttgatttgcatatttagaatttggatgactgtatttgaaattaccattgtatacttctatgactttagaaaaaaatgaaagaaaataaaaaacagaagactataatatagcattacatttgattctattcagttccattcatttctaatttatttgtggaaaaaataaatagaaaaatcaaatatacatgtaatatccaaaccttcgaccattcaattaggtgcataatattaaccacaaacgttgccaaaattttctgaatcgaatagcaacatattcataagccataatcttctcattaacaagtctgctattatgtaatactcagtttctccctaagcattctcttggggttaattattgactaatctgagttttatcttcaag

SEQ ID NO: 42766 - DNA, 751 bp, Homo sapiens
acagacatacacagatacagagacatacagacacacacaaacagrcacacagaaacctacagacacacacccctctgcccatttgtttcatttactgtctgtttaatcacaatatccgcagccttcagtttcaggtactggcacatagtaggtgctcaacaagtgtctgttggatgaataagcgcattagcggttcaattattctctctttgccctgtccctgaatattctggtacttgttctcttggcttgcctagatgcagttggaaaagagaaccagaagggattcctgcaatcatttcgggtagatgccaagctcctcagcgtggcttgtaaagtcctttgcgatgtggctcctgccaacttctcctgtctcattccccaaagccctctgatgtggccaacgccactctcagtggtttttaatcttttccaagacacagatttcttaaggagctgataaaagctgtagaccttctccaatatgtagtcacctgcgcattcaaacaatgttctggatttaatttttggggatccctaaggcctgtttatggatctccaaggagtacacaggacccaggttaagaaccactgtactgtcatattatttgagggtacagggctagggaaacccagaaagggaaaatgacttgcctagggtcatggatgacagaattggaaccgagaacccaggtctctggatctcaagttcagaactttctccctttcctcatcctgtgttgatgaatga

SEQ ID NO: 42767 - DNA, 607 bp, Homo sapiens
tgaggtttccctgagcaggagggctacaacctgcagttttgatgtgagttggaactcagtgcagggtgtgtgatctaaaaataagcagaaagactcgagtcagtggctgccccagtttttccagttctgacgaggcacttcggttaatagagatcagaagcttttaaaccagacaggacgcggtggctcacgcctgtaatcccagtgtgtccggaattggtgggttcttggtctcactgacttcaagaaygaagccgcggaccctcgcggtgagtgttacagctcttaaggtggtgcgtctggagtttgttccttctgatgtttggatgtgttcggagtttcttccttctggtgggttcgtggtctcactggctcaggagtgaagctgcagaccttcgcagtgagtgttacagctcttaaggcagagcgtctggagttgtgcgttcttcccggtgggctcgtggtcttgctggcttcaggagtgaacctgcagatcttcgcggtgagtgttacagctcataaaagcagtgtggacccaaagagtgagcagtaccaagatttagagcaaagaacaagcttccacagtgtggaaggggacctgagtggg

SEQ ID NO: 42768 - DNA, 607 bp, Homo sapiens
tgaggtttccctgagcaggagggctacaacctgcagttttgatgtgagttggaactcagtgcagggtgtgtgatctaaaaataagcagaaagactcgagtcagtggctgccccagtttttccagttctgacgaggcacttcggttaatagagatcagaagcttttaaaccagacaggacgcggtggctcacgcctgtaatcccagtgtgtccggaattggtgggttcttggtctcactgacttcaagaatgaagccgcggaccctcgcggtgagtgttacagctcttaaggtggtgcgtctggagtttgttccttctgatgtttggatgtgttmggagtttcttccttctggtgggttcgtggtctcactggctcaggagtgaagctgcagaccttcgcagtgagtgttacagctcttaaggcagagcgtctggagttgtgcgttcttcccggtgggctcgtggtcttgctggcttcaggagtgaacctgcagatcttcgcggtgagtgttacagctcataaaagcagtgtggacccaaagagtgagcagtaccaagatttagagcaaagaacaagcttccacagtgtggaaggggacctgagtggg

SEQ ID NO: 42769 - DNA, 668 bp, Homo sapiens
cagccagggcaacatagggagactctgtctctacaaaaaaaaaaaaaaaaaaaaaaattaaaattagccaggcatggtagcatgtgcacatagtcctagccactcaggagactgagacgggaggataacatgagcccagaatattggggctgcagtgagctatgattgtaccgctgcattccagtctgggcaaccaagcaagactatctcaaagaaacatgcaaaaaaaaacacttgaaaatacaagaattcttttttttttttttttttttttttttgtgagatagagacactctgtcacccaggctagagggcagtagggggatctcggctcactgcaacctctacctcccagattcaagtgatactcctgcctcagcctcccgagtagtgaggattatagtgacccgccaccacaccaggctaattttcgtactcttagtagagttgggttttcaccatgttggtcaggctggtctcaaactmctcacctcaagtgatctgctcgccttggcctcccaaagtgctgggattataagcggagccaccatgcccggccacaagaattcttaaaagatagctttactgttctctcccagaaagaccaacctcatcctaaccactactatcctacagtgatcttacaacaccttcaattgcaaaatgca

SEQ ID NO: 42770 - DNA, 668 bp, Homo sapiens
cagccagggcaacatagggagactctgtctctacaaaaaaaaaaaaaaaaaaaaaaattaaaattagccaggcatggtagcatgtgcacatagtcctagccactcaggagactgagacgggaggataacatgagcccagaatattggggctgcagtgagctatgattgtaccgctgcattccagtctgggcaaccaagcaagactatctcaaagaaacatgcaaaaaaaaacacttgaaaatacaagaattcttttttttttttttttttttttttttgtgagatagagacactctgtcacccaggctagagggcagtagggggatctcggctcactgcaacctctacctcccagattcaagtgatactcctgcctcagcctcccgagtagtgaggattatagtgacccgccaccacaccaggctaattttcgtactcttagtagagttgggttttcaccatgttggtcaggctggtctcaaactcctcacctcaagtgatctgctcgccttggcctcccaaagtgctgggattataagcggagccaccatgccyggccacaagaattcttaaaagatagctttactgttctctcccagaaagaccaacctcatcctaaccactactatcctacagtgatcttacaacaccttcaattgcaaaatgca

SEQ ID NO: 42771 - DNA, 603 bp, Homo sapiens
ttaaaggcttgttttaatttgtgggactaagtccagtacccaatagatgctaactattttggtaagtcaaaatctcttgtttaaaggcttgtttcaatttgtggtactaagcctagtaccaaatagatgttagctattttgttaagtcaaaatctcttgtttaaaggcttgtttcaatttgttgattttcacaaatgcaatttaaagctgttttcttttaacttatagtgactattctaatataacaagagaagtctgtttaatcaacatttaaaataatattttaatgacttatttaatatttaagaaaatgaataattcttttaaatatcattaatttgggctaatttatccactactcttcccaaagcaatgtctatattgcaaatgaaaccaataattaagttttaccttatattcaatgagtatgkgtaattaataaaaatgttttaaagaagaatgacactttttatataactttagttatattaacattctttttatcatttctggttctctttgttcattctgtgtattccagttactatctggggtcatattcttaatttaaaacttccttttactcgtcacctttttgctatt

SEQ ID NO: 42772 - DNA, 693 bp, Homo sapiens
tagtggagctggactgatacctattggccgaatgtgacctctgcctgtttcaaaggtgtttaatcctgatgtctcataaattaagactcaggcctgtaatcccagcactttgggaggccgaggtgggtggatcacttgaggtctggagttcgagaccagcctggccaacatggtgaaaccctgtctccattaaaaatacaaaaattagctgggcatggtggtaggcacctgtaattccagctacttgggaggctgaggcaggagaattgcttgaacccaggaggcggaggttgcagtgagctgagaccatgccctggcactccagcctgggcgacagagcaagactccacctcaaaaaaaaaaaaagtaaaaaagactcagtttggcctctgagttgtcagtttttagatcacagttatccagcctgagttccgtgggtcctttgctttgctcctttcagaatgtaaatgactcttcagctcatgatggcgtatgcccctaaaaggaagtgagatacaagttttagaagtccttcttagaaattttcccytttttttttttttttttttttttttaaataagagacagggtcttgctctgttgccaggctagagtgcagtggtgcaatcatggctctctgcagccttgaacttcctggctcaagcgatcctcccacttcagcctctcaagtag

SEQ ID NO: 42773 - DNA, 764 bp, Homo sapiens
ttcccggcctcgtgggccagaaccgaggggtaggaactgcacagggggttcctgagcaagagcaacttctcagggagggccaggccacgcgtggcctgggattctgtggctggaattaatgtcacccttgtgtatgtgtattggtttactgagtgctcacgtaggaggtaatgggaaaagaccttgggaactaccctggaggcagtgcagggctcggagcccgtatgcagaggaaactggggtccatgagggacatagctcctctcaaggctcccccctgggctgaggtgggatttagactctggatatcaggcctggggcctgggcgtagccctgtgttccctctgctgagtcttggttctctrggtgcccctctcaggagcaagggtgcctgtcttcacggcagccgcctcctccaagagcttccggctgatgagtctcccggtcctggagccccgccgggggcagggctgatgctgctggccagacataccggcccccaccctgccccagcagctgtggctttgcctctgtcctgtccttgttccttagatgtgccctaggcccgtcatccagccttgggcaggtggcccccttgcaggaagcccaggtccagacagcatgagtccagagagggaggggactttttccagggctaccccgcccatcggtggaaagccagggcatggagtcaggccctgagactgcaggagctggtcacccctcttcctacaactgcatctgcctccgctgacttcaaaccc

SEQ ID NO: 42774 - DNA, 764 bp, Homo sapiens
ttcccggcctcgtgggccagaaccgaggggtaggaactgcacagggggttcctgagcaagagcaacttctcagggagggccaggccacgcgtggcctgggattctgtggctggaattaatgtcacccttgtgtatgtgtattggtttactgagtgctcacgtaggaggtaatgggaaaagaccttgggaactaccctggaggcagtgcagggctcggagcccgtatgcagaggaaactggggtccatgagggacatagctcctctcaaggctcccccctgggctgaggtgggatttagactctggatatcaggcctggggcctgggcgtagccctgtgttccctctgctgagtcttggttctctgggtgcccctctcaggagcaagggtgcctgtcttcacggcagccgcctcctccaagagcttccggctgatgagtctcccggtcctggagccccgccgggggcagggctgatgctgctggccagacataccggcccccaccctgccccagcagctgtggctttgcctctgtcctgtccttgttccttagatgtgccctwggcccgtcatccagccttgggcaggtggcccccttgcaggaagcccaggtccagacagcatgagtccagagagggaggggactttttccagggctaccccgcccatcggtggaaagccagggcatggagtcaggccctgagactgcaggagctggtcacccctcttcctacaactgcatctgcctccgctgacttcaaaccc

SEQ ID NO: 42775 - DNA, 764 bp, Homo sapiens
ttcccggcctcgtgggccagaaccgaggggtaggaactgcacagggggttcctgagcaagagcaacttctcagggagggccaggccacgcgtggcctgggattctgtggctggaattaatgtcacccttgtgtatgtgtattggtttactgagtgctcacgtaggaggtaatgggaaaagaccttgggaactaccctggaggcagtgcagggctcggagcccgtatgcagaggaaactggggtccatgagggacatagctcctctcaaggctcccccctgggctgaggtgggatttagactctggatatcaggcctggggcctgggcgtagccctgtgttccctctgctgagtcttggttctctgggtgcccctctcaggagcaagggtgcctgtcttcacggcagccgcctcctccaagagcttccggctgatgagtctcccggtcctggagccccgccgggggcagggctgatgctgctggccagacataccggcccccaccctgccccagcagctgtggctttgcctctgtcctgtccttgttccttagatgtgccctaggcccgtcatccagccttgggcaggtggcccccttgcaggaagcccaggtccagacagcatgagtccagagagggaggggactttttccagggctaccccgcccatcrgtggaaagccagggcatggagtcaggccctgagactgcaggagctggtcacccctcttcctacaactgcatctgcctccgctgacttcaaaccc

SEQ ID NO: 42776 - DNA, 766 bp, Homo sapiens
aacaaacagttgtcagcatggatgggatgactgaggtcatttcttctatcctgctgacctgccagaaaagggaatagggaagaacgagaaatgaagtgcagcaacttccaccaaagtaactgacaatctctcttctcccagtcctgatgatctttgcaaatgggcggaggcagacaacaggaaagaacagataaaagaacagtggacaagtagttgagattctggtctggttctgatatgaactggatgtgaaaccttgagcatgtcacacctgtctcttcagctataaaagttatttctgatataaacatacatgaacaaattccatgcrtttcatgggttgtacttcacatagggcagcaaaacaatgggaaggaaatgaaaattttttaaaaaaacaagatttaattcagctaaaacttcccaagtgtaaaagtctactcctatgacatcattattccccccgccccattcagaggggcataagacatagaggagaaataatgatgagcagggaccgagaaggtcccggtctttttaagagtatttctttcaatcatcccttcatcttctatgcttccacttaatgctggtagacatcatggtgactatgatttccatgttcctgattcctcaaaatgggaaacctacagcagaaaagcatttttttttcccaagacttcagcaattggggaaaattgatttggaagggaaaatgttcagaacgagggttttctggaacttcagaagaacaaaaggaagaaaa

SEQ ID NO: 42777 - DNA, 766 bp, Homo sapiens
aacaaacagttgtcagcatggatgggatgactgaggtcatttcttctatcctgctgacctgccagaaaagggaatagggaagaacgagaaatgaagtgcagcaacttccaccaaagtaactgacaatctctcttctcccagtcctgatgatctttgcaaatgggcggaggcagacaacaggaaagaacagataaaagaacagtggacaagtagttgagattctggtctggttctgatatgaactggatgtgaaaccttgagcatgtcacacctgtctcttcagctataaaagttatttctgatataaacatacatgaacaaattccatgcgtttcatgggttgtacttcacatagggcagcaaaacaatgggaaggaaatgaaaattttttaaaaaaacaagatttaattcagctaaaacttcccaagtgtaaaagtctactcctatgacatcattattccccccgccccattcagaggggcataagacatagaggagaaataatgmtgagcagggaccgagaaggtcccggtctttttaagagtatttctttcaatcatcccttcatcttctatgcttccacttaatgctggtagacatcatggtgactatgatttccatgttcctgattcctcaaaatgggaaacctacagcagaaaagcatttttttttcccaagacttcagcaattggggaaaattgatttggaagggaaaatgttcagaacgagggttttctggaacttcagaagaacaaaaggaagaaaa

SEQ ID NO: 42778 - DNA, 619 bp, Homo sapiens
aaaaatgaggtgctttcaatagagaggattatgtaactcatgttttagttaggggaggtaacagtaattaatatgttatctgttaaattacataaacttttttttaaaaacctctagcattagtcaacaacaaaaaaaaagtaacctcaatttatggctgaatatgcttgacttcacaatgccaagaaaggttgtgggctcatttattttttcrgataactagacacatactatgacaaagctttttttagtaatattaccagggaactaatattctgaatttactgtgattggcacaggaaaatattaagagtgagagtgatcaggagtgattttaatgaaggtgaccagaaagcaactatatgattaccttttaaatagaatgctattgcaaatgtcaaactttaaacgggacatttggctttatacactaaaaaaaaaaaaaaaaaaaaaaaaaaaggcgttagtagtttcccaccaagaccgctacaaataaattcagaacatttatagaaatccaacattcacacttccctgtaactctaacctattgaaattagatgtaaaaggaagaaaaaaaatagaatatttaggttataaaaatcggcgcaaattcaaa

SEQ ID NO: 42779 - DNA, 1259 bp, Homo sapiens
  misc_feature (1)...(1259): n = A,T,C or G
aaaaagcctattattttacagtaattctacagtgacagtctctgaaatatttcatgaatcaaattggtgtatttaaaaggtttccccattcccgaattgcatagacagggacggggagcattgtgggtgctgcgacctcttcccaagcacagggtcattccacagagccaggagggtggtgcgagtgactgtgagtggagtgagggcagatacacatatgatcttccaataatctatttttaaaaaagggcatataagcaagggcactctcagaagaagctacttggaaaattgttaggaacaataataggattagccttattttcatttaatttggagtgaaattacccactgagctatgttttaagtcagggttgccatggcagcagtggaggcagtctaaatataggggatgatgtcatgtgccaaaattatctttatattaaacatacgttgggttcgtaatttaagcctcataggctataggtacattagttgaaactgacttttttttttaactagtcggattctaatttcatgcaggttggcttcctatcaatcccttgctttaacagagagttgccattttgagttcactttatagcatggtctagtcattatttttcttngcattaggaaggatttgtgtagtggtgagactagccaagtgttctttttttttttttttttttctgaagagatttgatggtgtagcctataacttgtacttctaataatatcaagaagaaagaaaattgatttcatttctgagttctccctctatggtttctaaattaagacatgatggttaacgggattaaggttgtatagtcttggctgggaacactgagggagcatttactccctttaaaatatgaacttatataacaaaagaamcaggcttccatacccttctgtgacagggaatgtgtagaggatagagaaggtaaggaaaaagaaaataaaaataaatgcattgaaaatgtgtcccaaaacaaatataaatgcatcgattcttaacttccatgactgagcttcagctccctgagacagagcctggaagcctcagtgtgccttcccaagctgtccacagctaccgatttggccccatcctggctccctccctgccaggcacgcccatccccttgcagtttgcccctgtgaacccatccctgtctttatgttactgggcgttttcatccctggtgcatttgttcagctgcacgtttccacgtggaaatcgcccactgcctatcttt

SEQ ID NO: 42780 - DNA, 760 bp, Homo sapiens
  misc_feature (1)...(760): n = A,T,C or G
ggggctgttacctttcactttactgatattatcttagagcttatgtatctgtcctgcctgaataggaaactttgaaaagcacacacacaatgaaccttacccaaatgtgactttccttaattttttttttttttgtttgcgactatcatgttggtgatagtatcgtgtgctaatattgaagtagccgatgctgtgcttttggacgctggaaaatgttcattttgctcttaagagntttggtgttctgataattttgtaaatcatgtggacataataaacgtgtcagtaactagcctttttttgggcaagctttaatggattaccattacagatgagagaattaggcttgtagaaataattgatgtgcctaaatcacatagtaatgacgttatgaagcagagattcagtctccagtcagtgttatactgcctgggagactagtgttaggagactgagttaatcctttttttttcgttttgagacaaggtcttgctytgtcacctaggctctagtgcagtggtgtgatcacagctcactgaagcctggacctcctgggctcaaacaatcctcgcatctcagcctcccaactagttgagactacaggtgtacacccccactattggcttttttttgtgtgtgtgtgattaggcatggggtcttgttatgttgtccagggtggtctcaaactcctgtatacaggaaattctgccaccttggcctcccaaagttctgggtttgtaggcgtgagccaccatacctg

SEQ ID NO: 42781 - DNA, 607 bp, Homo sapiens
aaagaataaagcaaatgtgataaaatattaatatttggggaatcttagtgaaggctacacagaatttttttactgtttatgcaacacttttgtaagtctgaaatggtttgaaaataaaaagttaagaaaactgtctctcaggctggtgtttttaaaaggtgtctccttcaaagagagagcaaagtagagaaatcaaacctgtcagtttgagccccggataattaacttttgcataatgccttattttttaaagaataatttttgtaccaaaataagatgtgttcctctctaygactgaatattgacaattaactgagtgggtgattcttcttcatattcaactgataaaataagcctttctagttttggttttttttccctgaaagttttgatgttgagagatcactttaacctttagattaggcagagtttgagttttaattaccacacatatattgcaggaaatttaaattgtctacaactttaaaaatacttatcatgcaaattcccagatatgccaacatattcaccaacagagacttttcctttataactggtggattcatttttggggaatggtgggaaataaaaagatctatgttgaaaa

SEQ ID NO: 42782 - DNA, 583 bp, Homo sapiens
tttcacttttgcaaatagaaaacacgccttagttttgggatgtaaatttcatcattgaaccaattgagtgcatttagcaaattatgtttttaaaatctgctgcaataatataatctcacaaacctttcatttaatatttacgtgtatctacttcctttgcttctgtcctcatgtgaagtgtttgcagactttatactgtaaactggaattccatatacattgaaggtttgtaaatcaaatttttttgtcagtcattgattctcagggagctagtttgttaaactaggttgtataactactaaaatctgtagcatgtttcagctggcttgtcacttagactgaaagtctacaggctacaaatacattttaaacagaaaacactgccataaacaggaaaagtaaggcacttcatattcaagaggaaactgttacgaaagaaaacagggttacaaacatatatatatttacacatatatgtgygtgtatatatatattgcactatacagtctaaattgtatatgtctgttcttgtaggatctgtttagaatgacatttcaattttaaacaatttgttaatactgag

SEQ ID NO: 42783 - DNA, 1435 bp, Homo sapiens
aatggcggtaatcataacaaaaggcttagaacaggaccttggcatgcagtaaacacttagagggattagtcatcattttaaatcattaataggatgtttttgtatataattaagtatctatgtctaaggaattacaaacattatatatatctttttctgcccctcttttaaataataaaatgtttcttcttttgagttacaactatggataatgtgttttgcttttttgcttgtttttcatgtcaaaaattaagccaatagtatcattcccatcagataactcttagaaaatccartaagtgacttatgggtgtttctttacactgttctattttctctcttattacagtggccattgcttatagaaattttattattctttctgtgtttgcataggtatttgataactgaaaaccatttcaagcttttgctgcatttgtgcatgattattatcttcagactagtaaaggataatacccgatgtaggcttcctagaaaggaatttcagctatcagagaagaaaattgcaacatgtaaactagagtgaggaaagcagggaacatttagaaaagctcccttatatgtttagagatacttacatgcagatctgcctattgtagaaacgatgtcaaggacatggagattaatgttggctttgctgttaatgtgctccaaacagccatcataagcaaaaggaggtcaacctccagtgtgccctggccattaccattccccacaaagagtcctaaaaaccatctcagagcaagacaatggtgtctaatgctgaagttctctaaagcccatctgacctggctgaggctccactggaagtaagcttccttcacaacataaatagaagtggctggagctcctctgagagcaaaggtaacaagaaaggtgttctcctcagggaatgggcccctgcaggctctgataggcttgatcctctgggttgctgggatcctactatcctgtacacagctggctttctgtggctgattttcagcctgtgagagagacatttctgggcttctgtatagcaggagtctataggccacagcagctgaacatttctcccagggaggctggccaaaagcccaggcacctcagggaatccaggatgttaaagaagaaatttctttcctctccttagccaacgagtgcagttggcttgcattcctgaacccaaaaaggataattaagattaacaaatgttaagcttaaataattatgaaatcttaatgaactcgtttttaaagaataactttataaccttatatagaaaataagtgcagaaacttaagttggatttttttttccttccctcctaaaaaacaaatttctaaataagataagagcctgactgcagaaagtttcagagaaggtaataatgggacacactcataaaaataggaagaaatcctatttacatcta

SEQ ID NO: 42784 - DNA, 1435 bp, Homo sapiens
aatggcggtaatcataacaaaaggcttagaacaggaccttggcatgcagtaaacacttagagggattagtcatcattttaaatcattaataggatgtttttgtatataattaagtatctatgtctaaggaattacaaacattatatatatctttttctgcccctcttttaaataataaaatgtttcttcttttgagttacaactatggataatgtgttttgcttttttgcttgtttttcatgtcaaaaattaagccaatagtatcattcccatcagataactcttagaaaatccagtaagtgacttatgggtgtttctttacactgttctattttctctcttattacagtggccattgcttatagaaattttattattctttctgtgtttgcataggtatttgataactgaaaaccatttcaagcttttgctgcatttgtgcatgattattatcttcagactagtaaaggataatacccgatgtaggcttcctagaaaggaatttcagctatcrgagaagaaaattgcaacatgtaaactagagtgaggaaagcagggaacatttagaaaagctcccttatatgtttagagatacttacatgcagatctgcctattgtagaaacgatgtcaaggacatggagattaatgttggctttgctgttaatgtgctccaaacagccatcataagcaaaaggaggtcaacctccagtgtgccctggccattaccattccccacaaagagtcctaaaaaccatctcagagcaagacaatggtgtctaatgctgaagttctctaaagcccatctgacctggctgaggctccactggaagtaagcttccttcacaacataaatagaagtggctggagctcctctgagagcaaaggtaacaagaaaggtgttctcctcagggaatgggcccctgcaggctctgataggcttgatcctctgggttgctgggatcctactatcctgtacacagctggctttctgtggctgattttcagcctgtgagagagacatttctgggcttctgtatagcaggagtctataggccacagcagctgaacatttctcccagggaggctggccaaaagcccaggcacctcagggaatccaggatgttaaagaagaaatttctttcctctccttagccaacgagtgcagttggcttgcattcctgaacccaaaaaggataattaagattaacaaatgttaagcttaaataattatgaaatcttaatgaactcgtttttaaagaataactttataaccttatatagaaaataagtgcagaaacttaagttggatttttttttccttccctcctaaaaaacaaatttctaaataagataagagcctgactgcagaaagtttcagagaaggtaataatgggacacactcataaaaataggaagaaatcctatttacatcta

SEQ ID NO: 42785 - DNA, 1435 bp, Homo sapiens
aatggcggtaatcataacaaaaggcttagaacaggaccttggcatgcagtaaacacttagagggattagtcatcattttaaatcattaataggatgtttttgtatataattaagtatctatgtctaaggaattacaaacattatatatatctttttctgcccctcttttaaataataaaatgtttcttcttttgagttacaactatggataatgtgttttgcttttttgcttgtttttcatgtcaaaaattaagccaatagtatcattcccatcagataactcttagaaaatccagtaagtgacttatgggtgtttctttacactgttctattttctctcttattacagtggccattgcttatagaaattttattattctttctgtgtttgcataggtatttgataactgaaaaccatttcaagcttttgctgcatttgtgcatgattattatcttcagactagtaaaggataatacccgatgtaggcttcctagaaaggaatttcagctatcagagaagaaaattgcaacatgtaaactagagtgaggaaagcagggaacatttagaaaagctcccttatatgtttagagatacttacatgcagatctgcctattgtagaaacgatgtcaaggacatggagattaatgttggctttgctgttaatgtgctccaaacagccatcataagcaaaaggaggtcaacctccagtgtgccctggccattaccattccccacaaagagtcctaaaaaccatctcagagcaagacaatggtgtctaatgctgaagttctctaaagcccatctgacctggctgaggctccactggaagtaagcttccttcacaacataaatagaagtggctggagctcctctgagagcaaaggtaacaagaaaggtgttctcctcagggaatgggcccctgcaggctctgataggcttgatcctctgkgttgctgggatcctactatcctgtacacagctggctttctgtggctgattttcagcctgtgagagagacatttctgggcttctgtatagcaggagtctataggccacagcagctgaacatttctcccagggaggctggccaaaagcccaggcacctcagggaatccaggatgttaaagaagaaatttctttcctctccttagccaacgagtgcagttggcttgcattcctgaacccaaaaaggataattaagattaacaaatgttaagcttaaataattatgaaatcttaatgaactcgtttttaaagaataactttataaccttatatagaaaataagtgcagaaacttaagttggatttttttttccttccctcctaaaaaacaaatttctaaataagataagagcctgactgcagaaagtttcagagaaggtaataatgggacacactcataaaaataggaagaaatcctatttacatcta

SEQ ID NO: 42786 - DNA, 598 bp, Homo sapiens
cacctagtaacagaagagttcattagtttgcacacacacatccacacactcgtatatacaggcatgcacatatctgtttaataaaataatgaagtggaatctttaatttaaatcaaagaaatgttataggctagtagaaatattttaagctataacctatacacagaagagtatcaaatgtatatgtatagtacagactcctcttctgatctccagaacataaatcaacttcctaggtatttcccaaccctccagtgacttgacatcattgtcagagtaaaatcctatattcttatagtaagttacaagggcctgtaagactggcttcatgctactgctgaatttcctactacaccttcccttccccaactttgaataatggttgagaatactgattttggagtcaattacctgggctccaatcccagctccctaacaaaatgggtgacctgggataaatatttaacctctgtgcctcagtatccttatatgtgaaatagcattcttcttgtaggattgttttaagaactgaattaacgctagyaatacacttaaaacagtgcttagtactccgtaaacactctataataaactactc

SEQ ID NO: 42787 - DNA, 573 bp, Homo sapiens
tgatgtggagaaggaatattacagcaaaaagagcagactttgtcaaaacaatgtstctgtcagtccctgtcattgaaccacatgagaaaaactaactcgtcaactggagcttcgcagaaggtcggccacctgcaggctggggtcttaaagaggaaaagtgcccagcccctggttgacttacctcaccgcaccttaaatgtcttgatattattacaagccgtgtttgggagagaagggagacagccccggcccagccccaccacatgactgtcaatggtccttacacacatttgaccagctgcagggtgcccaggcttcatatctggttgctgtccttggctcatttctctccttcacatcccagatcctgtcatcagcaaggcctgacacctctacttccaagggataactgaaaacaaccacctccactgttactactagcccaacctgccctaactgctggcctaaatcgctgcgagagccctaacctgtctccctgctttcttgctgtgaactgttctccacaaagcaccagggcgatctttctaatggcttcccacttcaatcagtaaa

SEQ ID NO: 42788 - DNA, 573 bp, Homo sapiens
tgatgtggagaaggaatattacagcaaaaagagcagactttgtcaaaacaatgtgtctgtcagtccctgtcattgaaccacatgagaaaaactaactcgtcaactggagcttcgcagaaggtcggccacctgcaggctggggtcttaaagaggaaaagtgcccagcccctggttgacttacctcaccgcaccttaaatgtcttgatattattacaagccgtgtttgggagagaagggagacagccccggcccagccccaccacatgactgtcaatggtccttacacacatttgaccagctgcagggtgcccaggcttcatatctggttgctgtccttggctcatttctctccttcacatcccagatcctgtcatcagcaaggcctgacacctctacttccaagggataactgaaaacaaccacctccrctgttactactagcccaacctgccctaactgctggcctaaatcgctgcgagagccctaacctgtctccctgctttcttgctgtgaactgttctccacaaagcaccagggcgatctttctaatggcttcccacttcaatcagtaaa

SEQ ID NO: 42789 - DNA, 1133 bp, Homo sapiens
tctgcccagcttttgctttctgcatgtgcaagatctcacattcatccagggatgttaagactttctctgtctttccagaacacgtgtaaagtcttcaacatgtttgtcaccctaatatcatctatggtatgaatataaagttgcttatcaaagcccactttcactatcttatttcccagaactccctgctatatttcttgctgttctgccagtttgctgcatgtcctaatcattactgcaaccacaaaattttgtttattggttacctttgagatttatatcattgtctgacaatgcccctggggacttggatattttcaagtcatcctcctgtggcagcaaagctgccagtcctcatgggatgccccatcacttggtgtaacttatgccacaaactctggatgagggtgggggaaatggttgcagccccaggctaaacaagtgtgtccagttgtatcactgctttttgtgaaggagctattccaagctccctactcagctattccagatgttagcacctatcaatattttattccattttgaaactgctcccaaaataagaagtgttttactgatctccatttttcagtgcctattctaaggcttgatacacattagaatatctgtaaattatcttgagtaaataataaaaagcctattttaagcagtcagcataaaatgcaggactttgaatagccatcagtttaaagtatttctttacttgtatcatagaattatttctcttgtaaaacaaccagataatcatactgtgaacttttctaatttcaggcaagcacagaaacaaagatttataaatatcagttgagaaatgcagattcagaaagaaataattaaatgtcctggagctaaaaaacttgtaagagtaaaaacaaatacggtccactttagggattgtgagttcaatgttacaattacacaaattataataataacatgagagtatattttattatttcggaagaaaggacttccatattctaataatagtaataatggcaacaatagtaataataatgatgaaaaatactgttttcagaatgtggaawattaaaaccactcattacgatgagcaactcatcataattctcagcccttggaccttgtgtatgagc

SEQ ID NO: 42790 - DNA, 583 bp, Homo sapiens
ttcgcttcattcctaaatggttatatccaactcagatgcagcacgcacttgaattccacctctaagacctcacttcatgaattatattttcatttcatcctctcmctgttttagctctttccgccgatactggaaagaccttattaaaaaaaacaacagtaacaatatcccctctttctatctacctcaccctcctttcttgctacagtttctctttgcctctcccagctccactttttccaaccaaactagttgctcgcatcctcagcctctaccttgatcctttcttgtctgataactcatggcatcctacctaatgctgcactgcaatggctctgatgataacatccggccaaacacaatggttcttgctgtccttacttccctgtacctcagtctgattaagctattgtttgtactgtaggtctctactcattcaaactctatcctcttgactaccattaccaagctcactcatgcttcttatcttttaagtttccattgttctgcttttttctaagttaatcctttgattgtggataacatgcctatttcaccaaccttctgtctttagcccacactc

SEQ ID NO: 42791 - DNA, 1061 bp, Homo sapiens
aaaccctgctggccttggcttctccatcttcaaatgagcataatcatttataatatccaaaataatattgtaagaattaagtaaaatgatttttgtaaagtacttggaaaagatgcctggcccatggaagatgtgcaaaaaatgttggctttattattattatcactactaattttatcagaattgaattccttcattcatgaaatggactatctactttattcagtttgtcgttgatgtacttcaatggcacttttataaataaaattattttttaaatcaaaatagtttcttttaatatraaaggtaagatattttattgctggttttgctctcctaagtagctactgctgttaaaattctgttggttttccacattttaatttgtccagcaaatctgcctgaatatacattttcctgttttttttttattttctggatggacagtattattttaaaacaggaaaaattaggtttttatttccaaatattttactagatatgtacatacacattttgcttgtttcagtgtttgtcttgatttctaataaaatgtggcagtaagacactcctccctgaccaagctttcatcaggctccactaagctgcttttctcctaggcctcaaccttggctcccatccttgccagatcggcattgcccagttttagcaggaatcctgctaagtcagtttagagagggtcccctctacccttccatctgaaaccccggcctgtcttcagcaagaatcctgtgaggtcggtctagcaggaatccccccaaccctttatgactgctcttaggagtgttccatccattgacttctccctaccccttggctgtaaaactctagcagcctttactgtatttggaatttatcccagctctatactgaggtttcttttcccctgttgcagtagtttctgaataaaatctgtctttactgcattaactaatgtttgatgttggttttctttttgacagtttcttgctgatgaagcttggatctggatcagaaccaccaccaaactcttggataggatcactggacctcccagcttg

SEQ ID NO: 42792 - DNA, 1061 bp, Homo sapiens
aaaccctgctggccttggcttctccatcttcaaatgagcataatcatttataatatccaaaataatattgtaagaattaagtaaaatgatttttgtaaagtacttggaaaagatgcctggcccatggaagatgtgcaaaaaatgttggctttattattattatcactactaattttatcagaattgaattccttcattcatgaaatggactatctactttattcagtttgtcgttgatgtacttcaatggcacttttataaataaaattattttttaaatcaaaatagtttcttttaatataaaaggtaagatattttattgctggttttgctctcctaagtagctactgctgttaaaattctgttggttttccacattttaatttgtccagcaaatctgcctgaatatacattttcctgttttttttttattttctggatggacagtattattttaaaacaggaaaaattaggtttttatttccaaatattttactagatatgtacatacacattttgcttrtttcagtgtttgtcttgatttctaataaaatgtggcagtaagacactcctccctgaccaagctttcatcaggctccactaagctgcttttctcctaggcctcaaccttggctcccatccttgccagatcggcattgcccagttttagcaggaatcctgctaagtcagtttagagagggtcccctctacccttccatctgaaaccccggcctgtcttcagcaagaatcctgtgaggtcggtctagcaggaatccccccaaccctttatgactgctcttaggagtgttccatccattgacttctccctaccccttggctgtaaaactctagcagcctttactgtatttggaatttatcccagctctatactgaggtttcttttcccctgttgcagtagtttctgaataaaatctgtctttactgcattaactaatgtttgatgttggttttctttttgacagtttcttgctgatgaagcttggatctggatcagaaccaccaccaaactcttggataggatcactggacctcccagcttg

SEQ ID NO: 42793 - DNA, 946 bp, Homo sapiens
tgtgtaaagtggaaataatatctgcctcacaaggtgggtggttataaaatcacaatataaatatattagacttattcgtgcataacttaattcaaatcttcgttgcaaaccacggaactaatatgtgtaagatcaacagaatagctctcttgcagatgaaaaaatttctcagggcacagaaattattgttagagttgtaagcagaattccaaagataaagtgccttctgtgccttacccacttatttatgctttggtttctttacccataatgggtaccaaatagtaccttttcatgcatcctccaacaaacttgtagatctcaagtattactactgaaaaaattttgaatcctcataggaaaatagatgcacttccagtattgaaaatataatgagctagccacagatttttaactcacaaagttaaaataatcataaactttagaacatatataaagtctgaaatacttgctgggaaattaaactaactctaggaaaattaaacgaacagtattatttagaaatgtcgtttataggtgttattttaaaagcatagccctttcaatccactaaaatattaagaattaaaacattctagaaatagaagcatagacaaagctattttcaaaaagcagtttctataagcatttgaatacccagaacgtaagaaggttcacaagagaagacttaaagatcataaaattaggatttgggatcataaaactttcattcaaatccaccacacctttcactcttatacaaaaataaatcaataaatatgtagcagcttacagtktgcataatataccatacagaaaatgattaataaatgaaaagacaaaaataccttaactagaaactcaaaatataggtcacagaataaggcataattacataaaatggtaattaaagaaagggctactattccaaatgtccacttgactc

SEQ ID NO: 42794 - DNA, 696 bp, Homo sapiens
attgaaattattgagacgtgggggttcttcattagcaagacataattttgtctgtcctgattgacacaacattatttgtaagaagtactttaataataattaaatattttatatatttctctattaactttatataacaaatatatccataggctgaagaaaaaaataaaagctttaaataccaaatctcatctttctatgagattgttctattatttcagatattgtctgcaggttagaataagaaggataaagttataataaatattttttgtgtgtgtttggaagttcccttccttaaaataaattttgctgtgtgatgaaagttattattccatttttaaaacgttaactaatatgaaatgtgttgagaaactaagtaaaatttatggagtaaaagcccttttgtcttacataagaaataatgacaagaaaatcccaccttcaccatcgaatgtgaaaaaagaaggctgctttaacattcttgtttggtatgtacacaaatcacttaagaaaactttacatgactgaactagtgagaagcacctttatattgcttcatkatacctagttgtcaattgatattcactgtagtattatttgtaataaaattttaaaatattaagaactacttgtcttgttctcagaaagatgagtgatataacaaatctatcacttatctatctatgaatatgc

SEQ ID NO: 42795 - DNA, 543 bp, Homo sapiens
tatgttgcatttttttatcatttagttcaaactaattctcatttgtatttctcatttgtattatttagacatgtgttatttaatttccagacagttgtgacttttcttgttattattgaaatttaacttaattcctttgtgattgggaaatatacacgaarctattccaatatttcaaagtttctggaggctttttatggttcatcagatattcgattttagtaaatatgctatgtgaacttagattatattattgtcaattgcttatgtctgtgatctcttaagattctgatttgttgctccagacccacacgatggcaaaggtgtccctgattctctctcctcagcagaggctctgtacatgggccatgtctgagcatcagctcaaacccagaattggtaattcctccacaagaaaagatatctggtgatctgcagctcacctgtttaccattctatttctggtaaatttctatttcttattccacctagtttttattgataccatagatttttgaagtcttgaatagtatgatttttgta

SEQ ID NO: 42796 - DNA, 555 bp, Homo sapiens
tcagaaagttatattgataagtactctccaataaaaagcaatttttgagtgcattaaaaataccaactttctcatcaaaacctacaaagtactgtataaaatgacatggcatgaagacaacagtgagcaaagtgtagccatcacatagaaaaagaaggagaagggctgtgatgaatacacagaagtcacataataagacaaacaaaactaaaggtaattaggaaataaaagaaccaaaatttctttttaaattcagcaaaatttagctttgcagcatggaaaaaaaatgttatctgcacatgaagaatcaatgttatttcttcactattggtattttccatctctgacttgaagttacaaactaactccagcaggaatgtttacaggttattatggaacatctgttacacagcaagcactgtcatatttgtttgccacatatatatataaaaacatcctcatgacttatgaagcattcctagttcttacctgaacaaattggctcaataaataaataaatttacttatgtcaatyataacaagagaaaagaataa

SEQ ID NO: 42797 - DNA, 510 bp, Homo sapiens
tgaagaaaatagctgtcaagtgagaataataccagcagcaaatctgtcctgccaaataaaaagaaaaagccaatccaaaatagccaaatcctgaaaaggtatattggcactgcatatgccttacatatgtaactatatttcaaagctatagtagtaaaaacagaatggaatatacagaaaaataaacaacaacaaaaaaaccaatggaacagaaatcactactcacacatttcagacttgatgcaaaaagagaatttaaaaaactgtttaacatagagtttctcaaaattatgcatatttgtgtgtcccccaaaacaacaacaaaaaaaaaccagtcagattgtgcagtcttttatatcccatgaagaggatgttggctttcactgtgaaaytgaagacagatcactaaagggaaagaggaatccttagagaattgaaaaacaatacaaaatatgttctatgtgagagaaaaataaaaaaaaactcgggctttccagaaactatttcctt

SEQ ID NO: 42798 - DNA, 592 bp, Homo sapiens
tttccctcattccagaaatcttttttattaaataataatgttgacagcaataggtcttgcacatactgcatggatgtacctgttatctgtctcctactttgtacttaatttgtgttgttttgttacaggggcctaagatcagggctgtcaccatttcattagatttctagatcccctcttctggcattatttgctatctttagctgtttttcacccatgaatataatcacccaatctattttcttatcatagtacttgattaaaaactgagtaaggtggccgggtgcggtgcttcacgcctgtaatcccagcattttgggaggctgaggcgggcagatcaygaggtcaggagatcgagaccatcctggctaacacggtgaaaccccatctcaactaaaaatacaaaaaattagccaggcgtggtggcaggtgcctgtagtcccagctactcgggaggctgaggcaggagaatggcgtgaacctgggaggcagcagttgcagtgagccaagatcttgccactgcactccagcctgggcaacagagcaagactccgtctcaaaaaaaaaaaaaaaaagaaaaaaaaagaaacaa

SEQ ID NO: 42799 - DNA, 592 bp, Homo sapiens
tttccctcattccagaaatcttttttattaaataataatgttgacagcaataggtcttgcacatactgcatggatgtacctgttatctgtctcctactttgtacttaatttgtgttgttttgttacaggggcctaagatcagggctgtcaccatttcattagatttctagatcccctcttctggcattatttgctatctttagctgtttttcacccatgaatataatcacccaatctattttcttatcatagtacttgattaaaaactgagtaaggtggccgggtgcggtgcttcacgcctgtaatcccagcattttgggaggctgaggcgggcagatcacgaggtcaggagatcgagaccatcctggctaacayggtgaaaccccatctcaactaaaaatacaaaaaattagccaggcgtggtggcaggtgcctgtagtcccagctactcgggaggctgaggcaggagaatggcgtgaacctgggaggcagcagttgcagtgagccaagatcttgccactgcactccagcctgggcaacagagcaagactccgtctcaaaaaaaaaaaaaaaaagaaaaaaaaagaaacaa

SEQ ID NO: 42800 - DNA, 685 bp, Homo sapiens
tgaactattttcagctttctccccactgcagaaaaaggaaagaaatatccaattttatctcaagccaagtgaaaaggaattcaaaagataaactttagagttttatatgtatcctctgaagtttgaggaaataagggattagtgtctgctatgtgcttaagaaatctaaaggcaaaatggtgggatctcaaccgggggaagggcagaaggaaagagattagactactttgggaagtactgccctttgaaataaaagactttttttttttttttaaataccacagagtgggtgttctttcaggaaaaaatcagccaggagccaagagaactatctggaatggatgggcaaggtaggaaaatctgactgaagtttaaaagcaacaactgcagctagtagatgcattgctcacattattgtaactgtgcatggaggttcccagtagggaaatatctgagaaacccacagaagccctagaagaaaacaagtaacataggaagtcaccataaccagaggacaagtccaggtcactagatcctaccagcccaaggctgcyttttctcttaatccactctccttctggaccccaagaggggaagaaccttagctattgggtgagagagaagaggcaaaagagctagaaaatcaaagcaaaaagaagccgtgaatgtcaaccttccctgcctt

SEQ ID NO: 42801 - DNA, 537 bp, Homo sapiens
aatgtaaagctcaataaatgtcagcttttattattagtctacatcctgagatttttgcaaatcccttaataccagtacagcaaataatttgcttcctaaaacacggcaaagtgtaaccaaaaaaagtaagcaatccctttgactcttaatgattctacaatacatgagtgaagtcattttcaaagctattagaataaactttatctctaaaataaactctatcaaactgtgtattcacctgagttggtgaattttgtatgctttctcgaaatatgttttaaatctggaaataaagkcacattgaggtgtaaatacagagcagtgagccagatatgcactaaggaagtggataaatgtgtacagtaaatatggcataaaataccactcaccctgtgacccagtcattagatgtcagagagggcataagcttggctggatagtactcttgctcagagctggtggctgaaagccagcagcaagcaatacttctcccagtcaaggaaataagcaccttggaggtctgggaaacactcacca

SEQ ID NO: 42802 - DNA, 717 bp, Homo sapiens
tattggtgcaatgatttataaattgctggagaccgcataatttataaacaaaagaggtttaattggctcatagttctgcacagaaaacagagtgccagcatctgctcagcttctggggaggcctcaggaagctttcattcatgggagaaggtgaagtgggagcaggcacttctcatggtgaaggcaggagtaagatgcactcaaagttatagtttgttgatcccctactatatgaaaaccacagtaatgtgcattgtcttttcctttgtgtttgcatggatcaattttaaacacaattttaacctttaaaaacgtgtaacttatttgtaaaatttctcatatgtgtaaatataaacattttatattactcattattgcactcacacccttactttgtcctagtcaattctatttttgcaaattagtatttatctaaaaaaaaaaaaccctgtaattttactctraaatcacagagcacaaaaatctaagtgcttattttaccaaatataattaaagacaatactgagaatcaatccatatactctaccaacacaagcacaggatagatacgctatctaggagttgtttctggcagaaaaatatcatatgctacaggaaggggtaagaaggaacctaaaactaggttttaggttttaattcgaacaatataatgaattgtcttacatgttatttaagcaagggtgctctttgtaattc

SEQ ID NO: 42803 - DNA, 497 bp, Homo sapiens
  misc_feature (1)...(497): n = A,T,C or G
ggcaactgtgcatgtggtcacgccggtggtggtgttagcatgggggcagggtgctggtgggtgcaggtctgtgtgtgttctatgtgtgctgtaagtagggctggtagctcagggtgggagatggtctgctgttctctgagactagtttctttcttgtaccattgttggcaccagaatgggcactggtgggggtggagctggctggctctgtgcctgccaaggatctcactgcaatgatagtccacggaggggaagcttcttttttttaaaacagacattggtttttgttttggttgttattttttaattgaaagacagatgaggaatcacattgaatttagtgcctgcaatttytggattcaatagtgttataaataagattaaaaagacaagataaagattttcaattcacctcacagatacataaaagtaggtattcaaaaaattatgatacatcatgtcaaatatattctacaaggaatagtattctnccatat

SEQ ID NO: 42804 - DNA, 1284 bp, Homo sapiens
atacaaacaattagctgggcgtggtggcacgcgccagtagtctcagctacttgggagaatcgcttgaagccaggaggcggaagttgcagtgagctgaaatcgcgccgctgcactctagcctgggtgatagagcgagactccgtctcaaaaaaaaaaaaaaaaaaaaaaaaagcactgaaaagtttcaatggccctggggtttcyagtgattcttccctcctgttgatctgtctcatcagttgcattacattttacccaaaatgaataatctcccttaaaaatcctttgggagaatggcaatatagacacaaatattattatttttctcctagctttgaaccagttcatggtttctttcattgagtactagatgaagtggctatcttgttttgtaagaaatttcctgtgaaaaaaaataactatgcttctttaaactctgtaatccccaggatttcatgtgaatccttctagttttctagttttcactagaagagagaatgaccaaggaaatagcaaatttccattttccagcttacggttgctcctggaatatgctaattgagtgtggaatagtcacaaaaatgtctcatgcatttcaagtgtttcacttctcctcatagaaaagcgaataaaatggaatttgcacaaattaaatgtgcctgtctcagaatgtgccccgcaatctttacacatgtgcatcttgttaaataatcactgatgctttaaatgacataagaaagcattagtcttttgcaacccaaagaatctaaatggactggaaaaatctgaaaagtgtgctttatcactttgtttacagcgaaattggaaagacaattggaaagaactaaaattagctctgttcaaaaattatcaaagagaattgtagagcatgcagttcacaaaaatgttatatgtcagagctgaaaaatcaatggactagctcatggttttattaaaaatgacccatgtttttcaagatgggctttcccattatgaactaattatctcacttttgtttgccttgtcattctctactgaatacgccatgtgccttcccttctccaaactctggacccaccttgtcttccaagcattgctgcagcaaccaacttcatggaggtgtaactacaaaacttcttacctcagtggcagcattttctatggctttctgcccctgtgcctctctggatgtgcagtggtagtgttgaacagttgctggaaaccacccagcactcacacatgtgcaacctagaagtgagaaggagttagtatgccaaagagtaa

SEQ ID NO: 42805 - DNA, 568 bp, Homo sapiens
aaaacaattcatttacatagcagcagttaaacacaaaggtctagagtccttttcaaattcatcacacctagaaataattaacaaataacagtttaatattttgaagcagttgttacaaatcatagcttgatacctacatgagtttttaatacatgctactatcaatttactgcaaaaatggcagtttccaggtggaggcatgtkatttctcatttgtaaacataaatataagaataactatacaaatgaatgaactctattctgaagccaaattcaaaagtattaaggaataggttgaaaatccatgcttttatggctcagctagatttgtctgattggtacccctgactataagcaaatattaaattttaaagtgaattattaacattcaataaaaaggtggaagtttcttacaaacaggttgttttctttgcaaagggatttaccacaaaattacttttcaaaaattgaggtacaacttacatacagtgaaatgcacagatcttacatgaccaatttgatgagctttggcaaatggatatacccaagtaaccaagatgcaaatcaa

SEQ ID NO: 42806 - DNA, 536 bp, Homo sapiens
  misc_feature (1)...(536): n = A,T,C or G
tggttgggtgtgttgtgtcagtgaccagtgtggagggctaagtgggtcctactcaacccaagggaagsccaactttgggtgcatttgagaataattagaattgtgtctcaggtgagacggaagcacagaaaacagtcgtttacagataccagtttctagcgccttctcagaatggagttcttggcactgtcttatagcttagaacacggcttgcaccagccttcacttatccccttttcatctcctatctcgattgctttgcattctctgttgcttgttgtgataaaatactttccaaaataaactttcagttgaattggcttttggttgatggcaagctgaaacgccgagccgcgcctagccnacttggcagctagggggagctcggtgcccgtgtcatggcttggcgcctccgctacaatgggctaggaacgggcttccatcagcagcggcggcagtttacgttgctgcaaaataccttaagtgtgaagttgtaatattgattttccagcagagattcgtgcaggacaaaatga

SEQ ID NO: 42807 - DNA, 574 bp, Homo sapiens
tggagcagaggcctatagaaggagggggacccaccaggtgaagagggcagggaatgcatccttggaagggggaacagcaagtgcaaaggccctgaggtgggaatgagctgaccatggaggcaaatgtaaggaaagccagtgtgtctgcggcacagagagtaaggaggagggtgccagataaacctgtggctccagtctgggacagacacaagccaccatcagccatggtggagcagctggcattcactctgaagacagatgacgggtattattcactttatctcagcagccaaggtagtattcttttagctgaatgtcaaggctcacacgtggaactgaaaacataactggactcacaaacactgcatttctatactttgtttgcgtgactacaacaaaacactttagactgggtgatttctaaacaacmgaaacttatcactcatagttctggaggctgggaagtccaagatcaaggcaccagtagacttggtgtctccagagggcccgttcctcacaggtggtgccttctcagtgcctccttacatggcagaaggggtgaacaagctccctt

SEQ ID NO: 42808 - DNA, 527 bp, Homo sapiens
cttccctgccaggcaataattggtaattgttcaagggtagacaacaaacttgagctagtctagtcatagacagggttacaatttattatccaaatggggtcattttttcctcaactttttattttgaaaaatttcaagtataccagaagtatcaaaagaataatacaataaatacaatatgctgaattacctagattctacaactgttaacgttttgtgacatttgttctatagctctttctctatcgatatgtccttttttccaattcatctgaaagcaaggtgcagacattattacactttttccttaaatactgcagcgtgtattatctcacagacacaaagaatattcttcttcataagcccagtattgccatcacacccagctattccccaaacattctttgtaggtgttcctccacttcccaggattatgtatttcattcagttattatgttttgtattctttttaaatctccttttcaatatcatttatrcaactgacatttttcaagaatccatgatga

SEQ ID NO: 42809 - DNA, 563 bp, Homo sapiens
tataaatgatgagtaacatttttcatgcatttacattgttctagattttattctaaaaattctgtgtataattaatgtgattctcttattttatgatttagatacagtcattagtatacattatgtagaccataaactaatacaaaggaaagtaaagaaatttgccaaaggtcatgtaactggaaagaggtagggccagtccctgagcctggcaagctggttccagagtccacacgcatattcatgatgttacaatagctgtcaggcctggaggctaccttggattgctccttgattcagaagccaaaggaggagagagcttcagaaaaagaggaagtggttgtctaccttgtgctgaagagttttttcagagaggttaaaataggcgamctctgtgggagatctggaacttgtaaaatgatagattatctttgagaagctgtttaaatgaagtgggtaaagcaaaatcaggtgttgagaagtagagtgtttctctgacttttggtctttaaaatccctgattcagaatcaccttgggtacttcatgaaaattcagattccct

SEQ ID NO: 42810 - DNA, 757 bp, Homo sapiens
attgtaggcactaatgggacccattaagataattcttactcttgctaaattcaagcaaattggtatgggagagggatggtaaggaggtcagaggcaaactggaagaatttatagtgtgtcctcccaatttcttaataatctaatattaaatcctttcttcatctcaaccattaattttattttctactttattaaaatatttgttaaattgtatgcaaccacaaacccaaagatgtcttttttaaaattatgatatacaattagatgaatgagtgaaagtttcaacattttaacttatttttatattttcagagtataaatccatgatgtctctgagatagaatatcttttcttgcattttttacaaataatcctatctagatccatcacagtgcaaaagaaatattgttgtaaagaaactactgattttattctaatgtgaaaactcaaagctgatttacttaaatgaaaatgaggtttctggctgggtgtggtgtctcatgccttggtaggctgaggcaggaggatggcttgaagccaggagtttgagattagcctggacaacatgcctcttctctaccaaaaaaagaaaaaagaacttaaaaaaaatgaagtttccgttgcaagactctttgttggcataaaaatatccagagataaacactataaggattaagtgctaattcagtttctacacyattaaagtttaattctaaaattttctggtaaaatcacgacttatttcaaattaggaatt

SEQ ID NO: 42811 - DNA, 629 bp, Homo sapiens
aaagaaaagggaaagcctatcacttaattgtagtatctttacagaccacatcttaaggcagcttgctttgaaacaggtgattttgtttccattttggaaggcaacaggtctgatattttccctggatagaggaaaggtgaagggaacaaagccctctctaaattgtggctacaggagtggcaggcaagtgcaagaataccccttttccacagagggaattaacccaaagggaatgactgaaagggtcattatgttctccaagacaatcaagcaagcagcatagagagtcaacgtgctgatgagggaatgttcccaatactgtgggtgctgttcaaactaccctcacacctagaaataacaaacactgtttagccagcttacaagtctgcaatttggtcagggctcaacagggaaasctcatctttgcagtacttgccaagagcagctctgaggctgaggactggaataactggaatcacttacaagtctggcagatgatgctgggaaaactcagtcagctgggttctgcaacagctctggctcctcagtcgtctccctctatccctacatgacttcttcagcatggcggcttcaaagtagccagacattttatgtgtgtgttgtcacag

SEQ ID NO: 42812 - DNA, 819 bp, Homo sapiens
gaaatgtaaacatagtatattatttggttctatagcaagtgacgcattatgatcatcataattaaaataccatttatgaaatttcaagtttttaaatcaagctaatagacatagcataaaaggcttaaaggtgtttaacaggatataaacttgatcacccttggcaatttaaaagtaaaatacaggccagtcacagtggttcacgcctataatcccagcactttcagaggctgaagtctgagtattgcttgaggccatgagtttgagaccatcctgggcaacacagtgaaaccatgtacctacaaaaaaataaaaaataaaaaattagccaggtgtggtggtgccacctataatcccagctactcaggaggctgagatgggagaattccttgagcccaggagtttgaggctacagtgagctatwatcaccactgcactgtataatcaccactgcactgcagcctgggccagagtgagactatgtctccaaaaaaaaaaaaaaaaaaaaaaagcgaaatgcagacagaggatttagaagaatttaaaagaagttcaaggatgttaacagttgtcatcttataaagtgaagtgtctggggaaaatcttagtggaacaggaaataaagacataatatcaagatataattattgttctgggttgaattgtgtcacctcccaaaacatatgctagagtcctagcccccagtaccttggaatatgaccttctttggagacagggtctttgtaggggtaatcaggttaaaatgaggccattcaggggaaggggttgggcaatacaaacccgtgcctttataagaga

SEQ ID NO: 42813 - DNA, 555 bp, Homo sapiens
tgttccaacataatttgaatatkatttacatcaatgcaaggaggcacaagaatgtatttggaaagaacaaaactccaagtgttagggaacttggttttcccttcagacgctgactctacaataatgtgatcagtttgcttcttgcttttgagtatgagaattctaaatgcagtctgtgacgtgactgtcctggactcccttatctccaaacttttccttatcttcctgttctaacagttcaagattcattaaactgggtgtccaataaaagtcatgtatggaacggccaacatgtaagacaggagaagggctcatctgcaaggctgtgaaaaactttcctgtcgttctaacattgtcaagacactaatgaacatcagaaatccttaaataataagaaaactcatgagagatgaccgacttgtctggaatggtgccacaaggcaaaggaaggacttgatagacaatacaaatcagatttcagaatcttagttgtaacccccaccactcactactattgagatgttcgccatcaacataaaaacagctggaatagat

SEQ ID NO: 42814 - DNA, 654 bp, Homo sapiens
aatacctattttcataaatcttagaaagagaggtctatgatatcttctaaatatatttttacrtatacttttaagaaaggatattgtaggggaaataattttcaaatttttaatctatatttaatagaatattttgaaggaactaattatgtatcacttttaaatctgtctataaactggaaaaaatgtcactatgtctgatacaaatagttttatgaacatgattgtgacaacaaaagagcaaccaaaattatttgggaaatgtactttaatgtttactaaacaatttactttcctctaacacattgtggatagcacatcaacatcccagaacttgtctttttctcacagcctggggaagcaatagattccacagcaaacattagacataaacttagtaaaaactgcttaatggaaacacttaaaaatatttatttcttctatatatttcttttagtgactgtatttatgaattccatcccatcttttttgctagaactattgaatttccctagactcttttatttagttttctgccatattggctttgtttgtttgtttgtttgtttgtttgtttgttttagatggagtcttgctctgtcaccaggctggagtgcagtggcgcgatctcggctcactgctacctctgactcc

SEQ ID NO: 42815 - DNA, 654 bp, Homo sapiens
aatacctattttcataaatcttagaaagagaggtctatgatatcttctaaatatatttttacgtatacttttaagaaaggatattgtaggggaaataattttcaaatttttaatctatatttaatagaatattttgaaggaactaattatgtatcacttttaaatctgtctataaactggaaaaaatgtcactatgtctgatacaaatagttttatgaacatgattgtgacaacaaaagagcaaccaaaattatttgggaaatgtactttaatgtttactaaacaatttactttcctctaacacattgtggatagcacatcaacatcccagaacttgtctttttctcacagcctggggaagcaatagattccacagcaaacattagacataaacttagtaaaaactgcttaatggaaacacttaaaaatatttatttcttctatrtatttcttttagtgactgtatttatgaattccatcccatcttttttgctagaactattgaatttccctagactcttttatttagttttctgccatattggctttgtttgtttgtttgtttgtttgtttgtttgttttagatggagtcttgctctgtcaccaggctggagtgcagtggcgcgatctcggctcactgctacctctgactcc

SEQ ID NO: 42816 - DNA, 973 bp, Homo sapiens
agcttataacctgggaagtaagtaagaacccattcctccaagattctcttaagcatatttgaacttttccttagcaccctcttcccccaggaactcttcctaagactaaagaggctttccattckatgttgtaccagtaaaagtctgcatgataactgatggctagtaagcactaaataaatattgttaaatgaataaattcataagtgaaaagaataaaccaggcaactgtatctaattctagcctatgttctcttttcctcagtcctctgggtttaggaaaagcttccctcttacatttcctgtcatacacagtctaaattctctctacccaaggtttacatcaacactttagcttatgttagccaggcttccttttaactgtatgcatatatatatatatatacacacacacatatatatagagagagagaggttttggaatacataaaaatatataaaaatatatgcaaatatatatgtataaatatatccaaatatatatttatacataatatataggatatataaatatataagattatatataatattaaaatatataaaaatatacattaaaaatataaaaaacttaaccatccctgtttttcagaacagtagtctgcaaattacaactattcatttacttttttgttctaggtagttgatactacttagctcttggggcaatcaactttctttcctagtcttagtactagaacttccaggaagctctgacttactgaacaatgaaaactccacagttaaatattttcaaaatcttatacatatttccatggagaagttacaaaattacaaagttgtttaagtgaatttacagaggttccctatttcacaaatagtgataaccttgaagagattaaaaactgtaaattggacattttaatcttgatagtagaattcactatgtgtcctaaaggaggtatagaagacataaaaacaagtgtgcctg

SEQ ID NO: 42817 - DNA, 973 bp, Homo sapiens
agcttataacctgggaagtaagtaagaacccattcctccaagattctcttaagcatatttgaacttttccttagcaccctcttcccccaggaactcttcctaagactaaagaggctttccattctatgttgtaccagtaaaagtctgcatgataactgatggctagtaagcactaaataaatattgttaaatgaataaattcataagtgaaaagaataaaccaggcaactgtatctaattctagcctatgttctcttttcctcagtcctctgggtttaggaaaagcttccctcttacatttcctgtcatacacagtctaaattctctctacccaaggtttacatcaacactttagcttatgttagccaggcttccttttaactgtatgcatatatatatatatatacacacacacatatatatakagagagagaggttttggaatacataaaaatatataaaaatatatgcaaatatatatgtataaatatatccaaatatatatttatacataatatataggatatataaatatataagattatatataatattaaaatatataaaaatatacattaaaaatataaaaaacttaaccatccctgtttttcagaacagtagtctgcaaattacaactattcatttacttttttgttctaggtagttgatactacttagctcttggggcaatcaactttctttcctagtcttagtactagaacttccaggaagctctgacttactgaacaatgaaaactccacagttaaatattttcaaaatcttatacatatttccatggagaagttacaaaattacaaagttgtttaagtgaatttacagaggttccctatttcacaaatagtgataaccttgaagagattaaaaactgtaaattggacattttaatcttgatagtagaattcactatgtgtcctaaaggaggtatagaagacataaaaacaagtgtgcctg

SEQ ID NO: 42818 - DNA, 1061 bp, Homo sapiens
ccaaaaaaaatgcttactgctgggaaatacagtaaatgctatccctgttgttaatgtctgcattttaattttgtatatatacatcagatttatgtttttgtttcatagggatctctagcaagatggaaaacagcaacaataatcagataatatcaataattgtgtttatattcactaatatcaagatatctaactgctctttcaaagtcctttgagaactccctcaaggcttcagaaagttcacatttttttgctttgttgaactgtggcaggttactggccataataaggacccagtgtagaattcagggatctactcctaattctcaggagtacatttcacatcataccctatttacctaagtctcatctctctggatcacaagccaaagtatcaaagagtgagatttagtttataagcatctttgaaatacatactcgtgttgagtcattatcttcacagacctacagaatgtaggagttaaagattatcgagatcaatctaccattcaacagacaaaaaaattaaaactcagaagaggtgaagcttgctgcttttttaattaaaagctataaattttttttgaaaagaaatgttttatttttaaaagaaarcattagtattgttctccaaatattttttcctaaatatacatatatatatgtatctaaataagtgatataaaccacttgaaagataactatttctcacataaataatttaaaagggagcacaagggtcaaccatctattttttttagttctcagagttaatggcttaatgggttatcatatttatgattgtagtcagcatctttttgttttttttttttagatctatccattatctattatccatccattctccaaacttattcatcccagttagattcagtcttggcagagggtttgtcatgcctctaaagctaagccaatttgactctttttggaatttaattctcatgttattatcttggtaagaggccataatttttttctcctcaggtgctgacttctttacctcaccacaactttatattgagtagtaagtaagtcatgca

SEQ ID NO: 42819 - DNA, 499 bp, Homo sapiens
atttcaccatagctatgcggctactattctagcattaagttaactttaaaactaatctatatcccagttataactgccttataccaaattccatcttactggtagttctacaatgttaagaaaagtgcaatgttagttcatacatgactttttttattaggatgactgcctgaagaaacttcaagtaagcctaactaatatatatgtgtgtgtgcgtgtatatatatatatatatrtatatgtgtgtgtgtgtgtgtgtgtgtgtatatatgtatatatatgcaggcgtatatatacacacatatatatgagtgtgtgtatatatatgcacgtatatatatacacacatgtatatataagtgtatatatgtatatatgagtatatatactctctatatatgacagtgtgtgtatatatatatatatatatataatctttgcctaaatactacagatagatagatagatagatagatagatagatagatagatagataca

SEQ ID NO: 42820 - DNA, 528 bp, Homo sapiens
tttcacaagtcaaaatggtgagcttctaaattaaaattgaagttgaccacatccttgatagggatgtgtcttcctttaaaaaaaaaaaaggccaggcatagtggctcacgcctgtaatcccagcactttgggaggccaaggcgggtggatcacccggggtcaggagttcaagaccagcctggccaacatagtgaaatccatctctactaaaaataaaaaaaaaattagccaggcatggtggcacgcacctgtaatcccagctactcgggaggctgaggcaggagaatcacttgaacccttgaggcggaggttgtagtgaggttgtagtgagccamgattgcaccactgcactccagcctcggtgacaaagcaagactctgtctccaaaaaaaaaaaaaaaaaaaaaaaaaagcaatccaccttcagtaagaggaaattaatctcaccccaaattatgttaataataatgacggcattggtggccagcatttataaaggcaggcaggcattcttctatgcacctgacac

SEQ ID NO: 42821 - DNA, 556 bp, Homo sapiens
ccagggcctaattaaccttcaccgttatgcgacgctscatttcacaaaatcatactaagcaaaaaagcaggacacgaaaccatttatatagtatgagcacagttttacgaaaagggttataaatatatatatgtatatatgtgtatatatatttataggtggtgtatgtataggcagacactggaaagaaatatgctcaaatgttaagagtggttatgagtggtgatttttaaaactgtttttctagactttctaaaattaacattaacataattaacaggaaaaaaatgttatttaaaatagccactgggatgggcaagaatcaaagacattctataaaaatagactttctgggaaaaggtaccctggcaacataccctgagaatttgaataaataaaaagtactttacttgattcatggagtgataatggaaagaacatgagatttagaagacctggattcaggcttcttagaaaagtgttaactcactaagcctccatttccttatataaatataggcatgaaaatagcaaaacttgtttcacaaggctgttg

SEQ ID NO: 42822 - DNA, 625 bp, Homo sapiens
attgcttgagcctgggaggcagaggttgcagcgagctgagatagcaccattgcactccagcctgggtgaaagagtgaggctctgtctcaaaaacaaacaaacaaacaaataaataaacaaaaccaaaataaaacagcaaggaacagagatgacgatctctgtcctcacggagcttatattttagcaggggagacaagcagtaaacaaatcggatggcgagaggtgctatggaagaaagataagggcaaggatagggctggagtgttctaggcagcattataacctcccaaaggtcactgagaaaggctgtactgaggtgacagagggatacagactttaaagtgacgagaggctggcgtggtggctcacacctaaaatctcagcactttgggaggccgaggagsgaggactgcttgagaccaggagcttgagaacagtcagggtgacatagcaagatcctgtctctacaaaaaaatttaaaatgaaaaaattagcctggcttggtggcagaggtgggaggatggcttgagcccaggagtttgaggctgcagtgagctacgatagggccactgcactctagcctgggcagcagagtgagaccctgtctcaaaaaataaataacatg

SEQ ID NO: 42823 - DNA, 625 bp, Homo sapiens
attgcttgagcctgggaggcagaggttgcagcgagctgagatagcaccattgcactccagcctgggtgaaagagtgaggctctgtctcaaaaacaaacaaacaaacaaataaataaacaaaaccaaaataaaacagcaaggaacagagatgacgatctctgtcctcacggagcttatattttagcaggggagacaagcagtaaacaaatcggatggcgagaggtgctatggaagaaagataagggcaaggatagggctggagtgttctaggcagcattataacctcccaaaggtcactgagaaaggctgtactgaggtgacagagggatacagactttaaagtgacgagaggctggcgtggtggctcacacctaaaatctcagcactttgggaggccgaggagcsaggactgcttgagaccaggagcttgagaacagtcagggtgacatagcaagatcctgtctctacaaaaaaatttaaaatgaaaaaattagcctggcttggtggcagaggtgggaggatggcttgagcccaggagtttgaggctgcagtgagctacgatagggccactgcactctagcctgggcagcagagtgagaccctgtctcaaaaaataaataacatg

SEQ ID NO: 42824 - DNA, 620 bp, Homo sapiens
tttgaatagtatccaatttccattggtaggtcataaaatttgaatgttgacaatttcatataatttaaactaatattaatagtcaaattaaagatatatatatatakagagagagagagagagagacagagagacagagtgagagagagacagagagacagagtgagagagagagagaactctaattgtcaattctctttcttttaataccttggtacgaaaaaaggaaacaaaccaagtttggttttaaagttgccaacaatattacagcagttattacattgtaggaaataattagtgcagtattcagaaggaaggtcatccaagtgatagtaaaatattatgaagagattcatcggtttgattgtgttattcatagctagtgataataagtaatttaaaaggagctaaatgtattttctttttgctataaaatggatctatttccacaaaattttcagaaaaataaatattttcctgaaggttagtattcacaactaaggaacaaatccttacagtaggtatttttgaatatatttgtacatgtaagtgtgtgcatatgtataggggagggtatgtgtattctgaatgatcacattaataaaacaaatcaggaaaaa

SEQ ID NO: 42825 - DNA, 633 bp, Homo sapiens
aaaagctcctcctctaaaatttataatccagtagtaaaagtataagattacctttctcctactttgctattttctgytaaagtgaaatagcaacatgctgagatgacatctctaaaacactaaaaattagctaggcatggtactgtgtgcctcttttcccagctaattgggaggctgagctgggaggatactttgagcccaggaggtccaggctgtagtgggtgatggagtgagaccctgtctccaaagacaaaaaaatcaaaaccagttatttttgtttttaatgttaatcttagcaaaatattaattaaatatttggcaacattagtctaaatttaaaggaaaaggattcattttgactctagacaaaggaggtgagaaaacttctcttttaattacaactattttgtttcacttctgctaagtgatatatatttttattgacaaacatcataatcagacttctcaggtcttcaacaataaaagttaataattctgttaactgtatatttttaaactgtggagggagcaaagaaacattttcaaatctgattgggatcagcagcaatgtactctgattactgtagattttgtttttccatttttgaagcactagagccccaggctaaaact

SEQ ID NO: 42826 - DNA, 529 bp, Homo sapiens
atttctggcacacacatattcctcagatttttgctaatctaatttaacatcttcatgcaattcttagtgtggaaatctttggcttcatattgaaagcaatgtcctgcctctgaaactgtcttgccttacaactatggttttccacaaagtaagagaagtttgaatcagcaagcaaaatgagttggggaaaaaawtatgcatctacaacaatccagccagaaagatatatggatttattaaatttgacaccctgaacagcagctaaaccattaatccttggactgtctacattttcaggtaatgaaagttggatcttttactttctccccattctgaaggactagacccaagacaagattggggaggttgtgctttaaatgtctcataaacggagacctactatacatcctagaagataacttatttttctctctctcgtccttgatcttgctctcactctctctctctctgtctctctctcaaattagataatacaatatttatgacttttaagattcttggctaggcc

SEQ ID NO: 42827 - DNA, 529 bp, Homo sapiens
atttctggcacacacatattcctcagatttttgctaatctaatttaacatcttcatgcaattcttagtgtggaaatctttggcttcatattgaaagcaatgtcctgcctctgaaactgtcttgccttacaactatggttttccacaaagtaagagaagtttgaatcagcaagcaaaatgagttggggaaaaaattatgcatctacaacaatccagccagaaagatatatggatttattaaatttgacaccctgaacagcagctaaaccattaatccttggactgtctacattttcaggtaatgaaagttggatcttttactttctccccattctgaaggactagacccaagacaagattggggaggttgtgctttaaatgtctcataaamggagacctactatacatcctagaagataacttatttttctctctctcgtccttgatcttgctctcactctctctctctctgtctctctctcaaattagataatacaatatttatgacttttaagattcttggctaggcc

SEQ ID NO: 42828 - DNA, 916 bp, Homo sapiens
tttctgtacaacagggtgagttaattcrcgtaagtaatgttaaaaacaatctttgataaaaatgagtggtatttaagagaggcggtttcccagaaaaatgatacaggtatctctacgttccatgaacgagagtccagcagcccaatagtcaaatagcacactaggtctcgagtttgctttagctgtgtggcccccttaactgaggacaccatcacctgagcagagcagaaggctttctgatcctaccactataatactgttgcatcttctagggagtgaagttttccttaaagctaattgttggagtagcttttccttaaagctaattgttgaattgagtaggaattaacaagttgttgactaactgcacttgcatactgataaatgtatggcagtattcagattataacttgttttcatttttaaaatggggaagagatctatatcttccacttatcctcaatttctagaaagtaccaatatttcttttgaaagcctgacgactataaaactcagcccatgggtcaccttcttggtcaagctttctctttatgcctcaagttgaaaagactacttcttactttatacctcccactgtatctggtattgtgtttattctatcttattgcagagggttgatttttaaaaaaatgtttgtcttccccactgattttgtgtttctttacacattgaagtgtggactagggaccatgtaaacttcatggtaacttcctgcaactttctaagacagggtttgttaatatgtgtggctatgaatttgacagcagctctgtgttaaacataaggaaggtgtgggaggataaaagtagtaagaaattagtatcactagaaattcctgagaatgtctcaaatcctttcccatgggccttcttatcattggcacaccattcaggga

SEQ ID NO: 42829 - DNA, 916 bp, Homo sapiens
tttctgtacaacagggtgagttaattcgcgtaagtaatgttaaaaacaatctttgataaaaatgagtggtatttaagagaggcggtttcccagaaaaatgatacaggtatctctacgttccatgaacgagagtccagcagcccaatagtcaaatagcacactaggtctcgagtttgctttagctgtgtggcccccttaactgaggacaccatcacctgagcagagcagaaggctttctgatcctaccactataatactgttgcatcttctagggagtgaagttttccttaaagctaattgttggagtagcttttccttaaagctaattgttgaattgagtaggaattaacaagttgttgactaactgcacttgcatactgataaatgtatggcagtattcagattataacttgttttcatttttaaaatggggaagagatctatatcttccacttatcctcaatttctagaaagtaccaatatttcttttgaaagcctgacgactataaaactcagcccatgggtcaccttcttggtcaagctttctctttatgcctcaagttgaaaagactayttcttactttatacctcccactgtatctggtattgtgtttattctatcttattgcagagggttgatttttaaaaaaatgtttgtcttccccactgattttgtgtttctttacacattgaagtgtggactagggaccatgtaaacttcatggtaacttcctgcaactttctaagacagggtttgttaatatgtgtggctatgaatttgacagcagctctgtgttaaacataaggaaggtgtgggaggataaaagtagtaagaaattagtatcactagaaattcctgagaatgtctcaaatcctttcccatgggccttcttatcattggcacaccattcaggga

SEQ ID NO: 42830 - DNA, 522 bp, Homo sapiens
gcaaagacttggaaccaacccaratgtccatcaatgatagactggattaagaaaatgtggcacatatataccatggaatactatgcagccataaaaaatgatgagttcatgtcctttgtagggacatggatgaaactggaaaccatcattctcagcaaactattgcaaggataaaaaaccaaacaccgcatgttctcactcataggtgggaattgaacaatgagaacacttggacacaggaaggggaacatcacacactggggcctgttgtgggctgaggggagtggggagggatagcattaggagatatacctaatgtaaatgacgagttgatgggtgcagcacaccaacatggcacgtgtatacgtatgtaacaaaccagcacattgtgcacatgtaccctagaacttaaagtataataaaaaatatatatattaaaaaaaaaaagaaaaccatagatgaaacctctgtgggcagggcccctcacttgggagacccaactcctggagcttggggtaagag

SEQ ID NO: 42831 - DNA, 726 bp, Homo sapiens
tggaatattgtgcagccataaaaaagaatgagatcagttcctttgcaacaacatgaatggagctggaggacattatcctaagcaaactaacacaggaacagaaaagcaaataccatatgctctcacttacagctgggaattaaacaacgagaacacatgagcgcaaagaggaaaacaacagacattgaggcctacttgtgggtgaagggtgggaggagggagaggatcagaaaagaaacctatcgggcactatgcttattacctggggcacaaaataatctgtacactaaacccctgtgacacacagtttgcctatataacaaacctgcacacatacccctgaatctaaaataagataaaaaacaataataaaataaaaagaaaatccagacactcagagaaacatagmgaaaacaacaatgtattttcagttcaccttgcaccctcaagatgatcttcaattaactcgtttcagaagcttgaaagagaacagtagaaaatcattattttttccaacaaaaaatcacaaaattaactgcttacatccattgtgagaaataaagtgtcacgagtgaaacttaaaataacattttatggacacacttagaagaaatccaaatacattcatagaaatggcagaatgatctttattcccaagctgtattttttttaaagtgagttaacctgacagtaatgtgcctcaggaattgccaatatattcaaatt

SEQ ID NO: 42832 - DNA, 726 bp, Homo sapiens
tggaatattgtgcagccataaaaaagaatgagatcagttcctttgcaacaacatgaatggagctggaggacattatcctaagcaaactaacacaggaacagaaaagcaaataccatatgctctcacttacagctgggaattaaacaacgagaacacatgagcgcaaagaggaaaacaacagacattgaggcctacttgtgggtgaagggtgggaggagggagaggatcagaaaagaaacctatcgggcactatgcttattacctggggcacaaaataatctgtacactaaacccctgtgacacacagtttgcctatataacaaacctgcacacatacccctgaatctaaaataagataaaaaacaataataaaataaaaagaaaatccagacactcagagaaacatagagaaaacaacaatgtattttcagttcaccttgcaccctcaagatgatcttcaattaactcgtttcagaagcttgaaagagaacagtagaaaatcattattttttccaacaaaaaatcacaaaattaactgcttacatccattgtgagaaataaagtgtcacgagtgaaacttaaaataacattttatggacacacttagaagaaatccaaatacattcatagaaatggcagaatgatctttattcccaagctgtattttttktaaagtgagttaacctgacagtaatgtgcctcaggaattgccaatatattcaaatt

SEQ ID NO: 42833 - DNA, 638 bp, Homo sapiens
atggttttaacagcttgattgagtattgtgtaatttttgaataattcaatatttatgtcttaaaaaacaagtactgatgagaacatagaggaggtggtgtggactagtgcttttggagagtagacaaaccagctgcagcacaatcaactgcgaagttttaaacaaacattgagcccaggtcstacccctggatattctgattcagttagtttggtcaagggccaggtgagttgttttcttcacatagctccccaggtactgagattgtcagggtgagaagaaaagagttctgaagacagaaacccagtaaatgtctttatgtaggggtctgaaagcagaaaaataattttcttttttttttttttttgagctggagtctcgctctgttgcccaggctagagtccagtggcgtgatctcggctcactgcaagctccacctgccgggttcacgccattctcctgcctcagcctcctgagtagctgggactacaggcgcccgacaccacgcccagctaatttttttgtatttttattagagacggggtttcaccgtgttagccaggaggatctcgatctcctgacctcgtgatctgcttgcctcagcctcccaaagtgttgggattacaggcgtgagccac

SEQ ID NO: 42834 - DNA, 638 bp, Homo sapiens
atggttttaacagcttgattgagtattgtgtaatttttgaataattcaatatttatgtcttaaaaaacaagtactgatgagaacatagaggaggtggtgtggactagtgcttttggagagtagacaaaccagctgcagcacaatcaactgcgaagttttaaacaaacattgagcccaggtcgtacccctggatattctgattcagttagtttggtcaagggccaggtgagttgttttcttcacatagctccccaggtactgagattgtcagggtgagaagaaaagagttctgaagacagaaacccagtaaatgtctttatgtaggggtctgaaagcagaaaaataattttcttttttttttttttttgagctggagtctcgctctgttgcccaggctagagtccagtggcgtgatctcggctcactgcaagctccacctgccgggttcacgccattctcctgcctcagcctcctgagtagctgggactacaggcgcccgacaccacgcccagctaatttttttgtatttttattagagacggggtttcaccgtgttarccaggaggatctcgatctcctgacctcgtgatctgcttgcctcagcctcccaaagtgttgggattacaggcgtgagccac

SEQ ID NO: 42835 - DNA, 1204 bp, Homo sapiens
taacaagggccaggaggagggggaacccggatgacttgcttaggttcaacctaaggaagaacttgaaagaaatcacagccatctgatgggaggccgtgtggagggatgctacagggagcatccacacggagaactagatgacctgtaaaggctcttccagtctgagattctctttctgtgacctacagaatgcttttcaagcagtgctccaggaggtcccatggtgatgtgagagtactgtatccctcaggtgtgcttagaacccaggtgtggggctgggaaagccaaggaagccctagaggctatcccgggatgccactttgattcaaagaagtggacgtcttgtctgtgctggggacatgaccaggaaccagataagttccctgatctcaattagttcatgaccaagtgagagaaacaccaggcaatggcctcaggaccatgaggacaagggcactgaggacggggccaccccaatcccacccagcatagtcctccaatacgccgtgggccgcagtccttcctgactctcactgctccacttacaacttataaaaggctgtaaatgtactaagggcatttaatattcctcaagaacacaggtaaagagaaactggcagaattagaaattattagtactaacagaaacaaaagacaaaaacattccaattgttaaactttataaactcaatggctccctttgaactcagaatgtgagattaatccatgatcattatacactgagccaaaattacccataagaagattatcaccaactatcatttctctaaagaaaataagctgggcccagggaaygcaaggtgtaaccattagagagggagtaaaaccctcaccagcagaaccagcaagaagccagccaacccctctctcccaaaccaaatgccacattccagctctgacatgctgtgacattagggaaacctcacaccagtcaaagcacgtgcatgccaccccctgcccccactcccatctgcaagtaaaatgctttgtctgtcttctgccccagttttctctgtgatcagacagcatgtggctttgactgcaatcagcagcccagttaatgcaagaggcaatttgaatctcctcctctcagcccaagtctcccattttggaagtctgcaccccagttccagtactttgccacactcagtgcgtgcccagaaagaccccagcagggcagggg

SEQ ID NO: 42836 - DNA, 545 bp, Homo sapiens
tgtatagataaacgttcacaagaagggagtggaaaaactcagattcccttgtcagaatagagattaataagaggaatcttggactggcgtggtggcacacacctgtacttccagctacataggcggctgagatgggaggatcacttaagcccagcaggtggagattgcagtgagctgagattgtgccactgcactccagcctgggtgacagagcaagaccctgcctctaaaaaaaaaaaaaaaaaaaaaaaaaagctgggtgcattggctcacgcctgtaatcccagcrctttgggaggccaaggcaggcggatcacctgaggtcaggcatttgagaccagcctggccaacatggcgaaaccctgtctctactaaaaatactaaaatgagctgggcatggtggtgcacgcctgtaatcccagctactctggaggctgaggcatgagaattgctcaaacccagaaggtggaaattgcagtgagctgagatggtgtcactgccctccagtctgggtgacagagtgaaactgtgtctcaaaacaaaaa

SEQ ID NO: 42837 - DNA, 661 bp, Homo sapiens
attggaattttgctttgtacaagacaaatgtagatccttcagacctattgggttatcaagcatttccagagcttccttgacttgatgctgaagctcatggcttctaagtctagaatcacagaagaactggaagaaaggccatcaggaatcaatggcccacagaaggatcattcatgaacaccagctatattgtacccactactgttttcttttcttttctttttgacacagagcctcgctctgtcacccaggctggagtgcagtggctcaatcttggctcactgcaacctctgcctgccgggttcaagtagttctctgcctcagcctcccgagtagctgggattacaggtgcccrccaccacaccggcctaatttttgtatttttagtagagacgggttttcaccatctaggccaggctggtcttgagctcctgactttgtgatccacctgcctcaacctcccaaagtgctgggattacaggcacgagccaccgtgcctggcctattgtttcttttaggatgtttgtaagaacagatggtccaacctaagacccatggggaatatgacagcaatagatgcctaatggctgactttaaagccaaaacggaggaagtcagtcagtagaaaatcagtttcttttttggtaaaagttagcagttg

SEQ ID NO: 42838 - DNA, 671 bp, Homo sapiens
ttaaaagatgtccggaaggacaatcttttatatgggtaccttagcacaaattgtcaaaaaaggaccatggcctgctgtggtgattcaaatgcgtggtgacttaaatgatttaaataatattagcaatgtggacatctttcattgaatgatgccagaaggacaatcccttaatgaaagttgtccacgttgctaatgttatcttactggtgtcttggaaccatttgttatgaaaagagggtaacacaaaggagtagaaatgactcatctaaatcaccacagcaggccatagtcctttattggcaatttgtgctaaggtatctacctaaaatgggaagcatttatcttcctaacccaatgttgtccaaatgattattcttgataagctgtcaatgagaattctctgatttcctgtaactttgtgggaattctatgtgtccatattctcccttcatgraaatgaaaacagatccatttctgaagacaggagacctcctgctaataaaagtatgcttcatgttctaaaattataccattagatgatcctcatcataatagcacaaagagatcaaaaggattaaggcacacttataaacattttttcttctgtaggatagttggaagatactactaataaattattttggttatctataatgtacttgtgtctatgc

SEQ ID NO: 42839 - DNA, 627 bp, Homo sapiens
actttaaaaaagtaccagaaagtatttattttatgttacttcagtattattaatgttcagtattattgtgcttgtgaaagttattcatgaaatacaagtgccactaatttcttttcactaccctgtattttctattgtactcttttgcaaaattgaattatctttcccttgtaaatgaacatttgtattgtttgaggaattatttatttatttatttattttgagaggaagtctcgctctgtcacccaggctagagtgcagtgatgtgatctctgttcactgcaacctccgtctcccagtgagaatcaagagattctcctgcctcagcctcccaagtagctggggctacaagtatccaccaccatgactggctgatttttgcatttttagtagagacggggtttcaccatgttggccaggctggtctcgaactcctgacctcatgatccgcccacctcagcctccaaaagtattgggattacaggtgtgagcctctgtccccggctgaattccttttattaaaagcagytattttgtgactattgttttaaatgtctcattctatgtgcaagcatatctctagccagagtgagttatagttggattgctgggatattttatctttac

SEQ ID NO: 42840 - DNA, 1051 bp, Homo sapiens
gcccttctacaacaaaggctgagtgcggttgttatagttaggaagatttatgcctgggagattgaggactacattttcagctaactgactccaggagtcctcaaaagcgctgtcgaaacttcaaaactgcacagtagtagtctaggatactttgccaacagttcccaccctctctcactcagggtcagcattgcattgctgtatggtagctctcccagctttgcccagtttccttcctgtttcccttcacgcgagcatgtcctctaattaaatctttgtacattaatcctgtcttggcatcttgttcttggatatctcagcctaacacaaaatgtaataagattagaattattgccaatagcatacacagaaatagcaaataggtgaattttaaaactaattgctaaataattttttaatcaaaagagaaaactgaaagtacaattatacagttgcaaacaataccatgcgatgaaacttataatcaaagttgtgtttagaaaaacatttgtarcttaaatgcttctattaaccaaatagaaatgaaaatatacctaccaaaactaagaactcaagaacatagaaaaaataaacacgcctaagcacagtaggttgaaggaattaatagggattaaagcagacatcaatagaatagaaaacaaaaatactatatgtgataattattttcttaccagaggtggcttttctcctcaattaattttaaaaataagaaaatatgtgtagaaagtttgaaggaaaaatgctgagtagtcatagataaataaggtttataaaaataattataattgaatattacatggcacacaatgttgaaaaacatgatcaggattaaacatataattttgaaagacttacatttaactaaaacttgttgaagatgatataataaaactaaatagatcaatttaaaaattagcaagttatcctactcatctctaaagagactggctcaaagtttcagaggtcagttctttgttttattctatttttattgagcaataataattgtatatatttttatggggtataa

SEQ ID NO: 42841 - DNA, 1051 bp, Homo sapiens
gcccttctacaacaaaggctgagtgcggttgttatagttaggaagatttatgcctgggagattgaggactacattttcagctaactgactccaggagtcctcaaaagcgctgtcgaaacttcaaaactgcacagtagtagtctaggatactttgccaacagttcccaccctctctcactcagggtcagcattgcattgctgtatggtagctctcccagctttgcccagtttccttcctgtttcccttcacgcgagcatgtcctctaattaaatctttgtacattaatcctgtcttggcatcttgttcttggatatctcagcctaacacaaaatgtaataagattagaattattgccaatagcatacacagaaatagcaaataggtgaattttaaaactaattgctaaataattttttaatcaaaagagaaaactgaaagtacaattatacagttgcaaacaataccatgcgatgaaacttataatcaaagttgtgtttagaaaaacatttgtaacttaaatgcttctattaaccaaatagaaatgaaaatatacctaccaaaactaagaactcaagaacatagaaaaaataaacacgcctaagcacagtaggttgaaggaattaatagggattaaagcagacatcaatagaatagaaaacaaaaatactatatgtgataattattttcttaccagaggtggcttttctcctcaattaattttaaaaataagaaaatatgtgtagaaagtttgaaggaaaaatgctgagtagtcatagataaataaggtttataaaaataattataattgaatattacatggcacacaatgttgaaaaacatgatcaggattaaacatataattttgaaagacttacatttaactaaaacttgttgaagatgatataataaaactaaatagatcaatttaaaaattagcaagttatccyactcatctctaaagagactggctcaaagtttcagaggtcagttctttgttttattctatttttattgagcaataataattgtatatatttttatggggtataa

SEQ ID NO: 42842 - DNA, 1051 bp, Homo sapiens
gcccttctacaacaaaggctgagtgcggttgttatagttaggaagatttatgcctgggagattgaggactacattttcagctaactgactccaggagtcctcaaaagcgctgtcgaaacttcaaaactgcacagtagtagtctaggatactttgccaacagttcccaccctctctcactcagggtcagcattgcattgctgtatggtagctctcccagctttgcccagtttccttcctgtttcccttcacgcgagcatgtcctctaattaaatctttgtacattaatcctgtcttggcatcttgttcttggatatctcagcctaacacaaaatgtaataagattagaattattgccaatagcatacacagaaatagcaaataggtgaattttaaaactaattgctaaataattttttaatcaaaagagaaaactgaaagtacaattatacagttgcaaacaataccatgcgatgaaacttataatcaaagttgtgtttagaaaaacatttgtaacttaaatgcttctattaaccaaatagaaatgaaaatatacctaccaaaactaagaactcaagaacatagaaaaaataaacacgcctaagcacagtaggttgaaggaattaatagggattaaagcagacatcaatagaatagaaaacaaaaatactatatgtgataattattttcttaccagaggtggcttttctcctcaattaattttaaaaataagaaaatatgtgtagaaagtttgaaggaaaaatgctgagtagtcatagataaataaggtttataaaaataattataattgaatattacatggcacacaatgttgaaaaacatgatcaggattaaacatataattttgaaagacttacatttaactaaaacttgttgaagatgatataataaaactaaatagatcaatttaaaaattagcaagttatcctactcatctctaaagagactggctcaaagtttcagaggtcagttctttgttttattctatttttattgagcaataataattgtatatatttttayggggtataa

SEQ ID NO: 42843 - DNA, 997 bp, Homo sapiens
cattagctatttgtcccaatgctctccctcccctcactcctgacgggccctggtgtgtgttgttcccctccaygtagacactgttttttatatcagctattctgatagccgtgtaatgatatctcattgtagttttaatttgtatttccccaatggctaatgatgttgaacatcctcccacatgcttatttgccaactgcatattctttttggtgaaatgtctctctatatctttcacctattttctaattggatttcatttttattacctagtttacaaactctgtaaaatttggaagattttcagaaacaatagtgtctacctatgaagaaaacaaacacatgagtacaaataaaattttaaaagacatttgattaaacaaaagaataaacaataacactctgcagtttctcagtagtgacatataactaatacctgtggtgataaatatattaatggttctctggcccactgagtcactttgaaatagacccaatatcctggctgtcatccatgatgtgacagcttacagtccagaggctctgcaggaatcgtttcaggggttgatctcagggtcagtctccaccagttcaggaaccaaccatgttctctagtcagacatgaggttgaaacaagtctgtttaactcaactgaaagagaaggtctgtttctcctaactccctattgccttcctcaagtttaccagcagaacaatggtaatcataattatagtaatagctactagcataagcacagtttttatagtttataaaaggttttcaaaattgacttcatcttctgttgtcttacctaattgagtaaaattaaaatgttattgcagttaaaaaattaactgatgttttacaattctcaggaatgctgcaagtctagaaaataatcattaaaattatactttattctgctgaatcaatgaaattttttggaaacaacctcaacccccacaaaagcacttacactgcttaaagaaatccagaa

SEQ ID NO: 42844 - DNA, 997 bp, Homo sapiens
cattagctatttgtcccaatgctctccctcccctcactcctgacgggccctggtgtgtgttgttcccctccatgtagacactgttttttatatcagctattctgatagccgtgtaatgatatctcattgtagttttaatttgtatttccccaatggctaatgatgttgaacatcctcccacatgcttatttgccaactgcatattctttttggtgaaatgtctctctatatctttcacctattttctaattggatttcatttttattacctagtttacaaactctgtaaaatttggaagattttcagaaacaatagtgtctacctatgaagaaaacaaacacatgagtacaaataaaattttaaaagacatttgattaaacaaaagaataaacaataacactctgcagtttctcagtagtgacatataactaatacctgtggtgataaatatattaatggttctctggcccactgagtcactttgaaatagacccaatatcctggctgtcatccatgatgtgacagcttacagtccagaggctctgcaggaatcgtttcaggggttgatctcagggtcagtctccaccagttcaggaaccaaccatgttctctagtcagacatgaggttgaaacaagtctgtttaactcaactgaaagagaaggtctgtttctcctaactccctattgccttcctcaagtttaccagcagaacaatggtaatcataattatagtaatagctactagcataagcacagtttttatagtttataaaaggttttcmaaattgacttcatcttctgttgtcttacctaattgagtaaaattaaaatgttattgcagttaaaaaattaactgatgttttacaattctcaggaatgctgcaagtctagaaaataatcattaaaattatactttattctgctgaatcaatgaaattttttggaaacaacctcaacccccacaaaagcacttacactgcttaaagaaatccagaa

SEQ ID NO: 42845 - DNA, 634 bp, Homo sapiens
ataatgtaagttggaaaaccaagggcctcagaaaacgaatcttgtttctggcagcagatgaaaacaaatgccccaaaatgtgcttgtccccatctgctgccagaagtgacaataatatgaccaagtatggtggccatttagtttggttcaatctctctctggtgttttcatcacggactttgtcagaggaaaacacaggatgaaactgagaatgttgtagactggtttaacatatttcataacattattacaaaaaaggagaagggacaggcaagcagatcatgcagatgccatatccattgaggagaaacacgttttacattatacgtgaaaaatcagtaactggttatttggcctcaagccacacaaaatagtaaataaaatctgtcatgacaacagattatgatgatgtcccatgagatgttctgaatttgattatgkggacaaaagggactactaagacaaagtcatctaataaatctagtgatacagtagtaattaactattagcagtcctaaatggcaggtgacacatcataaaagttaaatgtgtgattctgcaagccttaagtctgtacttgagtgactgaaatcctgtttatcagtgaaagctttaaactttatcttttttagca

SEQ ID NO: 42846 - DNA, 634 bp, Homo sapiens
ataatgtaagttggaaaaccaagggcctcagaaaacgaatcttgtttctggcagcagatgaaaacaaatgccccaaaatgtgcttgtccccatctgctgccagaagtgacaataatatgaccaagtatggtggccatttagtttggttcaatctctctctggtgttttcatcacggactttgtcagaggaaaacacaggatgaaactgagaatgttgtagactggtttaacatatttcataacattattacaaaaaaggagaagggacaggcaagcagatcatgcagatgccatatccattgaggagaaacacgttttacattatacgtgaaaaatcagtaactggttatttggcctcaagccacacaaaatagtaaataaaatctgtcatgacaacagattatgatgatgtcccatgagatgttctgaatttgattatgtggacaaaagggactactragacaaagtcatctaataaatctagtgatacagtagtaattaactattagcagtcctaaatggcaggtgacacatcataaaagttaaatgtgtgattctgcaagccttaagtctgtacttgagtgactgaaatcctgtttatcagtgaaagctttaaactttatcttttttagca

SEQ ID NO: 42847 - DNA, 575 bp, Homo sapiens
cagattgaacactacttgtaaaaagttatgtaattacacctctttgtgatgtcactttaccactcttctcatacatagatgcagacctatttctgtatctcttaaatttaagttkgttttgcttcttgctttaactaaaaaaaaaaatgcagcagtggttatattagtcagtcattttaaggctgcgcttatatgtgagaacagcctttaagagccactgaggttattacgttggccctcttggattctacatagagactttcatgacacaaagaacctggaataaaataccatgtagacagagtgatgcaaccatctcagctgtcccagatgagcttaacttccaaccaacttacctcctgaatacaaatacatgtgtgaatttaggtgcaactagcagaaaaaaatacgcattcaactcacagcctggtgacaaataacttgttttaagccactacatttttgtgtgatttgtaacagcaatacttgggaacatcattgtcagattattgaaaaagttaaggagaaaaaaatctcaaaaggaaggaaaaaactcacatacatattacatattg

SEQ ID NO: 42848 - DNA, 1280 bp, Homo sapiens
aataccaagaattgccacaccagaaactaagagaaagtcatggaacagaatctcccctaaagccttcggagaaagcatggacctgccaataccttgattttggacttstagcttccccagctgtgaaagaaaaaaaattctgttgttttaagccactcagtttgtggtaatttcttatggcagccttacaaaactcatacagtctgttcaggatctgtaaagaattagctccaactgtttttaccacactgatcccagcactcttctcccaccttgggggtataaaaatgttaaaattgaaaactgcaggccttgtttaatgtgctctgagactcaccctcacctcccatcactcagagtctgatgaatgaatcaatgcagaatgagtctatcttcactccctaggtgacatgtaatctcttacctgctaccctcataaccagcccaaaacccacaaaactagactcacaggatattggatcaaaatgtctagaagttaaaatttccaggaagggatcctcttattcaagagtcctgaaaacatttccctcaagtacaagaaaaggatgtggctgataaagctcctaggaggagcgtcagccactcaggaaaatgagattgtcaagcagcactgctgtagccagatgcagtgttcagaggatcacagaaggaaagtggacccaactggcctctctccaacccctgcacgtatcatcattcacaccaggctgtactggagtgtttcagagcacaaagaccctttaattctgaaagagaatttagccatggattctgaggactacgataacagagaccttgagaacaaagcacaagcagaagcacacacagaaagcgggggggagggtgacaaaggagagaagcctgctgatccctgaaagcaactctgctgccttaattagctgcccttactcaggagccacctacttcacacacagatgtttagtggtacttcaaatctctcagatcctctgtgtgggtgtgcgaattgtggtgtgtggtgtgtggaatggcgtggtgtatggatggtgcagtatgtgtgtgtggtttgtgtgtgcatgagtgtggtaagtggaatggttcagtgtgtatctggggtgtgtgcttggggaaggcagtgtatggggaaaaagggtttgtgactgaatgcctgctttcaggatttcctaggttcaggtggagcaaaaccagcctgggtatgtagctgccgcatcagcagtgacttggagctgatccactgtctggtctatttttaacaatga

SEQ ID NO: 42849 - DNA, 1280 bp, Homo sapiens
aataccaagaattgccacaccagaaactaagagaaagtcatggaacagaatctcccctaaagccttcggagaaagcatggacctgccaataccttgattttggacttctagcttccccagctgtgaaagaaaaaaaattctgttgttttaagccactcagtttgtggtaatttcttatggcagccttacaaaactcatacagtctgttcaggatctgtaaagaattagctcmaactgtttttaccacactgatcccagcactcttctcccaccttgggggtataaaaatgttaaaattgaaaactgcaggccttgtttaatgtgctctgagactcaccctcacctcccatcactcagagtctgatgaatgaatcaatgcagaatgagtctatcttcactccctaggtgacatgtaatctcttacctgctaccctcataaccagcccaaaacccacaaaactagactcacaggatattggatcaaaatgtctagaagttaaaatttccaggaagggatcctcttattcaagagtcctgaaaacatttccctcaagtacaagaaaaggatgtggctgataaagctcctaggaggagcgtcagccactcaggaaaatgagattgtcaagcagcactgctgtagccagatgcagtgttcagaggatcacagaaggaaagtggacccaactggcctctctccaacccctgcacgtatcatcattcacaccaggctgtactggagtgtttcagagcacaaagaccctttaattctgaaagagaatttagccatggattctgaggactacgataacagagaccttgagaacaaagcacaagcagaagcacacacagaaagcgggggggagggtgacaaaggagagaagcctgctgatccctgaaagcaactctgctgccttaattagctgcccttactcaggagccacctacttcacacacagatgtttagtggtacttcaaatctctcagatcctctgtgtgggtgtgcgaattgtggtgtgtggtgtgtggaatggcgtggtgtatggatggtgcagtatgtgtgtgtggtttgtgtgtgcatgagtgtggtaagtggaatggttcagtgtgtatctggggtgtgtgcttggggaaggcagtgtatggggaaaaagggtttgtgactgaatgcctgctttcaggatttcctaggttcaggtggagcaaaaccagcctgggtatgtagctgccgcatcagcagtgacttggagctgatccactgtctggtctatttttaacaatga

SEQ ID NO: 42850 - DNA, 1280 bp, Homo sapiens
aataccaagaattgccacaccagaaactaagagaaagtcatggaacagaatctcccctaaagccttcggagaaagcatggacctgccaataccttgattttggacttctagcttccccagctgtgaaagaaaaaaaattctgttgttttaagccactcagtttgtggtaatttcttatggcagccttacaaaactcatacagtctgttcaggatctgtaaagaattagctccaactgtttttaccacactgatcccagcactcttctcccaccttgggggtataaaaatgttaaaattgaaaactgcaggccttgtttaatgtgctctgagactcaccctcacctcccatcactcagagtctgatgaatgaatcaatgcagaatgagtctatcttcactccctaggtgacatgtaatctcttacctgctaccctcataaccagcccaaaacccacaaaactagactcacaggatattggatcaaaatgtctagaagttaaaatttccaggaagggatcctcttattcaagagtcctgaaaacatttccctcaagtacaagaaaaggatgtggctgataaagctcctaggaggagcgtcagccactcaggaaaatgagattgtcaagcagcactgctgtagccagatgcagtgttcagaggatcacagaaggaaagtggacccaactggcctctctccaacccctgcacgtatcatcattcacaccaggctgtactggagtgtttcagagcacaaagaccctttaattctgaaagagaatttagccatggattctgaggactacgataacagagaccttgagaacaaagcacaagcagaagcacacacagaaagcgggggggagggtgacaaaggagagaagcctgctgatccctgaaagcaactctgctgccttaattagctgcccttactcaggagccacctacttcacacacagatgtttagtggtacttcaaatctctcagatcctctgtgtgggtgtgcgaattgtggtgtgtggtgtgtggaatggcgtggtgtatggatggtgcagtatgtgtgtgtggttygtgtgtgcatgagtgtggtaagtggaatggttcagtgtgtatctggggtgtgtgcttggggaaggcagtgtatggggaaaaagggtttgtgactgaatgcctgctttcaggatttcctaggttcaggtggagcaaaaccagcctgggtatgtagctgccgcatcagcagtgacttggagctgatccactgtctggtctatttttaacaatga

SEQ ID NO: 42851 - DNA, 532 bp, Homo sapiens
gtaatgtccccaccacttggtttcatgaaactaggtatccctatatgtgcctcagmaacacaaaacacaacaaaattatagttgctggtccatcccttcatctctgctgattttaggaattcagaaatttaagaatatgagaagttttgatttggggaagaggaattagtatgcataggggtatactttagtaattcactaatgaaattttgtaaatgataatcacttcctattatttatttaactatgcccactattatcctagacacattgaattgagctcttagaattttgtctgtaaataagaattagaactatattttatgaggtcacttttaacttagtcatcaatgattccatgtttgtaaacacattctctgtcaatcatcttgcccactggtgatcaccagggaaaaggcaaaaggttattcaaagctcaaaaagaacattttaagtatatgtattacatcagcggcttagttgcatgtgtattaaaatgtgaagggcagtatattattaatcaaaagatggt

SEQ ID NO: 42852 - DNA, 532 bp, Homo sapiens
gtaatgtccccaccacttggtttcatgaaactaggtatccctatatgtgcctcagaaacacaaaacacaacaaaattatagttgctggtccatcccttcatctctgctgattttaggaattcagaaatttaagaatatgagaagttttgatttggggaagaggaattagtatgcataggggtatactttagtaattcactaatgaaattttgtaaatgataatcacttcctrttatttatttaactatgcccactattatcctagacacattgaattgagctcttagaattttgtctgtaaataagaattagaactatattttatgaggtcacttttaacttagtcatcaatgattccatgtttgtaaacacattctctgtcaatcatcttgcccactggtgatcaccagggaaaaggcaaaaggttattcaaagctcaaaaagaacattttaagtatatgtattacatcagcggcttagttgcatgtgtattaaaatgtgaagggcagtatattattaatcaaaagatggt

SEQ ID NO: 42853 - DNA, 532 bp, Homo sapiens
gtaatgtccccaccacttggtttcatgaaactaggtatccctatatgtgcctcagaaacacaaaacacaacaaaattatagttgctggtccatcccttcatctctgctgattttaggaattcagaaatttaagaatatgagaagttttgatttggggaagaggaattagtatgcataggggtatactttagtaattcactaatgaaattttgtaaatgataatcacttcctattatttatttaactatgcccactattatcctagacacattgaattgagctcttagaattttgtctgtaaataagaattagaactrtattttatgaggtcacttttaacttagtcatcaatgattccatgtttgtaaacacattctctgtcaatcatcttgcccactggtgatcaccagggaaaaggcaaaaggttattcaaagctcaaaaagaacattttaagtatatgtattacatcagcggcttagttgcatgtgtattaaaatgtgaagggcagtatattattaatcaaaagatggt

SEQ ID NO: 42854 - DNA, 548 bp, Homo sapiens
atatatgatttgcaattattttctcccatcatatggattgccttttcactttctagtagtgttctttgatgcacaacagtttcaattttgacaaaatccaattcagctctttttttcttttgttgaccgtgcttttggttccatgtccaygtgccaaatctaatgtctcgaagatttttccctatgatattttcttagaaatttacagttctaactctgacgtttaggtctgtgattcattggtgattttttaaaaattcctatataattcgtagactctaagagagtttccagctttcccatacccattgtccccagagatctggtttttagtctgaatgtgccttactctgaacatgtgccttccatttcaagaactcccatttcattttgttttgttctgttttttcttttataccagtattaaaacttttgagttgttgtataaatatactagcaatttaggagaattcctgatgggaaagaatatccttgcctagctagttaatgaatttagggacccttcattttctaatcctagatatgat

SEQ ID NO: 42855 - DNA, 548 bp, Homo sapiens
atatatgatttgcaattattttctcccatcatatggattgccttttcactttctagtagtgttctttgatgcacaacagtttcaattttgacaaaatccaattcagctctttttttcttttgttgaccgtgcttttggttccatgtccatgtgccaaatctaatgtctcgaagatttttccctatgatattttcttagaaatttacagttctaactctgacgtttaggtctgtgattcattggtgattttttaaaaattcctatataattcgtagactctaagagagtttccagctttcccatacccattgtccccagagatctggtttttagtctgaatgtgccttactctgaacatgtgccttccatttcaagaactcccatttcattttgttttgttctgttttttcttttataccagtattaaaayttttgagttgttgtataaatatactagcaatttaggagaattcctgatgggaaagaatatccttgcctagctagttaatgaatttagggacccttcattttctaatcctagatatgat

SEQ ID NO: 42856 - DNA, 504 bp, Homo sapiens
tcatgataataaaatattatgtcaggcacagctggtcacccctgcaatcccatcactttgggaggccgaggctggaggattgcttgatccaggagttctagatcagcctgggcaataaaaggaaaatctgtttctacaaaaaaattaaaatttatatttcatatattgatttaagctctactaaatgactattctttcaagtctaatagacagtgtatcttttagggctcagagtaaagataatttattraggacattttgaataggatgaattaaatgctttattggtaagtgatgcctttatctgagtgattccttctaggtaaatattatgggaccaatctttgtaaatgatctttgcatggaacaaaatattataaagttgaagtgatgaatttgtttccctcttaacaaaatatgtattcttgttaccccatttacaaacttggctcatggtaattcaggtaggaaaaagggaagtggcctactcagggatcaactggg

SEQ ID NO: 42857 - DNA, 504 bp, Homo sapiens
tcatgataataaaatattatgtcaggcacagctggtcacccctgcaatcccatcactttgggaggccgaggctggaggattgcttgatccaggagttctagatcagcctgggcaataaaaggaaaatctgtttctacaaaaaaattaaaatttatatttcatatattgatttaagctctactaaatgactattctttcaagtctaatagacagtgtatcttttagggctcagagtaaagataatttattgasgacattttgaataggatgaattaaatgctttattggtaagtgatgcctttatctgagtgattccttctaggtaaatattatgggaccaatctttgtaaatgatctttgcatggaacaaaatattataaagttgaagtgatgaatttgtttccctcttaacaaaatatgtattcttgttaccccatttacaaacttggctcatggtaattcaggtaggaaaaagggaagtggcctactcagggatcaactggg

SEQ ID NO: 42858 - DNA, 1346 bp, Homo sapiens
gccaagaaaaaaacaaaactctatcacaaaaagtattcatattcactctgtacatataggtttacagatcaatttatctacattacatatattgtaagaatttctaatcaatgttctataacttaaacctaagtttgagaaattcagcaaattgaagaaaccaataaatggccccttcctgctggtgctctatggcatttccaaaagctcagcagttacacaagcagaagaaacccacaggccaaaaatcatggctgtccagttgccagagtgtccacaggtggtgaccctctcactttctccccactcttccctgaggcccagcacagctgaactgccctggcacaggagacaggaactaacaagatcttactaattagttgaaaaatatgtttagtaggaaagaaaaaggagcacgaaattctgtttgagcaattatagaaacagtgatcaactgtcctggttttcccaggactagggggcttccaggaataccgaacttttactgccaaagccagaaaagatccaggcacactgggataagtaggcaaccctatatattatattaattgtagctacagttttttttttttaaaagccatagtctactaaaaaggaaaaagaaaaatgattttctagaaaaagtaaaaacagaaagacacattaagatgctcctgaccactacactgattgaaaaggtttatcaatgaatatcagttactgctgcctgtttcttctgtactttccaagcattcctctcccctgaattttctccctaagtctacgtctttcccattctaaaatatgaatctcccttaccagtggtgtctgtaatttaaaatactccagcataaaaagtgtaacacacgcatgtgttcagctaagttgcactctagggctcacacttctggggaagttactacaagcccttctgttattcctatctcaacatatcagtccatttgtgctgccgtaacaaaacacctgagactgagtaattgttaaacaatagaaatttatttctcacagttctggaggctgggaagtccaaaaccaaggtgccagcaggttggatgtctggtgagggcctgctctgtgcttccaatatggtaccttgttgctacatcgcatcctcacatggcagaagggataaatgtcatgaacrgcatagtggaagggcaaacaaggagctagctagcacccttcaatctcctttttagtggaactaatcccattcacgagggcacagccatcatgatctaatcacctgctaaagaccccacacctcttaataccatcaacttggggtgtaagtgccaacatgtaaatttaggaaggatacatgc

SEQ ID NO: 42859 - DNA, 578 bp, Homo sapiens
ttcactatcactttaatgttcttctaaaagaagataatcttgcacttcttctattctgttttatgacttttataaaaaattaaaactaatttgrctatcttaaaaagccccttataactaactccttcctctgcccagtgaccactcatatgagtgtgtgtgtgtgtagtgataaacagtttatcattaaagacaactattcactaaatgagattgttcattcaagtgacgtagttcctgctagaatcatactttttattacaagtgacacagaaattgaggaggtgtaatactcaccagcacactacatctcacatggctattgtttaatttatttgatttcttaactgatttcacactcacaagaatttcacactatagtcacattaatttttttaatttcctaagtcataccataacacataggggaaaatagatttttgtcagagtgcttttttcaaaattgcaaaacagatattaacttaccacaccacttttgcctccctctctctgtctctctctctccctctcacacacacacacatagacacacacacagagagagagcaaagtaatac

SEQ ID NO: 42860 - DNA, 260 bp, Homo sapiens
tcataaatccacagtgaaatgagaaaaaccagcatggcattttccacaaagctaaatacgtaagatatttatataattgtttcaaatgaccttttattatgagaccacatcctctgtaatttgttagcaataaaatttcctatctgtacacctactatgtacccacaaaaattamaaatttaaaacttgttttaaaaataaaatacagtatctgttatgaaatggtggcaatggcatatgacagatgtcatacagagtta

SEQ ID NO: 42861 - DNA, 1224 bp, Homo sapiens
aagttttaggcgtagaagaggaaagaaatatatgtattgcctacatacctattggaacttgggatcctttaaaacatgcagtcttattacagtgattcttctgtaatagcagtatttattttctggtctggggaacaaaagccttcttttcctttcttcgattaagaaattaaaatccagtagcatagaatctcttagaatcatttcttgtattgcttcctaacttgaccttaacattctgtgtgacctttcgaggccctttttacctctctcaacctctgcttcctgtaaaatgaggtggttgggtcaggtgacattaacggtccttacagcttttcagtttttaaattctacgaagacttaggagtaaaaccttgaagcgttaagtttcttttctgcggggggggagaaaaattactgttcttttaaattggccacgtggggtcgctagtgatctaagagactggttcgcgaaggtggtactgtaaatgtgtggtgcttcagcgaacagattctgggggtggtttatgaaattttctttttgtctctcccttcagctccaaaattcactcgaagacttgatcacatcattagtgttgagagaatcataagcagctgccagagattgtgttcagagccagaccgtggtatctcatgcccacctcaaaagaaaagaaaaaggaaaaaatcatggtaatcctggggtgcaactggctctccttttagactctaactcaagctgctacataatgtggycttgcaattccttggcttgagaagtaggtcctgcaaagttaaactggatggcataaaacatgccttagtgatggagtcaacctttgtctggaagaatctggagttaccaaaggcagaagcatggcaaaattctcactgaagagctgatgagtgtctctcttggcaattttcctggtgggctttgctgatggttgaggtggggtggggtgggtggcagcaagcttgaatgactgtagaaatcagggagggttcattaaacaaaaagtaaataaaataaaacaaaaatctggaaagctcatgtatcttcccacaccagggacagggtacccacagcatgctcggcacagaccagaccctttatggaaagtcagctgaaccttgccctcggcgtgcaaggaaaaaaaatgtcttttctgccagaagtgttgtataaacatccttttcctacgatcctggatcctgatcctc

SEQ ID NO: 42862 - DNA, 1224 bp, Homo sapiens
aagttttaggcgtagaagaggaaagaaatatatgtattgcctacatacctattggaacttgggatcctttaaaacatgcagtcttattacagtgattcttctgtaatagcagtatttattttctggtctggggaacaaaagccttcttttcctttcttcgattaagaaattaaaatccagtagcatagaatctcttagaatcatttcttgtattgcttcctaacttgaccttaacattctgtgtgacctttcgaggccctttttacctctctcaacctctgcttcctgtaaaatgaggtggttgggtcaggtgacattaacggtccttacagcttttcagtttttaaattctacgaagacttaggagtaaaaccttgaagcgttaagtttcttttctgcggggggggagaaaaattactgttcttttaaattggccacgtggggtcgctagtgatctaagagactggttcgcgaaggtggtactgtaaatgtgtggtgcttcagcgaacagattctgggggtggtttatgaaattttctttttgtctctcccttcagctccaaaattcactcgaagacttgatcacatcattagtgttgagagaatcataagcagctgccagagattgtgttcagagccagaccgtggtatctcatgcccacctcaaaagaaaagaaaaaggaaaaaatcatggtaatcctggggtgcaactggctctccttttagactctaactcaagctgctacataatgtggtcttgcaattccttggcttgagaagtaggtcctgcaaagttaaactggatggcataaaacatgccttagtgatggagtcaacctttgtctggaagaatctggagttaccaaaggcagaagcatggcaaaattctcactgaagagctgatgagtgtctctcttggcaattttcctggtgggctttgctgatggttgaggtggggtggggtgggtggcagcaagcttgaatgactgtagaaatcagggagggttcattaaacaaaaagtaaataaaataaaacaaaaatctggaaagctcatgtatcttcccacascagggacagggtacccacagcatgctcggcacagaccagaccctttatggaaagtcagctgaaccttgccctcggcgtgcaaggaaaaaaaatgtcttttctgccagaagtgttgtataaacatccttttcctacgatcctggatcctgatcctc

SEQ ID NO: 42863 - DNA, 1224 bp, Homo sapiens
aagttttaggcgtagaagaggaaagaaatatatgtattgcctacatacctattggaacttgggatcctttaaaacatgcagtcttattacagtgattcttctgtaatagcagtatttattttctggtctggggaacaaaagccttcttttcctttcttcgattaagaaattaaaatccagtagcatagaatctcttagaatcatttcttgtattgcttcctaacttgaccttaacattctgtgtgacctttcgaggccctttttacctctctcaacctctgcttcctgtaaaatgaggtggttgggtcaggtgacattaacggtccttacagcttttcagtttttaaattctacgaagacttaggagtaaaaccttgaagcgttaagtttcttttctgcggggggggagaaaaattactgttcttttaaattggccacgtggggtcgctagtgatctaagagactggttcgcgaaggtggtactgtaaatgtgtggtgcttcagcgaacagattctgggggtggtttatgaaattttctttttgtctctcccttcagctccaaaattcactcgaagacttgatcacatcattagtgttgagagaatcataagcagctgccagagattgtgttcagagccagaccgtggtatctcatgcccacctcaaaagaaaagaaaaaggaaaaaatcatggtaatcctggggtgcaactggctctccttttagactctaactcaagctgctacataatgtggtcttgcaattccttggcttgagaagtaggtcctgcaaagttaaactggatggcataaaacatgccttagtgatggagtcaacctttgtctggaagaatctggagttaccaaaggcagaagcatggcaaaattctcactgaagagctgatgagtgtctctcttggcaattttcctggtgggctttgctgatggttgaggtggggtggggtgggtggcagcaagcttgaatgactgtagaaatcagggagggttcattaaacaaaaagtaaataaaataaaacaaaaatctggaaagctcatgtatcttcccacaccagggacagggtacccacagcatgctcrgcacagaccagaccctttatggaaagtcagctgaaccttgccctcggcgtgcaaggaaaaaaaatgtcttttctgccagaagtgttgtataaacatccttttcctacgatcctggatcctgatcctc

SEQ ID NO: 42864 - DNA, 1224 bp, Homo sapiens
aagttttaggcgtagaagaggaaagaaatatatgtattgcctacatacctattggaacttgggatcctttaaaacatgcagtcttattacagtgattcttctgtaatagcagtatttattttctggtctggggaacaaaagccttcttttcctttcttcgattaagaaattaaaatccagtagcatagaatctcttagaatcatttcttgtattgcttcctaacttgaccttaacattctgtgtgacctttcgaggccctttttacctctctcaacctctgcttcctgtaaaatgaggtggttgggtcaggtgacattaacggtccttacagcttttcagtttttaaattctacgaagacttaggagtaaaaccttgaagcgttaagtttcttttctgcggggggggagaaaaattactgttcttttaaattggccacgtggggtcgctagtgatctaagagactggttcgcgaaggtggtactgtaaatgtgtggtgcttcagcgaacagattctgggggtggtttatgaaattttctttttgtctctcccttcagctccaaaattcactcgaagacttgatcacatcattagtgttgagagaatcataagcagctgccagagattgtgttcagagccagaccgtggtatctcatgcccacctcaaaagaaaagaaaaaggaaaaaatcatggtaatcctggggtgcaactggctctccttttagactctaactcaagctgctacataatgtggtcttgcaattccttggcttgagaagtaggtcctgcaaagttaaactggatggcataaaacatgccttagtgatggagtcaacctttgtctggaagaatctggagttaccaaaggcagaagcatggcaaaattctcactgaagagctgatgagtgtctctcttggcaattttcctggtgggctttgctgatggttgaggtggggtggggtgggtggcagcaagcttgaatgactgtagaaatcagggagggttcattaaacaaaaagtaaataaaataaaacaaaaatctggaaagctcatgtatcttcccacaccagggacagggtacccacagcatgctcggcacagaccagaccctttatggaaagtcagctgaaccttgccctcggcgtgcaaggaaaaaaaatgtsttttctgccagaagtgttgtataaacatccttttcctacgatcctggatcctgatcctc

SEQ ID NO: 42865 - DNA, 537 bp, Homo sapiens
ttatataatgatattcttgaatatgaatataactatataattataatatgaatataattatatagttatattcttaaatatgaatagttatattcatataattataattatataaatcatatagttatataattcatatacttatataattayatttcatataattatacttatataattcatataattatacttatataattcatataattatacttatataaggataatttataaaatatataaacaggaatagaattgctgggtcatatgataattatatatttaacttactaagaaactgccaaattatcttagatatatatacatttatatttatacatctaaattctgactcaaattcaaatttccttcgtgctcagaagcccaccttcttcaaaaaagccttcactaattccttggagatatttttggagatatctatatatctatatctatatctccaagaattgtattgaaaaaataaaatatgggtcttcaaacaaaaacttgtataagaatgttcattgcagcact

SEQ ID NO: 42866 - DNA, 1099 bp, Homo sapiens
catctaggagaccacaatatatttagtgatcatgtctttttaggcttctggctgtggcacttcctcagactttctttgttttttatgaccatgacagttttgaggaatcccagtcagatattttgtaggatgcccctctgtagtaatttgtctgatatttttctcatggtaaaaataaagtgatggattttggaaaagaagattataaagttctattttcattacattatatcaagggtatatactaggcaacatggtttgtccctgttgatgacgatcttaatcgcctggctgaggtaatgtttgtcaggtttctccactgtaaatttactctttttcctcccctttacatactgtattctctgagaggaagtcattatgcgcagcccacacttacggagcaaagatatgacctcttcttttagggcagagtatctacataatttatttggaagtgttagtcattcactttttatttccaaagatcagcacagagccctcaacatagtaggttcttactacatgtgamgtgcaagaataggattaaacggaatttttcccctcaagaaagtttataggatctggatgtcagcaaaatggtgaataagactttccagtgcttgtactcctgcagaaacatcaatctgaacaactatacatgcacaaaaatacacccccaggccatctgctgtggtcctatacaccagtgaacccacagttcgggcctgcttcagcagaccttgggtctaggcctatcctggtagaccccaagctccaggctagctttcatggcttcaagtaccaagccaacacccatgatccttggctccaggatataacccagagactcagaatccagtagaccccaatgttaggccagacctcatggactgagactccagaaccaaacctgccgacccaggctacagactggccatagtggacccaggacctaggcctgctcctgcagactcagccacagggccaccccagtgccagaccagtttccagccccatcttagtgcctgcccatcccctgcagattgaagctcaaagcacacagcagtaacaggtcagtccctatagacccaggattggg

SEQ ID NO: 42867 - DNA, 1099 bp, Homo sapiens
catctaggagaccacaatatatttagtgatcatgtctttttaggcttctggctgtggcacttcctcagactttctttgttttttatgaccatgacagttttgaggaatcccagtcagatattttgtaggatgcccctctgtagtaatttgtctgatatttttctcatggtaaaaataaagtgatggattttggaaaagaagattataaagttctattttcattacattatatcaagggtatatactaggcaacatggtttgtccctgttgatgacgatcttaatcgcctggctgaggtaatgtttgtcaggtttctccactgtaaatttactctttttcctcccctttacatactgtattctctgagaggaagtcattatgcgcagcccacacttacggagcaaagatatgacctcttcttttagggcagagtatctacataatttatttggaagtgttagtcattcactttttatttccaaagatcagcacagagccctcaacatagtaggttcttactacatgtgacgtgcaagaataggattaaacrgaatttttcccctcaagaaagtttataggatctggatgtcagcaaaatggtgaataagactttccagtgcttgtactcctgcagaaacatcaatctgaacaactatacatgcacaaaaatacacccccaggccatctgctgtggtcctatacaccagtgaacccacagttcgggcctgcttcagcagaccttgggtctaggcctatcctggtagaccccaagctccaggctagctttcatggcttcaagtaccaagccaacacccatgatccttggctccaggatataacccagagactcagaatccagtagaccccaatgttaggccagacctcatggactgagactccagaaccaaacctgccgacccaggctacagactggccatagtggacccaggacctaggcctgctcctgcagactcagccacagggccaccccagtgccagaccagtttccagccccatcttagtgcctgcccatcccctgcagattgaagctcaaagcacacagcagtaacaggtcagtccctatagacccaggattggg

SEQ ID NO: 42868 - DNA, 572 bp, Homo sapiens
cgtaagtatccttgccacttttcttgacccctatgraagacccctcctctgtactttgataacactctgtagcttttatgactatatctatcctcttctacagtggttacttttgaacatttattttttaccccagtagactatgaacttctgcccaaaatagactatatctaccaaaaggacaaacacatagtaggaattcagagctccttctatgactataaaaagacaaaccatttgttctgcagagaaagtgcacgtccaagaagctgctgtcccttttaaaaccactcaccttgaaagtcatccacttagtttaatgatgatggcattactccaagtatttttggaagtcaactttcagaattgtctggggaatgttctttaaattatctcaagtgaggccaaaaaaacatcattctgagcagatctgaggcctgggagaaatcatggggtgagcaatacaattctgtgcagaaaatgaggaatgaaatatgtaaagcaccatacaatgattgatgtgggggcaatgactaagaaactgctcagaagcatgcctagagggagaatca

SEQ ID NO: 42869 - DNA, 721 bp, Homo sapiens
ctgcataatattgaaagttttttgtttgtttgaaggtaaacagagatattcatgaaatggttgaaccagtatctcyacagaatatattttactatctctaaacttggggtgcagaatatagaatttatgactgggattatttcttgaagtaagttgattttcagttgtttcattatgtgcttaaagttaagtgttttgtcatggcagaaggtaaagactgttctaaagagacaaccttcacacaatagccgcatgtctccccactaatattaagtagaattttctctacatgaaaacgtgtatcacctatacatgttatacagttagagaatctacagaacaattgctaattttacccactttcatatttactacccttcgattagaagctaggtgacaaactattttctacacaccttaataaagtcactgagttgtctcgctgatccaggagtaatgttctgcaaaggaaagtatttgactactagaaactttgctctgcagtctggggagtattttagccagatagcattatcatgcgcctacattaccattgctgcgagacatgggaatcgttttaaattttttttagagatagagtctcactctgttgcccaggctggagtgcagtggtgattgtagctcactgccgcctggaactcctgggctcaagcaatcctcccacttcagccttctgagtagctgggactacaggtgtgtg

SEQ ID NO: 42870 - DNA, 721 bp, Homo sapiens
ctgcataatattgaaagttttttgtttgtttgaaggtaaacagagatattcatgaaatggttgaaccagtatctctacagaatatattttactatctctaaacttggggtgcagaatatagaatttatgactgggattatttcttgaagtaagttgattttcagttgtttcattatgtgcttaaagttaagtgttttgtcatggcagaaggtaaagactgttctaaagagacaaccttcacacaatagccgcatgtctccccactaatattaagtagaattttctctacatgaaaacgtgtatcacctatacatgttatacagttagagaatctacagaacaattgctaattttacccactttcatatttactacccttcgattagaagctaggtgacaaactattttctacacaccttaataaagtcactgagttgtctcgctgatccaggagtaatgttctgcaaaggaaagtatttgactactagaaactttgctctgcagtctggggagtattttagccagatagcattatcatgcrcctacattaccattgctgcgagacatgggaatcgttttaaattttttttagagatagagtctcactctgttgcccaggctggagtgcagtggtgattgtagctcactgccgcctggaactcctgggctcaagcaatcctcccacttcagccttctgagtagctgggactacaggtgtgtg

SEQ ID NO: 42871 - DNA, 721 bp, Homo sapiens
ctgcataatattgaaagttttttgtttgtttgaaggtaaacagagatattcatgaaatggttgaaccagtatctctacagaatatattttactatctctaaacttggggtgcagaatatagaatttatgactgggattatttcttgaagtaagttgattttcagttgtttcattatgtgcttaaagttaagtgttttgtcatggcagaaggtaaagactgttctaaagagacaaccttcacacaatagccgcatgtctccccactaatattaagtagaattttctctacatgaaaacgtgtatcacctatacatgttatacagttagagaatctacagaacaattgctaattttacccactttcatatttactacccttcgattagaagctaggtgacaaactattttctacacaccttaataaagtcactgagttgtctcgctgatccaggagtaatgttctgcaaaggaaagtatttgactactagaaactttgctctgcagtctggggagtattttagccagatagcattatcatgcgcmtacattaccattgctgcgagacatgggaatcgttttaaattttttttagagatagagtctcactctgttgcccaggctggagtgcagtggtgattgtagctcactgccgcctggaactcctgggctcaagcaatcctcccacttcagccttctgagtagctgggactacaggtgtgtg

SEQ ID NO: 42872 - DNA, 912 bp, Homo sapiens
catggttggcctccaaggagaccctcatcctctcaagattccgattcgggaaatccacagtggggcccaggtgtgcatattttaacaaagttccctaagattgagtctgttttctcttccctgaccctttccaagaaaagaagaggcttaaagcttggtggtgatttctgaaattggtcttcaggaatcagggcacacttttcactttttttctgccttctcagacrtaatcctaaaaagcgagacaggaagttgtgtcacagccaggctaggaggtctcagattgaagacaattctgtagagacgtcctgtacagcaactaacattctccaaggagctgaaatcttaacaaaaaatttttttcctacaatttcaagtctcctatttaaactgacaacttcatccttaggtaactgtagtgaccatctggaggttttaaggtttgtactacatgtgaataatatgctggccccagcactcccctctaccagcacagatcccaggaacggttgcttctggcttcagtgtcacgttcaccctttgaaatgtaccttctctagggagagaacaccgtagccaagggtacccccttcgcaaacatgggaagcaggtgaatttatctggagccacttttctattctctgtccatcaattctgtctcctgtacaggagaaaaacagtaactgtctccaaaagttctcttctctaaaggtatatgtcttataaaagaaccttcggtagaaggatgctggtgaactcggccttccacatagtttcacagtagtctgtttgtgtgtctttctgccctgttagtgtggggctttttgagcagagaggctgtgcttcgtcatctttgtatcttctgtgctgacacagacataggtgtttgttgaatgactgaatgaatgaatg

SEQ ID NO: 42873 - DNA, 912 bp, Homo sapiens
catggttggcctccaaggagaccctcatcctctcaagattccgattcgggaaatccacagtggggcccaggtgtgcatattttaacaaagttccctaagattgagtctgttttctcttccctgaccctttccaagaaaagaagaggcttaaagcttggtggtgatttctgaaattggtcttcaggaatcagggcacacttttcactttttttctgccttctcagacataatcctaaaaagcgagacaggaagttgtgtcacagccaggctaggaggtctcagattgaagacaattctgtagagacgtcctgtacagcaactaacattctccaaggagctgaaatcttaacaaaaaatttttttcctacaatttcaagtcwcctatttaaactgacaacttcatccttaggtaactgtagtgaccatctggaggttttaaggtttgtactacatgtgaataatatgctggccccagcactcccctctaccagcacagatcccaggaacggttgcttctggcttcagtgtcacgttcaccctttgaaatgtaccttctctagggagagaacaccgtagccaagggtacccccttcgcaaacatgggaagcaggtgaatttatctggagccacttttctattctctgtccatcaattctgtctcctgtacaggagaaaaacagtaactgtctccaaaagttctcttctctaaaggtatatgtcttataaaagaaccttcggtagaaggatgctggtgaactcggccttccacatagtttcacagtagtctgtttgtgtgtctttctgccctgttagtgtggggctttttgagcagagaggctgtgcttcgtcatctttgtatcttctgtgctgacacagacataggtgtttgttgaatgactgaatgaatgaatg

SEQ ID NO: 42874 - DNA, 912 bp, Homo sapiens
catggttggcctccaaggagaccctcatcctctcaagattccgattcgggaaatccacagtggggcccaggtgtgcatattttaacaaagttccctaagattgagtctgttttctcttccctgaccctttccaagaaaagaagaggcttaaagcttggtggtgatttctgaaattggtcttcaggaatcagggcacacttttcactttttttctgccttctcagacataatcctaaaaagcgagacaggaagttgtgtcacagccaggctaggaggtctcagattgaagacaattctgtagagacgtcctgtacagcaactaacattctccaaggagctgaaatcttaacaaaaaatttttttcctacaatttcaagtctcctatttaaactgacaacttcatccttaggtaactgtagtgaccatctgsaggttttaaggtttgtactacatgtgaataatatgctggccccagcactcccctctaccagcacagatcccaggaacggttgcttctggcttcagtgtcacgttcaccctttgaaatgtaccttctctagggagagaacaccgtagccaagggtacccccttcgcaaacatgggaagcaggtgaatttatctggagccacttttctattctctgtccatcaattctgtctcctgtacaggagaaaaacagtaactgtctccaaaagttctcttctctaaaggtatatgtcttataaaagaaccttcggtagaaggatgctggtgaactcggccttccacatagtttcacagtagtctgtttgtgtgtctttctgccctgttagtgtggggctttttgagcagagaggctgtgcttcgtcatctttgtatcttctgtgctgacacagacataggtgtttgttgaatgactgaatgaatgaatg

SEQ ID NO: 42875 - DNA, 591 bp, Homo sapiens
cttccaaaaaaaaaaaaacaaaacaaaacaaaaaaaatttaaaaaaaaaaaacaaaaaacaaaactaagctaccacgaaaatcgtcaaatcgcaagcggtccacctctgagggaaatcagatgccaaactaactagaagggaccccggcctttcgctgtgtgaattgtttatgcaccagtcatttttcactgtgagttttcgtgacactattttgcaggagcccatggaagtgtgtgagaaggcggtcgcaatggagatcrctgggagtgaatgttttcagggttttgttttgaagtgtcacagatgcttgtctgatttttttaaccttccgtgatcacaaacaggaatataggcctttgaatctgaagtggacaaaggaaagcaatttccagtctggctggggcacagcattaggtgattgaaaaggtgatgtggacttgtaaaaggtgttactcaaatattgaaggaagagaatttcctccttgtgatacttaggatgaccctatcttactctaatagatacaataattagtttgtttaaaagcaaaatgttctttgtgatacgaaatgaagagtagggcctgaggatg

SEQ ID NO: 42876 - DNA, 508 bp, Homo sapiens
cccgtgctaaatcaccagctttcaggaacatgactgctcctggcagtggaaggtgctgaaacagaaattttaattaaaaactttatcaagtactcttcacagtgctgcttggcaccatagaaaatcagtacaatatatcgagccctactttggaggagctggatttctgagggagctgatccagttctaagtgtcttctcgaattaggagatagatgatctttgatggggatctcctccgtcaccacaggccagtcacagaaccaactagccacgtgctgccagacctcagtgggcccaagcaggagcaatctcttctatcccccatctcccccaggaccatcccscccattgtcaacgtcatccagggctcttctggtagtgagtgacttttctgcacatgtttagggcttgggggagctagaacacaggaaacatgaatgcaaaaggcatggaaaacactgttttgctttgggttagtaaaatgtgggcaggacaaagattactat

SEQ ID NO: 42877 - DNA, 508 bp, Homo sapiens
cccgtgctaaatcaccagctttcaggaacatgactgctcctggcagtggaaggtgctgaaacagaaattttaattaaaaactttatcaagtactcttcacagtgctgcttggcaccatagaaaatcagtacaatatatcgagccctactttggaggagctggatttctgagggagctgatccagttctaagtgtcttctcgaattaggagatagatgatctttgatggggatctcctccgtcaccacaggccagtcacagaaccaactagccacgtgctgccagacctcagtgggcccaagcaggagcaatctcttctatcccccatctcccccaggaccatcccgcccattgtcaaygtcatccagggctcttctggtagtgagtgacttttctgcacatgtttagggcttgggggagctagaacacaggaaacatgaatgcaaaaggcatggaaaacactgttttgctttgggttagtaaaatgtgggcaggacaaagattactat

SEQ ID NO: 42878 - DNA, 431 bp, Homo sapiens
aatattagaaaaatgttactcctgctccattaagtgtccattcagtagaggagaaaggaatgaaattacacctggctcacagtgacttgagtctaacccttgagtccaactatttaagagtaagtgttaaggtcagtaccattgatggagaaaatactgagaactacagtttcttgtcttgtatttggtccttacaacattgtgcattgtatttttcatcatrttttacatgcacctgatagctttcctgttacacagtaagcaacctggggtaattcttgcgctgtttttctgtaccccacagtctttttatatggcacgtgccctatgtaactacaatacaaccatcaaaataaggatgttaacgatgacacattattgccctctaatcttcaaccctcatttaaattttgctaatttctcaataatgt

SEQ ID NO: 42879 - DNA, 1648 bp, Homo sapiens
gcgggaaaagaaatctacatgaccttagaattggagaggctccctaagatagactgggaaaatccaggcagaatctccaacagaagaacctcctgtggctcacctttcacctgaaagaatttcagagacaatgggtgacttcaagagaccatcagggaacaaattctcctatagcacaatctgtaatgactaagccccatcagtcagcgcacaatggggctttttagtatctgcttacatccagctctattgtccctgccatctgtgaccagccttccttctccccacctgaacacatgccttctcatatacacaagtacaggcatacacctcagggataaccactctccttgtagaaactgtacaatgtttgctaaagcatagtcccactgggagttgactcaattcctgggaaatccaagggattgtaaacaaaatagaacctatttctactaggactgaactaactgaaaaattttggaaactagaatttgctgaatacttcccatgctccatctactcttctaaggatttccatgaacagtattgttacttttgtcatatttacaactctataccaactcctcaaataacacccagtagatactaaaacaatatttagtgaatgaattcacccaagatcacacagtaagtgrtaaaacaagaaatcaaactaggatgtaactgactccaaagaccatactctttagccactaaactgcgccatcttcaaccctacgctacttcccctgagaagtgtacttcttgttatgaactgaatgtttgcatcccaccaaaatttatatattcaagctttaacccccagcatgactgtatttgaagatggggcctcaaaggaagtcatcgaggttaaatgaagccataagggtagggccctgatgtaataggattagcatcattataagaagagacaccagagtgtgcactctctcccaacaagcatacactgagaaaaggccatatgaggacataggaaggcggtagttgtatgtaagccaggaagagagccctcaccagaaacggaattggctagaaccctgatcttggactttgagcctccagaactgtgagaaaacaaatttctgatatttaagccacctagtctatggcattttgttgtggcagtctgagcagactaatatacttttaatactaaaatttccccagctctgggttatatataattcttgtgatctgagttgttcttgtgcacgccagggtatgtgccacaaggaaaaataaatatgtttcaaatgaaaagtataggaaacaaaagaccaccacccattttaatacataattgtatgcagaaccccagcatacttaaaaagaaaaaaaaaccctgtttttctgtcaagttctacccataccccccaagcagaaactttaataggaaacaaaggtggggatatcacataatatgtagttattacatattcaaaatagttattagaacatattgatgtaggaatgactcataattcagatgtgtgaaagctcaatatcgaaacagcagtattcttttttacctcaagcattcttctttatttctacatagtatataacagaatctacaaagaaacatttatagccacacagcagagcatggagttgagtgagagcccgg

SEQ ID NO: 42880 - DNA, 592 bp, Homo sapiens
tagaaagctggcaagctggcaggtgacatgactttatgacatactcccatgtgccccccaggttttgaacaatygcccgttagctagctagctagctagctggctctgattcttcttcattttctcccaaagagagcatattgttttgcagagcagtgaggaagttatcattgaagtaatctggaatccactctacttactttttttcctcctggagatggagtctcgctctgtcgccaggctggtgtgcagtggtgctatctcagctcactgcaacctccttttcccgggttcaagcagttctcctgcctcagcctaccgagtagctgggactacaggcgtgcaccaccacacctggctaatttttgtattttttggtagagacagggtttcaccagattggacaggatggtcttgatctcctgacgtcgtgatccacccgcctcgggctccctaagagctgggattacaggtgtgagccaccacgcttggcccactctacttactttttaaaaagttagtcatatttcaactatggaactttattattagtaacactttagttgtgatacatctcataaccaattgtgac

SEQ ID NO: 42881 - DNA, 592 bp, Homo sapiens
tagaaagctggcaagctggcaggtgacatgactttatgacatactcccatgtgccccccaggttttgaacaatcgcccgttagctagctagctagctagctggctctgattcttcttcattttctcccaaagagagcatattgttttgcagagcagtgaggaagttatcattgaagtaatctggaatccactctacttactttttttcctcctggagatggagtctcgctctgtcgccaggctggtgtgcagtggtgctatctcagctcactgcaacctccttttcccgggttcaagcarttctcctgcctcagcctaccgagtagctgggactacaggcgtgcaccaccacacctggctaatttttgtattttttggtagagacagggtttcaccagattggacaggatggtcttgatctcctgacgtcgtgatccacccgcctcgggctccctaagagctgggattacaggtgtgagccaccacgcttggcccactctacttactttttaaaaagttagtcatatttcaactatggaactttattattagtaacactttagttgtgatacatctcataaccaattgtgac

SEQ ID NO: 42882 - DNA, 592 bp, Homo sapiens
tagaaagctggcaagctggcaggtgacatgactttatgacatactcccatgtgccccccaggttttgaacaatcgcccgttagctagctagctagctagctggctctgattcttcttcattttctcccaaagagagcatattgttttgcagagcagtgaggaagttatcattgaagtaatctggaatccactctacttactttttttcctcctggagatggagtctcgctctgtcgccaggctggtgtgcagtggtgctatctcagctcactgcaacctccttttcccgggttcaagcagttctcctgcctcagcctaccgagtagctgggactacaggcgtgcrccaccacacctggctaatttttgtattttttggtagagacagggtttcaccagattggacaggatggtcttgatctcctgacgtcgtgatccacccgcctcgggctccctaagagctgggattacaggtgtgagccaccacgcttggcccactctacttactttttaaaaagttagtcatatttcaactatggaactttattattagtaacactttagttgtgatacatctcataaccaattgtgac

SEQ ID NO: 42883 - DNA, 592 bp, Homo sapiens
tagaaagctggcaagctggcaggtgacatgactttatgacatactcccatgtgccccccaggttttgaacaatcgcccgttagctagctagctagctagctggctctgattcttcttcattttctcccaaagagagcatattgttttgcagagcagtgaggaagttatcattgaagtaatctggaatccactctacttactttttttcctcctggagatggagtctcgctctgtcgccaggctggtgtgcagtggtgctatctcagctcactgcaacctccttttcccgggttcaagcagttctcctgcctcagcctaccgagtagctgggactacaggcgtgcaccaccacacctggctaatttttgtattttttggtagagacagggtttcaccagattggacaggatggtcttgatctcctgacgtcgtgatccacccgcytcgggctccctaagagctgggattacaggtgtgagccaccacgcttggcccactctacttactttttaaaaagttagtcatatttcaactatggaactttattattagtaacactttagttgtgatacatctcataaccaattgtgac

SEQ ID NO: 42884 - DNA, 1254 bp, Homo sapiens
atggtgaggacaaatttcaattattaagattttgagtatactctctgaagctgggttagagtctcgggcttcttttgaaaggtgcctcctagtctggaagggcttcctgcctccttgttcagagtgggaattattattccctgctttcctaggctgaatgtctttcttcctggctctctgtgaggcctctctagtctttctcttttctctattggatcctgcttctcccatgagaactactcggtcagctgaaaacccctcgtttaaaacctctgctgactatatagtcagccactatggtctaaatactgtttgctttctttcccgtggacaaaactttactgaaaactttcctgagcaacagtggctcttttggtgctcctgagatctcttcaaattagtccacctgaaagggagtcctagagcaaaacaaaacacaaatttcagatgcacattggcctacttattttgcctggtatgaagaaggcaaaaaatggctaaatcattcaaatcttactcaaactactgaagttattagacaacgtctccagaaaaaaatttccaagctgataaacttcctagagcctccacaactcttccaccctcccccttcagctttcttttgtatcaatttctcccagaatgtccctcaccagctgcatcgccagcccctgaattctctgtaatcataaggttcactgggcttccatctcttgctgataataagggtgaggctggtacacattctcaagcaaggttaacagaagaaattacatttaaacataggtcttgattcaaattatatgccatcgctaaggactttctgaccccagaaggaaagggaaagatttattaaacaatttagaatatttctcaggggacactctctaagattccttcacttatcacaacttatctacctactggttggacctggagatgcctccctttggtttgaaaaagccaaatggaccaccatctctgaagaccttcaaggatattggactatcactgattttcatcagagaatgaggcaaataagagaaaaattactaggagccatctctcaagtctatcccaccaaaattgattgcttacatatccaaaattgtaagcaactaaaggatgaaamttgctatcgtcatcaactatagataacatgggaagaacacttaaagctggaactgacttacttgacagttactgctctgcccaccagctttgtaaatggtctcagactggagatccatgatg

SEQ ID NO: 42885 - DNA, 645 bp, Homo sapiens
aggaaaactatttaggcctgtggagaactgggagcccctgcaggggaggaaggttgagactctgctcccactgatcttgccccataagaacgtgggccaaggggcaggggtgaggactgaaatagagatgttcatgtggaagtcgtaagagtttgcacaaatatatactgacacgtatccaccattagagcaccacacagtatttctttggggtaaccaattaaatgtaagtttaaacactgagcaccataagaaaaaactcactgtagaaaaaattcaatctgaaaactatccattagctgactctggaatacacagtaatattttatcagagaatcctaattccttttcttttctcttttttctttcttttcttttcttttcccttctctcttcatctttcatttgctattcttttttagtagattttrtgttatgtttagagtagttttaagtttactgcaaaattgagaggaaggtactgagatttcccatatacgctccaccctgacacatacatcagcctcccccatatcaacatcagccaccagagtggtccatgtgttacaatggatgatcgcacattaacacatcattatcacccaaagttgcagtacatgttagagttcactcttggtgtaagtt

SEQ ID NO: 42886 - DNA, 645 bp, Homo sapiens
aggaaaactatttaggcctgtggagaactgggagcccctgcaggggaggaaggttgagactctgctcccactgatcttgccccataagaacgtgggccaaggggcaggggtgaggactgaaatagagatgttcatgtggaagtcgtaagagtttgcacaaatatatactgacacgtatccaccattagagcaccacacagtatttctttggggtaaccaattaaatgtaagtttaaacactgagcaccataagaaaaaactcactgtagaaaaaattcaatctgaaaactatccattagctgactctggaatacacagtaatattttatcagagaatcctaattccttttcttttctcttttttctttcttttcttttcttttcccttctctcttcatctttcatttgctattcttttttagtagattttgtgttatgtttagagtagttttaagtttactgcaaaattkagaggaaggtactgagatttcccatatacgctccaccctgacacatacatcagcctcccccatatcaacatcagccaccagagtggtccatgtgttacaatggatgatcgcacattaacacatcattatcacccaaagttgcagtacatgttagagttcactcttggtgtaagtt

SEQ ID NO: 42887 - DNA, 645 bp, Homo sapiens
aggaaaactatttaggcctgtggagaactgggagcccctgcaggggaggaaggttgagactctgctcccactgatcttgccccataagaacgtgggccaaggggcaggggtgaggactgaaatagagatgttcatgtggaagtcgtaagagtttgcacaaatatatactgacacgtatccaccattagagcaccacacagtatttctttggggtaaccaattaaatgtaagtttaaacactgagcaccataagaaaaaactcactgtagaaaaaattcaatctgaaaactatccattagctgactctggaatacacagtaatattttatcagagaatcctaattccttttcttttctcttttttctttcttttcttttcttttcccttctctcttcatctttcatttgctattcttttttagtagattttgtgttatgtttagagtagttttaagtttactgcaaaattgagaggaaggtactgagatttcccatatacgctccaccctgacacatacatcagcctcccccatatcaacatcagccaccagagtggtccatktgttacaatggatgatcgcacattaacacatcattatcacccaaagttgcagtacatgttagagttcactcttggtgtaagtt

SEQ ID NO: 42888 - DNA, 547 bp, Homo sapiens
tgaaatcagccttgctctttttggataattagggtcctgtgaatgtaagtgaatggatctctaagtcagatctagccttttttttttgtttttggaataaccctcctggaaagcaggagtgacatctcactcccttctgacctagatttcatgagtcacatggaggaaagcttcagtcgcaggagaagacttgggattctccacctgggaagtgctccctaggcaatgaagaaatrcatagggcaattttgcccaaaaatttatcttacatataaatggcaagtagcttgattctgtgcatttgtctttataagatgtcccttgatcaatgatcaatatccactgtcgtgagcaacgtagagtttttgaaacaactgggtacatacttgggactgaatcttggatattggtgtcagctggttaactgttcttttccaaggcctcatatatcagcaggatgatgcagctgtgcccactgaagaagcaatttgggaaaacagacctaagtcactgtattagtccattttcacactgctgataaagacat

SEQ ID NO: 42889 - DNA, 648 bp, Homo sapiens
aaccacttatcatctcctttgctatcactcagattccaactacaaaaatctcttaacctggactttttcaatagtcacccaactgatcttcttgttttatgaagatgtttaccttgaaattttagttaattttcagtttttgccagttgaattcccctcagaaagtttggagatattcaactactatgttcttcctgccattctggtctaagaagaatacattcctgcttcttattgatcctactctgattaggctttgaggcccacccctgaattgaaatagatcatggtaaaggtaaacagtgtcttaccttatgtaaaataaaatgctcaactcttagatttcttcttacttggtttatagggcatttgacatgattgatcrgtccttccttcttaaaatactttgttagcatggcttgcaggacataatattaattacatttgtttcttgccttattttacaggctacctcctttgatgggtcttcactatttttctgagctctgagtctttgagtgctctaaagtcaatcttgaagatcagtgttttctctgtctactacttcccaaagcaaacacatccaaacttataactttaaatagctttattttacctatgatcctaaatctccagctttagtttttt

SEQ ID NO: 42890 - DNA, 1478 bp, Homo sapiens
tataatgattggggaaaaaatgcagtttttttgtatgacagatttgaagtcatactctgaggaaatcaaagttgtgatttctccttctcattacttgctttttcatccatttctcactttatttatccagaaactgtcaatcccagaatttatcattatgttgggatgaggtagtgaagacacaatacttgctttgtcgcccaggatagagtgcagtagcaccaccatagtctcaaactcctacactcaagagatccttccacctcagcctgtagagtagctgagattatttacaggcgcgagccactggggccaggctaattgcattacgaatatgtttttatttcaggaaaagttaaagacctggtttgatggggatgaacaggaagcaatcaagctagaatgctcattctttcatgtactacgttgcacaattgtcagagggtcctagcagaagagactccatcttgaataaagactggatgaggccaaacctgccgggatacattctcagaggggttaggcactcttggtcacaagatgtttatggttgagtgaaggagttaattatgttaactaaataaataaagactcagaacttatggaaacttcttgatattttatgaacaagaagcatttaataatcaaagttttgttaaaaataatattacactcacaaagtcttgctaacctcaatagctacccaggaaaataacaatactaatagcctgtcacaagctgagaacaagcttttataatgaggtacaatattatcagccttaataccctatataaacaagcattatctttaaggtagaggccttccttttcttgctttctggggatgccttactctgtagtagagtgatttctaataaacgatgttaactttactgtagtctgcaactcacacacgcaagatccaagaacccgctcttggagtctggaagaagacccctttttcggtaatacaatgaaaacccttagacttactcctactttccagaattattcatgaatctgatagattacgacgtgattttaccacactgttgcagctgtacactatgtgactatttgtatgagaagttatcaggttgcacaagtacaccgatgtactacctgatagacctagttgcatatttgcaggaaaaaacacaaatccgaaatatatatatatatatgtatttgtttaagatataggaaaaatctctttgacctatgaaaagattcgacaagaaacaaaaagtagtaggacttttcttgaatactgagaaaaatatctttgaaaatatttttgtcctgaaaaagggtaggtaaaagtttagaaaaaawatatataattgttttaataaaagtgcaaatagctattccttctataaattagcacaagaaagcaggtcgaggtatataataaatgaatgaatgtctgtcataaaaagaagaaaaattaagagtagaatttaatagaattaaaa

SEQ ID NO: 42891 - DNA, 1070 bp, Homo sapiens
cactgttaaatttaactctttgttatttagaactgattcaatttatattcctataatcagagatgattaattcttatttctaactactcacaatctgtagcacagttgactaagacttaaaaatcttaattattgcttaatttctagtaaaaatgttattgaggaaaactggttattgttattaagaattcattctggaaaaggtaagaattattaggagttctgttcatggaggaattaaactgcaacacttcgagcatcatcattgtgcctcaggaaatttgctttctctttgtgwtctttcccatctttattataatccatactatgatatcgaatagcatttttttcttcaacccactcttgattgacacctcgattgagaaatggtcacttcatactctcatttctggctctgattcctgattccatttcttgtatgttacatttgctcccagctccaaacatacatctatttttgagctttgttattgtcctaataggttaacatttctctttcaagacttaagaatgtttctattcttcaaatgtaattattttgtaattataatattgtagtataatattatatatcagcaactaacatgtatatctatcctgttgtggttagaatgaaaacatgtatagcatttttattctgttaagatcacaatatttgtattatagttaccagtccttaaaatatggttgtaagtacacctagtgtagagaggcttattattaacagattaaaatctttccttattttattctccagaagccccaaagcaaagtaacttacttacaaagcatatatgtgaaatcatttttaccttttagttttacttatcaagtgctggggtaagagcaagcaaacaagcaaataaactccatagcagcattatagatctatatgctaatatttgaaaattaaatttataaatatctgcaacacagaaacaacaacaataacaaattattttttgagacaaatacatgtgaaatagcatctaagagtgagagcagacccctcagcaaagtaggaagtgggacccaaagaatagtccacc

SEQ ID NO: 42892 - DNA, 552 bp, Homo sapiens
ttaagataaaacttgaaagtcattatattaatgctattaagaacagattttgtttcatgagtggaaaaatataacatttagaaagttaagaagaaaacttataatttttgtttatattggaagtatcagtataaaatactgatttatttgcttccttttaagaccaaacttatgtcctgtctatkcactgacatggcttagaagcaattataacactgtctcaatgaacactcctttttaatgtgtcttcctttaaaacttatcttttgttttacaaagaaaaaacatgcaatatatccaaaagagcaaattgtaccacatggtttgaaatctcagatgctctcgaatatacatgcagatgtaaaggagcatctctccggatggtgagattgtgtgcctaagaattacaccctccctcttcccctggttgtaagctgatgcctggcagcgcacaactaaaaattataacaccactatattgagaacttcccatgagccctcaatgttctgagcccttaaggtacaccaattctatactcacaactacccttt

SEQ ID NO: 42893 - DNA, 688 bp, Homo sapiens
tgcattttagtgttttcagagccagaaacacaaggagaacagtcatgttttgaaatccactaagaacaaatactagggataaacacagatgtaagaaaakgaatgttttggatagactccagctaagtaagtgaagtgaagaacagagtcatagaccttggaacaaagaatgaaaatgatcaagttgtgaatgttgttaagagaggttttaattcttttttttttcttagaggcatgcagaagcaataattgaagttaaaagaaagagaagatttgttcttcatggaagaagagtaaatgttattttatttctcctttccttaacttgaaagaaatgaaatgaaagaggagagttattaaggtgagaatgggggaggcatataatcttaagggctgtcacaaaaggtagtaacttttttgtagtgcagatttaagggaggaaaccacattgctttcaaaatggaaacttcaagcaaagccagtgttgcttgtattgacctttaggggaggaaggtagttagcattttttgttgttcaatttcatgtaaaatgaggagccctgagagctagcatttctgtcctgaagcatcttcatgtagatcagattcacacccccatgcctgactcctcaaagcatgctaatcccatcttgacatttgcagtaaatgaaaactctctgtcagtaggt

SEQ ID NO: 42894 - DNA, 701 bp, Homo sapiens
tgaggtcaacagtttgagaccagcctggccaacatggtgaaaccccatctctactaaaaaaaaaaaaaaaaaaaaaagcctggtgtgctggcacatgcctgtcatcccagctactcaggaggctgaggcaggagaaacgcttgaacccaggaggcagaggtagccatgagtcgagatcacgccattgcactccagcctggcgacagagygagactccatctcaaaaaaaagaagaactgagttcaaaatcagttcgaaaggttcaatgttgggtcacaggatcaggcaaaaagcagaggcagaaaggccttaggagtgttccaagaactagcactggaccagctgagagtcagagagagttcaccacgtgggaacaatgcagccagtcatgtgggatagtggcaccatgacagtatctagtcaggacaatgacagccccagggataatgctgatgagttcctgcttcaaaaaaggtcattgtcattcctttagtcctgatacctagaactatacgggattgttccctgcctctccccaagccccataacttgatcttaaaggcattattgtcaattaaagtagtcccaagttctagaagctatttttattcagcctcgtctaatagggctttcattttaaaatagctttattttgaatctatttactgttcccagcccctatcactttgttcttataaata

SEQ ID NO: 42895 - DNA, 554 bp, Homo sapiens
tcagaagcactgtaataaaaaatcacaaygcaaactgtaattcttacctgttaatgccaaatttctgctatttacagacttagctactagactaatttaacatttttctctttcagatatacctaatgtagataatttattttgatgctttcggtgttgaatttcttgtttaaattgtaaggtaaaatagttgtttgtcgggggttgctcatgtttctattgcctcatgaaattaagtagtggttttatagaacaatggggctaattgactgcaaactagatttatgttacataagaagaagagtgacacaaaggatttgtttttaaatatgaaatgcatttttctgagctatttaacatgagaattatcaaatttgtgagtcccttttttctaaatttttgtaggtacatagtaggtgtatatatttatggggtatatgagatgttttgatacaggcacgcaatgtgaaataagcacatcatagggaatgaggcacccagaccctcaagcatttaccctctaagttacaaaaaatccaattacattctttaat

SEQ ID NO: 42896 - DNA, 554 bp, Homo sapiens
tcagaagcactgtaataaaaaatcacaatgcaaactgtaattcttacctgttaatgccaaatttctgctatttacagacttagctactagactaatttaacatttttctctttcagatatacctaatgtagataatttattttgatgctttyggtgttgaatttcttgtttaaattgtaaggtaaaatagttgtttgtcgggggttgctcatgtttctattgcctcatgaaattaagtagtggttttatagaacaatggggctaattgactgcaaactagatttatgttacataagaagaagagtgacacaaaggatttgtttttaaatatgaaatgcatttttctgagctatttaacatgagaattatcaaatttgtgagtcccttttttctaaatttttgtaggtacatagtaggtgtatatatttatggggtatatgagatgttttgatacaggcacgcaatgtgaaataagcacatcatagggaatgaggcacccagaccctcaagcatttaccctctaagttacaaaaaatccaattacattctttaat

SEQ ID NO: 42897 - DNA, 554 bp, Homo sapiens
tcagaagcactgtaataaaaaatcacaatgcaaactgtaattcttacctgttaatgccaaatttctgctatttacagacttagctactagactaatttaacatttttctctttcagatatacctaatgtagataatttattttgatgctttcggtgttgaatttcttgtttaaattgtaaggtaaaatagttgtttgtsgggggttgctcatgtttctattgcctcatgaaattaagtagtggttttatagaacaatggggctaattgactgcaaactagatttatgttacataagaagaagagtgacacaaaggatttgtttttaaatatgaaatgcatttttctgagctatttaacatgagaattatcaaatttgtgagtcccttttttctaaatttttgtaggtacatagtaggtgtatatatttatggggtatatgagatgttttgatacaggcacgcaatgtgaaataagcacatcatagggaatgaggcacccagaccctcaagcatttaccctctaagttacaaaaaatccaattacattctttaat

SEQ ID NO: 42898 - DNA, 590 bp, Homo sapiens
tcacattatactgtcatctgtaaagtgtgtaatagtctgtcatctgtaaagtgtgtgatagccttacgtctaacacaacaatgtacatactttaaaaatattgctcaaaaatgctgatratcatgcaaggcttcagcaagttgtaatctttttgctggtggagggtcttgcctcagtgttgatggctgctgacttaccaagctggtggttgctgaagtaacgttagcgtggctacagcagtttctttaagacgacagtgaagtttgccacattgattgacccttccttatgtgaaagatttctctgcagcatgtgatgctatttgatagcattttgcccacaatagaacttctttcagatttggagtcagtcctctcaaaacctgacgttacagttaaccagctgcattagcccctaacaagagagtcagcctgaagctttgaagccaggcattaacttctcttctctagctgtgaaagtcctagatggcatcttcttccattataagactgtttagtttacattgaaaatctgttgcttagtgtagccaccttcatcagttatcttggctagatcttctggataacttg

SEQ ID NO: 42899 - DNA, 698 bp, Homo sapiens
gcatagattgagaaatcacaatctaactgagaaggtcttcctagtggctagccttagtctgatgctgtcacaaccactctcccctgctgctggctgggcccataaatgacatctccctgcaccagagttaggtgtctactgctttatcccagtaccctaggcactcctctgtcacagctcttctcatgctctattgtaaattctggtttacttctttatcttcccaccaacctgaaagcacctaaaaggtaaagaccttatcttcttcatttttgcatcccttgtccagaatagtagcaataaaaataaggcaatttgttgaataaatcaatgaagcacaacaagtcatcctttctgtgttttgaacaaagaaagacttttagaagaatatcaaagatcaatttctatgatatacatatcctcatcacattgtgtctacttagccacagaggattacaggctgggtgtggtgkctcatgcctataactccagaacttcggggggccaaagctggaagatcacttgagccaaggagtttgagaccagcctgggtaatacagtaagaccttgtctctactaaaaataaaaaaaaaatttaaattatccaggaagctaggtatggtggcttgcacctgtaatcccagcactttgggaggccgaggcaggcggatcacctgaggtcaggagttcgagaccag

SEQ ID NO: 42900 - DNA, 573 bp, Homo sapiens
tgaaaatatatatataaatatatatatgaaaawatatatataaatatatatatgaaaatatatatataaatatatatatatgaaaatatatatataaatatatatatatgaaaatatatataaatatatatatgaaaatatatatatatatatatatgaaaatatatatatatgaaaatatatatataaatatatatatgaaaataatatatataaatatatataaatatatataaaaatataaatatatataaaaatatataaatatatatatataaacatatatatataaatatatatatatatatatttttttttttttttgtattttttttgtagagatggaatttcaccgtgttgcctaggctggtctggagctcttgatctcaagcgatcctccctgcctcggcctcccaacgtgctgggattataggcgtgagccaccgctcctggccagggtctgttcctagttgcaacagttcttggaaacccactcgagagggccacgcctccattcaccaggccacggtgggtggtgtgcgtatgttttgctgaggcctggtcatcacgctg

SEQ ID NO: 42901 - DNA, 573 bp, Homo sapiens
tgaaaatatatatataaatatatatatgaaaatatatatataaatatatatatgaaaatatatatataaatatatatatatgaaaatatatatataaatatatatatatgaaaatatatataaatatatatatgaaaatatatatatatatatatatgaaaatatatatatatgaaaatatatatataaatatatatatgaaaataatatatataaatatatataaatatatataaaaatataaatatatataaaaatatataaatatatatatataaacatatatatataaatatatatatatatatatwtttttttttttttgtattttttttgtagagatggaatttcaccgtgttgcctaggctggtctggagctcttgatctcaagcgatcctccctgcctcggcctcccaacgtgctgggattataggcgtgagccaccgctcctggccagggtctgttcctagttgcaacagttcttggaaacccactcgagagggccacgcctccattcaccaggccacggtgggtggtgtgcgtatgttttgctgaggcctggtcatcacgctg

SEQ ID NO: 42902 - DNA, 506 bp, Homo sapiens
agtgtgggggcactaaaaggattttagtggggaaattacagtatagagtgagggtgtaaggtggttggaggtcaagactggagcagggagagcaggcaggaggcttttgacagacagaatggcacaaaccggagcagccaaggtgggaatgagcgaaaggaatgagtggagaaatatttaggaggtgagactgcaggacccataattgattggatttgcaggagcgggaaggaaaggagtctttgatgattaccttttgctgttgtaaatcctgagttaatgtaccccttccctgggagttttcattttagaggatgcttcttattctatattttcagaaggatcagttagacaattagttgcacagactcctaatgttcagtagggaagctacctaaggagttggagtcagttctaagcagtcaacttaaaaggcagtggagakacagcatttagtgtctctgtgtctcagttttctaatctgtaaagtcaatgctagctccatt

SEQ ID NO: 42903 - DNA, 1496 bp, Homo sapiens
cggggctcaccgcgatggccctcccgacaccctcggacagcaccctccccgcggaagcccggggacgaggacggcgacggagactcgtttggaccccgagccaaagcgaggccctgcgagcctgctttgagcggaacccgtacccgggcatcgccaccagagaacggctggcccaggccatcggcattccggagcccagggtccagatttggtttcagaatgagaggtcacgccagctgaggcagcaccggcgggaatctcggccctggcccgggagacgcggcccgccagaaggccggcgaaagcggaccgccgtcaccggatcccagaccgccctgctcctccgagcctttgagaaggatcgctttccaggcatcgccgcccgggaggagctggccagagagacgggcctcccggagtccaggattcagatctggtttcagaatcgaagggccaggcacccgggacagggtggcagggcgcccgcgcaggcaggcggcctgtgcagcgcggcccccggcgggggtcaccctgctccctcgtgggtcgccttcgcccacaccggcgcgtggggaacggggcttcccgcaccccacgtgccctgcgcgcctggggctctcccacagggggctttcgtgagccaggcagcgagggccgcccccgcgctgcagcccagccaggccgcgccggcagaggggrtctcccaacctgccccggcgcgcggggatttcgcctacgccgccccggctcctccggagccggggcgctctcccaccctcaggctcctcggtggcctccgcacccgggcaaaagccgggaggaccgggacccgcagcgcgacggcctgccgggcccctgcgcggtggcacagcctgggcccgctcaagcggggccgcaggccaaggggtgcttgcgccacccacgtcccaggggagtccgtggtggggctggggccggggtccccaggtcgccggggcggcgtgggaaccccaagccggggcagctccacctccccagcccgcgcccccgggacgcctccgcctccgcgcggcaggggcagatgcaaggcatcccggcgccctcccaggcgctccaggagccggcgccctggtctgcactcccctgcggcctgctgctggatgagctcctggcgagcccggagtttctgcagcaggcgcaacctctcctagaaacggaggccccgggggagctggaggcctcggaagaggcgcctcgctggaagcacccctcagcgaggaagaataccgggctctgctggaggagctttaggacgcggggttgggacggggtcgggtggttcggggcagggcggtggcctctctttcgcggggaacacctggctggctacggaggggcgtgtctccgccccgccccctccaccgggctgaccggcctgggattcctgccttctaggtctaggcccggtgagagactccacaccgcggagaactgccattctttcctgggcatcccgg

SEQ ID NO: 42904 - DNA, 1171 bp, Homo sapiens
cagaccgccctgctcctccgagcctttgagaaggatcgctttccaggcatcgccgcccgggaggagctggccagagagacgggcctcccggagtccaggattcagatctggtttcagaatcgaagggccaggcacccgggacagggtggcagggcgcccgcgcaggcaggcggcctgtgcagcgcggcccccggcgggggtcaccctgctccctcgtgggtcgccttcgcccacaccggcgcgtggggaacggggctkcccgcaccccacgtgccctgcgcgcctggggctctcccacagggggctttcgtgagccaggcagcgagggccgcccccgcgctgcagcccagccaggccgcgccggcagagggggtctcccaacctgccccggcgcgcggggatttcgcctacgccgccccggctcctccggagccggggcgctctcccaccctcaggctcctcggtggcctccgcacccgggcaaaagccgggaggaccgggacccgcagcgcgacggcctgccgggcccctgcgcggtggcacagcctgggcccgctcaagcggggccgcaggccaaggggtgcttgcgccacccacgtcccaggggagtccgtggtggggctggggccggggtccccaggtcgccggggcggcgtgggaaccccaagccggggcagctccacctccccagcccgcgcccccgggacgcctccgcctccgcgcggcaggggcagatgcaaggcatcccggcgccctcccaggcgctccaggagccggcgccctggtctgcactcccctgcggcctgctgctggatgagctcctggcgagcccggagtttctgcagcaggcgcaacctctcctagaaacggaggccccgggggagctggaggcctcggaagaggcgcctcgctggaagcacccctcagcgaggaagaataccgggctctgctggaggagctttaggacgcggggttgggacggggtcgggtggttcggggcagggcggtggcctctctttcgcggggaacacctggctggctacggaggggcgtgtctccgccccgccccctccaccgggctgaccggcctgggattcctgccttctaggtctaggcccggtgagagactccacaccgcggagaactgccattctttcctgggcatcccggg

SEQ ID NO: 42905 - DNA, 1171 bp, Homo sapiens
cagaccgccctgctcctccgagcctttgagaaggatcgctttccaggcatcgccgcccgggaggagctggccagagagacgggcctcccggagtccaggattcagatctggtttcagaatcgaagggccaggcacccgggacagggtggcagggcgcccgcgcaggcaggcggcctgtgcagcgcggcccccggcgggggtcaccctgctccctcgtgggtcgccttcgcccacaccggcgcgtggggaacggggcttcccgcaccccacgtgccctgcgcgcctggggctctcccacagggggctttcgtgagccaggcagcgagggccgcccccgcgctgcagcccagccaggccgcgccggcagaggggrtctcccaacctgccccggcgcgcggggatttcgcctacgccgccccggctcctccggagccggggcgctctcccaccctcaggctcctcggtggcctccgcacccgggcaaaagccgggaggaccgggacccgcagcgcgacggcctgccgggcccctgcgcggtggcacagcctgggcccgctcaagcggggccgcaggccaaggggtgcttgcgccacccacgtcccaggggagtccgtggtggggctggggccggggtccccaggtcgccggggcggcgtgggaaccccaagccggggcagctccacctccccagcccgcgcccccgggacgcctccgcctccgcgcggcaggggcagatgcaaggcatcccggcgccctcccaggcgctccaggagccggcgccctggtctgcactcccctgcggcctgctgctggatgagctcctggcgagcccggagtttctgcagcaggcgcaacctctcctagaaacggaggccccgggggagctggaggcctcggaagaggcgcctcgctggaagcacccctcagcgaggaagaataccgggctctgctggaggagctttaggacgcggggttgggacggggtcgggtggttcggggcagggcggtggcctctctttcgcggggaacacctggctggctacggaggggcgtgtctccgccccgccccctccaccgggctgaccggcctgggattcctgccttctaggtctaggcccggtgagagactccacaccgcggagaactgccattctttcctgggcatcccggg

SEQ ID NO: 42906 - DNA, 604 bp, Homo sapiens
gaaaataagtgacaaaaaggaaataagtgtacagagtatctaagaaagaagcgaatgacaatggcagagtggaaagggcactggatttggagtctgaagatctgagctcatgcacccatgcctcacagtaartaacttaacccctctgaccatttactttgtctgaccctcactttcttagtcctcaaaataggcttattgtaatactcatccctattgttgttttcacagacaaatgaaattataccatgaagtacttgtaattgacaatattatacaaataatgtcagaatgaagtactgacatatgctacaacgtggaagaaccctggaaacatggtaagcgaaataagctagacacaaaaccacaaatgtaatatgattccacgtacatgaaatatatagaataggtaaattcatagggacaggaagcagattagaggtaaccagaacctggagggaggggggaatagggaattatttcttaatcattacagaatctctggagtgatggaaaagtttgactgatagaggtgatggctgcacagtaccatgaatgcaattaatgtcattgaatgttacctttaaaaatagtgaaaatggca

SEQ ID NO: 42907 - DNA, 604 bp, Homo sapiens
gaaaataagtgacaaaaaggaaataagtgtacagagtatctaagaaagaagcgaatgacaatggcagagtggaaagggcactggatttggagtctgaagatctgagctcatgcacccatgcctcacagtaagtaacttaaccyctctgaccatttactttgtctgaccctcactttcttagtcctcaaaataggcttattgtaatactcatccctattgttgttttcacagacaaatgaaattataccatgaagtacttgtaattgacaatattatacaaataatgtcagaatgaagtactgacatatgctacaacgtggaagaaccctggaaacatggtaagcgaaataagctagacacaaaaccacaaatgtaatatgattccacgtacatgaaatatatagaataggtaaattcatagggacaggaagcagattagaggtaaccagaacctggagggaggggggaatagggaattatttcttaatcattacagaatctctggagtgatggaaaagtttgactgatagaggtgatggctgcacagtaccatgaatgcaattaatgtcattgaatgttacctttaaaaatagtgaaaatggca

SEQ ID NO: 42908 - DNA, 532 bp, Homo sapiens
tcacgcctggctaatttttgtatttttagtagagatgaggttaatctattggaaataagtctatgtaaacttaagttgttgttattctccaaaaaataaataatcagggtgtttttaatgcctaatttatagaaacttgtataaccagatgttgactgagacttttcatattttgaaaaattatagtttaataccaaagccaagaaacatggcactatgtactgtgcattctagagccagaaagctaattagggctactgacttctgaggatgtagccttccccttttgcccaagttaatataacatgaacacagaagactggaaaaggagtaagcttcatggaggccaagtgagagaggctctggaagagtcactcatgaagaacagaggccctgcttggaaagacacctgcatgccattccctggctggacaacacagctcattttgtgaagctctacaggggagcatggaagagacagttcttgaaagagtgctctgasagattaggagtgcatcaaattattgttctc

SEQ ID NO: 42909 - DNA, 610 bp, Homo sapiens
gacagggctgttgttcagcaagagaagtcattgcacaggttatgagagttgggacatgtgtctgcatgaggtgttagagggacagagaacaggaatcccacatccccatcacagacatggatggacacactccatctgcgtttgctccctgaagcagtaatacttccaggctgacactctgatgaccatgtcttctaggatgctcattggtarctcgtgcaaaggatcacattcttcttcttgctctggtttatttgctcttaccaaaacataattccagcttttctgtttatgagtgtgttctttcagagactctgagcaatttgagagatggctcatatgtcacttacctctccaaaaacagaaactggcagaatttgggcactcaagaaatgttggatggatagatgaataggcaaatgcatggatggacagatagttgaatgaatgaatgaatgagccagcagatggacagatggacaaattgatggatagatagaaggatgaatggaaatgaatggatggataggcaggtagatggatagatagttgaatgaatggatagatggatggatgaatgatagagggatggatggatagatggatggat

SEQ ID NO: 42910 - DNA, 586 bp, Homo sapiens
ggggaaaatgttctagtgtctgtagacaagctagtgccaagattagcctagctttttgagggtaccttgtttcagatttattcagccccagaagtgttaactgcactgtgtccaggatctagcaagacactatccattyccagcttggtccaaacaaaacaaaacatcaaccaaagagggaggaaaccatgaatgttgccagaaaattagtttgctctgtcttttttttcttctagagtgtttcacagccaatggtgcggattataggggaacacagaactggacagcactacaaggcgggaagccatgtctgttttggaacgagactttccagcatccatacaacactctgaaataccccaacggggaggggggcctgggtgagcacaactattgcaggtaagatggggccactcagtactttaaaaagatagatatatatctagtctcttcttccaacccctttcatcccagctcacaactaggggaagtcttttgaccaactcaagagacttatcttgtcagttttaaaaatatttctttcacaccttacacacacacacacacacacacacacacacacaca

SEQ ID NO: 42911 - DNA, 603 bp, Homo sapiens
ttttgcccaagcagcagtttattattatcatcctggtgccctatttctttgttaaagtcaaagagccacctttaccttttatttttaatggtacatgggacagctaaggctaagaagattgaagaaagaaaataatgaaggtttaaaaaagccacatctttgatccctcactgtctacttcttctttcagcaatattcctttcactgtggttcatccatgggtcaagattcattgattcattcactcaaatcattcatcttagcaaaaacmatatatcacataatctgatgttgaactataaaggtttcatcaggtcattcattcaccctgtccacaagctgtgaattattatctctttcctggttgtattttgggattacaatcatcttgagtcaaagctggaaactgagtggaagtctctgggaaagactcaaacctccttaagctatacacctcttttccccatcagattttccttccttcagtttccaccaaaatgtgctcttggatttttcatatgaatgtataatgtacctcaggcctataagtattttaaaagggatcaaaatcttagttttaatggaggacatttttatgatgga

SEQ ID NO: 42912 - DNA, 445 bp, Homo sapiens
aaggggaaaacagagtgaagaaaagtcagagagagggacaagaagcagggaggggaggagctgctatccaggatgtggagtttaagttcagaaatgagttctgaaattctcagtctcacctctattttcccacaggaggtggaaacttcaagtgctggatttacaggatgtctgtgagaacttctggatggtttggtctgaagctatggcccatgggtgcttcctcaatgccaagaggaacaaaaaaccagtggaggactgtccaaggatgaraggacggcagcccttgactgtgttcgtagaactttggctcaagaacaggactctggatgaatacctcacctgcctccttctatgggtcaagcagaggaaagatttactacacctgtgctgtaagaagctgaaaattttgggaatgcccttccgcaatatcagaagcatcctg

SEQ ID NO: 42913 - DNA, 529 bp, Homo sapiens
tgcaataataataataataaatttactcctgtgaattgggcttaatatgacattttgcctacctctgcttttcagatgggggctaaggagtctacaaaatcccccaaatgtctataattcacattggtcatgtctagtgactgcgggaaatacataacctctgaagaggtaacatggacaagattagtctagactggtattttaaaactcttgctccaataccatttctaaacattaacctacaaatgaagaatttagtgtttctctttcaattgatactgaaggagagtctgaggatctctagcgckgttaagctagtttcattgtaacatgtggctgcaatgcacaaattttcagtcatatattcatgggatttaaattatttcagatgtgccttctccctgaagacatttttctgattttaatctcatgctttttttttttttactaatattgttgttaagaaaaaatattacccaaagcttatacgtaaggtaaaaaaaaaaaaaaaaaaaaaaaaaaaaaaaaa

SEQ ID NO: 42914 - DNA, 1093 bp, Homo sapiens
cattcaagggaagatgtagacatcaggagagaatcaagttatccaagcagagtgactttgaggttggtaatgggaaactaagtaggaagctgaagggagaggggaggtcagagtgtaattgcccaacaggttcttcctgcccactgcaccgagaaaaccaattcactgagatggcagtatggcagtaaagaaagagttaaattaacatgaggttagccacgcagaagatagagtttattacccacaacatccttcccaagaactcggaagctagggtttttatgaataatttggcaggcaggcagggggctaggaaatgggtgctgctgattagctgggggtaaaatcatatgggtgtgggaaatggtcctcgcatgctgagtctgcctcttggtggggccacaggactggctgagacatgagtcatgggtctggatggggttggtgagttgccagaatgcaaaaattttaaaaacatctcaaaagaccaatcttagattctacaatagtgatattatctctaagagcaattgaggaagtcacaaattctgtgacctctggccatatgactcctgagcagtaagaaattatagaaactatgcctacattttagcagaatgcaggcccctctcataatcctaatcttrtggcctttcattagtcagggtttaagcccctgaagaaggaaggtgtcagttttagggagggactattatcatccttgcttcaaagttaaactataaattaaatgcttcccaaggttagcttggcccacacccaggaatgaatgaggacagccagcctgtgaggctagaagtaaggtggacacagccaggctagattatctcgctgtcataatctttgcaaaggcagtttcaggagaacaatagccaccaaaacagaggcaactactgagcactggtactgtccgccttgctggggtgatggttgtgaaaaggctggtttggaactcatggctgatggtgtgatggggtctccatctccagccagggagtgcagccaccactcactagtccagctgtcatccctgctaggtcttacctatttgaagacacactgggtcttgttcagc

SEQ ID NO: 42915 - DNA, 1093 bp, Homo sapiens
cattcaagggaagatgtagacatcaggagagaatcaagttatccaagcagagtgactttgaggttggtaatgggaaactaagtaggaagctgaagggagaggggaggtcagagtgtaattgcccaacaggttcttcctgcccactgcaccgagaaaaccaattcactgagatggcagtatggcagtaaagaaagagttaaattaacatgaggttagccacgcagaagatagagtttattacccacaacatccttcccaagaactcggaagctagggtttttatgaataatttggcaggcaggcagggggctaggaaatgggtgctgctgattagctgggggtaaaatcatatgggtgtgggaaatggtcctcgcatgctgagtctgcctcttggtggggccacaggactggctgagacatgagtcatgggtctggatggggttggtgagttgccagaatgcaaaaattttaaaaacatctcaaaagaccaatcttagattctacaatagtgatattatctctaagagcaattgaggaagtcacaaattctgtgacctctggccatatgactcctgagcagtaagaaattatagaaactatgcctacattttagcagaatgcaggcccctctcataatcctaatcttgtggcctttcattagtcagggtttragcccctgaagaaggaaggtgtcagttttagggagggactattatcatccttgcttcaaagttaaactataaattaaatgcttcccaaggttagcttggcccacacccaggaatgaatgaggacagccagcctgtgaggctagaagtaaggtggacacagccaggctagattatctcgctgtcataatctttgcaaaggcagtttcaggagaacaatagccaccaaaacagaggcaactactgagcactggtactgtccgccttgctggggtgatggttgtgaaaaggctggtttggaactcatggctgatggtgtgatggggtctccatctccagccagggagtgcagccaccactcactagtccagctgtcatccctgctaggtcttacctatttgaagacacactgggtcttgttcagc

SEQ ID NO: 42916 - DNA, 1093 bp, Homo sapiens
cattcaagggaagatgtagacatcaggagagaatcaagttatccaagcagagtgactttgaggttggtaatgggaaactaagtaggaagctgaagggagaggggaggtcagagtgtaattgcccaacaggttcttcctgcccactgcaccgagaaaaccaattcactgagatggcagtatggcagtaaagaaagagttaaattaacatgaggttagccacgcagaagatagagtttattacccacaacatccttcccaagaactcggaagctagggtttttatgaataatttggcaggcaggcagggggctaggaaatgggtgctgctgattagctgggggtaaaatcatatgggtgtgggaaatggtcctcgcatgctgagtctgcctcttggtggggccacaggactggctgagacatgagtcatgggtctggatggggttggtgagttgccagaatgcaaaaattttaaaaacatctcaaaagaccaatcttagattctacaatagtgatattatctctaagagcaattgaggaagtcacaaattctgtgacctctggccatatgactcctgagcagtaagaaattatagaaactatgcctacattttagcagaatgcaggcccctctcataatcctaatcttgtggcctttcattagtcagggtttaagcccctgaagaaggaaggtgtcagttttagggagggactattatcatccttgcttcaaagttaaactataaattaaatgcttcccaaggttagcttggcccacacccaggaatgaatgaggacagccagcctgtgaggctagaagtaaggtggacacagccaggctagattatctcgctgtcataatctttgcaaaggcagtttcaggagaacaatagccaccaaaacagaggcaactactgagcactggtrctgtccgccttgctggggtgatggttgtgaaaaggctggtttggaactcatggctgatggtgtgatggggtctccatctccagccagggagtgcagccaccactcactagtccagctgtcatccctgctaggtcttacctatttgaagacacactgggtcttgttcagc

SEQ ID NO: 42917 - DNA, 1179 bp, Homo sapiens
tctcatgtcttttttcttcccccatcccttttccttatactagctctttattttgtaggcccacttatccagattctacatcaaaaaggaggattagtaacatgttctagatagcctgaccaccgtcagggagtgcagggaatgtgtgtgtgcatacgtrtgtgtgttgaggtgaagatgggtgtgtagtgggaagttgattgcaaacacttattaattaatggcttttctaggttcagagcaatttaactcaattgaaattgtacacttactcaaaatatggttgttcaggctagaaaggacatttttttttctcttttgggtaggagtttagcaattcacagatgtaatactgaccatatgggactattctgactggtggctatttatgttttttagaaaaaaaattgttatcttatgtattttagtaaaaacaaaacaaaacaaaacctcaaaccccagggtccacagttgtggtagttaggggagataagatgagctctgagtggtgaaagaagtttgaaaacctctgatgtggtacttcatgccccacgcatgattttatttagtcttcacaacaccctgcacagtgggtgctgttatctccattctgcaggtgaggaaactgagagttacagaagttaagtattttgactaatatcactcagatgaagttggggctttgtccaagagctgcataactttaaaatgacaggtggaataaaataaagattttcagattgcttcagaacctctctctctctctctctctctctctcactcactctctctctgtctctctctttcaaatccatatcttatctgagagggttagattgaaaaaggtatgattatctgaaggccaaattcagttatagcgcttgagatgatgttgctctgacaaggacagaggaaggagaggagtgattattaaggtatataagaaccagcaaatgtcactcaaatgacaaagtcataaagatggatgtcaaaaggaaatttaagaaaaaaaggcaaagaggctgaggagttgagtattctcagcatggaatttagaggggaaagggagatcaaaaggaagtggggaaattttgatgcctctcatatactaaacactataatatatataaagcttatacgatgctaatagcttatcaccagactgcctgactttcacaa

SEQ ID NO: 42918 - DNA, 558 bp, Homo sapiens
ggtagactacccaagattacgcctgcagcaatccattactgaagcatagggaaggtgcccaccacaagacagaaagttccagaagttacatttgtgggaaaattcccacgggctggtggtccccaggcttgtgaaggaggagagagagatgttgccatggagttgcctaaagaagttgtacagaacttccagcatcacacatcatcaatgactctgcctccatttctttctctccttctaaaaatttctattcagcttactggacaaagtttcttaataatggaaaataatgtaaaagacatgctttatttaaacagcttactaaggcatatctatttcatcaaatgaaggctctatttacaatgattgwttgctagtgtgctttgctttccgtattaagtttagcattaaaaaaagttttcccaatttaaattttaatatgttttgtaactgctttttaatagtctactgtgaatatatgtccatcattaaatacactagatcattttttaaaaggtttcctattccacagatcccagagataagtgtagtgtcaca

SEQ ID NO: 42919 - DNA, 558 bp, Homo sapiens
ggtagactacccaagattacgcctgcagcaatccattactgaagcatagggaaggtgcccaccacaagacagaaagttccagaagttacatttgtgggaaaattcccacgggctggtggtccccaggcttgtgaaggaggagagagagatgttgccatggagttgcctaaagaagttgtacagaacttccagcatcacacatcatcaatgactctgcctccatttctttctctccttctaaaaatttctattcagcttactggacaaagtttcttaataatggaaaataatgtaaaagacatgctttatttaaacagcttactaaggcatatctatttcatcaaatgaaggctctatttacaatgattgtytgctagtgtgctttgctttccgtattaagtttagcattaaaaaaagttttcccaatttaaattttaatatgttttgtaactgctttttaatagtctactgtgaatatatgtccatcattaaatacactagatcattttttaaaaggtttcctattccacagatcccagagataagtgtagtgtcaca

SEQ ID NO: 42920 - DNA, 558 bp, Homo sapiens
ggtagactacccaagattacgcctgcagcaatccattactgaagcatagggaaggtgcccaccacaagacagaaagttccagaagttacatttgtgggaaaattcccacgggctggtggtccccaggcttgtgaaggaggagagagagatgttgccatggagttgcctaaagaagttgtacagaacttccagcatcacacatcatcaatgactctgcctccatttctttctctccttctaaaaatttctattcagcttactggacaaagtttcttaataatggaaaataatgtaaaagacatgctttatttaaacagcttactaaggcatatctatttcatcaaatgaaggctctatttacaatgattgtttgctagtgtgctttgytttccgtattaagtttagcattaaaaaaagttttcccaatttaaattttaatatgttttgtaactgctttttaatagtctactgtgaatatatgtccatcattaaatacactagatcattttttaaaaggtttcctattccacagatcccagagataagtgtagtgtcaca

SEQ ID NO: 42921 - DNA, 906 bp, Homo sapiens
tgttccatatcacataaagttaagtgtgcacaccatatgaatagccacgtacattatcttatactgcagttcagagtagttggtaaacggaaaaaaaaagattctctgttttcctcatttctatgcatgatgacagatcttgacagtatcttggagggttgctaatttagtttcaggcagaaccatgcaattcctattgtctcagcatgactagaccacctcttcagatttcataatgggaaaataacacaatatctgcatttgttcttctggcagccagctagtggtgtgattgcattgttttctcaatcaagaagtaccattatttcagatagactggtacatggaagaagaaaaaaagtaccattgcttttgtcttcattgagttacatcaggatgattttctttggtagtgttatattagagaaagtaggcagggcgcggtggctcacgcctgtaatcccagcactttgggaggccgaggcgggcggatcacaaggtcaggagatcgagaccatcctgactaacacrgtgaaaccccatctctactaaaaatacaaaaaattagccaggctcggtggcagcggctgtagtcccagctactccggaggctgaggcaggagaatggcgtgaacctgggaggcggagcttgcagtgagccaagatcgcgccactgcactctagcctgggcgacagagcgagactccgtctccaaaaaaaaaaaaaaaaagagaaagtaatttacagttttattttctctcatttaagcatctaacattattatatgcctaacagagtatatttatctcataaaagttgctgagaattcttttaaattaaatttactccgtagttgcattatattataaaataagagatgtattccagggaagaaagttttaagta

SEQ ID NO: 42922 - DNA, 1750 bp, Homo sapiens
gagtcacaaagaaccacgtccgtccatccaactgcttagcctggagtcctaaaccattgccctgtgaccatagcttgcaatttcttcaggtttatcatcctataaaactggaataatgatatttgccttttggggtagtggtgagggttaactggtgtcatatattaaaaacataaacccattttggaagacagatgctgggcacatttccacgcccactcaccagccttgctacttgtagttcaaattcgtgcctcagcaaagttataaatcagtccatgtcatagatctgaaggtgggaggggtggtggcgttcttacatagttgaaaccaagaacataaaatccttgaatgtcattatctcagtgaatgctaataataaggataatgataataatggtaatatgcttccacttaatgaatacctactatgtatgtgccaggtattttacatatattatatcacttttgyctattcggcaaataggtatttagtgtgcaacacatgcctggcattatgttaacgctaactgccataatgaaactgagtgtaggtcttatcattcctgtttaacagatgatgaggttgagactcacccctctggcctcttttctcacttgtacaacagggacaataataatcctacctgcaggatgcatcagggaatacagttcatatagcatattgcctgggacatagcagatactcaatgtatgcttgttacttaatagattagcactactatttctgctagtgcaaccactgctcagggtcacagagctagcaaatggcctatctgactccacagcctctgctctgtcccctctgtcatgctctttatgctacgtcagtctttctactatggctgccttcccacaaaggcaggcctggctttactgtaaattctgttggaagaaaaggaggagcagccagagggcaccaagtcacagcagaaacagctgttttgaaacagaggcaggtcccaggagtagctattatcatttttttctcataaaagtgatctacggatgattgggtcaagatggcagatgggacacttaatggcagcctcgccccacccctaaatatctagaaataacagaaatgtgtgtgtgtgtgtgtgtgtgtgtgtgtatgtgtgttccaaaaccatatggaaaatcaggaaggcatatgtctccagtggtttagaaactacaaaagatgagattaaagagaagtgaaaaaagcctcaaacacaccaaggcagtaactaatgggtgtcatttcaagggtggtacatacctagagcaaagaggttggggacataggggattgatttggagcagtgcaatagaagccgtcaggcatggtgaccagctccctcccatccaccctgctttggctaaatagtaagttacataagtgtctccccgcagatggcagcagtaagtctgaatgcaaaactgtgtcctgggtgagcaggttgagaaacagaggtctccaagtccagaaaacaaatttatattctatccctggagttagactgtggtgaacagataaagcactttcagataggctgacaagaaattttaaacttcaaaataaaaacatagccaagagtcaccagatatttggaaaacccaacacatgaaacagtaacatcaaaaacaacaaaccaaagaacttacacctgaggaaacagagagcaaatagaaccagactatggaataagtatcattatataccttggacaaatggcagagccta

SEQ ID NO: 42923 - DNA, 1750 bp, Homo sapiens
gagtcacaaagaaccacgtccgtccatccaactgcttagcctggagtcctaaaccattgccctgtgaccatagcttgcaatttcttcaggtttatcatcctataaaactggaataatgatatttgccttttggggtagtggtgagggttaactggtgtcatatattaaaaacataaacccattttggaagacagatgctgggcacatttccacgcccactcaccagccttgctacttgtagttcaaattcgtgcctcagcaaagttataaatcagtccatgtcatagatctgaaggtgggaggggtggtggcgttcttacatagttgaaaccaagaacataaaatccttgaatgtcattatctcagtgaatgctaataataaggataatgataataatggtaatatgcttccacttaatgaatacctactatgtatgtgccaggtattttacatatattatatcacttttgtctattcggcaaataggtatttagtgtgcaacacatgcctggcattatgttaacgctaactgccataatgaaactgagtgtaggtcttatcattcctgtttaacagatgatgaggttgagactcacccctctggcctcttttctcacttgtacaacagggacaataataatcctacctgcaggatgcatcagggaatacagttcatatagcatattgcctgggacatagcagatactcaatgtatgcttgttacttartagattagcactactatttctgctagtgcaaccactgctcagggtcacagagctagcaaatggcctatctgactccacagcctctgctctgtcccctctgtcatgctctttatgctacgtcagtctttctactatggctgccttcccacaaaggcaggcctggctttactgtaaattctgttggaagaaaaggaggagcagccagagggcaccaagtcacagcagaaacagctgttttgaaacagaggcaggtcccaggagtagctattatcatttttttctcataaaagtgatctacggatgattgggtcaagatggcagatgggacacttaatggcagcctcgccccacccctaaatatctagaaataacagaaatgtgtgtgtgtgtgtgtgtgtgtgtgtgtatgtgtgttccaaaaccatatggaaaatcaggaaggcatatgtctccagtggtttagaaactacaaaagatgagattaaagagaagtgaaaaaagcctcaaacacaccaaggcagtaactaatgggtgtcatttcaagggtggtacatacctagagcaaagaggttggggacataggggattgatttggagcagtgcaatagaagccgtcaggcatggtgaccagctccctcccatccaccctgctttggctaaatagtaagttacataagtgtctccccgcagatggcagcagtaagtctgaatgcaaaactgtgtcctgggtgagcaggttgagaaacagaggtctccaagtccagaaaacaaatttatattctatccctggagttagactgtggtgaacagataaagcactttcagataggctgacaagaaattttaaacttcaaaataaaaacatagccaagagtcaccagatatttggaaaacccaacacatgaaacagtaacatcaaaaacaacaaaccaaagaacttacacctgaggaaacagagagcaaatagaaccagactatggaataagtatcattatataccttggacaaatggcagagccta

SEQ ID NO: 42924 - DNA, 1990 bp, Homo sapiens
atccccggagtgtttgacaggctggcccctcccccgcattcctcctgtcctgaccccggaacgggacgtctcttctgcagctccaggagcccggcctggtggggccgcatcgccctcggctctcagcccttgggggaggtgaggggagtatgcagaaccacccctgagcgttccaccaggccagggagggtgcccgcagctggccccggcaagaatgaagttcgggtgcttggagcgtgttgcccacgagtccaagagcttccttcaggggctggcagcagccacgccctctgggcctgagtgtgtgggacaccagtgctccccactcccagcctctgtccctgtgcggccctcacctgcccttccagccccgtctctctcatcgacttcctgctaagcccggcccccaggcctcccctccctaaggagcagttgtgacgccagttggaggcaagctgagccctgggcccccaggccagcccaccacctgctgtccccacccgcactctgcctcctcacagccctcaagctcccgagggcaggctcgggaactgggtcatcacaccggtgtgccaccgccacgcgcccagacctcctccccacggcccaccctgcccctcaccctccctctcatctgctatacagacatccccccacctcaaggcctgcactgtccccctgcctggacgttcttccctcggcacaccccatccaggtctcagtccgaacgcctcctcccgcacaggctcctgtgcccaccgggctcatggactctgcccctgtcgggcccaccccaccgtccgaggggccccgaccatgcctcggtcacagggctcaggccagcctcgttctaccccgggatacggacacccgggcactcygcggggaactggccatgaagacgtctgccaaggcgttcagaggctctccccactctgcacggctccccaagtccccccatcagggcctgaaggctgtgctcagggactccctccaccctgaagtgcctcaggcaggcgaacaggggccctgaggtcagtcagtgccaaggacgatcccagcgatgaaggatccgggcgacagacggacggtgaaacccgagacccctgcccggtcccagcggtgcgggctgagcgggggggctctgcggggccaggggtgcgggctgagcgggggccctgcggggccgggggtgcgggctgagcggggccctgtggggccgggggtgcgggctgagtggcgccctgcggggccgggggtgcggcggggcaggagcggttgtggaactagagctctctcggcaaactcgttcccaagagcaccaaggtcacatgcccggcagccccggccgcagaagcgggtctgggaggcgcacggtccctgccagggcccggcctgctctgggctccatctcctccctcctccccagcggggcctgagtcccgagtccaatcggggtagccccgacccggagggtgagctcagcctgctggcgtcacgcccacttcctggcgggaacaagatgacgtcccacggggcgtgcggccctgatgcttccatgaaggggagggaatgactacgacaggcgctcggcagacccctaccctgccatcatccccgggggcctctcttcccatcaccccgggaaggatgagctgcccccaggcgctcggcggaccccctaccctgtcgtcacccccgggggcctctcttcccatcgccccaggaaggatgagctgcccccacggctcccccagctcttggtgagtgggaaggcccctccccctgagccctgcaacgctcccagtctcagccccatctgtgtctctgcttccttgcaggatcagctgtgggggtggggaggcagcctctcccaccctgtactagcccaggaggcagggacacatccagccctctcgtgggtaggccgtagggctcagtgggaacccacacctgtcccaggaacactgcaatgccagtcggtggcttc

SEQ ID NO: 42925 - DNA, 1990 bp, Homo sapiens
atccccggagtgtttgacaggctggcccctcccccgcattcctcctgtcctgaccccggaacgggacgtctcttctgcagctccaggagcccggcctggtggggccgcatcgccctcggctctcagcccttgggggaggtgaggggagtatgcagaaccacccctgagcgttccaccaggccagggagggtgcccgcagctggccccggcaagaatgaagttcgggtgcttggagcgtgttgcccacgagtccaagagcttccttcaggggctggcagcagccacgccctctgggcctgagtgtgtgggacaccagtgctccccactcccagcctctgtccctgtgcggccctcacctgcccttccagccccgtctctctcatcgacttcctgctaagcccggcccccaggcctcccctccctaaggagcagttgtgacgccagttggaggcaagctgagccctgggcccccaggccagcccaccacctgctgtccccacccgcactctgcctcctcacagccctcaagctcccgagggcaggctcgggaactgggtcatcacaccggtgtgccaccgccacgcgcccagacctcctccccacggcccaccctgcccctcaccctccctctcatctgctatacagacatccccccacctcaaggcctgcactgtccccctgcctggacgttcttccctcggcacaccccatccaggtctcagtccgaacgcctcctcccgcacaggctcctgtgcccaccgggctcatggactctgcccctgtcgggcccaccccaccgtccgaggggccccgaccatgcctcggtcacagggctcaggccagcctcgttctaccccgggatacggacacccgggcactctgcggggaactggccatgaagacgtctgccaaggcgttcagaggctctccccactctgcacggctccccaagtccccccatcagggcctgaaggctgtgctcagggactccctccaccctgaagtgcctcaggcaggcgaacaggggccctgaggtcagtcagtgccaaggacgatcccagcgatgaaggatccgggcgacagacggacggtgaaacccgagacccctgcccggtcccagcggtgcgggctgagcgggggggctctgcggggccaggggtgcgggctgagcgggggccctgcggggccrggggtgcgggctgagcggggccctgtggggccgggggtgcgggctgagtggcgccctgcggggccgggggtgcggcggggcaggagcggttgtggaactagagctctctcggcaaactcgttcccaagagcaccaaggtcacatgcccggcagccccggccgcagaagcgggtctgggaggcgcacggtccctgccagggcccggcctgctctgggctccatctcctccctcctccccagcggggcctgagtcccgagtccaatcggggtagccccgacccggagggtgagctcagcctgctggcgtcacgcccacttcctggcgggaacaagatgacgtcccacggggcgtgcggccctgatgcttccatgaaggggagggaatgactacgacaggcgctcggcagacccctaccctgccatcatccccgggggcctctcttcccatcaccccgggaaggatgagctgcccccaggcgctcggcggaccccctaccctgtcgtcacccccgggggcctctcttcccatcgccccaggaaggatgagctgcccccacggctcccccagctcttggtgagtgggaaggcccctccccctgagccctgcaacgctcccagtctcagccccatctgtgtctctgcttccttgcaggatcagctgtgggggtggggaggcagcctctcccaccctgtactagcccaggaggcagggacacatccagccctctcgtgggtaggccgtagggctcagtgggaacccacacctgtcccaggaacactgcaatgccagtcggtggcttc

SEQ ID NO: 42926 - DNA, 557 bp, Homo sapiens
ggcataggagctgaggaccaggggactgctgctgcttctacccctgggtccttgggggcttggagggtggaggcccctctctggctgaactaagactgtgactgtcccactgtggggggcccagtggaccacagaggggtgctgtactgagacagaattggcctcatgggtggaaragcttcccaagcagctgtccctgtgcagcatgatggcttcggaagacagagagcagcctgtgcctgggcatgtgtgagcagagggaagaactgtgtctacccagggattcctgactctgctggggccagctcagattcacatggattctgtgaaaagccatggaggcccccagtagcatcacttgtcagattccactttttttttctcgaggtaaggttttactcccatcgcccaggctggagtgcagtggtgccctctcagctcactacgacctccacttcccaggctcaagcgatcctcctgcctcagcctcccaagtaactcagactacaggcatgcatcaccacttctggcaaatttttgtatttttagtagagatg

SEQ ID NO: 42927 - DNA, 1220 bp, Homo sapiens
cgtctgcctcggcctcccaaagtgctgggattacaggggtgagccaccgcacccggctaatttttgaatttttagtagagactgggtttcactgtgccggccaggctggcctcgaactcctgacctcaaatgatccacctgtctcagcctcccaaagtgctgggattacaggtgtaaaccaccgcacctggctctagttcttattttttgtgagaaataaagataaatacaggatccagtctaatgttttcttccacatcccattgacaaatgactaatcggcccctctcaccccaagcttctgggggcttctcggggcaggtggagctggtggccatcctgcaggctgctggggatctgagaagaactggagttgagattcttcccccagtggcctgggcctagcaggggagggtcgtgggctgtagcacctcccacagcgcggccaggcctccactccttgagcagggggaaggggggtgaagttgagccgagattagcaggagtcgggagggaggctcctagacctgcagagaaaggggtgcgataggcaaaggcaccatgcctctgcgggatgaaaccctccgagaggtgtgggcctctgacaggtctggaaggcccccagttcgtggcacctgaaccctggggggcctagatggagggatggggagtgggtgggatggggagggaaggggaagggagacaggctgatccctttgctaccctcagtgggcatgaagaagaaagcctgagcccggaggccccgcggcgccccaaacaggtatgccaccccacttggaaaggaagcagaaagatgtccccgctgtgcgtaaacccacgcagggtagggggtctaggggtgggacaggtcccccttagcagggtctgggggttgcatgtctggagatctggggggagaaagggctgtttggggrcttggggtttccagggaaggaatagggactttggagcattggatatggccacgatgcatggaaggggtcatcctgcctcactccaagaagggggctgcagttccccccggataatctgcggttatttctggcggctcaagggattagagggggatgggcgggcctcagcgcccccctttccttcctcgacctcctcttgacccccgttccgcagcgacccgccccggcacagaggctaaggaagaagaggacggaggcccccgaatccccctgccccacgggatc

SEQ ID NO: 42928 - DNA, 666 bp, Homo sapiens
tcataatatcatatatagtggtgttttttggaaaagacaaattacgtgctcaaatagatttacaacaccttttccttccagggagcaaatgatctgactaaatgatgctttccgtatgtatgagatgttactgtaaaccagacatgacatccaagacaaagtagaattttgctgaaatgagaacactgcatttccacttgttactctgatttgtaaatctttatttgtattatctgtctccttctaccaaactatgtcasacactcagatgcttattgactgacttaatacatggatttccagatattctcagccaactaggacttgaagtctaacttgtgtatttctctgagcaggagcgtgagttagtaaatggatggaaatgttcttaacaaaaattggctagatttgcatacacaagtcagtgtcctaagtaaagctcagcaaacctgcagctgtccccagatgacttagggcagtactcatgaaaaggcaattaagtgtaggtatgagataaaaatgaggttgatatatttgacaaaaagccatgaaggagataaggattagttgtcgtaattcactacacatccattaggccaattatacacatgtgggcacgcacttgtctcctgggaaacctgagtgtgccagcctttcagattcctg

SEQ ID NO: 42929 - DNA, 1091 bp, Homo sapiens
gcaaaaacgtttaacatggttttgaactctgtcatcatcaagtaaaacatataaatgtaaaataaaagaaaactgtaaagggctataaaaatccacgaatttcaacgtgtttgttgatgtttttgctaataaagttttgaggctttgtgtgtataagttatatttaagttagtgtaagacaggcagttgcataggtgtgagactttcaggcattacaaaaactacatctttgattttaaatagtccctaaaggattagtgtacaaagaaagcctcaatgtgtcaattttatacacatgaaagtacatggttattaattaaaataatttctttgtacagctcctcagattctggtgcaccctacaatctgccattgttctctggcccgtggtatctgtggaagttcagtgaagagagaagccaggccctgaggctggggtttccacaatctccttccaggttctagcttacaggtgcaagtagtctatgtatttccactggttttccatctagcctgggttacccttccagttaatcatttataaccaacactgcggacctctggatggcatgcttccatgaagtcggtgaaaatgtttaggcatggataaaatgtgacctatatgtgcattgccatctgtaagtttggactatttgggtcaatgaagaacccatggcaaaytctcctatcactttctcatttcacaagtcaatgtagttcttcaaagtgtgctgtgcactttttatttttaaaattctttaaaatcaggatttaattcccaagtatgtttctaacatatttaaaatgcagcagttttgttagcacttgaatacctgtgcttgttatgaaaagtagatgcaaatatatctgtttcatacggactggcgagcgtcatgagcattggaaacagtggttcttaaatccccgatgttcctgcctccagaggctgctagatgtggtcagttccccccaataggttagcctcacttgtcctccaccttctgtagttagtcagctctgcccgacccatgttactggcaaaacgccttcatgtctccccacacatggctctgtttcactgaagtcctgtg

SEQ ID NO: 42930 - DNA, 1091 bp, Homo sapiens
gcaaaaacgtttaacatggttttgaactctgtcatcatcaagtaaaacatataaatgtaaaataaaagaaaactgtaaagggctataaaaatccacgaatttcaacgtgtttgttgatgtttttgctaataaagttttgaggctttgtgtgtataagttatatttaagttagtgtaagacaggcagttgcataggtgtgagactttcaggcattacaaaaactacatctttgattttaaatagtccctaaaggattagtgtacaaagaaagcctcaatgtgtcaattttatacacatgaaagtacatggttattaattaaaataatttctttgtacagctcctcagattctggtgcaccctacaatctgccattgttctctggcccgtggtatctgtggaagttcagtgaagagagaagccaggccctgaggctggggtttccacaatctccttccaggttctagcttacaggtgcaagtagtctatgtatttccactggttttccatctagcctgggttacccttccagttaatcatttataaccaacactgcggacctctggatggcatgcttccatgaagtcggtgaaaatgtttaggcatggataaaatgtgacctatatgtgcattgccatctgtaagtttggactatttgggtcaatgaagaacccatggcaaattctcctatcactttctcatttcacaagtcaatgtagttcttcaaagtgtgctgtgcactttttatttttaaaattctttaaaatcaggatttaattcccaagtatgtttctaacatatttaaaatgcagcagttttgttagcacttgaatacctgtgcttgttatgaaaagtagatgcaaatatatctgtttcatayggactggcgagcgtcatgagcattggaaacagtggttcttaaatccccgatgttcctgcctccagaggctgctagatgtggtcagttccccccaataggttagcctcacttgtcctccaccttctgtagttagtcagctctgcccgacccatgttactggcaaaacgccttcatgtctccccacacatggctctgtttcactgaagtcctgtg

SEQ ID NO: 42931 - DNA, 534 bp, Homo sapiens
atcgcagcacaggagtcccctgggctccctcaggctctggtatgacatatttgagccatataaattcagcttctcctctggcatctgttagccgactcacttgcaactccacctcagcagtggtctctcagtcctctcaaagcaaggaaagagtactgtgtgctgagagaccatggcaaagaatcctccagagaattgtgaagactgtcacattctaaatgtaagttgattcatattttttcccttttgagcagaagcatggtttcacagatttatcatattgcaaagtgaacattagaaagtggaatcaaaggtgactttgaattatggcttgyttattgagatttattgtgtattgttttattctctctgttctttggttaggcagaagcttttaaatccaagaaaatatgtaaatcacttaagatttgtggactggtgtttggtatcctggccctaactctaattgtcctgttttgggggagcaagcacttctggccggaggtacccaaaaaagtaagtaaatacacatca

SEQ ID NO: 42932 - DNA, 2088 bp, Homo sapiens
ttttatagcaaagcacaatctcaaaacacaacctgagacatttcttgcttgcatcatagcctgataatacagggcacctactgttagtagataggcccattctcagggggaaaaaaaagtgcaggaaaatcaaatctttgccaagaagccaagttagcagtgggcargaagagaggggagggggccgtggtgtgtttggtaagagttggctctagtatctaactgcttctgtctgaatcactcatgatctggggaatattggacaagttacttgctctctctggagactcatagctctatctgtaaaatgggtatatgcttttgtagtggaagttcaatggagtaatgtgtaagtaaagctttttgctcaatgcctaaaacatagttgatttttcttaagtgttttatattacttatttactggacatgaatattccatgccaaatattgtgctaagaaccttactggcattatttcattaaaatatatccatgtggtaggtattataaatctcccaatttttcagataagtgaccacaggagaaaatcattttctaaagtcatgcactttgtgagttatagagtagatggaattaaactcgagtttctctgattacagatcttctgaaatttttaacattaaaaaaaaaagagcttggaaatcctgactgttgtaggctgtgccatgatcactgttgaattctttatctgaacaccagttttctatatgaactgagagagatggcaagaaataaagaattggtactttcttaggctgtataaatgagaggattgtgcaaatcatgatagacaaaacccaggaatgactggcattttaaagaaacttgtgcttactagaaagggtaattaatagcttaatgaagttactaagtactaaatgctcataatcattctgtgtttaatgctttatatagggaaaaaacaataagaccagcctaattgaacagagtaagatacagctcagctcttgtcaaatccccctcccaaactctacggctaaaaaaatgtgttatcttaaggtgggaactagattgagatgccaaaagcacaatatgtaaggaatgctggctttcaagattgtgaaagtactggaatgtgtgttcattttctgttacagtataacaagctacagcaagctgagtggtttaaaatcatacatataagcttggcatggtaatcctagcactctgggaggctgagggtggtggatcacttgaggtcaggagtttgagaccagcataacaagctacagcaagctgggtggtttaaaatcatacatataggctgggcatggtggctcacatctgtaatcccagcactttgggaggctggggctagtggatcacttgaggtcaggagtttgagaccaacctggccaccatggtgaaaccctgtctctaccaaaaatacaaaaattagccaggcatggtggtgtgtgcctctagtctcagctactcgggaggctgaggcaagagagttgcttgagcctgggaggcggaggttgcagtgagctgagagtgtaccattgcactctggtttgggtaacaggaagagacttcatcccctctgccccaaataatgataataataataaaataaaaatcatacatatttatcaccctgtagtttccacgggtcagcagttctagcacaacttaattggatcctcggtaaggctgcagtagaggtgtctgtggagctgtggactcatctggaatctcaactatggaagggtccacttctaatttcacacagttggcagaattcatttccttgcatatacggtactgagagtttcagtttcttgttggttgtcatctggaggtcactgtgagcgccttgaggcctctcatagtttcttgtcatatgggattctgtgccatggctatgtgctttctcaaggtcagaatgagaatgaaggaatccagcaaaatgggtgctgccatcttatgtaacataatctcggccgggcgcggtgcctcacgcctgtaattccaacattttgggaggccaaggcaggtggatcacttgaggtcaggagttcgagactggcctggccaacttggt

SEQ ID NO: 42933 - DNA, 643 bp, Homo sapiens
tgcattaattataaccaactaatttcacatacatgtgaatcagctttgcagatgcctgtgtttcacttgtttcaggcaggatggggagaagcaggaaaacaattccraagtgcttcttatggatgtaactttaggatgagggaccacgtgcagcaaaatgacagtgtggacctagcagaagaagaggtgatgttaaaaagggagggacatgttcttttttttaaattgaaaattggtgtctgtagttgatatatattcatgtaggtttatacagaacatttatgagacgtatgataattctcaggtgagtgagattttcagactggcattttattaacttatgttaagagcacgccagacactgctcttggtttttcacaaatgatcccattgtatacctacaatacccctaggaggaatatcttttcttgtgctcattgctgatgggaagacagaagcgcagggaggaaaaaggttttgctagtgtcacacagctagtgggtagtgacgctggatttgaatccagccagtctggctccagtgcccaagctctcatagccattactctatgaggtcatatgtaccagatggatgaaacagtcagggcttaggttagggagcctctgataaaaaagtgcttcta

SEQ ID NO: 42934 - DNA, 643 bp, Homo sapiens
tgcattaattataaccaactaatttcacatacatgtgaatcagctttgcagatgcctgtgtttcacttgtttcaggcaggatggggagaagcaggaaaacaattccaaagtgcttcttatggatgtaastttaggatgagggaccacgtgcagcaaaatgacagtgtggacctagcagaagaagaggtgatgttaaaaagggagggacatgttcttttttttaaattgaaaattggtgtctgtagttgatatatattcatgtaggtttatacagaacatttatgagacgtatgataattctcaggtgagtgagattttcagactggcattttattaacttatgttaagagcacgccagacactgctcttggtttttcacaaatgatcccattgtatacctacaatacccctaggaggaatatcttttcttgtgctcattgctgatgggaagacagaagcgcagggaggaaaaaggttttgctagtgtcacacagctagtgggtagtgacgctggatttgaatccagccagtctggctccagtgcccaagctctcatagccattactctatgaggtcatatgtaccagatggatgaaacagtcagggcttaggttagggagcctctgataaaaaagtgcttcta

SEQ ID NO: 42935 - DNA, 643 bp, Homo sapiens
tgcattaattataaccaactaatttcacatacatgtgaatcagctttgcagatgcctgtgtttcacttgtttcaggcaggatggggagaagcaggaaaacaattccaaagtgcttcttatggatgtaactttaggatgagggaccacgtgcagcaaaatgacagtgtggacctagcagaagaagaggtgatgttaaaaagggagggacatgttyttttttttaaattgaaaattggtgtctgtagttgatatatattcatgtaggtttatacagaacatttatgagacgtatgataattctcaggtgagtgagattttcagactggcattttattaacttatgttaagagcacgccagacactgctcttggtttttcacaaatgatcccattgtatacctacaatacccctaggaggaatatcttttcttgtgctcattgctgatgggaagacagaagcgcagggaggaaaaaggttttgctagtgtcacacagctagtgggtagtgacgctggatttgaatccagccagtctggctccagtgcccaagctctcatagccattactctatgaggtcatatgtaccagatggatgaaacagtcagggcttaggttagggagcctctgataaaaaagtgcttcta

SEQ ID NO: 42936 - DNA, 552 bp, Homo sapiens
tttcattttttgttacactgatggataccacatgtcttaggtgattgggggtgcggtggctagtaattactgccattattgtctgtgatacagcagtgttcagatagcagctattctgcttataatcagatgaacaagatattatgtttggctttgtttatggaaaaaaagamattttattaaattgtggttagaggcctgttagcataaaggatgaatggtttcttggaattacaacttgaatattttgagagaaacaaatgaaaagtatctcactgtagggctgaattggtttgtgaccttgcttctctagctgaaatctattgactctctcagaagtattgctaggagaagaaataatcctataaaaggacattaagcaatgctaagaaaaagatgatgataataataatgctttcagctcaccatgtgccaaacatcatattaaacactttaagtgcattattacattgaattctcacaaccctacaccatatcctcattttacagatggagaaaattgaagcctagaaagatcaagaaactttctcc

SEQ ID NO: 42937 - DNA, 596 bp, Homo sapiens
gcatcttgaaagaaaatttgtgtaatgtcatttcaggctgtccctaatccagaattattgagggggggctgggacctgggaattgcctctgacacttgacaaatactcagctttgtgtaaatggacaggctcctgaaataactgcctttggatgtcatatgaagagaaattaattctttattaacttccgcaatgataatctaataaacccatcaggcctccaggccccaacatttaaagagcttggtagtttggatgcaaatgtctcctgaccccattttgtcgggaatatgttcatggagaggaggaataattgactctrgaggtcagatgtcagctcagagtcaaaacgagtgactttcatggctccacacagacctgagactcaggaggtttggcctttcctgtggccaccagctgttctggattttctgcgatggcccttaatttcaggtattctgtccctttgttccccaaagagcatttgttctggtcagacaacagtctctggtttttattcagattgtgaggtcaccagagccctcacccgccagtaccaaggggccgttcatatattctttaactcttaggtgcgg

SEQ ID NO: 42938 - DNA, 824 bp, Homo sapiens
gctggatcccacactagcccctacaccctctcatcaccaaatattcctgcttcctctcacctgcacttgctgttctctcctctgccacacaaatctacctctcaagcctaggtcccacctgcttcatgacaactttccagactattccagaacctttaaccatctctgacctctcatcagatctatgttgtacataacaccaattaatgagatcattactgctttatgctctaattgcttcctgtattcaaaatcttctctccaaccacataatgactccctaaacttctcttgtattttccaatgccttgtacaagcacagaactggtcaatcaataaatactcactggttatttgaggaaaaaatgttgccaagcaccatctttatcagaaaataaatcaattcttctaaacttggagaaatcaccctattcctagtatgtgatcttaattagaacaattcagattgagaggtgacagcatgctggcagtcctcagagccctcgcttgctctcggcacctcccctgcctgggctcccactttrgtggcatttgaggagcccttcagcctcccccctgcactgtgggagcccctttctgggctggccaaggctggagcccactccctcagcttgcagggaggtgtggagggagaggcacgagcgggaaccggggctgcgtgcggcgcttgcgggccagctggagttccgggtgggcttgggcttggtgggccccgcactcggagcagccggccagccctgctggccccgggcaatgggggacttagcacccgggccagtggctgcggagggtgtactgagtcc

SEQ ID NO: 42939 - DNA, 824 bp, Homo sapiens
gctggatcccacactagcccctacaccctctcatcaccaaatattcctgcttcctctcacctgcacttgctgttctctcctctgccacacaaatctacctctcaagcctaggtcccacctgcttcatgacaactttccagactattccagaacctttaaccatctctgacctctcatcagatctatgttgtacataacaccaattaatgagatcattactgctttatgctctaattgcttcctgtattcaaaatcttctctccaaccacataatgactccctaaacttctcttgtattttccaatgccttgtacaagcacagaactggtcaatcaataaatactcactggttatttgaggaaaaaatgttgccaagcaccatctttatcagaaaataaatcaattcttctaaacttggagaaatcaccctattcctagtatgtgatcttaattagaacaattcagattgagaggtgacagcatgctggcagtcctcagagccctcgcttgctctcggcacctcccctgcctgggctcccactttgrtggcatttgaggagcccttcagcctcccccctgcactgtgggagcccctttctgggctggccaaggctggagcccactccctcagcttgcagggaggtgtggagggagaggcacgagcgggaaccggggctgcgtgcggcgcttgcgggccagctggagttccgggtgggcttgggcttggtgggccccgcactcggagcagccggccagccctgctggccccgggcaatgggggacttagcacccgggccagtggctgcggagggtgtactgagtcc

SEQ ID NO: 42940 - DNA, 824 bp, Homo sapiens
gctggatcccacactagcccctacaccctctcatcaccaaatattcctgcttcctctcacctgcacttgctgttctctcctctgccacacaaatctacctctcaagcctaggtcccacctgcttcatgacaactttccagactattccagaacctttaaccatctctgacctctcatcagatctatgttgtacataacaccaattaatgagatcattactgctttatgctctaattgcttcctgtattcaaaatcttctctccaaccacataatgactccctaaacttctcttgtattttccaatgccttgtacaagcacagaactggtcaatcaataaatactcactggttatttgaggaaaaaatgttgccaagcaccatctttatcagaaaataaatcaattcttctaaacttggagaaatcaccctattcctagtatgtgatcttaattagaacaattcagattgagaggtgacagcatgctggcagtcctcagagccctcgcttgctctcggcacctcccctgcctgggctcccactttggtggmatttgaggagcccttcagcctcccccctgcactgtgggagcccctttctgggctggccaaggctggagcccactccctcagcttgcagggaggtgtggagggagaggcacgagcgggaaccggggctgcgtgcggcgcttgcgggccagctggagttccgggtgggcttgggcttggtgggccccgcactcggagcagccggccagccctgctggccccgggcaatgggggacttagcacccgggccagtggctgcggagggtgtactgagtcc

SEQ ID NO: 42941 - DNA, 824 bp, Homo sapiens
gctggatcccacactagcccctacaccctctcatcaccaaatattcctgcttcctctcacctgcacttgctgttctctcctctgccacacaaatctacctctcaagcctaggtcccacctgcttcatgacaactttccagactattccagaacctttaaccatctctgacctctcatcagatctatgttgtacataacaccaattaatgagatcattactgctttatgctctaattgcttcctgtattcaaaatcttctctccaaccacataatgactccctaaacttctcttgtattttccaatgccttgtacaagcacagaactggtcaatcaataaatactcactggttatttgaggaaaaaatgttgccaagcaccatctttatcagaaaataaatcaattcttctaaacttggagaaatcaccctattcctagtatgtgatcttaattagaacaattcagattgagaggtgacagcatgctggcagtcctcagagccctcgcttgctctcggcacctcccctgcctgggctcccactttggtggcattygaggagcccttcagcctcccccctgcactgtgggagcccctttctgggctggccaaggctggagcccactccctcagcttgcagggaggtgtggagggagaggcacgagcgggaaccggggctgcgtgcggcgcttgcgggccagctggagttccgggtgggcttgggcttggtgggccccgcactcggagcagccggccagccctgctggccccgggcaatgggggacttagcacccgggccagtggctgcggagggtgtactgagtcc

SEQ ID NO: 42942 - DNA, 824 bp, Homo sapiens
gctggatcccacactagcccctacaccctctcatcaccaaatattcctgcttcctctcacctgcacttgctgttctctcctctgccacacaaatctacctctcaagcctaggtcccacctgcttcatgacaactttccagactattccagaacctttaaccatctctgacctctcatcagatctatgttgtacataacaccaattaatgagatcattactgctttatgctctaattgcttcctgtattcaaaatcttctctccaaccacataatgactccctaaacttctcttgtattttccaatgccttgtacaagcacagaactggtcaatcaataaatactcactggttatttgaggaaaaaatgttgccaagcaccatctttatcagaaaataaatcaattcttctaaacttggagaaatcaccctattcctagtatgtgatcttaattagaacaattcagattgagaggtgacagcatgctggcagtcctcagagccctcgcttgctctcggcacctcccctgcctgggctcccactttggtggcatttgaggagcccttcagccycccccctgcactgtgggagcccctttctgggctggccaaggctggagcccactccctcagcttgcagggaggtgtggagggagaggcacgagcgggaaccggggctgcgtgcggcgcttgcgggccagctggagttccgggtgggcttgggcttggtgggccccgcactcggagcagccggccagccctgctggccccgggcaatgggggacttagcacccgggccagtggctgcggagggtgtactgagtcc

SEQ ID NO: 42943 - DNA, 1198 bp, Homo sapiens
tcctctcatcttccatttccagccaccttttttctctaaaccctgtaacacttcataggagtccctcccaatgaaagccacaccccgcctggtgtctcacaccccaaagcagactgtaagcttcctgaagactgtcctgctcctcaatgtcccatcccctcccgaactgaccagcggtgctatctacggggaagcaccggggcagttgttgttgaattgatttcagttaattcagtttttaactgaatcacacaaaggatgtcacaagctagcttttataactaaagaaagcacagttgtgcagctgcctccagagtctctgggggttagagggaatgaaatagggaaagtccccagaagccagctgactgctgctcaaaccaggtgcaggttgggagaaaatctgtagtgaatgaaggaaaatgaaatgcacagtggaaaagaataccaacattcttgcaaaggaaccttaaagtattatttttgcaaagaatgcaaggattatttcagttcccttgttgactgttttgtatggtcttcctacagatactttcagaaaaagatctattgtttgtttttctctgtgctgacacagtatccattgtttagaactgtaatcatagcacacatagttgaaaatgtgggctcggggacaagctgtattttcccctctggttctttagacagtgaatactgtgttctttatctcttatcacagctcttttgtcaaacatttaatgattttttcccccagacaaatttgtagtttgttatcaaccataaaaatgtctattgccttatttttaaacatttaaactttggtaagtgtgtctcaagatgagcatgaattaaggtgtttatttcattttaaatacttttttttatcatagcgtacaaagctagagttctctgacatggatggcttatgtggatctctatttagacttgatgagagaacattttatttttgtactgtgtgtatttgcagggaagatggttaggctgactggctcccaggttgggtgtgttgggagcatctgtcaagggttggacaggtgcagacatctgtgacrtcctgcagtaggcagccatcactcgatttcctgcttaaaaagatctgacacacttcttcactccttggatctccattttttccaaatgcccgatacttcttaccattctacaacccttaaaccgg

SEQ ID NO: 42944 - DNA, 1198 bp, Homo sapiens
tcctctcatcttccatttccagccaccttttttctctaaaccctgtaacacttcataggagtccctcccaatgaaagccacaccccgcctggtgtctcacaccccaaagcagactgtaagcttcctgaagactgtcctgctcctcaatgtcccatcccctcccgaactgaccagcggtgctatctacggggaagcaccggggcagttgttgttgaattgatttcagttaattcagtttttaactgaatcacacaaaggatgtcacaagctagcttttataactaaagaaagcacagttgtgcagctgcctccagagtctctgggggttagagggaatgaaatagggaaagtccccagaagccagctgactgctgctcaaaccaggtgcaggttgggagaaaatctgtagtgaatgaaggaaaatgaaatgcacagtggaaaagaataccaacattcttgcaaaggaaccttaaagtattatttttgcaaagaatgcaaggattatttcagttcccttgttgactgttttgtatggtcttcctacagatactttcagaaaaagatctattgtttgtttttctctgtgctgacacagtatccattgtttagaactgtaatcatagcacacatagttgaaaatgtgggctcggggacaagctgtattttcccctctggttctttagacagtgaatactgtgttctttatctcttatcacagctcttttgtcaaacatttaatgattttttcccccagacaaatttgtagtttgttatcaaccataaaaatgtctattgccttatttttaaacatttaaactttggtaagtgtgtctcaagatgagcatgaattaaggtgtttatttcattttaaatacttttttttatcatagcgtacaaagctagagttctctgacatggatggcttatgtggatctctatttagacttgatgagagaacattttatttttgtactgtgtgtatttgcagggaagatggttaggctgactggctcccaggttgggtgtgttgggagcatctgtcaagggttggacaggtgcagacatctgtgacgtcctgcagtaggcagccatcactcgatttcctgcttaaaaagatctgacacacttctycactccttggatctccattttttccaaatgcccgatacttcttaccattctacaacccttaaaccgg

SEQ ID NO: 42945 - DNA, 2987 bp, Homo sapiens
gcagaacatgggtcctgcctctcagcagttcaggtctcttcacatttctcagcctcctatggccacggtttcctgtgctctgttcacgtttttcaaatgtgatgtttattatttcttaacttgtaatgtgtcaaacaagtataaggaaagctaacgagacggaaacatagggaaaaaatatttttaaagcagtattacaagaagaaagtgaatacttaagcggaattggtgaaaacctttaatttacagaaagtgtcacaaacccacttccacttcattagagtacatatattatatcaattcttaatagtagttataaattgtaataggaaccaggaagactacaacatttatcagttcacaagtggatttttcgtaatcctgctgtcttcaggtatacatttatgtcccaatttctttaagacacagagtcataaagagattcgggtgttccctgagctacaaagcagaagagcctccctcggcccctggggagcctgctcaggaatcgggctgtgtggggacagtctcctcacctttgggcatgaggtggggctgggcaaagaccacccagctccctaacccctactcatccacctcctgccccagttaaaatcaataaatatttactggcagctacaggtgtctggggaggcagaaaggaacaagtcatgggcccccacccaaggagggggcaggatgcagcgtaagaacctgcgcttggtcactgaggtgcttggcctcaggccaccacctcacctgcgcaattaggtacatggtaagagcatggtgacggttctctctccgctggggtgacatggggatgttaggtgacctcgagggccattgacacagtcagatgtgggagccccgggtccattgcaaatggatccagtctaatgggggagagagacctgccttcctcacacggtggtggccaacctcgacgttagatttgggggaagttcagaggagtgagcgggcctccctggggggcttcccagaggtgggcttagagccagactttgaagggcaggcagggttagagtaatgagcaaagggcagaggaagcagtgcgagcaaacgcggggacctgagcaggcccgttggggcagcaggagggcagcagggttctgggaagcaggggaagccgtcctgtcccggccggctgctgggagaaggtgggggcagaggggaaaatggagggaaactggtgcttccgtgtccactggtcaggggtgggagttgattagtaactgagggaggaaacataagatcctctctgagtggaaagtctctagcagtgactatctctgagtccttctccagtcccaaagctctgccatttctgcctttgctgctatgaaataaatatatatatatgtatatactgtttgtatgtgtttatgtgcatgtgtgtgtgtatgtgggggtgcatatatgtgtatatatgtgtatgtgagcatgtatgagcatacatatgtatgtgtgcgtgtatatgtgtgtataaatattatagattcagattttcccatatttccccacattctgccagcagtaatagaacaagctacataaattgccacaaactgtcaaatattcaggattctctgttctcagagttcaaagagaagtagttgtaacgatggttttcatattgaaatgagaactactaagctaagctaacctagagaggattctagcaaatagatcttggattgattccttgcttgcaatttatctaagcaatccataccaaaaaaaagtaataaatatgcaattttgcctaaatctcatgaataactgataaaaagctagattatctgggcttcagcaagtactttcacatggagttataaatacagaacattgaaggagtggtcgggaggccaggatcccaagtcagactgtgagaattcaatctctgggtgccttttcatctctagtctgattgatagactgtggagtgcgttctccaaaaacaagttttagaggagccacaaagtcggaaggggctgtgggggaagcaccttcggttgcctgcttgccacagctgctagtcagggaataggtacatcgggccgttcctcatcttcctggcctgctgacccacaattatcctcactcaaaagcactgtagatgggaccaggcacggcggctcacacctgtaatcccagcagtaatcccagcactttgagaggttgaggcaggcagatcacctgaggtcaggagttcaagaccagcctggccaacgtggtgaaaccccatctctacyaaaaatacaaaatttagccgggtgtggtgacatgtgcctgtggtcccagctactcaggaggctgaggcaggagaatcacttgagcccaggaggcggaggttgcagtgagccgagattgcgccattgcactccagccgggcgacagagcgagattccgtctcaaaaacaaacaaacaaacaaaaaaacccaccaaacattgtagaagaaggaaacaccctcactgtggatcacatgcatcacttctgaagatttattttgttaaggaaagaaactttgtttgcctcgggttttgggttggtgatgagttttcctcgttcagctcattagcccatagaacaactgcttcagcgcatcacgctggcagggccctgaaggagaagataatccgctctttctgaatccataggacaataatagcaaattctgagcttattaaaatacatggtgtcaccagctcatcagaaagggcaacaggcagtataccaatgcagttctggtcttgtagtttcaaaaggctaattacttttacaataaaataaagagaacttacctgtcattgagctgatgcatgtaaaagctgtttctagctaatagaggtttctgcaaatgattcagtacacattttccacaatgttccacaaatcatattggggtatagttgttggcggcatttcatacctgagtgaggtgtgatcatgttttaattagga

SEQ ID NO: 42946 - DNA, 2987 bp, Homo sapiens
gcagaacatgggtcctgcctctcagcagttcaggtctcttcacatttctcagcctcctatggccacggtttcctgtgctctgttcacgtttttcaaatgtgatgtttattatttcttaacttgtaatgtgtcaaacaagtataaggaaagctaacgagacggaaacatagggaaaaaatatttttaaagcagtattacaagaagaaagtgaatacttaagcggaattggtgaaaacctttaatttacagaaagtgtcacaaacccacttccacttcattagagtacatatattatatcaattcttaatagtagttataaattgtaataggaaccaggaagactacaacatttatcagttcacaagtggatttttcgtaatcctgctgtcttcaggtatacatttatgtcccaatttctttaagacacagagtcataaagagattcgggtgttccctgagctacaaagcagaagagcctccctcggcccctggggagcctgctcaggaatcgggctgtgtggggacagtctcctcacctttgggcatgaggtggggctgggcaaagaccacccagctccctaacccctactcatccacctcctgccccagttaaaatcaataaatatttactggcagctacaggtgtctggggaggcagaaaggaacaagtcatgggcccccacccaaggagggggcaggatgcagcgtaagaacctgcgcttggtcactgaggtgcttggcctcaggccaccacctcacctgcgcaattaggtacatggtaagagcatggtgacggttctctctccgctggggtgacatggggatgttaggtgacctcgagggccattgacacagtcagatgtgggagccccgggtccattgcaaatggatccagtctaatgggggagagagacctgccttcctcacacggtggtggccaacctcgacgttagatttgggggaagttcagaggagtgagcgggcctccctggggggcttcccagaggtgggcttagagccagactttgaagggcaggcagggttagagtaatgagcaaagggcagaggaagcagtgcgagcaaacgcggggacctgagcaggcccgttggggcagcaggagggcagcagggttctgggaagcaggggaagccgtcctgtcccggccggctgctgggagaaggtgggggcagaggggaaaatggagggaaactggtgcttccgtgtccactggtcaggggtgggagttgattagtaactgagggaggaaacataagatcctctctgagtggaaagtctctagcagtgactatctctgagtccttctccagtcccaaagctctgccatttctgcctttgctgctatgaaataaatatatatatatgtatatactgtttgtatgtgtttatgtgcatgtgtgtgtgtatgtgggggtgcatatatgtgtatatatgtgtatgtgagcatgtatgagcatacatatgtatgtgtgcgtgtatatgtgtgtataaatattatagattcagattttcccatatttccccacattctgccagcagtaatagaacaagctacataaattgccacaaactgtcaaatattcaggattctctgttctcagagttcaaagagaagtagttgtaacgatggttttcatattgaaatgagaactactaagctaagctaacctagagaggattctagcaaatagatcttggattgattccttgcttgcaatttatctaagcaatccataccaaaaaaaagtaataaatatgcaattttgcctaaatctcatgaataactgataaaaagctagattatctgggcttcagcaagtactttcacatggagttataaatacagaacattgaaggagtggtcgggaggccaggatcccaagtcagactgtgagaattcaatctctgggtgccttttcatctctagtctgattgatagactgtggagtgcgttctccaaaaacaagttttagaggagccacaaagtcggaaggggctgtgggggaagcaccttcggttgcctgcttgccacagctgctagtcagggaataggtacatcgggccgttcctcatcttcctggcctgctgacccacaattatcctcactcaaaagcactgtagatgggaccaggcacggcggctcacacctgtaatcccagcagtaatcccagcactttgagaggttgaggcaggcagatcacctgaggtcaggagttcaagaccagcctggccaacgtggtgaaaccccatctctaccaaaaatacaaaatttagccgggtgtggtgacatgtgcctgtggtcccagctactcaggaggctgaggcaggagaatcacttgagcccaggaggcggaggttgcagtgagccgagattgcgccattgcactccagccgggygacagagcgagattccgtctcaaaaacaaacaaacaaacaaaaaaacccaccaaacattgtagaagaaggaaacaccctcactgtggatcacatgcatcacttctgaagatttattttgttaaggaaagaaactttgtttgcctcgggttttgggttggtgatgagttttcctcgttcagctcattagcccatagaacaactgcttcagcgcatcacgctggcagggccctgaaggagaagataatccgctctttctgaatccataggacaataatagcaaattctgagcttattaaaatacatggtgtcaccagctcatcagaaagggcaacaggcagtataccaatgcagttctggtcttgtagtttcaaaaggctaattacttttacaataaaataaagagaacttacctgtcattgagctgatgcatgtaaaagctgtttctagctaatagaggtttctgcaaatgattcagtacacattttccacaatgttccacaaatcatattggggtatagttgttggcggcatttcatacctgagtgaggtgtgatcatgttttaattagga

SEQ ID NO: 42947 - DNA, 2987 bp, Homo sapiens
gcagaacatgggtcctgcctctcagcagttcaggtctcttcacatttctcagcctcctatggccacggtttcctgtgctctgttcacgtttttcaaatgtgatgtttattatttcttaacttgtaatgtgtcaaacaagtataaggaaagctaacgagacggaaacatagggaaaaaatatttttaaagcagtattacaagaagaaagtgaatacttaagcggaattggtgaaaacctttaatttacagaaagtgtcacaaacccacttccacttcattagagtacatatattatatcaattcttaatagtagttataaattgtaataggaaccaggaagactacaacatttatcagttcacaagtggatttttcgtaatcctgctgtcttcaggtatacatttatgtcccaatttctttaagacacagagtcataaagagattcgggtgttccctgagctacaaagcagaagagcctccctcggcccctggggagcctgctcaggaatcgggctgtgtggggacagtctcctcacctttgggcatgaggtggggctgggcaaagaccacccagctccctaacccctactcatccacctcctgccccagttaaaatcaataaatatttactggcagctacaggtgtctggggaggcagaaaggaacaagtcatgggcccccacccaaggagggggcaggatgcagcgtaagaacctgcgcttggtcactgaggtgcttggcctcaggccaccacctcacctgcgcaattaggtacatggtaagagcatggtgacggttctctctccgctggggtgacatggggatgttaggtgacctcgagggccattgacacagtcagatgtgggagccccgggtccattgcaaatggatccagtctaatgggggagagagacctgccttcctcacacggtggtggccaacctcgacgttagatttgggggaagttcagaggagtgagcgggcctccctggggggcttcccagaggtgggcttagagccagactttgaagggcaggcagggttagagtaatgagcaaagggcagaggaagcagtgcgagcaaacgcggggacctgagcaggcccgttggggcagcaggagggcagcagggttctgggaagcaggggaagccgtcctgtcccggccggctgctgggagaaggtgggggcagaggggaaaatggagggaaactggtgcttccgtgtccactggtcaggggtgggagttgattagtaactgagggaggaaacataagatcctctctgagtggaaagtctctagcagtgactatctctgagtccttctccagtcccaaagctctgccatttctgcctttgctgctatgaaataaatatatatatatgtatatactgtttgtatgtgtttatgtgcatgtgtgtgtgtatgtgggggtgcatatatgtgtatatatgtgtatgtgagcatgtatgagcatacatatgtatgtgtgcgtgtatatgtgtgtataaatattatagattcagattttcccatatttccccacattctgccagcagtaatagaacaagctacataaattgccacaaactgtcaaatattcaggattctctgttctcagagttcaaagagaagtagttgtaacgatggttttcatattgaaatgagaactactaagctaagctaacctagagaggattctagcaaatagatcttggattgattccttgcttgcaatttatctaagcaatccataccaaaaaaaagtaataaatatgcaattttgcctaaatctcatgaataactgataaaaagctagattatctgggcttcagcaagtactttcacatggagttataaatacagaacattgaaggagtggtcgggaggccaggatcccaagtcagactgtgagaattcaatctctgggtgccttttcatctctagtctgattgatagactgtggagtgcgttctccaaaaacaagttttagaggagccacaaagtcggaaggggctgtgggggaagcaccttcggttgcctgcttgccacagctgctagtcagggaataggtacatcgggccgttcctcatcttcctggcctgctgacccacaattatcctcactcaaaagcactgtagatgggaccaggcacggcggctcacacctgtaatcccagcagtaatcccagcactttgagaggttgaggcaggcagatcacctgaggtcaggagttcaagaccagcctggccaacgtggtgaaaccccatctctaccaaaaatacaaaatttagccgggtgtggtgacatgtgcctgtggtcccagctactcaggaggctgaggcaggagaatcacttgagcccaggaggcggaggttgcagtgagccgagattgcgccattgcactccagccgggcgacagagcgagattccgtctcaaaaacaaacaaacaaacaaaaaaacccaccaaacattgtagaagaagraaacaccctcactgtggatcacatgcatcacttctgaagatttattttgttaaggaaagaaactttgtttgcctcgggttttgggttggtgatgagttttcctcgttcagctcattagcccatagaacaactgcttcagcgcatcacgctggcagggccctgaaggagaagataatccgctctttctgaatccataggacaataatagcaaattctgagcttattaaaatacatggtgtcaccagctcatcagaaagggcaacaggcagtataccaatgcagttctggtcttgtagtttcaaaaggctaattacttttacaataaaataaagagaacttacctgtcattgagctgatgcatgtaaaagctgtttctagctaatagaggtttctgcaaatgattcagtacacattttccacaatgttccacaaatcatattggggtatagttgttggcggcatttcatacctgagtgaggtgtgatcatgttttaattagga

SEQ ID NO: 42948 - DNA, 2987 bp, Homo sapiens
gcagaacatgggtcctgcctctcagcagttcaggtctcttcacatttctcagcctcctatggccacggtttcctgtgctctgttcacgtttttcaaatgtgatgtttattatttcttaacttgtaatgtgtcaaacaagtataaggaaagctaacgagacggaaacatagggaaaaaatatttttaaagcagtattacaagaagaaagtgaatacttaagcggaattggtgaaaacctttaatttacagaaagtgtcacaaacccacttccacttcattagagtacatatattatatcaattcttaatagtagttataaattgtaataggaaccaggaagactacaacatttatcagttcacaagtggatttttcgtaatcctgctgtcttcaggtatacatttatgtcccaatttctttaagacacagagtcataaagagattcgggtgttccctgagctacaaagcagaagagcctccctcggcccctggggagcctgctcaggaatcgggctgtgtggggacagtctcctcacctttgggcatgaggtggggctgggcaaagaccacccagctccctaacccctactcatccacctcctgccccagttaaaatcaataaatatttactggcagctacaggtgtctggggaggcagaaaggaacaagtcatgggcccccacccaaggagggggcaggatgcagcgtaagaacctgcgcttggtcactgaggtgcttggcctcaggccaccacctcacctgcgcaattaggtacatggtaagagcatggtgacggttctctctccgctggggtgacatggggatgttaggtgacctcgagggccattgacacagtcagatgtgggagccccgggtccattgcaaatggatccagtctaatgggggagagagacctgccttcctcacacggtggtggccaacctcgacgttagatttgggggaagttcagaggagtgagcgggcctccctggggggcttcccagaggtgggcttagagccagactttgaagggcaggcagggttagagtaatgagcaaagggcagaggaagcagtgcgagcaaacgcggggacctgagcaggcccgttggggcagcaggagggcagcagggttctgggaagcaggggaagccgtcctgtcccggccggctgctgggagaaggtgggggcagaggggaaaatggagggaaactggtgcttccgtgtccactggtcaggggtgggagttgattagtaactgagggaggaaacataagatcctctctgagtggaaagtctctagcagtgactatctctgagtccttctccagtcccaaagctctgccatttctgcctttgctgctatgaaataaatatatatatatgtatatactgtttgtatgtgtttatgtgcatgtgtgtgtgtatgtgggggtgcatatatgtgtatatatgtgtatgtgagcatgtatgagcatacatatgtatgtgtgcgtgtatatgtgtgtataaatattatagattcagattttcccatatttccccacattctgccagcagtaatagaacaagctacataaattgccacaaactgtcaaatattcaggattctctgttctcagagttcaaagagaagtagttgtaacgatggttttcatattgaaatgagaactactaagctaagctaacctagagaggattctagcaaatagatcttggattgattccttgcttgcaatttatctaagcaatccataccaaaaaaaagtaataaatatgcaattttgcctaaatctcatgaataactgataaaaagctagattatctgggcttcagcaagtactttcacatggagttataaatacagaacattgaaggagtggtcgggaggccaggatcccaagtcagactgtgagaattcaatctctgggtgccttttcatctctagtctgattgatagactgtggagtgcgttctccaaaaacaagttttagaggagccacaaagtcggaaggggctgtgggggaagcaccttcggttgcctgcttgccacagctgctagtcagggaataggtacatcgggccgttcctcatcttcctggcctgctgacccacaattatcctcactcaaaagcactgtagatgggaccaggcacggcggctcacacctgtaatcccagcagtaatcccagcactttgagaggttgaggcaggcagatcacctgaggtcaggagttcaagaccagcctggccaacgtggtgaaaccccatctctaccaaaaatacaaaatttagccgggtgtggtgacatgtgcctgtggtcccagctactcaggaggctgaggcaggagaatcacttgagcccaggaggcggaggttgcagtgagccgagattgcgccattgcactccagccgggcgacagagcgagattccgtctcaaaaacaaacaaacaaacaaaaaaacccaccaaacattgtagaagaaggaaacaccctcactgtggatcacatgcatcacttctgaagatttattttgttaaggaaagaaactttgtttgcctcgggttttgggttggtgatgagttttcctcgttcagctcattagcccatagaacaactgcttcagcgcatcacgctggcagggccctgaaggagaagataatccgctctttctgaatccataggacaataatagcaaattctgagcttattaaaatacatggtgtcaccagctcatcagaaagggcaacaggcagtataccaatgcagttctggtcttgtagtttcaaaaggctaattacttttacaataaaataaagagaacttacctgtcattgagctgatgcatgtaaaagctgtttctagctaatagaggttyctgcaaatgattcagtacacattttccacaatgttccacaaatcatattggggtatagttgttggcggcatttcatacctgagtgaggtgtgatcatgttttaattagga

SEQ ID NO: 42949 - DNA, 509 bp, Homo sapiens
cgcctgctgtcagggcagcaaggcatcagattctcctaggagcgggaaccctattgtgaactgcgtatacgaggtatctaggtgcgtgctccttttaagaatctaatggctgakgacgaggggcacagtttcaacctggaactgtccacaccccctacccaccttcccccgcccttggaaaaactgccttccatgaactgggtcccttgtgccagaaaggttggggaccgctggactatccgatcaaatgaagcagggactcggggcgagctcccccgctgctcccgccggcttctccgtgtagaatcgaagaaggcagtcccaagggctcttctgccccgtatccccgcctgaggagcgtgccaggcgcgcagctagtcctcccccgacccaaccggtttgatgaaacgcaagagaaagtgaattttccagccactcccattggccagaattcgtctcagccgcaagggaggctgggaagtgcagtcatgccttcaggtagccgtgag

SEQ ID NO: 42950 - DNA, 592 bp, Homo sapiens
cacaattctttccagtgctrtcactcatgtgtctgtccactgctaccttggctttctccaaggtactttctccaagactcagttccttccttggtctctggtttctccagatacctgcccatggcgtgcctgggtcctgcctcagggaatccagcctggatagttgccagaaagggttgtgaggattggatgcccccctttgtctttgtcttttcattcattccttcgttcctttcttcccttccttccttccttcctctctctctctctctctctttctttctctctctctttctctttctctgtctctttttctttcttttctttcgcacttgtcacccaggctggagtgcagtggcgcaatcttggctcactacaatctccgcctcccagattcaagcgattctccggcctcagcctcccaagtagctgcgattacagacgcccaccaccatgtctggctaattttttgtaatttcagtagagatggggtttcaccatgttggccaggctggtctcaaactcctgacctcaggtgatccgcccaccttggcctcccaaagtgctggaattacaggcgtgagtaccatgt

SEQ ID NO: 42951 - DNA, 1164 bp, Homo sapiens
cttcttggcccttcagccctttagtcccaagtgaagggagcactccagtgttggtcagctttatttgggggtgcgttgttgataatctgccacccaaatggattgcgtgatacaactgcttcctgcttcgtccctctccaaaaactctatgctcatggggccattgccactcgcccttcccagcagtgttctagtggggtatttaataggtaacccagactcccagggagaacaccagagttcaaggccagtaccttggcaggtcatttaacttcttaactctatttcctcctttgtgaaatgacgatggttctcacttatttgtcccaaacccctcatcacccgtcaatgagctattcttccatggattagaaattcatttcaggcagggcacagtggctcatgcctgtaatcccagcactttgggaggccgaggcgggcagatcacctgaggtcaggagttcgagaccagcctggccaacatggctttcgccccgtctctactgaaaatacaaaaaaaagttagccatgtgtggtggtggatgcctgtaatcccagccactgaggaggctgaggcaagagaatcgcttgaacccgggagtcaaaggttggtgagccaagatcatgctattgcactccagcctaggcgacagagcgggactccatctcaaaaaaaaaaaaaaaagaaagaaaagaaaagaaagaaacaaattcattgcagtacccataagggggttaggaatatgggtccctccttagtgaagaggtacttctagagtcaggatgagaagagagtttgactaacggcatggccttgggcacctgaccggaccgctgcctggtttctcatggctttacctaccttataggggctttgtgagcatctaaagcatttagcacagagcaggggccctattagtatcagctggtactatcattaatgagacagtctcagttccagcaagaactgttctttttcgcaggagacaaatggaagtaaytcgtcttgttggaacctgcggtgaggtagctgggttaaacaggagcacctgggcaagcaggcaatgctcctcctgctcactcgagagcaggtggggcttccttgtggccttctggtctccaactccagggctcggatttcgggagggaaggtggtggcaaggg

SEQ ID NO: 42952 - DNA, 639 bp, Homo sapiens
tgatcatacctactgtacgctaacctgggcaagaacaagaccctatctgttaaaaaaataataacttaaataaatacttaaaatcaattataaagaaatggtatgatgactcagatttactttgaattaattcattttactattttctagagttattatcagaaaaaaaaaaaaatcttgcccaaaataccactgatgtcatagcatgtcctataaatcaggactttgaagcctgcattaccttaagaatcttttttaccccttactcctctcactgcttttyatggccttaaaaatgaatacttttacaaagtgtttactaattgctttttggtgaggtggggctgaaataagacgggcagtgagttgatcattgctgaagctgagtgatataggtctataggggtcattatattattctgtgtaattgtatgtatgttttaattttccataatgataaatttaagtaactcctaaaacaataaggaatttttaaaaatctcaaaataagtggcaaatctgtcaaatctgtaatccaaaagggagaattacaaaatctgcaacagactgtctgtgaacaaattgtatttaatgttactcagactgtgactgcttaggtttttaaacagttctcttcat

SEQ ID NO: 42953 - DNA, 639 bp, Homo sapiens
tgatcatacctactgtacgctaacctgggcaagaacaagaccctatctgttaaaaaaataataacttaaataaatacttaaaatcaattataaagaaatggtatgatgactcagatttactttgaattaattcattttactattttctagagttattatcagaaaaaaaaaaaaatcttgcccaaaataccactgatgtcatagcatgtcctataaatcaggactttgaagcctgcattaccttaagaatcttttttaccccttactcctctcactgcttttcatggccttaaaaatgaatacttttacaaagtgtttactaattgctttttggtgaggtggggctgaaataagacgggcagtgagttgatcattgctgaagctgagtgatataggtctataggggtcattatattattctgtgtaattgtatgtatgttttaattttccataatgataaatttaagtaactcctaaaacaataaggaattyttaaaaatctcaaaataagtggcaaatctgtcaaatctgtaatccaaaagggagaattacaaaatctgcaacagactgtctgtgaacaaattgtatttaatgttactcagactgtgactgcttaggtttttaaacagttctcttcat

SEQ ID NO: 42954 - DNA, 619 bp, Homo sapiens
ccctcaccattagtttaatttttttttttttttttttgagatgaagtctcactgtctcacccaggctggagcacagtagcatgatctcgtgctcactgcaacctccgcctcccgggttcaagggattctcctgccccagcctcccaggtagctgggattacaggcacatgccaccacgccaggctaatttttgtatttttagtagaaacggtgtttcgccacattggccaggttaatctggaactcctgacctcaagtgatccacccgcctcagcctctcaaagtgctgggattacaggtatgagccaccgtgaccggcccatcattagtttaaatttgaggcttttttttttcccgtgttagctgtgcctatcatttgtccattctccactggattagtcttttttccaattaatatttaagctttctgcatataacattgccatctgtgttacaaatgtattttttcctaatttattgtctgtagactttgtggtatattttccataccaaagtttttatttttatgtatgttttgagttttcaatcttggttaagacattccttcttgactcagaacagtacatttactcacataattcttgcaaaactttwaaaa

SEQ ID NO: 42955 - DNA, 791 bp, Homo sapiens
aatacaatttaagcacagccctatgtggatatacttggaaatacaagtattttgaacttagcttctaatcatttataattgttattaatttcaagtacccaaggttaaagcaaagctttgcttttctctcccttcctccttgttcatttaaccaagtttatggggtttattagtcaagttaatggggttcattctcttttaagatgtttaaagaaagagttytgtaattttacaaggcttaaaaaccacatacctgataagttaataaataatacctgtctcatccttagaactaccttagtaataacaagtattgtagaaaggtgcttaggttaagagggctgtctaatacttattgcttcaagtagtcttcattctttgttagagtaatccaacataagataaaaataaagtgaagtctgtgggaaatttatattttcaaattttgtagataatcatgatacaattatgtcaaaatattgcccccaatttctacatgattaaagtagcaattcttatttagtagaaagtaattttaaaatatgtttggatttcgtcaaaataactgatgctatttttaaaaaacaatttattttaaaatagtttcaggacattaccttcccacccagtcatttgaaagggaaagatccctcagatttttcaagatttttgctcagagaacagcaaatttttcatctagagtattctgaatctgcaattttataaactagccagtcgaagtaatgtgagtgagtcttagaaggttctcagaagggaagatttctaatgaa

SEQ ID NO: 42956 - DNA, 504 bp, Homo sapiens
tcccttcagggagatgaactgttatgtacacaagtcatgatcatattagttgaaatgttttaacctactactayaccttacttttatcctgtgatttgtatcaggaagatagttttatattctccctctgattgagcaatttttaataagctcttaaaatgactaaccttctgcttctctttcatttcacattaacccatatgtttaccagtctgcccccttctctttgatgattttccatgtagaggtgcaccctaattgcatctcccgtcaaccaacattttgctataatattcaagtttagagacttgtgccttcttaggtatcaattatgctttttctcttctgttgttgctctttatttgatgggatacttgatttctctcacagactctggttttcagtcagtcctgactacactggcaagtcttcaggccagtctttagtatctaggccaatgtttttccaaacacgggctcacagactacctacattagaggtgct

SEQ ID NO: 42957 - DNA, 1083 bp, Homo sapiens
atccttagcttcggggaacataactccaatctctacctcagtcttcaagtgacctcctcactctgtcartgtgtctccatgtcttctcatggcgttctccctgcatgtctgtgtctgtgtcaaaatgtccctcttcttatagggacaccagccatgttagattaagacccatcctaatgaccccatcttaacttgattaaatatatgaagactttatttccaactaaggtcatactcacaagaccccagggttaggacttcaacgtatcttctgggttgggggaacacaatttgacccataataaaagccataggttcaagggggagagtttttcaagataaagatgggaaagaagattcatgtgttcttttaaaataacattttattaaagatcagtaggcaggtcatggtgctttccaaataagcagaaaatctgattatctgcatcccaagaaagctttgcaaggcctggtatatcatttttagaactctgctttgatttaatgagttggagaaggacatggctgaacaacttttgccaggaacactttggtactgtcatctatcacaacctcccagctcatgtcttccttgatcaataagaaagcaaaatcaatgcccatgtcaagctgcacgggtagctctcaatcacacagactgacagaggcaagcagtggcataaacaataaaactaacaaacagaaacgttccacctggctggaatttggtctgttttttaattgacatttttcttaggcaattaaaaaatgagtttgtaatctgtttatatcaaatggaaatagcagtgaaaggaagtagcttggaaacagccagattgcaaaaggaagccagcctggaagtaaatggctggtgtaggtaatacgcacacttttaacaaagatttagctatacttacaatatcaacaataggttgagccaacacccaaaatgttggcattaaaattttgccttaacaattccaacacaagattatcatatcaagaaacggtcacttataatatttatgcattcattaacttttctcaaaacattattacccactccctgaatagcttaacata

SEQ ID NO: 42958 - DNA, 1083 bp, Homo sapiens
atccttagcttcggggaacataactccaatctctacctcagtcttcaagtgacctcctcactctgtcaatgtgtctccatgtcttctcatggcgttctccctgcatgtctgtgtctgtgtcaaaatgtccctcttcttatagggacaccagccatgttagattaagacccatcctaatgaccccatcttaacttgattaaatatatgaagactttatttccaactaaggtcatactcacaagaccccagggttaggacttcaacgtatcttctgggttgggggaacacaatttgacccataataaaagccataggttcaagggggagagtttttcaagataaagatgggaaagaagattcatgtgttcttttaaaataacattttattaaagatcagtaggcaggtcatggtgctttccaaataagcagaaaatctgattatctgcatcccaagaaagctttgcaaggcctggtatatcatttttagaactctgctttgatttaatgagttggagaaggacatggctgaacaacttttgccaggaacactttggtactgtcatctatcacaacctcccagctcatgtcttccttgatcaataagaaagcaaaatcaatgcccatgtcaagctgcacgggtagctctcaatcacacagactgacagaggcaagcagtggcataaacaataaaactaacaaacagaaacgttccacctggctggaatttggtctgttttttaattgacatttttcttaggcaattaaaaaatgagtttgtaatctgtttatatcaaatggaaatagcagtgaaaggaagtagcttrgaaacagccagattgcaaaaggaagccagcctggaagtaaatggctggtgtaggtaatacgcacacttttaacaaagatttagctatacttacaatatcaacaataggttgagccaacacccaaaatgttggcattaaaattttgccttaacaattccaacacaagattatcatatcaagaaacggtcacttataatatttatgcattcattaacttttctcaaaacattattacccactccctgaatagcttaacata

SEQ ID NO: 42959 - DNA, 700 bp, Homo sapiens
tcaggccatttgcagatggcccttgccctctcagccttccctggctctctacacatatggtatttataacctttcatacattatctgtagcttctccttcctggtgtacaatcattgacaagacaacatccatgccttagcatctctggggccttgcccagggtctcggctataggaggttcccagtagacattttgcagaatgggagggaagatggggagaggtgaggatccccaagcagcagacaggtttgagcgccttttgtctgagacactctccyggctttgcctaagtcatcactggctgttaactgggtctaagaaagtggcagagtcaaattgccacagatgattcctcatctgagggagacagtaagaccgggagaggcagatcgctcttctttcttatcctccatgtgcagtagttccctctccccactcatgtcagcaactgaatttagctcatgcgtcaaaagctgtctccccttgagggagtgtcagccagcgctgtaggaggggtcataccacagggaaccctccagaaccaaatcatgtacttttcttctttctcataaaatccagtaaacagttgtttttaattggaaaatatagaaaagaataaatttaaagaagaaaaaaagtcacccataatcccatgacttaggagaagctattttaatttacatataaaatatatttat

SEQ ID NO: 42960 - DNA, 1609 bp, Homo sapiens
tgcatgcactcacaacccagtgattaatatacaattgtcttgcctatataaggcrtgtctatttatgccatgaggttagaaagaaggtatcaagtcaactatagcagaaagcagtaatagtaattccccaactcttccaaatctctattattttaaaaccatcatcctttagttatagtctttgtaactaaaccggaatttgggcacttctcttcatgaaggcaatttaagagcctgtattgggggaccacctaaaaccttgctattgtcccctaccccaccctgcgtcactagcaacatccgcatcacctggaagcttttcagaactgtagattttctcacccctgtcctgaaacttactgaatcagaatctgtattttaacaagatcctcaggtgaaccataggcacattaaagtatgagaaacgctgatctaaaacactcccttatggggcagcaccctatctacaacaatccaaatagaaaaaacggctggataaaatgcgataggggaaaaattccccaattcctgcaggactgcactgatatacacttggatcagagactaataaagcaggtatgatttatctaataaatgttagcttaaaaaagaattccaaaggctggtattcaatatattcatttatttgacaattatttattcatttgacaattattcaatgtttactgcataagcaaaaaactgaataagacggttttctgcttttataaaacttacagttaagtagaagggacactgcataagaagtaacatgggagaaggctcaagtgttgacaactgtgatgaagagagatggaggtccagaaggaaattcaactgtggcgagaggcaactaaaaggttcctgcagtccaggagtcagcaacctatggctcattaagctattcaggatagagacagctgtggctcatatggctagtgagacaacttccaacagagtttagtcaacaatgataagaagaacagtttcactacaggaagagctactgcgcaactgcctggcagtcagccagggctttggctgaccaggaggtatctctggccatcattaaataggactgagactgccaacaccaccttatgtccactgtgcactgctacagagttgggtggtaagtacttgagggcatgtgggaacattcagctggatgaataccttaaaggctgccgatctcactctgggcagctgtgatattgtgaaatatatagttggtcttcaactcccttcctggcatacaactcctaaaatctttggcctttccaaagtggtgtcattttgtatgctaatgattggtggctggcgcacttaggtagcttcagggtaggggctggtcactgaaaaaccaagggaggattagaaggttaggactttctgtcccatctcccaacctccaaggagggcagagaggctgactgatttccaatggccagtggtttaatcagttgtgcctacataatgcagcttccataaaacccttaaaaggactgggtttggggcacttccagatagctgaacaggtggaggtttctggacagctgcacaccaggaaaggtatggaatctcctcaccccttcccccatcttgtcct

SEQ ID NO: 42961 - DNA, 1367 bp, Homo sapiens
gtgtggacaagggagataatgtcaaagtacagtttgtttgttttttcaaaataagcaaaatgttttatttataggatccttttgctctctgtttactctattaaaaaagaaaagcagctgggtacagtgccatgtgcttttagtcccagctactattcaggaggctgaggtggtaggactgcttgagcccaggagttttaggccagcccgggcaacacagcaagacccttgtctctaaagaaatatatacaagaagttttttaaagagamaaatagacagtttggattatatgctttgtgcaggaaaaactgtttcactagggactaaaaaaacctatcctattaaaacacaaccataaaaatgaaatgtagatttgttctccttttcagtactatcaaacaataacttacttagaaagaattcctcgaagtcagttttctccacacagctagtatacatgcgcagggccgcaatcttaatcttctagacaaagagaataaaaccaaactcaagacatgaccaagtggatgttctacttccattagacatgggtcacaaaatcttatatttcttcaactagaaggaagggtccaaaccactctctaggtaatttaaaccaatataaattttttttgttttcttagagcttagccattcatacagacttcacacaattttcatattttaggactttagcatgaaaacctcagaaaggcttttccaatatttaaatgaaatctctcatttaattccaacctacttcaccacatttgtgcctctaaatcactgttcagcattatccacattaactctttagaatctgaaatcctttatagtaaaaaagtacacattcttctggccaaaatcaaagaaatatacaaaaaccctcaagcctttaatctttcctcagaggcactactatctattctataaatctcgggggatggagtaagcggtatcttttttccagatctttaattttatagtttgctgattaacactgtgtctgtaaataagggtttctaatgactgtaaaatacaatataagaatcaaacttttactattcccaaagcactaggaattctcttaggcttttgatatgagtggtggttttaattttttcactgagctgtatacttaagatttttatattacactgtatataaattatgccttaataaaaataaatctaaaaataaattatttaagagttgacttatgggtctgaagaccaactcagcactctaggaacaggtattttaaggactttcaaaacatttcattaaggatataactaaataaatgagcacttcaacaaggcttctagaagcttattttttcttataacaacagggaaagttataa

SEQ ID NO: 42962 - DNA, 722 bp, Homo sapiens
tataggtgacatttttatttttgtttttcccattatacaagtaattttatagaaacctgaaaaattttgaaaagtataaagaaaacaatacaaaaatgctcctctcaccattcagtgatgtacaaatataacggaaactcattattttcttgagtcttttttttcctctacaaatgtaaatatatttaggagttgaaattataaatatttgtgttctttttcacttgacatagcataaacattttactatggtttatacattcatacatttacagaatataatctgctataatatacccattctttcccttgttgttggactttgaaattttatctatttcctaagtgacatgcagaaaatttttarttttacttgattgaaatcctacataatatcttggtttaaaaaaaaaatcactatttggccgggcgcggtggctcacatctgtaatcccagcactttgggaggccgaggagggcggatcacctgaagccaggagttcaagactagcctggccaacatggtgaaaccccgtcttcactaaaaatacaaaaattagctgggcatagtggtgcatgcctgtaatcccgactactgaggaggctgaggcaggagaatcacttgaacctgggaggtggaggttgcagtgagctgagatggtgatattgcactccagcctgggggacaagaatgaaattccgtctcaaaaaaaaaaaaaaag

SEQ ID NO: 42963 - DNA, 722 bp, Homo sapiens
tataggtgacatttttatttttgtttttcccattatacaagtaattttatagaaacctgaaaaattttgaaaagtataaagaaaacaatacaaaaatgctcctctcaccattcagtgatgtacaaatataacggaaactcattattttcttgagtcttttttttcctctacaaatgtaaatatatttaggagttgaaattataaatatttgtgttctttttcacttgacatagcataaacattttactatggtttatacattcatacatttacagaatataatctgctataatatacccattctttcccttgttgttggactttgaaattttatctatttcctaagtgacatgcagaaaatttttaattttacttgattgaaatcctacataatatcttggtttaaaaaaaaaatcactatttggccgggcrcggtggctcacatctgtaatcccagcactttgggaggccgaggagggcggatcacctgaagccaggagttcaagactagcctggccaacatggtgaaaccccgtcttcactaaaaatacaaaaattagctgggcatagtggtgcatgcctgtaatcccgactactgaggaggctgaggcaggagaatcacttgaacctgggaggtggaggttgcagtgagctgagatggtgatattgcactccagcctgggggacaagaatgaaattccgtctcaaaaaaaaaaaaaaag

SEQ ID NO: 42964 - DNA, 571 bp, Homo sapiens
gaatgagattgctgaagtccattttaagattttcccctttttcacttgtgtttctctcctgtattctcatccccaagtgtcgagaacagatcttggcttttggtaatttctctctttaatatgcattacygtaagtcttataaataaaaataaatgttcccttttgggtttcacacctgttcttgcttcatgaaatgtaatgtctccaggcagcttacatttaaaaaaaattctgaaattctgtgtgtgtttcacagtgtgacactatttatttctctgaagttttcaaaaaatattattcctgttttcccatgcttcatattggttgaaaagaacagttttcttttcataagctgactaccatacagctgcttttgatgtgagattagaacattgccaagccaaattattttgctttgaagtcctgtaattgcagcgtgattttgactagatgtatttcttatctaaacaaatcgacagttaatacttcattgggagcattctactgttgtgatatgtttggagtagcactttacttatcaaattatttatttatttttcaagtagaaag

SEQ ID NO: 42965 - DNA, 849 bp, Homo sapiens
tcacacatgttggcacaagtgttgctggggtgaattaagcgtgtcctgtgtgattccactgggggaaaactcttggaagcttgtgcctggtctcccctagatttcaccccgggtacctcttccccttgctgatctcactttgcatctgttcaatgtagtaagtcacagctgtgartatgactgtattctgagtcctgtgaattttcctagtgactcattggacctggaggtggtcttggggaccactgacatagtctctgatcccagaatcttagatcttctgtctgcatccatgaaatggtgacaggttaacttgttaatttcaaagatgaaacctcaggcccatcacagtgcttgaaagagcaatcccgttacctctcaggacccatgggagagtgagtgtggggtgggtaggaattccagatctaaattaacttgggtgttccatgccctgcttatcatggagctttcaggagcagcacctgatctaagccagtccaagccgaatgaagtccttttcttctcctctggccaagaatcaagaagagtgtaacctgggaaaaccaccttgcaatcatgggggttaacccagagcaagtgggaccgagaaactggtcctggatcacactgttggagcccctgaaaccagccagccttgcggctagtttgcctctggatgattttaagacatatgagttaataaatttcctttactgcttaagacagattgggtatgattttctatcccttgtaagagaagtcctaactgatgcagatcatggctgttcaaagaataggccccctggagggcctctgtccagttgtagagaaccaagcctcacaaagatg

SEQ ID NO: 42966 - DNA, 2376 bp, Homo sapiens
aatgagagaatcactgttctgcttgctcatgtattgttttagtttgttgcaataaaataaatatttgcatggaggggaaaaatggcttgattttccctggtattgtttcctttaataggatctctttctctcccagcccgttcctgttgatgtcttggttggggtggccccctgactttcatttttctgcatctcaagttccaaatttgaagcctgatgatctgtcagtcagggtctccagagaaacagaatcaatagggggagcgggagaagaaagagagagagagagagaaagagagagagagagagagagagagagagatctgttttaaataaatgatgtatgcaactgtgtggctgttaagtctgaagtttgcagggcagtcctgtaggcttgaatccaaaggcagtccagagggagaattttctccttttatgcagggacctcagtcttttctcttaaggccatcaaccgatgagacaaggtccacccacagtgtgatggggaatctgctttactcaaagcccatcgagtccaatgttaatctcatccaaacacaccctcacagcaacatctagactggtgtttgaccaaacagctgttgggtaccatagcctagccaagttgacacataaacttaatcatcatgggatcagtcccaccatgccccatgcccatctttggaccagtgttctagcctcctgcctgttcaggtgagttatgggagaaaacttaggaccccatgcaaatgcagactttcttttacattgtaaataccactgacattcttgctcatccaactgggacatttttgccattcagtttgtcaagcaaatataacgatgcatattttcagcacacacttccactgtttagcagatggcacatctgaaacatggtacatgggtgtaggcaattatttgactccctagtgccatatggtgacatattccttcttgtgatactagaatataaatatgttaaatgttttgtgtatgtgtgtatgtgtgtgtaggcatatgcgtcacatctggaatctcaaaaatatcaaggagccagatgtatattcatatgatcatatgtgtatatacacgtatactatccactcctttaacatagtaacagcttacatttttatcctttggttttattgaaggatcctgtaaatgaataaaaccataagaaaacatatggaagaacagtcaaataggttataaatataatcaacactgttttaacagcatcacagagcaagcatggagggaatgatattttattgattatttagagcctaagccaggccttgtgcaasgcatttctcatgtataatcttatctgacctcatgaaggaggattttccttaaactggggagtctgaggcttagcaaatgaatcgcacaaccaggatttgaactaaagtttaccttcatctaaatacgcgtttttctttctctctctctctttttttttttttacccctatcgcatcatagccacatctgtggccacacaagaaatactttcccaacactcagtagctaattattcataaggttttagggtgacggtgggccatgtgcagagatgctttgaaagacttccaggaaaatcatgctttatggcttagaatttggggacatgactgtacctgaattgagatggacaggaaatcatttctccctccttcctgcttcagcacacccctcttcccactcaagagattctggagacgcttcaaggccatctccttgccagatgcctctgttttagaaaagtcatttcaagtgccccaaggagaatggattggaggggatcacgttgggagactgaacatgtaacacaggtgggatatgatggagatgggagttggtgggaggccatctgggtagtataatctaccagacttgggggtaggtggcctggcaaattgggggagttaggccaaagatgactcccaagtttctggttttggccgtggggtagatggagacaaggttgggaggacagatagttcgctttgagtctgtggagctggaggtgcctgtggccacctgggtggtgatgtggcctccaggagggagctggcatggagatggagctccaggagccacagtgactggcatagtgccaggtttctaataggtgtgcaataaatatttgtgaaatgcatgggatgtggggggtgttgagccaggcacgtagactgggttggaacagggagctgacaggtctgcctctgaaggctgttactgtctgcttagtagcaggggttgttatctgttggtggggaggagtgggtggtgatgtcttaggattgagccgagaggagcactatgagctggccaactatttgaaggaagtgggtcaatgacaaag

SEQ ID NO: 42967 - DNA, 793 bp, Homo sapiens
gatccatcgtktccttgtggcattttgatggaggccttcacctcaacagtgagttaagcctagagtatgaggatgagttctgtgcattagccactttaaagtttgtttgtcgttactcagtatacaacagagaaaacctcaaaatccctcttcacttctcttccaactctgcttttcccagtgtgagtagaatcaaaccatatgtactgttcagggatctcctttcttttcaattcaaccatgtgttttgggtgctcttgttctgactcatgaatctgagaactcttcccacctcaatcattagagaggcagaggattgtagttgtgaaaagtttgtacattggagtctggctttgagtcccagttttcccgtggacaggtcatgtgaccttggcaaaataaccacctcccatgcctcaggtgcctcatctgtgaaatggggataataataacacctacttcaaataaaacaatgcaaggaatgccctagaacaaacgcctggcacatagtaagttctacccaagtatttattattataataattgtataaacatttaacgacttccttaaattgtttcctattacttgctattttgaatagtgtttcaattaatatccttgtgatatggttttgctgtgtccccaaccaaatcttatcttgagctgtaattcccacagttcccatgtatcgtgggagaaacctagtgggaggtgatagaattatgggggcgggtctttcctgtgctgttcttgtgatagtgaatgagtctcatgagatctgatggctttaaa

SEQ ID NO: 42968 - DNA, 793 bp, Homo sapiens
gatccatcgtgtccttgtggcattttgatggaggccttcacctcaacagtgagttaagcctagagtatgaggatgagttctgtgcattagccactttaaagtttgtttgtcgttactcagtatacaacagagaaaacctcaaaatccctcttcacttctcttccaactctgcttttcccagtgtgagtagaatcaaaccatatgtactgttcagggatctcctttcttttcaattcaaccatgtgttttgggtgctcttgttctgactcatgaatctgagaactcttcccacctcaatcattagagaggcagaggattgtagttgtgaaaagtttgtacattggagtctggctttgagtcccagttttcccgtggacaggtcatgtgaccttggcaaaataaccacctcccatgcctcaggtgcctcatctgtgaaatggggataataataacacctacttcaaataaaacaatgcaaggaatgccctagaacaaacgcctggcmcatagtaagttctacccaagtatttattattataataattgtataaacatttaacgacttccttaaattgtttcctattacttgctattttgaatagtgtttcaattaatatccttgtgatatggttttgctgtgtccccaaccaaatcttatcttgagctgtaattcccacagttcccatgtatcgtgggagaaacctagtgggaggtgatagaattatgggggcgggtctttcctgtgctgttcttgtgatagtgaatgagtctcatgagatctgatggctttaaa

SEQ ID NO: 42969 - DNA, 793 bp, Homo sapiens
gatccatcgtgtccttgtggcattttgatggaggccttcacctcaacagtgagttaagcctagagtatgaggatgagttctgtgcattagccactttaaagtttgtttgtcgttactcagtatacaacagagaaaacctcaaaatccctcttcacttctcttccaactctgcttttcccagtgtgagtagaatcaaaccatatgtactgttcagggatctcctttcttttcaattcaaccatgtgttttgggtgctcttgttctgactcatgaatctgagaactcttcccacctcaatcattagagaggcagaggattgtagttgtgaaaagtttgtacattggagtctggctttgagtcccagttttcccgtggacaggtcatgtgaccttggcaaaataaccacctcccatgcctcaggtgcctcatctgtgaaatggggataataataacacctacttcaaataaaacaatgcaaggaatgccctagaacaaacgcctggcacatagtaagttctacccaagtatttattattataataattgtataaacatttaacgacttccttaaattgtttcctattacttgctattttgaatagtgtttcaattaatatccttgtgatatggttttgctgtgtccccaaccaaatcttatcttgagctgtaattcccrcagttcccatgtatcgtgggagaaacctagtgggaggtgatagaattatgggggcgggtctttcctgtgctgttcttgtgatagtgaatgagtctcatgagatctgatggctttaaa

SEQ ID NO: 42970 - DNA, 1264 bp, Homo sapiens
tgcattagcagactttttctagaaagggccagataggaaatacttttgggtttgccagccatggggtttccatctcaacctaaagaatcattgtcactgtaggggaagcagccccagacaacctctaaacaatgggcatgactgtctgctaataaaactttatttacaaaagcaggtgggggctggagtttcccaatccctggtactgggcactgaaagacacaacactacaggaagaggctgaattgccatgaaggctgtgtgtgcccctgatgtgagaatcacggaagggacctcaaatgaagaggggcccacaggacctgcaactcaagacgtgtccaactagatctggctaaatctcctgtgttctttacagcaatgacaagtcatcaatgggactactgataaggcagtctctctctctctgtccccgatggaccatgcccaggccagcccactcacattccgctccagctcgatggcccggtccttcactcggagaagctccatggtggcttccttatggccgggcccccaggcctccttcccctggtgactggcggctgtcttccccrcagggtgcttgaaagagttctgcaagtgctgcccctctccctggttctgcctgagggtctcacactccttctttagctacaggtgtgacaataagcaaggaggctttaggcggaagcagcctggcctggagccccgagtgagtggctgagggcaacctgcaccacaccctccacactccccatactcgcccgccctggtctgtgtaagccagacgcgctccttttcttttgaggggaaggcaccaaccctctgccctacattttcccttcccttccagagaggacagggaggtgggggcctgcaacccgttcctgcctcagtccctgctttagccatgtggcttcctgctttcctgagcctcagttatccactccctcaaacagaggtgaggctgaggatacaggaggtgaacagggatgaggtctcaaagcccctgctggcactggagcagctttatccagattcctattcaatcctgcagccaagaagcatggcatgtgttcaaaactgaggctggaagagtgcgtgtgtggaaggggggagtgtgcacacctgatcacctgtgagagtgtgcacattgagagcacgtgtcgggtgtgtacacctgtgtgtgaggagcatgtgtttgtgtgtggagtgtgcacacacgtggtgggcacatgtataatacatgtgtgtagagagcatg

SEQ ID NO: 42971 - DNA, 1264 bp, Homo sapiens
tgcattagcagactttttctagaaagggccagataggaaatacttttgggtttgccagccatggggtttccatctcaacctaaagaatcattgtcactgtaggggaagcagccccagacaacctctaaacaatgggcatgactgtctgctaataaaactttatttacaaaagcaggtgggggctggagtttcccaatccctggtactgggcactgaaagacacaacactacaggaagaggctgaattgccatgaaggctgtgtgtgcccctgatgtgagaatcacggaagggacctcaaatgaagaggggcccacaggacctgcaactcaagacgtgtccaactagatctggctaaatctcctgtgttctttacagcaatgacaagtcatcaatgggactactgataaggcagtctctctctctctgtccccgatggaccatgcccaggccagcccactcacattccgctccagctcgatggcccggtccttcactcggagaagctccatggtggcttccttatggccgggcccccaggcctccttcccctggtgactggcggctgtcttccccgcagggtgcttgaaagagttctgcaagtgctgcccctctccctggttctgcctgagggtctcacactccttcttyagctacaggtgtgacaataagcaaggaggctttaggcggaagcagcctggcctggagccccgagtgagtggctgagggcaacctgcaccacaccctccacactccccatactcgcccgccctggtctgtgtaagccagacgcgctccttttcttttgaggggaaggcaccaaccctctgccctacattttcccttcccttccagagaggacagggaggtgggggcctgcaacccgttcctgcctcagtccctgctttagccatgtggcttcctgctttcctgagcctcagttatccactccctcaaacagaggtgaggctgaggatacaggaggtgaacagggatgaggtctcaaagcccctgctggcactggagcagctttatccagattcctattcaatcctgcagccaagaagcatggcatgtgttcaaaactgaggctggaagagtgcgtgtgtggaaggggggagtgtgcacacctgatcacctgtgagagtgtgcacattgagagcacgtgtcgggtgtgtacacctgtgtgtgaggagcatgtgtttgtgtgtggagtgtgcacacacgtggtgggcacatgtataatacatgtgtgtagagagcatg

SEQ ID NO: 42972 - DNA, 468 bp, Homo sapiens
taaatatatatacctactgtgtacctataacaattaaaaattttaaaaaagattctgttctctagatctactcttggtattaaaataggtattagtggctgggcgcggtggctcatgcctgtaatgccagcactttgggaggctgaggcrggctgatcacgaggtcaggagatcgagactatcctggctaacactgtgaaaccctgtctctactaaaaatacaaaaaattagccgggcgtggcggcgggcgcctgtagtcccagctactggggaggctgaggcaggagaatggcgtgaacccgggaggcggagcttgcagtgagccgagattgtgccactgcactccagcctgggcgacagagtgagactctgtctcaaaaaaaaaaaaaaaaaaataggtattagtttgctagagctaccataacaaaataccacagactgggtgggttaaacaacagaaatgtatt

SEQ ID NO: 42973 - DNA, 463 bp, Homo sapiens
ctccctatgcagacacttgggccacctcctcatagtcagtgctgctgtgcctgtcctccttgctgatgtggctggaggttcaccttcccagcccccggggttggagaaggactagtccaagtcagccatggtaactccgcccctctgtcagcgattggctgagacctgagtacaggactcaagcctggccaatgaagggaagacaccactgggatgctgagaaaggctttcttcccttgataccacagccccacaggagaacctgccttccaggaagacacttgsatgcccagaactgctgcagccaccttatgactatgaggagctggggctgggtgtggtggagctcctgagttaaccagccctgcagctagccggactacttttcaaggagatcaattccttgctgtttaagtcactctgggttcattattctctttcttgcagccaaatgcattctaaa

SEQ ID NO: 42974 - DNA, 764 bp, Homo sapiens
tgccccagtccatagaattggaggcgtgtcaactgtgaagcctcatttccctgaccatccaatgggcagctaggctaaacttaaatttaggctctccttctcctgggaatttgagtcttgagtagatattctccaggagtgaaggcagagttatcccacagcagccccctatagagacattccgtgggttcctgagatgttcagattcrccctggtcctatccttcagttccaggagacaccagaattccaacaaggcagagatgccagtacctagtctccctttttccttagagaaacaagatggagtttactgtgtgtgtaaatgtacccccagctttaaaggcactaactcctctgggagatgcactttgtctattctctttcctttttttacctggaataccgatgtgacggttggatctacagtgattgtattgcagctgtaaagtgaacttgaggatggaaaccagccctgaagatggtggagagaaaggtagatggagcctggttcctaaggagtttatgaaactgccataccagccctgcaccgcctgccttctggctttaggagagagggaaaaaaaagtcttccatcctacataggctaatatgattacgggtctcagtcattagcagccagaatgaatcctaagcaatacacccattcttttgcttaaattagaatcagtaactttgcttctaattacagatgagtccgtttccttggaattaaaggaagtgtaactaggagcccaaggggca

SEQ ID NO: 42975 - DNA, 777 bp, Homo sapiens
tgccccagaaactgagttttagatgcagggatcctcttgatcttaaatggcgtcctctagggaaaatgtggtggttctcagctgcttcagcgcaagctctccaagcccgtctactcagcatgaaaatctaggaggggtgagctgaagaactgtcctcatctccagcaaagtccttatagtggaaggacgcatccttgaatggatgacatctccttaccaaacacagtgccccagtgcatatacatggatgtagcatcaaagtacagacagcaagcaaaaaacacgaagagaaatgtgcacaacacaagtctgccaaatctctctcaatcatacaggttaaggggaacaaaaaaataagtatcctggattggaatatggattgaaaaaatattgctttggaggagaatattgggaaaactggtgaaatgtgaataaagataatattaaatatatttgatattatataatggcattgtatcagtattcaatttcctgaattaaatatttgctctttggtttacagagatggttcttgttcttaggagacacatggtagagaatctgggggtgaagggtcattatatctgcaacttactctcaaatggttcacacacacacrcagacatatacacatccacacacatctacatatacacatacacacattcacatacatatatatacacacaatccacatatccacacatagacatccacacacgtgcacatccacatacacatattcacatccacacacacacacacctccacatatac

SEQ ID NO: 42976 - DNA, 1387 bp, Homo sapiens
gtgcatcttaaaatcacacggagaggataaaaagaaaaccctttgtggtgacacaacaatgtccaccatgtccctcctcctttcgaggacacgggttgattctgggcatgtcctctctcccctgcagctgtggctggaagtccagggcactgacgcccccagagtacggccctcactgcacgtggagggaggcgggtgtgcaatgcgccagcagccttgtggctcacggggacactgccgggcgcaggtcctggactgtttccccagtccccagcagtctgagctcccaatgcctgcagaggtgacgtgttgacacacccagtatctatggggatgccttcccttcccacacccactccagggttcctgggtcatgtcccaaatagacgacttgcccttgaatctgactcagggtctgcttctggggaggccaaactgagaccccaactgagcgagaatctaggtgtagagcctcaggaacgggtttcacctcctcgaatgtctggcaggacatgaaagcccggctggacccgacactggccctggttgcgaaggactttcccatgcaccaagggcacaatgtcagcaccccggccccgcccactgcttgtcagtgatgaccaagtatgttcccacaattcttagaacttgcccggggtcaggaccacccatcctgagaattcccacagctgatccctccagacaaggactgtgggatccacaacccggacagccgcctgggagctctggtctgtgtggaacagaggctgactgcccctgtcccttcccgtttccatctgtgcggccacctgtcctccctatttcaggcaggaggggaaactcctttgtctcccacctttgccctcactgtgatgcctcgggtgccttccttggagggtgcagtgcaccgttcagaggtcatgagcgctggcatgggcggaaccactcccagatgggttttatttcattcacggaaatggcccccaagtgtactgaaaagtggaatctgtagtcaaaatgtttaaataaggagactttacatttaaagaactgcatttccaatttctcttgagtaatcacaagttgtgggaacacaggtgacatttgcccttggtagggaatccctgagctgagctgcagctgcccctccacacagggcctgtgctccccactttgccacaatccccactcctccctgttgtccccactcctggcctgtttcactcactcacaccccctgcctygctcctgtgagtttgtgtccctgccagactggggactccacactgaggctgaggtcaccccactctctcccaacgttgcagagctgttacaaggacaaatgagatcatgagtataaagtgcctggaacgtagatgagcaatac

SEQ ID NO: 42977 - DNA, 574 bp, Homo sapiens
ggtccaaaccaacacagagggagatgctttggtaaaggacagaagccttactggcacaatatgtttaaacataacctcttatttatcattagccggtcaccaaactatactgacctaggagtgacttctagaaagccaagcttaaaaataaaaattgaggaaaaagtaaaaaacagaagacaactaaccagagacatcagtggtcatacactattgagaagactatagaaatagtccaggcaagtctgtaaacaaacagcaaccacaataatctgggaggtgtcaggagtcagaatctcgagttgttatattatggaaaatgtacaatttcaacaaaagttttcgagccatgcaaagaaacagactgaaaaaaagcctaggggactataaaggagactaaaatgacaagacaatacaatgcaaaacataattcytaaaatgattctgtatttaaaatacaacagctataaagaacactatgggagagtgaagaaattttaatataggctacatagtagataacagtatagtcaatgttaaatttctgaaaagtgataactacattgtggttatt

SEQ ID NO: 42978 - DNA, 590 bp, Homo sapiens
ttctatttttataaatttgatattttgttctaaacctcctgtagatgaaaagtaccatttcacaagtgagacaggtaataggcttctctaagtagctatattcaggatttcactataggaactctacctttttacatgttctgtaaattttggttcattgtctgaaaagggttgttctattcaagatatactcttattaaaatgtattggttctgtatttgccacagtgcagtttactacatggtatcttataatttactcttatttggaattatayaaaatgattttcaggggtatgaaatagtgttaattaaagctatttttaaagtattttggttaagttgaaagatacgcacttttaaaaatacatatgactgtaggtgttcatcttttgaagcaatctgaaaaattatggataatctcttatgtacctggaattaaaacaaatgccacaagcatgtataacaaatgtaatactaaacagaaaagtttctatccccatacctccagtctgaataatatatgccacctttacatttgaatttttaatactttattttcttatctgaggaccatccctcccctccttc

SEQ ID NO: 42979 - DNA, 570 bp, Homo sapiens
tgtgtgtttttccccagtactattattggcaacacagataatgttctttgcttagagaaaaccagataatgaagtggttaaacaacaagattgatttgcaagccattattttagctagacactggttttgccaggtaagaaacataattstttgatgttcccctggccttttacttgatgtccctttttaacaagacaattctaccactggggttttttaaatgtctagatttctttcaaacaaaaattaaagagcaagaatcattactgtataaatttttcccagaggagaaaatttaatttttccttatatttccaggattatgcgttgttcatatatatatatatttttttctacatttatttttctttctttttttaacttttgttttaggtttggtggtacatttgaaggtttgtacataagtaaactctctttctttttttttttttttttttgagagagagtcttgccctgtcgcccagtctggagtgcagtgacgcaatctcagctcactgcaacctccgcctttcaggttcaagccattcttctgtctcagcctcctgagt

SEQ ID NO: 42980 - DNA, 539 bp, Homo sapiens
tgcwactcaacaagattagagtttgtcctaatgtatatctgaacatttggaggcagtgggtttacaatgtaaaactttgaagctcttttattttgtttactctttgagacagggtctccttctttcacccagactggggtacagtggcatggttacagctcgctgcagcctccatcttatggaatcaagtgatcctcctacctcagccacctgagtagctgggactacaggtgcgtgccaccacaccaggctaatttttaaaatttttttgtagagacaagatttcactattttgcccaggctggtcttgaactcctgagctcaagtgatcctcctaccttggcttctcaaaatgctaggattccaggtgtgagccaccacagctagcctgaaactcttttgtttaaacctgaaaacacgaagaagagagacttcttccatgttacagcataaccatacgaaatagtgaaatttagagtcagaaacaacaggatttgaatgccacagtcccttactgctctcatgaccttcagcaaatg

SEQ ID NO: 42981 - DNA, 539 bp, Homo sapiens
tgctactcaacaagattagagtttgtcctaatgtatatctgaacatttggaggcagtgggtttacaatgtaaaactttgaagctcttttattttgtttactctttgagacagggtctccttctttcacccagactggggtacagtggcatggttacagctcgctgcagcctccatcttatggaatcaagtgatcctcctacctcagccacctgagtagctgggactacaggtgcgtgccaccacaccaggctaatttttaaaatttttttgtagagacaagatttcactattttgcccaggctggtcttgaactcctsagctcaagtgatcctcctaccttggcttctcaaaatgctaggattccaggtgtgagccaccacagctagcctgaaactcttttgtttaaacctgaaaacacgaagaagagagacttcttccatgttacagcataaccatacgaaatagtgaaatttagagtcagaaacaacaggatttgaatgccacagtcccttactgctctcatgaccttcagcaaatg

SEQ ID NO: 42982 - DNA, 539 bp, Homo sapiens
tgctactcaacaagattagagtttgtcctaatgtatatctgaacatttggaggcagtgggtttacaatgtaaaactttgaagctcttttattttgtttactctttgagacagggtctccttctttcacccagactggggtacagtggcatggttacagctcgctgcagcctccatcttatggaatcaagtgatcctcctacctcagccacctgagtagctgggactacaggtgcgtgccaccacaccaggctaatttttaaaatttttttgtagagacaagatttcactattttgcccaggctggtcttgaactcctgagctcaagtgatcctcctaccttggcttctcaaaatgctaggattccaggtgtgagccaccacagctagcctgaaactcttttgtttaaacctgaaaacaygaagaagagagacttcttccatgttacagcataaccatacgaaatagtgaaatttagagtcagaaacaacaggatttgaatgccacagtcccttactgctctcatgaccttcagcaaatg

SEQ ID NO: 42983 - DNA, 539 bp, Homo sapiens
tgctactcaacaagattagagtttgtcctaatgtatatctgaacatttggaggcagtgggtttacaatgtaaaactttgaagctcttttattttgtttactctttgagacagggtctccttctttcacccagactggggtacagtggcatggttacagctcgctgcagcctccatcttatggaatcaagtgatcctcctacctcagccacctgagtagctgggactacaggtgcgtgccaccacaccaggctaatttttaaaatttttttgtagagacaagatttcactattttgcccaggctggtcttgaactcctgagctcaagtgatcctcctaccttggcttctcaaaatgctaggattccaggtgtgagccaccacagctagcctgaaactcttttgtttaaacctgaaaacacgaagaagagagacttcttccatgttacagcataaccataygaaatagtgaaatttagagtcagaaacaacaggatttgaatgccacagtcccttactgctctcatgaccttcagcaaatg

SEQ ID NO: 42984 - DNA, 1992 bp, Homo sapiens
aatgctggtggtttttcttcttggttttataagccacagcctctcagtgaagtggcttttttacttccttctcacactcaatatctggggatttaatgtcagaagtgggttaacattttattaattacatttgatctcatggccatgaacttgggtatttgctcacctctaacaaggaaaatgtggtcgttgccttagaacatgagatcctttctgaataaattgcraaagtcttttcaacagcctacttgttctttttacataggagcttagctttggaattacgtgaaagccacgctaaccagctacctgctttgtgtactgtcctaacaatttggcctttgattttatgcttctttcaaaagcatacaagcaataggcaaacattattcatcaaactggtttgatgacattcttttgaatttagctttttttattctcctatggcacagtcacatctattctcaaggctatgatgacccacgtgtgctgaggcctctgggcagaagtgccacattagagctttcattggacagatcaagagctccagagttcctgctggctgcctaaagaaagatatttagcattttctctgcgattgcctccttcccttgccacagttttctcagagttgtcttagaggaagtattcatctatatctctgttaagagctttgatgcataaggaccccgcttgcaggggctgtgaggctgcatctggcagatgtgttgatgtataactagcaaaatgatttaagttcaatctgatcaatactgtggttagtattagcctcacactcctcctgtgcatccttcaccaagcccacagtttctgcccagccatggtccttgaatctatactgcctgatgtggacacttgtgttaagaatagctaccctcaaaggtactcgcactgtcacattttgaacttctctgccctttcttcctttcctccctccccactcaatccccaacttcacatacccagaaatcctagaagcttcctcccagtaatctccttggaagaagctgaccaggctcaggggaaataaagtagtagagaagtccatattggcctcttcctgtggtttcagctctaaaagggaaacaaaagccctagttggagactgaccagctgtttacccacttcacacacatggtaaatgttctctgctgataattcttgtttccatttgactaagtgagaatccttatgtctagggataaagtgactgactccaatgggaggtcactttcagaagaaacagaaatagatggattccacagcactaaccaatgctaatattgggtgtgttaaaaataaacatgtgttttccctcagtgaaatacaacttccccaaccatttcttttttcctttctctttctcaatatttcattaatgcaaacttttcctaactcaaaaggtattcctgcatacagattggtttccactaagagaagtatgttttgataaaatttacgcaaagtgagcaccataaacatagcagcataacatcacctatggtcatgctgagattgtaaccagtgaggtaaatctgagccaaagacagctttatatcttttagtggctttattccctttcaattcagtggcttgctgaaatagctgtaataattaaacagagaacttctaagctatctagattatataaagataggtgctaaaagtcacactagagtgggaaaagttttgtgtggcaatatggctaggttactaaactgccttatacagaacctaatgcaattagtacttctgaccatagactttccactcctttttaaaacagtaatactagcaaagaagcaatagaaaacaaagagatcacaatggtaaactcagaggttcagatatttgctctgtcgcttacagtttatatgaacttggacaggtaattgaacatttctgtgttactttattcatctataaacatgaatattagtaatacttttctctcaggcctgctttgaggat

SEQ ID NO: 42985 - DNA, 476 bp, Homo sapiens
cccacattatggagggtaatctgctttactcaaaatctatctcatccaaaaaacatctttgcrgaaacatccagaataatgtaccaaatatctgggcactgtggcccagataagtagacacgtaaaattagccatcacaagggagttgtgggtctcattgtgaactggaaagatgttgccgaaaaggatccactatcttatctcagtgggtggagtttccagagagttagagattacatctggatttttgttgttgctgttgttgtttttgagacagggtcttgctctgtcacccatgctaaagtgcaatggtgcaatcatggctcactgcagccttgacctcctgtgctcaggtgatcctcccacctcagtctcctgagtagctgggactacagtcgtgcaccaccacgcctgactaatttctgtatttttcacagagacaggggtttcaccatgataactaggctggtctcaaa

SEQ ID NO: 42986 - DNA, 794 bp, Homo sapiens
aggaggaagggtgcagatggcaggaaagtgaaatgccaagaagtgtttaatgtctgtgtctcctactagtcacaggtctccttgagagcaaggatatagaaattttaaaagctaacacaccgctggagaagcagacaggcagaaggtgatgccaacactgcatggcctatgccaggaggattgatccatttattwactcacttaacaaccttttcttgagaactcgtgagatgttggaaatgctctaatgaataagatggtcgaggtacctactcttatggagcttccattctggcaggggaaaccaaatgtaacccaatgaaccaactcagataatataagatgataacaaatgctggaacagcaataaaaaggagtaacaaggtcgggtgtggtgacttatgcctgcaatccctgcattttgggaggccgaggcaggaggatcatttgaagccagaagttcaagaccagcctgggcaacaaagtgaaagcctatgtctacaaaaaaattttttaattagccaagcatggtggcatgtgccagcagtcccagatactcaggaggctgaggcaggagaatcacttgagcctaggctgcagtgagctatgcacacagtttaaaagaaaaaaaaagtaacaacataaacagtgatggagtgaggtgggggctgttctagaaagagtgggcaaggaaaggcttccctgggggtgtcatttgagcagaaacttgactaaagtagggagcacatccatctgagggaagttatatggtctgtttttgtttcttaaaacat

SEQ ID NO: 42987 - DNA, 559 bp, Homo sapiens
gagacagctgcaaagaagcagataagctaagctaagggaacattagatgacacaaagggtgtcccacatagggaccggggaggcttcctgaaaaggagcaatgccattagaggagaggagctgaagctcggaagcgagctggtgtagatgaggttgatggcagtactgggaggaaaggggatagctttctctgggctggtgagctcacaggattggcatgttgagctaatgacattagggtcagagcctctacttgaggccaaggttttacataaccatctgtcttgggtcattttactgcaaactgtcttagcaacagaggattggtatgaacagccaacataaagaagggagactagaagagttctgctctccgtatctgagttcctaagctataaacccccaacatagcaaagccattctatcccctgcagtaaaaactagatcaatcaacccaaagratatgtctcaatccctgaagggtctagattcttagggtcttcacaagtaccttaacacttagctctagccagacgtggtggctcacgcctataatccc

SEQ ID NO: 42988 - DNA, 531 bp, Homo sapiens
ccactcctaggaatctacccaagagaaatgaaaacatgtccatacaaaaatttgtacatgaatgttcataacagcattactcacaatagccaaaaagtggatacaatccaatgtctatcaactgatgaataaacaaactgtaccatatccatgcaataggatattactcagcaataaaagaactgaattacttacatatgctacaatatgggtgagtcccawaaacataagtgtcacaaaagtccacatattgtgatcatttatatgaaatatcagaaaaggtaaatcttttttatctttttttttgctagacttttaaaagcaaaaatcttggttttactcatcaattctactttttgtttgtttttaaatcccttacttttgtttttatctctactagtatttctactttgttttggttaattttgttttttcttacttttgagtgaaaatgaattaatttggtttagtttcaaatttctaaatttccagttgctttttggagggttctgtcttaatttaaaatatgaa

SEQ ID NO: 42989 - DNA, 628 bp, Homo sapiens
tactagaatgatttctattcctttgggtatatacccagtaatgggattgctgggtcaaatggtatttctggttctagatccttgaggaattgccatactgtcttccacaatggttaaactaatttacattcccaccaacagtgtaaaagcgtttctakctctccacagcctcactagcatctattgtttcctgactttttaataattgccattctgactggcatgaggtggtacctcattgtggttttgatttgcatttttctgattatctgtgatgttgacctgtctgatctgaaatatttctacaagaccctttggaatgctgtgtggaaaatgaatgggtatggtgggagggtaggagtggaggtgtagcaccaattagaaggttggggtcaacatagatgcgtaacaggctgtgactaaggggggtgaattggaatccatgttgaaggtagaagtaatagaacttatgaatgatttttaactctggaatcggagaagagtagcgagagaaggagagaaagccacttgttttctatgtatgccctgtatatcaggtagaataaattgatcttctttgtccttcattcttagttgcctatattggcatcatcggtggttagcctct

SEQ ID NO: 42990 - DNA, 734 bp, Homo sapiens
cacggcaataaatagccttcggcatttgcatttttgccagtgtatcccaggagtcaggttttagaagctgaattatcttccatcagatttttaccattttgcattccaaccttcaacatacaagcgtgcctattttcacttagccttgctaagagactgcactgtcacactctcaaatttttgccaatccaaagatgaggattgtakgtcattgtatctttaatttgcatctcttattgtgaatgaaatcaagcaccttttttgagttgtttacatttttcccaataaactatagcatttgtggtaattgtatttatttttagaagttcattgaatttggggaatattttgtgatatcactttgtgatacaagtatttcattctattatgattgagttttttactttgctcttttggtgttttcaccatacaaaagagtgaaaaaaccaattatctatgtttttcctttgttgcctctagatattgaatttgtaaagcttttctcattctaggtaacatagtaatatgttctcttctagaactcatataacttatgattacatttaaatctttgattgattttaagttaatcttggcatgtggtatgagaaatggacacaattttattctttttcatagagctatccagttatcttagcactccctgatataatgttcattattcctcatagattggagatttcacctctatcatacagcaaatttttatatgc

SEQ ID NO: 42991 - DNA, 735 bp, Homo sapiens
tttcggcagctctctgatgcccttcagtagggttttcattacaggcaggagtagtgtttggctgcaaactccttacagccaaggacttctgacagcaaacccagggcttttcccaggattgtcacagctgtgaggtagttggtgggcggcaggagcgcaggtgcaaagggtggaggtggtgtggtgacagcagagtggagaaggtgtggccggtcacatttgtagctggctgggactcagatcttggcagcaatatctgacctgggaacaagacaagcaggcccctctgaacaataggcagttggcaatggctgtttcctgcacacctacctttcctttttggttactgtattgaaactcactctgaggccatctgaaactgcgcaagggctggagrtttgtcctgagcacaaacaaattaatgtaataatttttaaacttttgcccacctttactcagccatctctatcagtaaattcacactcactgcttcttcacttgtcctggtgatcctgctcctggctgtgagtcagacagggatattagtgggaatggggatggtcatatatccaaggacaaaggcaggcaggcttcaatctgggggctccttggtcattttttgtgccacttactttgcaccttgggcatattttattgctgtcaggaccaggcttccatccctcagatttcaaaagctctcatttctctcctcttcaccagaagcgtccgctcagg

SEQ ID NO: 42992 - DNA, 518 bp, Homo sapiens
ggacctctgtgaagaatgcaggctcccagccagcgacctgccagcacgttgccaagctgtgaggaacagccacggtgcagatgatgctgattggaagggatggggcagagctgtgcctgctcccgagcactcacacgagtgactgaatcctttgccacagttgcccaggggcacctttcccacaaacccacagagaagtgggcatagctgtggctgaagctcagagtggagctgccaggttgagctgtgacatgataactgaattatttaccaaatcctggggagaagagaagaagcagaagtagtgacagcagcaagcagaggaaagggagctattttccaagattaccattttaagagaaatttcttacttatggttcataagtcttttatgacaaatttgacaactaaaaaaaaatgtcgacctggaatctttttttaaacytaatcttatcctaactgctcgttacctcaccatatttaataataattgaaaccaccatttactcggcatttac

SEQ ID NO: 42993 - DNA, 589 bp, Homo sapiens
gcctgggtaacaaagggagactctgtctcaaaaaaaaattagtaaatataaataaataaagcaaagtgtattcacaatcaaaattatttactaattcatttcaattcaataaacaaattaatccacaatacatactacatgaaagggagtgtgataagtcccagaggtcaaagataaagacatgatatttgctctaacagtatatattgtctttcaggagagacacttaggatttcaagacaatgtgatatgtactgctgaaaaatagacctcaggaaaaatacttaattagctaaatttagccattttctaatgtatattttcaaaatatcattaaaaaaacatatatataatttctatttgccaattaaaaacaaataacacttaacactatgcaaggcccaccccaggtattctgagcacacactaaggttgtaggttaagaatggmtttccggccaggcgcaggggctcacacctgtaatcccagcactttgggaggccgaggtgggtggatcacctgaggtcaggagttcgggaccagcctggccaacatagtgaaaccccatctctctaaaaatacaaaaatt

SEQ ID NO: 42994 - DNA, 608 bp, Homo sapiens
gcatggatccattaaacagaaaggcaagtagaaacatccagtttgctgcagcaagggaatccagaaattataactgaagtgagaaaagctgtacatgccacttcttagctcccccttaaggacttctgttgagccttaagtcctgaagaatttcatggattagaaacaaaaataaatatttcttactgtggaggtctggatgagaattaaccatgggactgcttcmtcttccccctacttaaactaaaatgtaggtcccttcaggggaggtagacatggaaacacatgaagcagtaattaccacaaaaaaattcctaacatctacacaaaaaaactattgtcattaacgcagtgtaatataacacttccaagaaaatctttggttgattcataattagttcaagaaagaaaactaagtattccaggttatttgctacccgaaggtaaacaagtaatggacactataaaatacaatataacagaatcccacaagtgacctgctttttttgtttgtttatttgtttgttttttgtgacaaagtcttactctgtcgcccaggctggagtgcagtggcgtgatctcagctcactgcaatctctgcctcccag

SEQ ID NO: 42995 - DNA, 1288 bp, Homo sapiens
gtttttttcttgtaaatttgtttgagttcattgtagattctggatattagccctttgtcagatgagtagrttgcgaaaattttctcccattttgtaggttgcctgttcactctgatggtagtttcttttgctgtgcagaagctctttagtttaattagatcccatttgtcaattttggcttttgttgccattgcttttggtgttttagacatgaagtcttaaaagttttagttgtatccaccctatttcaggttattttggttggtgtctcataggtataggacatgtgaatggttcttttaatttttttctggggttttttttagagaaaacttggaagataaactccttcttgatatatatatgtatattttctttagcagcttgttatcactggaatcaaagggaaaatgatctcgttttgtattagttgtatttgtatgtcaaaaaagacactttgttaaaaaaaattaatgtggattgaaagtactattttttaagtagaaggccgggcatggtggctcacacctataatctcagcactttaggaggccaaggcaggtggattgcttgagtccaggagtttgagaccagcctgggcaacatgacaaaatcccgtctctactgaaaacacaaaaattggcatggtgttgcacatctgtagttccagctacttgggaggctaagatgggagaaccacttgggcctgggaggtaggcagtgagccgagattgcaccactgcattccagcctgggtgacagagtgagactccatttcgaaaaagaaaaagaaaaaaaaaaaagggtggttgagtctctactgaacatgtacagactttttttcttgtcccttttttcttatctcctaaacaatacagtataacaactatttacaaagcatttagattctattagatcttaaaactaatctaggagatgatttaaagtatgtaggaggattgcatgggttgtatgcaaaggttttatgcaaatatgataccattttatatcaggaacctgagcattcatgtattttagtatccacaggggtcctagaaccaataacccatggatactgaggaacgaatgtaatgtataattatatgtataagaattgctaagaggagtcatcttagctgttatcatttggctacttattaataattttataaatcacaagattagatttttccaagcttagcaaataaacttgatttacactaatctgcttttggggataaagaatgatctttggcaaggttttagacatgtgtaccagggaccttca

SEQ ID NO: 42996 - DNA, 1043 bp, Homo sapiens
tacagaccctacctcaacaattataattaaaaatgctaaagtctcgagtaagcaaaaccaggaaaatagccttcacgtagatttcgtatcttagtactttgtatttctgtctgtctgagagaactacacattactaaaatagaggtaaaaaatataaaaaaagaagtgaccatacaattacagaaggtggtattaatatcagggaggaggcctgatacagtgaaggccagaaaaattaaaggtcaagaagaaccatctaatatatcatttggtcgagttttgagcataatggaaatggcttatcctttaagaactctgattctgtccgatttttgctttcagttgtttctgagctctaccatgtgctcttcctctgccctgagtgtagcttagttaggctacagagagtgtagaataagctgtgactgcaaactatgtggtaaatctttgacagaatcagtcttaagcttttctgttaactgttttttataggtggttatgttgttgttaatctgcaataaacattattcttgacatagacatatgggttttgcttattttatatatgtgtgcaaagttaacttcagtttcatcctccctcctttcctccctcccttccccctcccctccctccctcccttcctccctccctcccttcctccctcccttcctaccttcgtccttccttccttccttccttcctctcttccttccttctcccattctkcttattttttctcttctgcacattttgctggagaatctgttcatgtaccctgctttcccacagttgctttcagacttttttttttttgagacagcgtctctctctttctctctctgttacccagactcaagtgcagtgatactgtctcagctcactacagcctcaacctcctaagctcaagtgatcctcctacttcagcctcccaagtagctgagactacatgcacataccaccacacctggctaatttttaaattttttgtagagatgaggtctcactatactgcctcagctggtctcgaactcctgggctcaag

SEQ ID NO: 42997 - DNA, 1043 bp, Homo sapiens
tacagaccctacctcaacaattataattaaaaatgctaaagtctcgagtaagcaaaaccaggaaaatagccttcacgtagatttcgtatcttagtactttgtatttctgtctgtctgagagaactacacattactaaaatagaggtaaaaaatataaaaaaagaagtgaccatacaattacagaaggtggtattaatatcagggaggaggcctgatacagtgaaggccagaaaaattaaaggtcaagaagaaccatctaatatatcatttggtcgagttttgagcataatggaaatggcttatcctttaagaactctgattctgtccgatttttgctttcagttgtttctgagctctaccatgtgctcttcctctgccctgagtgtagcttagttaggctacagagagtgtagaataagctgtgactgcaaactatgtggtaaatctttgacagaatcagtcttaagcttttctgttaactgttttttataggtggttatgttgttgttaatctgcaataaacattattcttgacatagacatatgggttttgcttattttatatatgtgtgcaaagttaacttcagtttcatcctccctcctttcctccctcccttccccctcccctccctccctcccttcctccctccctcccttcctccctcccttcctaccttcgtccttccttccttccttccttcctctcttccttccttctcccattcttcttattttttctcttctgcacattttgctggagaatctgttcatgtaccctgctttcccacagttgctttcagacttttttttttttgagacagcgtctctctctttctctctctgtyacccagactcaagtgcagtgatactgtctcagctcactacagcctcaacctcctaagctcaagtgatcctcctacttcagcctcccaagtagctgagactacatgcacataccaccacacctggctaatttttaaattttttgtagagatgaggtctcactatactgcctcagctggtctcgaactcctgggctcaag

SEQ ID NO: 42998 - DNA, 629 bp, Homo sapiens
atggcttctgtgaagtgacctccgagaagaatccaatcaatagtgttttcaaccacattaatctggactagacgatactgtgcccttagtctaatgcatcrattacttggttattgatagtaaagctaattgccatatatataaaaatatatatgaatatatataaatatatatgaatatataaatatataaatatatatacatatataaaaatatataaatatataaatatatacatatatataaaaatatatataaatatatttatatataaatatatatacatatatataaatatatatacacatatatataaatatatgtgtatatatatttagatggagtctcgctctgttgccaggttggagtgcagtggcgtgatcatggctcactgcaacctctgcctcctgggttcaaatgattcttgtgcctcagcctcctgagtagctgggattacaggcgtgcaccactacgcctggttaatttttgtattttttgtagagacgggtttcaccatactggtattgaattcctgacctcaagtgatctgcctgccttggcctcccagagtgctgggattacaggtgtgagccaccggtgccaggccgccaattatattttgagcatat

SEQ ID NO: 42999 - DNA, 1478 bp, Homo sapiens
cttgagatcttattgctcttattgcctgactaaggaggttctgggtagggagttcattttagatctgctttttttgtttgtttttgttctcatcaaaaactacctttgcaatctcatgtttctcttgggccctctttaatggcctaacttcttcaaagcatgattttcttttagttcctcaaggtggctttggagaaaagtctggcaactgtggagacccagaacccatctttgccttgagaatgcagagctgaaagagcagaaatgtctgagggatgggagattgaggaagacaaggagaagggcaaggtggtggttgagactgtggttgccaaagagggtctgagtgagagtagtcttcaggctgagttcagaaagctccagggaaaactgaagaatgcccacaatatcatcaacctcctcaagaacaacttgtgctgagtagcaaagaagggaatagtaaacttactccagagctccttgtgcatctgaccagcaccatcgacagaataaacacagaactggttggttctcctgggaagcaccaacaccaagaggaggggaatgtgactgtgaggccttgccccagaccccagagccttgaccttggggctaccttcacagtggatgcccaccaagtcaatgtaggcttagatggaatgaaaaaccactggagaagggctcgagatgacagtgtttactttaaaacgttctcccatgtgaatcaagaggtaccaagagaaaggtctctttgtaccacaaacaacagtaataatattcagcctacattcagcctttagaaagccttttacaatataaatatttcttgagtacttaatttttcagataacacactaggcattggcatggggcaataaaaccaatggctgcccttgagatacttaatatggtaaggaaagatggcacataaacaggtaattttaataggagggggtaactgctgtaacatagggatgcatcaggttatgaggcagcccagacaagtagtatgtaatgacatcccttccttatcaatgccatttttttttttttttttggtcacagctcatcacaggtgtctgttcctggacctcagatgggttattgggatcctgtttaggggaggagccatgctgaagattcagtaaaatggggaatacaggggattctgagagaatcgatggcacagaatgtgaggggagatgagtggagggttccaccccttctctttttgaccactgagaaaacgtttcctaagagctcctctgtagacttgattggcgctgtgctgtgtgctgtggatacagatatgaagaaaacattatcccagcactccaggagctccatcyggaaagcaagtcactgccaaatggcatgagaagtgctgtgacagacttgagtaaagtccacggggttcacaacgggccgtggtcatcactgcatgggggtggcctcggactgtcctgatccttgtcttg

SEQ ID NO: 43000 - DNA, 1478 bp, Homo sapiens
cttgagatcttattgctcttattgcctgactaaggaggttctgggtagggagttcattttagatctgctttttttgtttgtttttgttctcatcaaaaactacctttgcaatctcatgtttctcttgggccctctttaatggcctaacttcttcaaagcatgattttcttttagttcctcaaggtggctttggagaaaagtctggcaactgtggagacccagaacccatctttgccttgagaatgcagagctgaaagagcagaaatgtctgagggatgggagattgaggaagacaaggagaagggcaaggtggtggttgagactgtggttgccaaagagggtctgagtgagagtagtcttcaggctgagttcagaaagctccagggaaaactgaagaatgcccacaatatcatcaacctcctcaagaacaacttgtgctgagtagcaaagaagggaatagtaaacttactccagagctccttgtgcatctgaccagcaccatcgacagaataaacacagaactggttggttctcctgggaagcaccaacaccaagaggaggggaatgtgactgtgaggccttgccccagaccccagagccttgaccttggggctaccttcacagtggatgcccaccaagtcaatgtaggcttagatggaatgaaaaaccactggagaagggctcgagatgacagtgtttactttaaaacgttctcccatgtgaatcaagaggtaccaagagaaaggtctctttgtaccacaaacaacagtaataatattcagcctacattcagcctttagaaagccttttacaatataaatatttcttgagtacttaatttttcagataacacactaggcattggcatggggcaataaaaccaatggctgcccttgagatacttaatatggtaaggaaagatggcacataaacaggtaattttaataggagggggtaactgctgtaacatagggatgcatcaggttatgaggcagcccagacaagtagtatgtaatgacatcccttccttatcaatgccatttttttttttttttttggtcacagctcatcacaggtgtctgttcctggacctcagatgggttattgggatcctgtttaggggaggagccatgctgaagattcagtaaaatggggaatacaggggattctgagagaatcgatggcacagaatgtgaggggagatgagtggagggttccaccccttctctttttgaccactgagaaaacgtttcctaagagctcctctgtagacttgattggcgctgtgctgtgtgctgtggatacagatatgaagaaaacattatcccagcactccaggagctccatctggaaagcaagtcactgccaaawggcatgagaagtgctgtgacagacttgagtaaagtccacggggttcacaacgggccgtggtcatcactgcatgggggtggcctcggactgtcctgatccttgtcttg

SEQ ID NO: 43001 - DNA, 1478 bp, Homo sapiens
cttgagatcttattgctcttattgcctgactaaggaggttctgggtagggagttcattttagatctgctttttttgtttgtttttgttctcatcaaaaactacctttgcaatctcatgtttctcttgggccctctttaatggcctaacttcttcaaagcatgattttcttttagttcctcaaggtggctttggagaaaagtctggcaactgtggagacccagaacccatctttgccttgagaatgcagagctgaaagagcagaaatgtctgagggatgggagattgaggaagacaaggagaagggcaaggtggtggttgagactgtggttgccaaagagggtctgagtgagagtagtcttcaggctgagttcagaaagctccagggaaaactgaagaatgcccacaatatcatcaacctcctcaagaacaacttgtgctgagtagcaaagaagggaatagtaaacttactccagagctccttgtgcatctgaccagcaccatcgacagaataaacacagaactggttggttctcctgggaagcaccaacaccaagaggaggggaatgtgactgtgaggccttgccccagaccccagagccttgaccttggggctaccttcacagtggatgcccaccaagtcaatgtaggcttagatggaatgaaaaaccactggagaagggctcgagatgacagtgtttactttaaaacgttctcccatgtgaatcaagaggtaccaagagaaaggtctctttgtaccacaaacaacagtaataatattcagcctacattcagcctttagaaagccttttacaatataaatatttcttgagtacttaatttttcagataacacactaggcattggcatggggcaataaaaccaatggctgcccttgagatacttaatatggtaaggaaagatggcacataaacaggtaattttaataggagggggtaactgctgtaacatagggatgcatcaggttatgaggcagcccagacaagtagtatgtaatgacatcccttccttatcaatgccatttttttttttttttttggtcacagctcatcacaggtgtctgttcctggacctcagatgggttattgggatcctgtttaggggaggagccatgctgaagattcagtaaaatggggaatacaggggattctgagagaatcgatggcacagaatgtgaggggagatgagtggagggttccaccccttctctttttgaccactgagaaaacgtttcctaagagctcctctgtagacttgattggcgctgtgctgtgtgctgtggatacagatatgaagaaaacattatcccagcactccaggagctccatctggaaagcaagtcactgccaaatggcatgagaagtgctgtgacagacttgagtaaagtccacggggttcacaacgggccrtggtcatcactgcatgggggtggcctcggactgtcctgatccttgtcttg

SEQ ID NO: 43002 - DNA, 604 bp, Homo sapiens
tttagaggagaggctgcaagtcttgggaaagtggccctgcattcagagtcagacctcaggggctgtgaattctgactccacttcgttgtggttgaatcatcttgtcaacttccttgatgtgcccttgaggttccctttcttcatctctaaattttggaggatcagatgccagaaagtcaggagactgaagagtaaagatgtggaaatccctgtctagaccctggtactggggagagttttgtccttgggatggacctggctcctgccctgtaggcaatgaccacagcagcatgtccagccttccactgaggcaggcgtgtctgtcttttctcagaatatgaagagtgcaaagacctcataaaatctatgctgaggaatgagcgacagttcaaggaggagaagcttgcagagcagctcaagcaagctgaggagctcaggtgaggggaccccatgggggcaggygggggagcagctgtgtaaatctctgaagtacagcagctcggtggggagacgtaagagctaagctgggccaggggaagggcaggaattgccatggcaggctcgcaacacacaagtatttatcaagcagagaagaaggataata

SEQ ID NO: 43003 - DNA, 781 bp, Homo sapiens
aagggagaggtgtttgttatcttctcacccagcatgcaaaagatacagtaaaatcttttgaggatctcctaaggagcaatgacattgactactacctgggacagagcttccgggagcaactggcccggggaagccagctgacagagaggctcaccagcacactcagcaccagtaagttggccacagggctttggatactctcagtcaccccacagttccagcccctggtggccaccacatctccactgcaactttttaacgtagggtcctgtttctatttcatttcctggggctaatataggatcaagactgctcaatggggagcatggagaggaacacacagggctggagatgccatggttacaactctagaaacttcaccactcatggaatgtgacctgtggggcaggggagacatctctctggtgctaagagggagtaggggacatgacatggaagggccttgttataggaggaagagccgtgagctaagaattgcaagacatcgaggcgctgaggccaaagggtccgtgaggaaacaggcgcagctcrcgcccctcggcctacgggagggagggcaaggagggttctacggttcctgggaggacgagaagagccaagagccccgacggccggcgccggggaaaaggccccgaggcggggtccgcatccctggaagggcggcgtccaccctcctgagaggcacggggcgcccagggctcggaggctcaaagcccgccggctcctgcagcttctgggagccgaagagtgtcagccggga

SEQ ID NO: 43004 - DNA, 781 bp, Homo sapiens
aagggagaggtgtttgttatcttctcacccagcatgcaaaagatacagtaaaatcttttgaggatctcctaaggagcaatgacattgactactacctgggacagagcttccgggagcaactggcccggggaagccagctgacagagaggctcaccagcacactcagcaccagtaagttggccacagggctttggatactctcagtcaccccacagttccagcccctggtggccaccacatctccactgcaactttttaacgtagggtcctgtttctatttcatttcctggggctaatataggatcaagactgctcaatggggagcatggagaggaacacacagggctggagatgccatggttacaactctagaaacttcaccactcatggaatgtgacctgtggggcaggggagacatctctctggtgctaagagggagtaggggacatgacatggaagggccttgttataggaggaagagccgtgagctaagaattgcaagacatcgaggcgctgaggccaaagggtccgtgaggaaacaggcgcagctcacgcccctcggcctacgggagggagggcaaggagrgttctacggttcctgggaggacgagaagagccaagagccccgacggccggcgccggggaaaaggccccgaggcggggtccgcatccctggaagggcggcgtccaccctcctgagaggcacggggcgcccagggctcggaggctcaaagcccgccggctcctgcagcttctgggagccgaagagtgtcagccggga

SEQ ID NO: 43005 - DNA, 781 bp, Homo sapiens
aagggagaggtgtttgttatcttctcacccagcatgcaaaagatacagtaaaatcttttgaggatctcctaaggagcaatgacattgactactacctgggacagagcttccgggagcaactggcccggggaagccagctgacagagaggctcaccagcacactcagcaccagtaagttggccacagggctttggatactctcagtcaccccacagttccagcccctggtggccaccacatctccactgcaactttttaacgtagggtcctgtttctatttcatttcctggggctaatataggatcaagactgctcaatggggagcatggagaggaacacacagggctggagatgccatggttacaactctagaaacttcaccactcatggaatgtgacctgtggggcaggggagacatctctctggtgctaagagggagtaggggacatgacatggaagggccttgttataggaggaagagccgtgagctaagaattgcaagacatcgaggcgctgaggccaaagggtccgtgaggaaacaggcgcagctcacgcccctcggcctacgggagggagggcaaggagggtyctacggttcctgggaggacgagaagagccaagagccccgacggccggcgccggggaaaaggccccgaggcggggtccgcatccctggaagggcggcgtccaccctcctgagaggcacggggcgcccagggctcggaggctcaaagcccgccggctcctgcagcttctgggagccgaagagtgtcagccggga

SEQ ID NO: 43006 - DNA, 781 bp, Homo sapiens
aagggagaggtgtttgttatcttctcacccagcatgcaaaagatacagtaaaatcttttgaggatctcctaaggagcaatgacattgactactacctgggacagagcttccgggagcaactggcccggggaagccagctgacagagaggctcaccagcacactcagcaccagtaagttggccacagggctttggatactctcagtcaccccacagttccagcccctggtggccaccacatctccactgcaactttttaacgtagggtcctgtttctatttcatttcctggggctaatataggatcaagactgctcaatggggagcatggagaggaacacacagggctggagatgccatggttacaactctagaaacttcaccactcatggaatgtgacctgtggggcaggggagacatctctctggtgctaagagggagtaggggacatgacatggaagggccttgttataggaggaagagccgtgagctaagaattgcaagacatcgaggcgctgaggccaaagggtccgtgaggaaacaggcgcagctcacgcccctcggcctacgggagggagggcaaggagggttctacggttcctgggaggacgagaagagccaagagccccgacggccggcgccggggaaaaggccccgaggcggggtccgcatccctggaagggcggcgtccaccctcctgagaggcacggggcgcccagggctcggasgctcaaagcccgccggctcctgcagcttctgggagccgaagagtgtcagccggga

SEQ ID NO: 43007 - DNA, 1732 bp, Homo sapiens
gctgttttggttactgtagccttgtagtatcatttgaagtcaggtagcgtgatgcctccagctttgttcttttggcttaggattgacatggcgatgcgggctctcttttggttccatatgaactttaaagtagttttttccaattctgtgaagaaagtcattggtagcttgatggggatggcagggaatctataaattaccttgggcagtatgaccattttcacgatagtgattcttcctacccatgagcgtggaatgttcttccatttgtttgtatcctcttttattttgttgagcagtgttttgtagttctccttgaagaggtccttcacatcccttgtaagttggattcctaggtattttattctctttgaagcaattgtgaatgggagttcactmatgatttggctctctgtttgtctgttattggtgtataagaatgcttgtgatttttgcacaagaattttgtatcctgaggagtcatttttaaaataaatatattgcaaatgacttttcccagtcagtgaaaagtctgactgaaagctgtcaactgaaaaatcacacaatttataaatttagaagggagattttattttttataaagggttacagcctgcaaggtggccattctgacagacagggaggcataccctcttgctgctgaaacctgaaaagtacgtttccagggaggggaggggggaacagggatttatgttgatgtggtgggccacatatacatattcaacagggaataggaggagctctgaatattcatgaagggatcctgctgcatgcatgctgagtaaacatgcctgttacatgcaacccatgttcactttggggtggagacaacatttaaatacattataattaggccctatgcttcaaaaggggaagcagggacacaaaggcagtcaagtgcacagcctctgtaaaccgtccagaacccgtccacagccagtgctctcttatcaaggggaagttactgaaatcagtctcttgtccaatcaaagctgtagttatggcttgtgtagggagggctcagtcagtttatggtaatgggtgagctgcaagtgcttcagcattgcttatctcaaggccagtgcttgtttagctagagaaaaaaaggaagaagaaaaagacctgtggcaattagaacatagtttattctttaagttgaggggcgcatgactccaccttgcctggcgtggccttaggtctcgtttatcataccgtatcttcctactgcaaggagtctgttctgtcagtcttaggatctctattttaacaataatgctggtcagttgtgtctaaaccacaaagggagagagtataaggagaggtgtctgagattccaactactgggcaggaactcagtatttaagacttctctggggtctccttggccaagaagcagtctgtccagtggctttggattttaattttagttctcaaagcatttaattagatgaaattttgccatattttttcttttttttttttttttgagacggagtctcgctctgtcgcccaggccggactgcggactgcagtggcgcaatctcggctcactgcaagctccgcctcccgggttcacgccattctcctgcctcagcctcccgagtagctgggactacaggcgcccgccaccgcgcccggctaattttttgtatttttagtagagacggggtttcaccttgttagccaggatggtctcgatctcctgacctca

SEQ ID NO: 43008 - DNA, 1732 bp, Homo sapiens
gctgttttggttactgtagccttgtagtatcatttgaagtcaggtagcgtgatgcctccagctttgttcttttggcttaggattgacatggcgatgcgggctctcttttggttccatatgaactttaaagtagttttttccaattctgtgaagaaagtcattggtagcttgatggggatggcagggaatctataaattaccttgggcagtatgaccattttcacgatagtgattcttcctacccatgagcgtggaatgttcttccatttgtttgtatcctcttttattttgttgagcagtgttttgtagttctccttgaagaggtccttcacatcccttgtaagttggattcctaggtattttattctctttgaagcaattgtgaatgggagttcactaatgatttggctctctgtttgtctgttattggtgtataagaatgcttgtgatttttgcacaagaattttgtatcctgaggagtcatttttaaaataaatatattgcaaatgacttttcccagtcagtgaaaagtctgactgaaagctgtcaactgaaaaatcacacaatttataaatttagaagggagattttattttttataaagggttacagcctgcaaggtggccattctgacagacagggaggcataccctcttgctgctgaaacctgaaaagtacgtttccagggaggggaggggggaacagggatttatgttgatgtggtgggccacatatacatattcaacagggaataggaggagctctgaatattcatgaagggatcctgctgcatgcatgctgagtaaacatgcctgttacatgcaacccatgttcactttggggtggagacaacatttaaatacattataattaggccctatgcttcaaaaggggaagcagggacacaaaggcagtcaagtgcacagcctctgtaaaccgtccagaacccgtccacagccagtgctctcttatcaaggggaagttactgaaatcagtctcttgtccaatcaaagctgtagttatggcttgtgtagggagggctcagtcagtttatggtaatgggtgagctgcaagtgcttcagcattgcttatctcaaggccagtgcttgtttagctagagaaaaaaaggaagaagaaaaagacctgtggcaattagaacatagtttattctttaagttgaggggcgcatgactccaccttgcctggcgtggccttaggtctcgtttatcataccrtatcttcctactgcaaggagtctgttctgtcagtcttaggatctctattttaacaataatgctggtcagttgtgtctaaaccacaaagggagagagtataaggagaggtgtctgagattccaactactgggcaggaactcagtatttaagacttctctggggtctccttggccaagaagcagtctgtccagtggctttggattttaattttagttctcaaagcatttaattagatgaaattttgccatattttttcttttttttttttttttgagacggagtctcgctctgtcgcccaggccggactgcggactgcagtggcgcaatctcggctcactgcaagctccgcctcccgggttcacgccattctcctgcctcagcctcccgagtagctgggactacaggcgcccgccaccgcgcccggctaattttttgtatttttagtagagacggggtttcaccttgttagccaggatggtctcgatctcctgacctca

SEQ ID NO: 43009 - DNA, 1732 bp, Homo sapiens
gctgttttggttactgtagccttgtagtatcatttgaagtcaggtagcgtgatgcctccagctttgttcttttggcttaggattgacatggcgatgcgggctctcttttggttccatatgaactttaaagtagttttttccaattctgtgaagaaagtcattggtagcttgatggggatggcagggaatctataaattaccttgggcagtatgaccattttcacgatagtgattcttcctacccatgagcgtggaatgttcttccatttgtttgtatcctcttttattttgttgagcagtgttttgtagttctccttgaagaggtccttcacatcccttgtaagttggattcctaggtattttattctctttgaagcaattgtgaatgggagttcactaatgatttggctctctgtttgtctgttattggtgtataagaatgcttgtgatttttgcacaagaattttgtatcctgaggagtcatttttaaaataaatatattgcaaatgacttttcccagtcagtgaaaagtctgactgaaagctgtcaactgaaaaatcacacaatttataaatttagaagggagattttattttttataaagggttacagcctgcaaggtggccattctgacagacagggaggcataccctcttgctgctgaaacctgaaaagtacgtttccagggaggggaggggggaacagggatttatgttgatgtggtgggccacatatacatattcaacagggaataggaggagctctgaatattcatgaagggatcctgctgcatgcatgctgagtaaacatgcctgttacatgcaacccatgttcactttggggtggagacaacatttaaatacattataattaggccctatgcttcaaaaggggaagcagggacacaaaggcagtcaagtgcacagcctctgtaaaccgtccagaacccgtccacagccagtgctctcttatcaaggggaagttactgaaatcagtctcttgtccaatcaaagctgtagttatggcttgtgtagggagggctcagtcagtttatggtaatgggtgagctgcaagtgcttcagcattgcttatctcaaggccagtgcttgtttagctagagaaaaaaaggaagaagaaaaagacctgtggcaattagaacatagtttattctttaagttgaggggcgcatgactccaccttgcctggcgtggccttaggtctcgtttatcataccgtatcttmctactgcaaggagtctgttctgtcagtcttaggatctctattttaacaataatgctggtcagttgtgtctaaaccacaaagggagagagtataaggagaggtgtctgagattccaactactgggcaggaactcagtatttaagacttctctggggtctccttggccaagaagcagtctgtccagtggctttggattttaattttagttctcaaagcatttaattagatgaaattttgccatattttttcttttttttttttttttgagacggagtctcgctctgtcgcccaggccggactgcggactgcagtggcgcaatctcggctcactgcaagctccgcctcccgggttcacgccattctcctgcctcagcctcccgagtagctgggactacaggcgcccgccaccgcgcccggctaattttttgtatttttagtagagacggggtttcaccttgttagccaggatggtctcgatctcctgacctca

SEQ ID NO: 43010 - DNA, 1732 bp, Homo sapiens
gctgttttggttactgtagccttgtagtatcatttgaagtcaggtagcgtgatgcctccagctttgttcttttggcttaggattgacatggcgatgcgggctctcttttggttccatatgaactttaaagtagttttttccaattctgtgaagaaagtcattggtagcttgatggggatggcagggaatctataaattaccttgggcagtatgaccattttcacgatagtgattcttcctacccatgagcgtggaatgttcttccatttgtttgtatcctcttttattttgttgagcagtgttttgtagttctccttgaagaggtccttcacatcccttgtaagttggattcctaggtattttattctctttgaagcaattgtgaatgggagttcactaatgatttggctctctgtttgtctgttattggtgtataagaatgcttgtgatttttgcacaagaattttgtatcctgaggagtcatttttaaaataaatatattgcaaatgacttttcccagtcagtgaaaagtctgactgaaagctgtcaactgaaaaatcacacaatttataaatttagaagggagattttattttttataaagggttacagcctgcaaggtggccattctgacagacagggaggcataccctcttgctgctgaaacctgaaaagtacgtttccagggaggggaggggggaacagggatttatgttgatgtggtgggccacatatacatattcaacagggaataggaggagctctgaatattcatgaagggatcctgctgcatgcatgctgagtaaacatgcctgttacatgcaacccatgttcactttggggtggagacaacatttaaatacattataattaggccctatgcttcaaaaggggaagcagggacacaaaggcagtcaagtgcacagcctctgtaaaccgtccagaacccgtccacagccagtgctctcttatcaaggggaagttactgaaatcagtctcttgtccaatcaaagctgtagttatggcttgtgtagggagggctcagtcagtttatggtaatgggtgagctgcaagtgcttcagcattgcttatctcaaggccagtgcttgtttagctagagaaaaaaaggaagaagaaaaagacctgtggcaattagaacatagtttattctttaagttgaggggcgcatgactccaccttgcctggcgtggccttaggtctcgtttatcataccgtatcttcctactgcaaggagtctgttctgtcagtcttaggatctctattttaacaataatgctggtcagttgtgtctaaaccacraagggagagagtataaggagaggtgtctgagattccaactactgggcaggaactcagtatttaagacttctctggggtctccttggccaagaagcagtctgtccagtggctttggattttaattttagttctcaaagcatttaattagatgaaattttgccatattttttcttttttttttttttttgagacggagtctcgctctgtcgcccaggccggactgcggactgcagtggcgcaatctcggctcactgcaagctccgcctcccgggttcacgccattctcctgcctcagcctcccgagtagctgggactacaggcgcccgccaccgcgcccggctaattttttgtatttttagtagagacggggtttcaccttgttagccaggatggtctcgatctcctgacctca

SEQ ID NO: 43011 - DNA, 1732 bp, Homo sapiens
gctgttttggttactgtagccttgtagtatcatttgaagtcaggtagcgtgatgcctccagctttgttcttttggcttaggattgacatggcgatgcgggctctcttttggttccatatgaactttaaagtagttttttccaattctgtgaagaaagtcattggtagcttgatggggatggcagggaatctataaattaccttgggcagtatgaccattttcacgatagtgattcttcctacccatgagcgtggaatgttcttccatttgtttgtatcctcttttattttgttgagcagtgttttgtagttctccttgaagaggtccttcacatcccttgtaagttggattcctaggtattttattctctttgaagcaattgtgaatgggagttcactaatgatttggctctctgtttgtctgttattggtgtataagaatgcttgtgatttttgcacaagaattttgtatcctgaggagtcatttttaaaataaatatattgcaaatgacttttcccagtcagtgaaaagtctgactgaaagctgtcaactgaaaaatcacacaatttataaatttagaagggagattttattttttataaagggttacagcctgcaaggtggccattctgacagacagggaggcataccctcttgctgctgaaacctgaaaagtacgtttccagggaggggaggggggaacagggatttatgttgatgtggtgggccacatatacatattcaacagggaataggaggagctctgaatattcatgaagggatcctgctgcatgcatgctgagtaaacatgcctgttacatgcaacccatgttcactttggggtggagacaacatttaaatacattataattaggccctatgcttcaaaaggggaagcagggacacaaaggcagtcaagtgcacagcctctgtaaaccgtccagaacccgtccacagccagtgctctcttatcaaggggaagttactgaaatcagtctcttgtccaatcaaagctgtagttatggcttgtgtagggagggctcagtcagtttatggtaatgggtgagctgcaagtgcttcagcattgcttatctcaaggccagtgcttgtttagctagagaaaaaaaggaagaagaaaaagacctgtggcaattagaacatagtttattctttaagttgaggggcgcatgactccaccttgcctggcgtggccttaggtctcgtttatcataccgtatcttcctactgcaaggagtctgttctgtcagtcttaggatctctattttaacaataatgctggtcagttgtgtctaaaccacaaagggagagagtataaggagaggtgtctgagattccaactactgggcaggaactcagtatttaagacttctctggggtctccttggccaagaagcagtctgtccagtggctttggattttaattttagttctcaaagcatttaattwgatgaaattttgccatattttttcttttttttttttttttgagacggagtctcgctctgtcgcccaggccggactgcggactgcagtggcgcaatctcggctcactgcaagctccgcctcccgggttcacgccattctcctgcctcagcctcccgagtagctgggactacaggcgcccgccaccgcgcccggctaattttttgtatttttagtagagacggggtttcaccttgttagccaggatggtctcgatctcctgacctca

SEQ ID NO: 43012 - DNA, 1732 bp, Homo sapiens
gctgttttggttactgtagccttgtagtatcatttgaagtcaggtagcgtgatgcctccagctttgttcttttggcttaggattgacatggcgatgcgggctctcttttggttccatatgaactttaaagtagttttttccaattctgtgaagaaagtcattggtagcttgatggggatggcagggaatctataaattaccttgggcagtatgaccattttcacgatagtgattcttcctacccatgagcgtggaatgttcttccatttgtttgtatcctcttttattttgttgagcagtgttttgtagttctccttgaagaggtccttcacatcccttgtaagttggattcctaggtattttattctctttgaagcaattgtgaatgggagttcactaatgatttggctctctgtttgtctgttattggtgtataagaatgcttgtgatttttgcacaagaattttgtatcctgaggagtcatttttaaaataaatatattgcaaatgacttttcccagtcagtgaaaagtctgactgaaagctgtcaactgaaaaatcacacaatttataaatttagaagggagattttattttttataaagggttacagcctgcaaggtggccattctgacagacagggaggcataccctcttgctgctgaaacctgaaaagtacgtttccagggaggggaggggggaacagggatttatgttgatgtggtgggccacatatacatattcaacagggaataggaggagctctgaatattcatgaagggatcctgctgcatgcatgctgagtaaacatgcctgttacatgcaacccatgttcactttggggtggagacaacatttaaatacattataattaggccctatgcttcaaaaggggaagcagggacacaaaggcagtcaagtgcacagcctctgtaaaccgtccagaacccgtccacagccagtgctctcttatcaaggggaagttactgaaatcagtctcttgtccaatcaaagctgtagttatggcttgtgtagggagggctcagtcagtttatggtaatgggtgagctgcaagtgcttcagcattgcttatctcaaggccagtgcttgtttagctagagaaaaaaaggaagaagaaaaagacctgtggcaattagaacatagtttattctttaagttgaggggcgcatgactccaccttgcctggcgtggccttaggtctcgtttatcataccgtatcttcctactgcaaggagtctgttctgtcagtcttaggatctctattttaacaataatgctggtcagttgtgtctaaaccacaaagggagagagtataaggagaggtgtctgagattccaactactgggcaggaactcagtatttaagacttctctggggtctccttggccaagaagcagtctgtccagtggctttggattttaattttagttctcaaagcatttaattagatgaaattttgccatattttttctkttttttttttttttgagacggagtctcgctctgtcgcccaggccggactgcggactgcagtggcgcaatctcggctcactgcaagctccgcctcccgggttcacgccattctcctgcctcagcctcccgagtagctgggactacaggcgcccgccaccgcgcccggctaattttttgtatttttagtagagacggggtttcaccttgttagccaggatggtctcgatctcctgacctca

SEQ ID NO: 43013 - DNA, 1732 bp, Homo sapiens
gctgttttggttactgtagccttgtagtatcatttgaagtcaggtagcgtgatgcctccagctttgttcttttggcttaggattgacatggcgatgcgggctctcttttggttccatatgaactttaaagtagttttttccaattctgtgaagaaagtcattggtagcttgatggggatggcagggaatctataaattaccttgggcagtatgaccattttcacgatagtgattcttcctacccatgagcgtggaatgttcttccatttgtttgtatcctcttttattttgttgagcagtgttttgtagttctccttgaagaggtccttcacatcccttgtaagttggattcctaggtattttattctctttgaagcaattgtgaatgggagttcactaatgatttggctctctgtttgtctgttattggtgtataagaatgcttgtgatttttgcacaagaattttgtatcctgaggagtcatttttaaaataaatatattgcaaatgacttttcccagtcagtgaaaagtctgactgaaagctgtcaactgaaaaatcacacaatttataaatttagaagggagattttattttttataaagggttacagcctgcaaggtggccattctgacagacagggaggcataccctcttgctgctgaaacctgaaaagtacgtttccagggaggggaggggggaacagggatttatgttgatgtggtgggccacatatacatattcaacagggaataggaggagctctgaatattcatgaagggatcctgctgcatgcatgctgagtaaacatgcctgttacatgcaacccatgttcactttggggtggagacaacatttaaatacattataattaggccctatgcttcaaaaggggaagcagggacacaaaggcagtcaagtgcacagcctctgtaaaccgtccagaacccgtccacagccagtgctctcttatcaaggggaagttactgaaatcagtctcttgtccaatcaaagctgtagttatggcttgtgtagggagggctcagtcagtttatggtaatgggtgagctgcaagtgcttcagcattgcttatctcaaggccagtgcttgtttagctagagaaaaaaaggaagaagaaaaagacctgtggcaattagaacatagtttattctttaagttgaggggcgcatgactccaccttgcctggcgtggccttaggtctcgtttatcataccgtatcttcctactgcaaggagtctgttctgtcagtcttaggatctctattttaacaataatgctggtcagttgtgtctaaaccacaaagggagagagtataaggagaggtgtctgagattccaactactgggcaggaactcagtatttaagacttctctggggtctccttggccaagaagcagtctgtccagtggctttggattttaattttagttctcaaagcatttaattagatgaaattttgccatattttttctttwttttttttttttgagacggagtctcgctctgtcgcccaggccggactgcggactgcagtggcgcaatctcggctcactgcaagctccgcctcccgggttcacgccattctcctgcctcagcctcccgagtagctgggactacaggcgcccgccaccgcgcccggctaattttttgtatttttagtagagacggggtttcaccttgttagccaggatggtctcgatctcctgacctca

SEQ ID NO: 43014 - DNA, 596 bp, Homo sapiens
tggctccaagcctggcaggacaggccacccacggtcgtggccatggtgccccggtacccaaccccattgttcatgatgcaggtccgtatgtagtctgggagcaagagacagaagatcaacttgggctgaggtcccctgtctcccaccctgcccctctccacccccactcgcctttctcctggaagaggtcayagcgcccagaatgccgcagcctcgtgtggggtgagtgttgagtccatggcagcagttggcaaccatggctgctcacattgtagtggaacgccctggagagaagaaggcacaaggtaacgccacggcccaggctcccctgcccccagtcttatctatgcccagtggccactcaccggcagtccattaagggcccacagcgaccagcacactcttcagcatctgccacatcctcctgccaaggcccgggcaccaccgcttgtagcggcgctgtagctctgtgccccggagcacctagaagtcattcaatggcgagcgctgccctgcagagtgggtgcaggtcaggtgggcatacatgtcagtaatgtgtattggcatgtccacagtttgttcattcaggggatcaa

SEQ ID NO: 43015 - DNA, 596 bp, Homo sapiens
tggctccaagcctggcaggacaggccacccacggtcgtggccatggtgccccggtacccaaccccattgttcatgatgcaggtccgtatgtagtctgggagcaagagacagaagatcaacttgggctgaggtcccctgtctcccaccctgcccctctccacccccactcgcctttctcctggaagaggtcacagcgcccagaatgccgcagcctcgtgtggggygagtgttgagtccatggcagcagttggcaaccatggctgctcacattgtagtggaacgccctggagagaagaaggcacaaggtaacgccacggcccaggctcccctgcccccagtcttatctatgcccagtggccactcaccggcagtccattaagggcccacagcgaccagcacactcttcagcatctgccacatcctcctgccaaggcccgggcaccaccgcttgtagcggcgctgtagctctgtgccccggagcacctagaagtcattcaatggcgagcgctgccctgcagagtgggtgcaggtcaggtgggcatacatgtcagtaatgtgtattggcatgtccacagtttgttcattcaggggatcaa

SEQ ID NO: 43016 - DNA, 596 bp, Homo sapiens
tggctccaagcctggcaggacaggccacccacggtcgtggccatggtgccccggtacccaaccccattgttcatgatgcaggtccgtatgtagtctgggagcaagagacagaagatcaacttgggctgaggtcccctgtctcccaccctgcccctctccacccccactcgcctttctcctggaagaggtcacagcgcccagaatgccgcagcctcgtgtggggtgagtgttgagtccatggcagcagttggcaaccatggctgctcacattgtagtggaacgccctggagagaagaaggcacaaggtaacgccacggcccaggctcccctgcccccagtcttatctatgcccagtggccactcaccggcagtccattaagggcccacagcgaccagcacactcttcagcatctgccacatcctcctgccaaggccygggcaccaccgcttgtagcggcgctgtagctctgtgccccggagcacctagaagtcattcaatggcgagcgctgccctgcagagtgggtgcaggtcaggtgggcatacatgtcagtaatgtgtattggcatgtccacagtttgttcattcaggggatcaa

SEQ ID NO: 43017 - DNA, 610 bp, Homo sapiens
ttcgtttgatcaagactccataagtagaatgtgttcttccatcaggatgtccctatgccagctgtctctcttttcaagatccaacccactcattagaggctgcaaaactgtgagcttctcatttagtcactcctgtgtatattaattagaattctataatgaggcactttccctccttactattggataaccagtggtacagktcattcaggaaaggaaaggaaaggatttaacctgtattatggacttaaaatactttttttttgagccagtctctctctgtcgcccaggctggagtgcagtggcacaatcacaactcatgttaggcttgacctcccaggctcaagtgatcctcccacctcagcctcccaaatagctgggactataagtgttcaccactatacccagctaatttttttttttttttttgagacagggtcttgctatgtctcaagaaatgggccaccacgcctggccttaaaatacattttaattttttaaaatacaaataatttttaatgtattttaaggccaggcgtcatggctcatgcctgtaatcccagcactttgggaggctgaggcgggtggatcacctgaggtcaggagttca

SEQ ID NO: 43018 - DNA, 592 bp, Homo sapiens
tggggggaagagagagctaaatgcctggatatcttctcccaatcccaggctctctttctccccagattgccattgtgtctgtggtttttcttttagaaaagacttcacttctactttcacttcttcaggtaactaactgcatctacatctttaaggtcctttgagcatcttgtggttgcccttagcaacagctgcatacatgggttttacaggctctgtttctgaccaaaccataggatcaaagcctttcagggtggcacaggatcagagcccagccctctctctgatgtctggacattgtctacaacctccctgctgctccatccacgcccggcctcaccctcaccccacccacaccatgcacagaycattttcactgtcagaaagttctttattaggctgggctcagtgactcatgcctgtaatcccagtactttgggaggccgaggcgggtggatcacaaggtcaggagttcgagaccagcgtggccaacatggtgaaaccctgtctctactgaaaaatacacaaattagctggacgtagtggcgggcacctgtaatcccagctacttgggaggctgaggcaagagaat

SEQ ID NO: 43019 - DNA, 987 bp, Homo sapiens
tgcacagggcacatacccaggtcacctgggccctggtgacagacacagccggagaaaacctgcccttccccaagccccagcacagcccggaaggctcaaaagcccctgtgctcatccctgtggctgcagtgacagatgccaccacgccgatggcttcaagcaacataagtttactctcttagatctcgaggattctggaggccagatgtccaaaatcagtctcgctgggctaagtcaaggtgtcagcgggcaggtgccttctggacgttctgggggcgaatctgtttccttatgttttccatggaaaatggagaggccacccgcggtcctcggtccccgccttgtgtcaccacagcctctggtgtgcgtcagcctggcgtcttcccctcttctgtgcccttctctctcgggctccctgtcatgagggctcttgtgggtacgttggggcccacctggataatgcccccatctcaggagccaacatttcatcacagctgcaaaatcccrtttgccctataaagtgtcatttacaagtcccaaaaattcggtgatggatgtctttggggcccaccattgagtcccccataccctctctcacacttgggcatcagctattaccgaggacctcctgtggccaccggagttgctggcgctgaccccagctagtgggagccaccacaaagccccgcacctggccctcgggtggggccccagcggagtgtcttgaagaggctggaatcaggagtgctggcccgaacatggagtgaatcatgactcgcaggccaggcggtggggagcccccggtgggagctgggagcaacaatgcccgagcttgggatatcggaaggccgggctctgttctcgttacctagatgcccatggaggtgcccagcgggctgcccgctctgcaggactgatttttatctatgtgggagctcagctgcaattacggagctagaggaattggctcattcagtgccagtccca

SEQ ID NO: 43020 - DNA, 987 bp, Homo sapiens
tgcacagggcacatacccaggtcacctgggccctggtgacagacacagccggagaaaacctgcccttccccaagccccagcacagcccggaaggctcaaaagcccctgtgctcatccctgtggctgcagtgacagatgccaccacgccgatggcttcaagcaacataagtttactctcttagatctcgaggattctggaggccagatgtccaaaatcagtctcgctgggctaagtcaaggtgtcagcgggcaggtgccttctggacgttctgggggcgaatctgtttccttatgttttccatggaaaatggagaggccacccgcggtcctcggtccccgccttgtgtcaccacagcctctggtgtgcgtcagcctggcgtcttcccctcttctgtgcccttctctctcgggctccctgtcatgagggctcttgtgggtacgttggggcccacctggataatgcccccatctcaggagccaacatttcatcacagctgcaaaatcccatttgccctataaagtgtcatttacaagtcccaaaaattcggtgatggatgtctttggggcccaccattgagtcccccataccctctctcacacttgggcatcagctattaccgaggacctcctgtggccaccggagttgctggcgctgaccccagctagtgggagccaccacaaagccccgcacctggccctcgggtggggccccagcggagtgtcttgaagaggctggaatcaggagtgctggcccgaacatggagtgaatcatgactcgcaggccaggcggtggggagcccccggtgggagctgggagcaacaatgcccgagcttgggatatcggaaggccgggctctgttctcgttacctagatgcccatggaggtgcccagcgggctgcccgctctgcaggactgatttttatctatgtgggagctcagctgcaaktacggagctagaggaattggctcattcagtgccagtccca

SEQ ID NO: 43021 - DNA, 665 bp, Homo sapiens
tttccttgtacttgtttttccactattgatgcttaccagatcccatccygtggtctcctctgatactgctgggcctaggccccctctccttagatgaaaaattccacatttaaggatctagttattgtttgtactgatttctgcagtccatatcttcaggccagaccatatttctaaattccagaaccatatattttgctgcatgcttgatatttctccctaaatattccacaagtatacctcaaatccaataaattcaaaattgaactcatatgttcattctggtgctcttaaatgatagtaatcttagactcttcctccttttcttactcatcccatatccctatcatcatgcttcctattatttctgtcctttaagtttttctgaagactgtcctttcttctttcttccctgtacctgctgacttaacttggggcttgtaatttatggcctagattactgtgagaatcaccccaggggttctcgtgtatttgtggcccttgctgcagtttaacctccatgttgctataagagtgagccacttcctttcctgcttaatataatggcttactgttgggtttcataaagtccaaactcctttacttggcacatacattcctatataattattccttcttactttctcatccttatcttctactcc

SEQ ID NO: 43022 - DNA, 545 bp, Homo sapiens
aatattgatatactgcttgtgtgttttataatatatttttggctttcaatcatcaccaataagttttgctggcatcaacatcttacttttttaactttttaaatttttatttatttaytattattattatttttgagacaaggtctcactgtgtcacccaggctggagtaggagtatcacaataacagctcgctgcaccctccaactcctgggctcaagtgatcctcccatctcagcctcccaagtagctgggaccacaggcgtaagccaccacatccagccaatatcttgtttagaaaaacaattttcactttgccatattgaaaacattgtttccaagaaaaacaattcttagaattatcctaattttctgtgcatagggaagatgaagctggggtaagctggggtacacgtggagatcggaagaggagaagatgacgtctctgggtatggggaccacaccttgaccctggctgattgtccagtgagctgggctgggggcatcactgtctccagaagcaggagggcgaactgcactttcagtc

SEQ ID NO: 43023 - DNA, 1248 bp, Homo sapiens
tttttttttgagacagtctcgctctgtcacccaggctggagtgcggtggcgcaatctcagctcactgcagcctctgcctcctgggttcaagcgattctcttgccttggcctctcgagtagctgggattacaggcgtgagataccacaaccagctacctttgtatttttagtagagacagggtttcaccatgttggccatactggtctcgaactcctgacctcaagtgatccgcccgcctcggcctcccaagtgctgggattagagatgtgagccaccgtacccagccgggacacttttatcttaactctgtaaataacttgctctttaacaactttgtgttcctggttcttaaaatcctcgtttttaagaagtgattttgatgcacagtgtgcctcacaccatggcttgataagctgttttatctttatggcattcacttttcagatgtggaaagacagtggccccttcccttaagatcctgtggaaattgacaacactaatcagatcaccaggttatttttgaggggaggaaagcttcaaaaaatgtggaattcaaatgatggtgataattggcttttcataatttgttccatttttcaaattcaaggaacaaaaagtcgtgattcaactgattttccattgtgtcaaaaggaaaatacacatcttcatttttcaatgattaaatacagtccagtgaactggcactgatgatccaactcaatacattccatcgatcctggagccaccccagtgataacacaggaggacggctgttcttactacatgaggtctggagctgagtcaacaatgttttgggatgggaatgaggaataatgtccggccctgttaccaccacaaccaacaaatgacattttctattttgcaagragtattgagctattttgtctttctcagagatggacaaacaggggggcttgtgtattcctgaaagggatgtgaaaacaacaggaagcacctctgtgggacatttctatacaagtcattcaaagcatctgcaaagaggaaagccttgcagcctttcacaagcttaatcttacagcaaaacacagattttgactaattccaaaaacagattaaaacccttgaaaatgagatcacattcataacttggtcttttctgacctgcaagtgcaaagataccctgggggaaggccagctggaggctgagaggtacaatgactaaaatgcatggtaaatacattatcccggaaatgcagcctgaacag

SEQ ID NO: 43024 - DNA, 1100 bp, Homo sapiens
atcactctttgatttcacttctattttccatgaaataataagtcaaaaggtacaggatcccaggtagaaactggaaacagttcgtttgttgtgtttcttttattctcttctccatcatcttggtcttcatttgggaggaggggagtagattcttaagttatttttattttctttggctacatggtttttcaaatttatgtctcattaatttaaaaatatcactgtagggttgcattcttggagaagtttaaaagacaatacttacccgttattattacagggacccaaagaggttacagatggaaatatcatgtgtattacttgtcaatgatcatcctaaaatgaaatcctagcmcaaaagcaaacaaccaaatttaactcttttttagtaaacctagcagatcataataggaggaaactggatcagtatgatttttcttttcctttgcatttcttatatcccatggccctacacacacagacacacacacgtgtacgcacgcatgcacgcgcacacacacacacacatttcctacatactttgtctaggctttgccatatgctggatgaagactttcatgtcccatctcatttgacagatacagctgaatgttgttattcatgtgtttgtttgttttaaattctaccatattgtttcttatctcttttgtaagtcagaaaacatgagactaactacatcaaagaatattgccctaaacctccataaatatctgttccgctgaacactggagctacaacaaattgattttacttccgcaggtctctctttaaaatgtgactggttgggtgcccctgggactctttgcatgttacagaagactgctcatgctcaagatacagcaaaatgttgccttttagttagacagaagacagctgtgctgggctcagttgtgctgtgctgtgctgtgctgagctggaccaggctgggctgagctgttcctgggagagtgaaagtgagtgatgcttccttgcatcctgcacttaggtaggcatctgcatgttttctgtttgtccataatggttttgctttatcaggtaactggcattgtgcacaatgccattgtgtacagattataaca

SEQ ID NO: 43025 - DNA, 1100 bp, Homo sapiens
atcactctttgatttcacttctattttccatgaaataataagtcaaaaggtacaggatcccaggtagaaactggaaacagttcgtttgttgtgtttcttttattctcttctccatcatcttggtcttcatttgggaggaggggagtagattcttaagttatttttattttctttggctacatggtttttcaaatttatgtctcattaatttaaaaatatcactgtagggttgcattcttggagaagtttaaaagacaatacttacccgttattattacagggacccaaagaggttacagatggaaatatcatgtgtattacttgtcaatgatcatcctaaaatgaaatcctagcacaaaagcaaacaaccaaatttaactcttttttagtaaacctagcagatcataataggaggaaactggatcagtatgatttttcttttcctttgcatttcttatatcccatggccctacacacacagacacacacacgtgtacgcacgcatgcacrcgcacacacacacacacatttcctacatactttgtctaggctttgccatatgctggatgaagactttcatgtcccatctcatttgacagatacagctgaatgttgttattcatgtgtttgtttgttttaaattctaccatattgtttcttatctcttttgtaagtcagaaaacatgagactaactacatcaaagaatattgccctaaacctccataaatatctgttccgctgaacactggagctacaacaaattgattttacttccgcaggtctctctttaaaatgtgactggttgggtgcccctgggactctttgcatgttacagaagactgctcatgctcaagatacagcaaaatgttgccttttagttagacagaagacagctgtgctgggctcagttgtgctgtgctgtgctgtgctgagctggaccaggctgggctgagctgttcctgggagagtgaaagtgagtgatgcttccttgcatcctgcacttaggtaggcatctgcatgttttctgtttgtccataatggttttgctttatcaggtaactggcattgtgcacaatgccattgtgtacagattataaca

SEQ ID NO: 43026 - DNA, 1100 bp, Homo sapiens
atcactctttgatttcacttctattttccatgaaataataagtcaaaaggtacaggatcccaggtagaaactggaaacagttcgtttgttgtgtttcttttattctcttctccatcatcttggtcttcatttgggaggaggggagtagattcttaagttatttttattttctttggctacatggtttttcaaatttatgtctcattaatttaaaaatatcactgtagggttgcattcttggagaagtttaaaagacaatacttacccgttattattacagggacccaaagaggttacagatggaaatatcatgtgtattacttgtcaatgatcatcctaaaatgaaatcctagcacaaaagcaaacaaccaaatttaactcttttttagtaaacctagcagatcataataggaggaaactggatcagtatgatttttcttttcctttgcatttcttatatcccatggccctacacacacagacacacacacgtgtacgcacgcatgcacgcgcacacacacacacacatttcctacatactttgtctaggctttgccatatgctggatgaagactttcatgtcccatctcatttgacagatacagctgaatgttgttattcatgtgtttgtttgttttaaattctaccatattgtttcttatctcttttgtaagtcagaaaacatgagactaactacatcaaagaatattgccctaaacctccataaatatctgttccgctgaacactggagctacaacaaattgattttacttccgcargtctctctttaaaatgtgactggttgggtgcccctgggactctttgcatgttacagaagactgctcatgctcaagatacagcaaaatgttgccttttagttagacagaagacagctgtgctgggctcagttgtgctgtgctgtgctgtgctgagctggaccaggctgggctgagctgttcctgggagagtgaaagtgagtgatgcttccttgcatcctgcacttaggtaggcatctgcatgttttctgtttgtccataatggttttgctttatcaggtaactggcattgtgcacaatgccattgtgtacagattataaca

SEQ ID NO: 43027 - DNA, 743 bp, Homo sapiens
aaaggaagatgtgaatagtgtaaggtcagaaacagttgcatatcagctacgatatatagacccagaaatgtttcatttggaaaaattcttcttaggctgtatgtactgcttagaataagggaactatatytgattttcaataccagtcttagattactctatctttatggtttattatattgaattggaacattttgtttatataactgcctccctgccctcctactgcacaaacctcatcctcgatatggactcacctattctaaagtctttatgcccttgggaggcagggatagaattctttactgttgtacgcatggagccctgcagtagtgggcatccgataaatacttgttaaaggctttaaataaataggagattttataactgttacaaaactttaaaagactgtccaatgaaaggaaataagtctctttatacaattacaactaattgtaagattagttggagtacaagctaaatggctataacaaaggcatcctaaaacagagtagactgaacaagactgaagcttatttctctaccatcccaaagtaaagactccaggactgatggaatagccctgccactttgagtatgtggctttaatctcagagtcagatagctcctttagtcccagacatctctagccagcagtaaggaaaaatttgacgagacaacgcacactcaattgttttaatggcaagtcatgaatgtggtgcacatcacttattctccatcca

SEQ ID NO: 43028 - DNA, 1098 bp, Homo sapiens
tcctgtcttggcctcccaaagtgctgagattacaggcatgagccaccatgccttgctaggttatctgtattttccacgtagatttgtactctttttactgtgtaatggagtggtacagcatgatgaaacattttggaatgccattcatacgctgctttctttgatatgtatgaatgaacattcttttgtagctcctttttttcactgataaactggttaaaatgacttaaaattctgtacggtgcttttggtcatcaatgtaagtgtgtagatctatttctccaacttgtaaccgtcaaccaagtctgtttttaagaagcttacctttarggaatgtttgtatacctacatgtcagtttattttaaataacatttattttctgtttacttccaaaattacttaagaaagatatcagatgtttaaagtgacatttaaaggaccgtcattatcttttttttacttcatttttaattatagatttattccctaaaatataaaacacacaaaaaagtactttttctattaatggagagtaattgtagacttaaggaaaatgacatatgtctatattggtggtaagaaaaggaacctgagagctcttcaatttgtaagggtttaagtatggaattaaatttagaatgtttgtatgtgggtactccctgagaagaacttggaagtgttagccaatcatcttagtttgttgaagacacatatttcacagctaaatgtaaggaattacttgtgaagtttagtagaaaatgaagtgtgctatataagtgtttggaaatattaccaattttattcacaaatttgtaaacggtaacacatctatagtgactatattatggtttctcttcacagatatcaagttattctagtacaaccatataaataaataatacctgaagtctcagtgtaacatggacaattaacagtgatgacagataaatacagacgcatggggatcaaatactaggcaaaacgctttttaaaaggtaagaaataatgtaatcttaattaaggccatgtggggtttagttagaagtaattgattgaagtttctttttcagtgtatcaggcttttaagaaacactgca

SEQ ID NO: 43029 - DNA, 566 bp, Homo sapiens
cagattaggaagttgctccctctttgcatttcccacataattgaatgcatattccttcacctctatgaagggcctctagttagggactattttttatgaagacatttgaattcctttaagtattgaccacaaagctggggacatagcaactgtttagcaaatcttctattttactgattcatcaattggtacagatgaattattcttgcagtgccaggccatggaactgatatagagatcttagacttgttcttcatacaaaattgaaatatgcgtgtttccatttgttaatcttttggtatttgtattgcagaataaaatacagggtactcaattcaatttaaatttcagataaacaacaaacaatgttttagcgtttaakttatgtctcaaatattgcaaaggatatacttctaatgaaacaaattatttgttgtttatctgaaatttaaattgaagtagatatcttatatttttatttgctaaatctggtaatgctatttagtgttcataaaataataactttaaagtatatcctgaaaagacagggctatcattccttcttt

SEQ ID NO: 43030 - DNA, 566 bp, Homo sapiens
cagattaggaagttgctccctctttgcatttcccacataattgaatgcatattccttcacctctatgaagggcctctagttagggactattttttatgaagacatttgaattcctttaagtattgaccacaaagctggggacatagcaactgtttagcaaatcttctattttactgattcatcaattggtacagatgaattattcttgcagtgccaggccatggaactgatatagagatcttagacttgttcttcatacaaaattgaaatatgcgtgtttccatttgttaatcttttggtatttgtattgcagaataaaatacagggtactcaattcaatttaaatttcagataaacaacaaacaatgttttagcgtttaagttatgtctcaaatattgcaaaggatatacttctaatgaaacaaattatttgttgtttatctgaaatttaaattgaagtagatatcttatatttttatttgctaaatctggtaatgctatttagtgttcataaaataataactttaaagkatatcctgaaaagacagggctatcattccttcttt

SEQ ID NO: 43031 - DNA, 853 bp, Homo sapiens
agagagatagaagaacaagatatcatggaggaaataagcataaatgtccaacagaaatctaggatgcataagaataccctggattcatacacagttttacttcctgtaaaacttttatgaaattattttacctgataaaggaatctaagtagacagccaaagcatgattaaacacttatctaaactctggcagcctggctccccttgagcaaaatggaggtgatattaactgggttatcaccttgaagagcttagaccaggaaagggccttaaaaatcactaattttggccagacgcggtggctcatgcctgtaatcccagcactttgggaggccaaggcgggcggatctcaaggtcaggagatcgagaccatcctggctaacgctgtgaaaccctgtctctactaaaacaatgaaaaattagccgggcgcggtggcgggcacctgtagtcccagctactcaggaggctgaagcaggagaatggcttgaacccrggaggcagaggttgcagtgagttgagattgcaccactgcactccagcctaggcaacagagcaagactctgtctcaaaaaaaaaaaaaaatcaccaatttttaaagccatttcattttttaagtgaggacagttaggcttctagagaaatggtctataacatagctatttagtaagagaactgggaatggaaaaggatattttgagttgttttaacttagacttttttcttcactgtctctaactaagcctagttggcattctcaaattctaagaattcagatttagtgaaaatagttaaatggattttaaatgtgtagtttttttttttcaaatggtaaatatttgggcttgcctattt

SEQ ID NO: 43032 - DNA, 581 bp, Homo sapiens
aaacacaggtttggaggatcataatgtaaaacacatatcttaacatatcatggccagctgtatggccacgtagctctttgagggttgggacattcttgatctatatatccctcatgcccaatgtcctacctggtgagtactcaggagttgttgactggaatgattatgaaggtttgagaaggaattggaagaatgaaaagcaggtaggttggggaggaaatgagggcttgaattaagtgtaaattttgtagtttcctttatcttgaatgttaawatatattttttcaacctaatattattgccacaaagaacccgtgtttgttatctgtgctctggggttgtctcccatcaccttcaatgtaatgtggtataaataatacttcctgctaatgttgcagctgtcactcaaggatcttaaattactttaggagcaagatctggtgatgagtgcccggctccacttggcaggtgccagagttaagaaccagtgactgcctgaaatctttgggctccaggatgacggctccctctctgtcatcctcccacactctcttctgcccatcccttcttccatggaggga

SEQ ID NO: 43033 - DNA, 581 bp, Homo sapiens
aaacacaggtttggaggatcataatgtaaaacacatatcttaacatatcatggccagctgtatggccacgtagctctttgagggttgggacattcttgatctatatatccctcatgcccaatgtcctacctggtgagtactcaggagttgttgactggaatgattatgaaggtttgagaaggaattggaagaatgaaaagcaggtaggttggggaggaaatgagggcttgaattaagtgtaaattttgtagtttcctttatcttgaatgttaatatatattttttcaacctaatattattgccacaaagaacccgtgtttgttatctgtgctctggggttgtctcccatcaccttcaatgtaatgtggtataaataatacttcctgctawtgttgcagctgtcactcaaggatcttaaattactttaggagcaagatctggtgatgagtgcccggctccacttggcaggtgccagagttaagaaccagtgactgcctgaaatctttgggctccaggatgacggctccctctctgtcatcctcccacactctcttctgcccatcccttcttccatggaggga

SEQ ID NO: 43034 - DNA, 581 bp, Homo sapiens
aaacacaggtttggaggatcataatgtaaaacacatatcttaacatatcatggccagctgtatggccacgtagctctttgagggttgggacattcttgatctatatatccctcatgcccaatgtcctacctggtgagtactcaggagttgttgactggaatgattatgaaggtttgagaaggaattggaagaatgaaaagcaggtaggttggggaggaaatgagggcttgaattaagtgtaaattttgtagtttcctttatcttgaatgttaatatatattttttcaacctaatattattgccacaaagaacccgtgtttgttatctgtgctctggggttgtctcccatcaccttcaatgtaatgtggtataaataatacttcctgctaatgttgcagctgtcactcaaggatcttaaattactttaggagcaagatctggtgatgagtgcccggctccacttggcaggtgccagagttargaaccagtgactgcctgaaatctttgggctccaggatgacggctccctctctgtcatcctcccacactctcttctgcccatcccttcttccatggaggga

SEQ ID NO: 43035 - DNA, 643 bp, Homo sapiens
attcaggaaatatttaaggaacacayactttgtacaaatggtatacatgagatgtgtaaaataaacttacatccatggcctaacattctaaaaatatgaaaaatccaagttctacatggaaatatttaactttcaagtaagaggtttacaactttaaaatttaatcataaaaatcatacacgttcggggccatggattaggcaaagaattcttaaacgataaatgtgaagctataacataaagggaaaagttgataaattagaccatgttagaattaacaacttttggctatcaaaaggtatgaataagagaatgaaaagacaaatgacatagtgaaagcagatatttgcaatacatatatctgataccaagatacatagccagaaaaaaaaaatatgaaaaagatggtcggtatcattagtcatctgagaaatgcaaaatgaaatgcaataccactaaatatccattagaatggctaaaatgaaaaggaaacacaaagtgtagccaaatatgtgcaactactgtatatgtgtgtatgtacacatacacacacgtatatattacatatatttttatatataatattaaattaaaaagtaaaatgttaaatttataatatataatgtaataatatctatacatg

SEQ ID NO: 43036 - DNA, 1233 bp, Homo sapiens
agggtcacaagatatacaagtatgtttacagcaagacctttcattacaccttcaaactgaaacatacacacgtgtcactcaactgtacaaacaacagatatagcaatgagaatgaacaactatatacatgaatctcacaaacatggattgtgtaagagatactaagtacacaggaatatatactgtatgatcccatttatatcaagttcaaaactagacaaaaatccacgtatgatgttagaagtctggatagaggtaatcctggctgggatttagaaagggcacaaggcaggcccactgggggcccagtagtgttctattttgtactgtgggtgctgggtacacaaggctatccgggttataaaaatgggtcaacctgcacactgctactttttgcacttttctgtatgtatgttagacttcaacacaaacatttttcaaaaaccaaatgtgtctctcttgaactaagaaacataaaaagccatccaaaagcctttatccctgtcaacttaactttgttattgcagatacaggaaaatgtaagacatttcaaaatgattggaaattgtcaagtaatagccatacaaagctattgtaagaacaaaaagaaatcaagaactaatacatttcagctgatgaaaattttgccttccaaaatccaaatcaagagaaggaacctgtaatacaagtccctagtatgaatgaaaaagctgctaaaaagttactatagatttttttaatcttttatcagaaatttaaattcttacaatggacatgtagaatacataaaaaaatcctacaactcaataaaaagccaagcaacccaatagaaaatgagcaaaacgtctaaacaatcacttgactaaaaattctgatatgcaaataaccatatttgctcatgagaaagatgttcagtgtcatcattcatccaggaactgcaaattaaaactacaatgagacacatctccatactcactagaattggtcaaattaaaaacaccaaaatctgctgaataggtgatgcaatggaaactctcatacatgctaatgtaaaggcaaaattaaacaatcattttggaaaactgcttggcattctctaagttaaacatatacctagccgaatccagtctttgacttaccttttcattttttttttaatttaaagttttkattctttttttttatactttaagttttagggtacatgtgcacaacgtgcaggtttgttacata

SEQ ID NO: 43037 - DNA, 1454 bp, Homo sapiens
attttattcaatgcattccttatgtttggttctgcaggacagcatcactcatttaaaaaaaatgtccttttgagtacccactgtgttcaagaactatttttgccacttaacatgctacaaatttgagttgaattttgagagttgaattttgttttcaaggagcttagtgtctaataggggagataggtatagaacaaggtagagagtgactaatgccagtagtatagctactgtgctcacaacatttgaataaaagaaaacttacttcatttgtggcactcagaaaagatttgtggagaaagtagtgcttgatttgtctttgcaggagtctaaatgtaaatagatgggagctaagtagaaaggtcattttagtggagcataaactggtatgagttaaaacagacacaggaaaggtcaagattagacagagacaatgagtaggcaatgacttcagggaaggagtcatccaggggagtggtggaagctaaggatgttagctaagaataataatatggcaaggaaggatagcgacagactgtagagagccttgaagactgagccaaataatttgaaattttgttcaaataagtaggatcggccgggcatggtggctcatgcctgtaatcccagcactttgggaggccgaggcgggcagatcgcgaggtcaggagttcaagaccagtctggccaacatagtgaaaccctgtctctactaaaaatacacaaaaaattagccaggtgtggtggtgtgtgcctgtaatcccagctactcaggaggctgaggcaggagaatcacatgaacctgggaggcggaggttgcagtgagccaagattgtgccactgcactccagcctgggcaacagaacgagactctgtctcaaaaaataaaataaaataaaataaataaaataagtaggatcaagtcaatagttttttagaagatatatcttttcttattcttgtcttattatggtaagaacacttaacatgatatctatcctcttaaatttttaagtgttaactataggcacattttgcacagcamatctctagaatgtatccatcttgtatatctgaaactttatactctttgattatcaacttcccaattcccattcccccaggccatcaaccaacattctactctcagcttcaatgagttagactattttagatacctcacataactgaatcacgcagtgtttatccttttgtgactggcttatttcacttagcaaaatgtcctctaggttcattcattttgctgcaaatgacaggatttccttatctttaaggctgagtaatatcccattgtatatgtttatcacattttctttttccatttatccatccatgggcatttaaggtttttctacttcttggctattatgaatagtgctgcagtgaactcaggagtgctaatatatatatatatttgagatcctgatttcaaa

SEQ ID NO: 43038 - DNA, 1454 bp, Homo sapiens
attttattcaatgcattccttatgtttggttctgcaggacagcatcactcatttaaaaaaaatgtccttttgagtacccactgtgttcaagaactatttttgccacttaacatgctacaaatttgagttgaattttgagagttgaattttgttttcaaggagcttagtgtctaataggggagataggtatagaacaaggtagagagtgactaatgccagtagtatagctactgtgctcacaacatttgaataaaagaaaacttacttcatttgtggcactcagaaaagatttgtggagaaagtagtgcttgatttgtctttgcaggagtctaaatgtaaatagatgggagctaagtagaaaggtcattttagtggagcataaactggtatgagttaaaacagacacaggaaaggtcaagattagacagagacaatgagtaggcaatgacttcagggaaggagtcatccaggggagtggtggaagctaaggatgttagctaagaataataatatggcaaggaaggatagcgacagactgtagagagccttgaagactgagccaaataatttgaaattttgttcaaataagtaggatcggccgggcatggtggctcatgcctgtaatcccagcactttgggaggccgaggcgggcagatcgcgaggtcaggagttcaagaccagtctggccaacatagtgaaaccctgtctctactaaaaatacacaaaaaattagccaggtgtggtggtgtgtgcctgtaatcccagctactcaggaggctgaggcaggagaatcacatgaacctgggaggcggaggttgcagtgagccaagattgtgccactgcactccagcctgggcaacagaacgagactctgtctcaaaaaataaaataaaataaaataaataaaataagtaggatcaagtcaatagttttttagaagatatatcttttcttattcttgtcttattatggtaagaacacttaacatgatatctatcctcttaaatttttaagtgttaactataggcacattttgcacagcaaatctctagaatgtatccatcttgtatatctgaaactttatactctttgattatcaacttcccaattcccattcccccaggccatcaaccaacattctactctcagcttcaatgagttagactattttagatacctcacataactgaatcacgcagtgtttatcctttygtgactggcttatttcacttagcaaaatgtcctctaggttcattcattttgctgcaaatgacaggatttccttatctttaaggctgagtaatatcccattgtatatgtttatcacattttctttttccatttatccatccatgggcatttaaggtttttctacttcttggctattatgaatagtgctgcagtgaactcaggagtgctaatatatatatatatttgagatcctgatttcaaa

SEQ ID NO: 43039 - DNA, 562 bp, Homo sapiens
tgatggttaccaaaagccaggaaagagaaggggaaggaataattaaggagaagagagaaaagaaatgggtttattaccactgaactatataattgaaaatgctaaagatggtaaattatatgtgtatattttatctcaatatttttttttttacaaatctgctggacatagaatgaaaaaaaacatatctgcatyaccacgtttattgcagccactattcacaatcgtcaaggtatggaatcaacctaagtgttcatcaatgaatggatggataaagaaaacatggtagatatatgcaataaaatattattcagctgtaaaagagaatgaaatcctgtcatttgcagcaccataggtggaacttatattaggaggtaattatattaggaggtaattatattaagtgaaataagccaggcacagaaagacaaatatctcgttctcatttacatatgggaactaaaaatttgatctcatggaggtagagaaggatggttaccaggcgttgggaaaaataggggtgaggaagagataagagagattggataatggggacacaaat

SEQ ID NO: 43040 - DNA, 1252 bp, Homo sapiens
atttggatctatatttttcacacaagttttaacactatgcacactttcccctaccttgctttatcaacttatatttgagctttgagtagtgacagagcttccttgttttaatagctgcatagtattccattttatgaataaatcctsatttatttaatcaatcctttcttctcagaaaaatatgatcgaacaaaaaatagacatttgatttatttccaaatatttcctactgtaagcaatgctccaggatgagcctgtgatcactgaaattgactttttttctaaccgagtcaacccctccccaaccatttacctttgaaaatcaaccgttggtcctgggcttctagtcacttcacgctgttccatcctctgaacttgggaaatgacaagtagatgcttttttatctttgtaactatggccttggctttgcatgacttggcttctccttgctactttactttatttggtggcttgtaacttttccttagcaaaaataaacctatttctaattccttcagacatttttctcctgtctaggaacattttctgtttcaattttttcccaatacctagaacaccttctcttctttattcacttccttgctatctcttttataatttgtcctccttgaatgaggaaataatttttcttacaaccccattttaacaatcaactcaatccaaagtataattcccccatctccttctgtacaatggaagtaaggtattctaatacgccttgcatgtgtgtaaactttgataaataacatggggtatactctaatgggatgcaggcacttacattttgacattatatgatctctgtcccttttctcttcatgtaccacctcctttggaatttggaacctcttgaaatttgcaaggttttggaatttgcaacctcttgaaacaggtatttaaaacagaacagcaggtatagctcaatgactgttgttataaaaaccaagaaaaagaaaagaggaccatatccaaatgcccattgcagaaaaccacaaaaaaaacattttttggttatttctaaattttgttttcatcaccaaaataatagctcagctcttgcaatggtgtattagctcatttctgccaaagaatcaacgaataaaaatgttgattgaatttaatatgggtctgggtggatgtgtgtcaatattaatgtaaaattaaggtacaataggtaaataacatgtaagatgatagagccacagctgtttcaaaactgtccccaagtaa

SEQ ID NO: 43041 - DNA, 1252 bp, Homo sapiens
atttggatctatatttttcacacaagttttaacactatgcacactttcccctaccttgctttatcaacttatatttgagctttgagtagtgacagagcttccttgttttaatagctgcatagtattccattttatgaataaatcctcatttatttaatcaatcctttcttctcagaaaaatatgatcgaacaaaaaatagacatttgatttatttccaaatatttcctactgtaagcaatgctccaggatgagcctgtgatcactgaaattgactttttttctaaccgagtcaacccctccccaaccatttacctttgaaaatcaaccgttggtcctgggcttctagtcacttcacgctgttccatcctctgaacttgggaaatgacaagtagatgcttttttatctttgtaactatggccttggctttgcatgacttggcttctccttgctactttactttatttggtggcttgtaacttttccttagcaaaaataaacctatttctaattccttcagacatttttctcctgtctaggaacattttctgtttcaattttttcccaatacctagaacaccttctcttctttattcacttccttgctatctcttttataatttgtcctccttgaatgaggaaataatttttcttacaaccccattttaacaatcaactcaatccaaagtataattcccccatctccttctgtacaatggaagtaaggtattctaatacgccttgcatgtgtgtaaactttgataaataacatggggtatactctaatgggatgcaggcacttacattttgacattatatgatctctgtcccttttctcttcatgtaccacctcctttggaatttggaacctcttgaaatttgcaagkttttggaatttgcaacctcttgaaacaggtatttaaaacagaacagcaggtatagctcaatgactgttgttataaaaaccaagaaaaagaaaagaggaccatatccaaatgcccattgcagaaaaccacaaaaaaaacattttttggttatttctaaattttgttttcatcaccaaaataatagctcagctcttgcaatggtgtattagctcatttctgccaaagaatcaacgaataaaaatgttgattgaatttaatatgggtctgggtggatgtgtgtcaatattaatgtaaaattaaggtacaataggtaaataacatgtaagatgatagagccacagctgtttcaaaactgtccccaagtaa

SEQ ID NO: 43042 - DNA, 677 bp, Homo sapiens
attctagtttttcccctttatactttctgctgccatcaactttattattttgggagaaaagattaaatttcaaccctatatcttgtatggtgcagttgccccataaatgtgtgttgattggtgaaaaacatcaaatctctttagccctcatattttcttgtcacaaaagtattactaatattttgtattaaatggtcattgaagaaaatcatcatgtgtagttgagcatcagcattggtcagcatctgtatagaacttgaaagcctataaagggaggacttttatggactttatcagaagcaagcttcataaatctgtggagaaggggctcttctctccattttgcagttgagaaatcagtagataggaactaatttgtccaaggtggagatgagaatctcatctctcctgtctctaaatcatcttttcttttgactatattgtctcttgacaataatttaaaagtatctcaatatccacagcaataattattttttgcctgaaaattacaggagcagattatttcattcatttaatgtattgattcaccaacatctcttgcacatctartatgtgccaaataataagtttccagagccaggggtatgttgtccttttccttaaggcattgtattctaacttattggggtagacagaaatatgactaaataaataca

SEQ ID NO: 43043 - DNA, 574 bp, Homo sapiens
caaaaacttcaaccctgtcaaaaacagctttgttatgcgaagttttattgggaaagraagtgtcccaagaatttcctatagctgagcctgttacaaaagttcactccacctctccaacactcactcaggtttctagccgccttggtggtccccgctctctctctctctgtgttgagctgtgattccctgctcaggtctgaagtgattctggatttcgcctcatcttgacatgtgttttccacttcttcaattttactttcttttttctagaccacttgtgaagaggaaagttattcctcttaaagatgaaatatctttccaccctaactaatgaaggcatcccagtatgacctttcccaggacagtcctggagaaatgaatggcccccgacagtgctgggcatgggtctgggccggggaggggccagcattctgctcccgagggaatcctgaacaccgctctcatattttcttccacgagccaactcaacccagaacaatgcccttaaaaacatttcctatgtcttaggtaaactctgcatttggtattctaaagagacttggaaatacatcac

SEQ ID NO: 43044 - DNA, 971 bp, Homo sapiens
tgagtggggactgaacacatgcaaccacacagtgtagtatttttaggcaattgctcactcatttgagaaaacacagtgggtaaaactgtttcccttgtggtgactgttggacttcctgcattttcagaggttttctgtattttcataggagtcccatttccttttaagaaccagattgccaatgccccattagttagctttccacyccaacaggccgcttgctcttttgcctttccctccccttctcttttaaaccaattaattaaaaagctttacaaaaacaatacatgctaacgtgaaaaattaaagcagtatagaaaactacaacacaaaaaggaaaagctcctctgccctcagctcctacactcctcagaggtggccatcatgaacattggcttctttctagaacttttcctgcatagacaatcagagaaacatagattgatagactgatttatgcaaagatggctgaataatgatgtttaatgctctgttacttgctttttcctacttaatttatgctagacatgatttcacagcagttgtcaaggaggtctatcacccttttcaacatttgcattttttcaattataaataaaaaattaattaattaagaaacacttgcatttggttctactgtagaagtgtaccatcatttgtttaaccaatattccacagattgacttgtagattacttcagaggtcttaatattaaatgttccagtaaatatcctcaggcatgtgtttttgaagaacagggctagtgtatcaacaggagattgttttataggtctttataaaattaaactgttttcactggtataaaaatttaataattgtcaaataaaatgttgctcttttaaagtttcttctcattatcaaatgacgcttttttttttgtcttggtcttctataaacctgcccttaagctgtgacaaaattaatttaaaaaaatcgatgttggtccatgg

SEQ ID NO: 43045 - DNA, 971 bp, Homo sapiens
tgagtggggactgaacacatgcaaccacacagtgtagtatttttaggcaattgctcactcatttgagaaaacacagtgggtaaaactgtttcccttgtggtgactgttggacttcctgcattttcagaggttttctgtattttcataggagtcccatttccttttaagaaccagattgccaatgccccattagttagctttccactccaacaggcygcttgctcttttgcctttccctccccttctcttttaaaccaattaattaaaaagctttacaaaaacaatacatgctaacgtgaaaaattaaagcagtatagaaaactacaacacaaaaaggaaaagctcctctgccctcagctcctacactcctcagaggtggccatcatgaacattggcttctttctagaacttttcctgcatagacaatcagagaaacatagattgatagactgatttatgcaaagatggctgaataatgatgtttaatgctctgttacttgctttttcctacttaatttatgctagacatgatttcacagcagttgtcaaggaggtctatcacccttttcaacatttgcattttttcaattataaataaaaaattaattaattaagaaacacttgcatttggttctactgtagaagtgtaccatcatttgtttaaccaatattccacagattgacttgtagattacttcagaggtcttaatattaaatgttccagtaaatatcctcaggcatgtgtttttgaagaacagggctagtgtatcaacaggagattgttttataggtctttataaaattaaactgttttcactggtataaaaatttaataattgtcaaataaaatgttgctcttttaaagtttcttctcattatcaaatgacgcttttttttttgtcttggtcttctataaacctgcccttaagctgtgacaaaattaatttaaaaaaatcgatgttggtccatgg

SEQ ID NO: 43046 - DNA, 971 bp, Homo sapiens
tgagtggggactgaacacatgcaaccacacagtgtagtatttttaggcaattgctcactcatttgagaaaacacagtgggtaaaactgtttcccttgtggtgactgttggacttcctgcattttcagaggttttctgtattttcataggagtcccatttccttttaagaaccagattgccaatgccccattagttagctttccactccaacaggccgcttgctcttttgcctttccctccccttctcttttaaaccaattaattaaaaagctttacaaaaacaatacatgctaacgtgaaaaattaaagcagtatagaaaactacaacacaaaaaggaaaagctcctctgccctcagctcctacactcctcagaggtggccaycatgaacattggcttctttctagaacttttcctgcatagacaatcagagaaacatagattgatagactgatttatgcaaagatggctgaataatgatgtttaatgctctgttacttgctttttcctacttaatttatgctagacatgatttcacagcagttgtcaaggaggtctatcacccttttcaacatttgcattttttcaattataaataaaaaattaattaattaagaaacacttgcatttggttctactgtagaagtgtaccatcatttgtttaaccaatattccacagattgacttgtagattacttcagaggtcttaatattaaatgttccagtaaatatcctcaggcatgtgtttttgaagaacagggctagtgtatcaacaggagattgttttataggtctttataaaattaaactgttttcactggtataaaaatttaataattgtcaaataaaatgttgctcttttaaagtttcttctcattatcaaatgacgcttttttttttgtcttggtcttctataaacctgcccttaagctgtgacaaaattaatttaaaaaaatcgatgttggtccatgg

SEQ ID NO: 43047 - DNA, 971 bp, Homo sapiens
tgagtggggactgaacacatgcaaccacacagtgtagtatttttaggcaattgctcactcatttgagaaaacacagtgggtaaaactgtttcccttgtggtgactgttggacttcctgcattttcagaggttttctgtattttcataggagtcccatttccttttaagaaccagattgccaatgccccattagttagctttccactccaacaggccgcttgctcttttgcctttccctccccttctcttttaaaccaattaattaaaaagctttacaaaaacaatacatgctaacgtgaaaaattaaagcagtatagaaaactacaacacaaaaaggaaaagctcctctgccctcagctcctacactcctcagaggtggccatcatgaacattggcttctttctagaacttttcctgcatagacaatcagagaaacatagattgatagactgatttatgcaaagatggctgaataatgatgtttaatgctctgttacttgctttttcmtacttaatttatgctagacatgatttcacagcagttgtcaaggaggtctatcacccttttcaacatttgcattttttcaattataaataaaaaattaattaattaagaaacacttgcatttggttctactgtagaagtgtaccatcatttgtttaaccaatattccacagattgacttgtagattacttcagaggtcttaatattaaatgttccagtaaatatcctcaggcatgtgtttttgaagaacagggctagtgtatcaacaggagattgttttataggtctttataaaattaaactgttttcactggtataaaaatttaataattgtcaaataaaatgttgctcttttaaagtttcttctcattatcaaatgacgcttttttttttgtcttggtcttctataaacctgcccttaagctgtgacaaaattaatttaaaaaaatcgatgttggtccatgg

SEQ ID NO: 43048 - DNA, 1477 bp, Homo sapiens
cgatcccattacgggcccctcgacattcccagcmtgtgtaaccagtccctagtagtcactttcttctggcagtgttcttgctgaggagtctgggcatgagcagatgctccaggccttctgaggacactctgcaatcatcatcctgatatcattcggctcccatccagaggcagttaactctctccatccccagcttctgttttgccagtcacctcactgagaggtttctgactcccacacggagcacagggcgctttaaacacagcccacctgcactacacatggacacgtgctttaaccatgacttgtctgccctgtccaactcaagcacatcgcctcaggcattctaaccatatccttgtccttctcaacccttttacttctgaatgagactcataacagcaggatttatcatagttaaaaactggaacaaatctagttgttcaacaactggggatctgctagatatattatcatggctcattaacataatggaatataatttgaccaataacaccttctacacagtagaagatgtaataatgaggcctggcgcggtggctcacacctgtaatcccagcactttgggaggtgaggcgggtggatcatttgaggtcaggagttgaagaccagcctggccaacacggtgaaatcccgtctctactaaaaatacaaaaattagagggacgtggtggtgcacggctgtagtcccagctactcgggaggctgaggcacgagaatcgcttaagcccaggaccagagattgcagtgagcagagatcatgccactgcactccaacctgagcaacagagtgagactgtctcaaaatgaaacaaaataaaacaaaaagaagatgtaataatgagaatgatgcccaccatacattaagaaaaaaagaagagttgcagaataggttttcttaacacatgaatgtacatcaagatgctatccagtaacaaatttctagtttgtagggttatggttggtttaccttttcttttttgtttatctctattttataactttttaaaatgagtatgtgttcttttggaaaaatgcaacattggaaagaaaaaattcaacatggcatgttaaaaggtttatctgtttttcaaaggtgttgagcctcaagccagtttgtaccccaccaagacgggtcactctgcctacaaagctgaaactgcccagagcagcagcagtagtcacaagaccttagatgggggctcactttgcctctaggtggtgcagtcatgattgccagggagctgggcctggagagagagttggcaacctatctatctcttcatagaaatggtagtgtcctagaaacaggtgcggttacaatgctgaatgaagccctaggttaatgatttttaaacatttagcagaggaagcttttttttcccccaaatgaaatctcacataaaacatcaactcttaaacacacaaaaatattgttgatcatgatgaagctctc

SEQ ID NO: 43049 - DNA, 1477 bp, Homo sapiens
cgatcccattacgggcccctcgacattcccagcctgtgtaaccagtccctagtagtcactttcttctggcagtgttcttgctgaggagtctgggcatgagcagatgctccaggccttctgaggacactctgcaatcatcatcctgatatcattcggctcccatccagaggcagttarctctctccatccccagcttctgttttgccagtcacctcactgagaggtttctgactcccacacggagcacagggcgctttaaacacagcccacctgcactacacatggacacgtgctttaaccatgacttgtctgccctgtccaactcaagcacatcgcctcaggcattctaaccatatccttgtccttctcaacccttttacttctgaatgagactcataacagcaggatttatcatagttaaaaactggaacaaatctagttgttcaacaactggggatctgctagatatattatcatggctcattaacataatggaatataatttgaccaataacaccttctacacagtagaagatgtaataatgaggcctggcgcggtggctcacacctgtaatcccagcactttgggaggtgaggcgggtggatcatttgaggtcaggagttgaagaccagcctggccaacacggtgaaatcccgtctctactaaaaatacaaaaattagagggacgtggtggtgcacggctgtagtcccagctactcgggaggctgaggcacgagaatcgcttaagcccaggaccagagattgcagtgagcagagatcatgccactgcactccaacctgagcaacagagtgagactgtctcaaaatgaaacaaaataaaacaaaaagaagatgtaataatgagaatgatgcccaccatacattaagaaaaaaagaagagttgcagaataggttttcttaacacatgaatgtacatcaagatgctatccagtaacaaatttctagtttgtagggttatggttggtttaccttttcttttttgtttatctctattttataactttttaaaatgagtatgtgttcttttggaaaaatgcaacattggaaagaaaaaattcaacatggcatgttaaaaggtttatctgtttttcaaaggtgttgagcctcaagccagtttgtaccccaccaagacgggtcactctgcctacaaagctgaaactgcccagagcagcagcagtagtcacaagaccttagatgggggctcactttgcctctaggtggtgcagtcatgattgccagggagctgggcctggagagagagttggcaacctatctatctcttcatagaaatggtagtgtcctagaaacaggtgcggttacaatgctgaatgaagccctaggttaatgatttttaaacatttagcagaggaagcttttttttcccccaaatgaaatctcacataaaacatcaactcttaaacacacaaaaatattgttgatcatgatgaagctctc

SEQ ID NO: 43050 - DNA, 1477 bp, Homo sapiens
cgatcccattacgggcccctcgacattcccagcctgtgtaaccagtccctagtagtcactttcttctggcagtgttcttgctgaggagtctgggcatgagcagatgctccaggccttctgaggacactctgcaatcatcatcctgatatcattcggctcccatccagaggcagttaactctctccatccccagcttctgttttgccagtyacctcactgagaggtttctgactcccacacggagcacagggcgctttaaacacagcccacctgcactacacatggacacgtgctttaaccatgacttgtctgccctgtccaactcaagcacatcgcctcaggcattctaaccatatccttgtccttctcaacccttttacttctgaatgagactcataacagcaggatttatcatagttaaaaactggaacaaatctagttgttcaacaactggggatctgctagatatattatcatggctcattaacataatggaatataatttgaccaataacaccttctacacagtagaagatgtaataatgaggcctggcgcggtggctcacacctgtaatcccagcactttgggaggtgaggcgggtggatcatttgaggtcaggagttgaagaccagcctggccaacacggtgaaatcccgtctctactaaaaatacaaaaattagagggacgtggtggtgcacggctgtagtcccagctactcgggaggctgaggcacgagaatcgcttaagcccaggaccagagattgcagtgagcagagatcatgccactgcactccaacctgagcaacagagtgagactgtctcaaaatgaaacaaaataaaacaaaaagaagatgtaataatgagaatgatgcccaccatacattaagaaaaaaagaagagttgcagaataggttttcttaacacatgaatgtacatcaagatgctatccagtaacaaatttctagtttgtagggttatggttggtttaccttttcttttttgtttatctctattttataactttttaaaatgagtatgtgttcttttggaaaaatgcaacattggaaagaaaaaattcaacatggcatgttaaaaggtttatctgtttttcaaaggtgttgagcctcaagccagtttgtaccccaccaagacgggtcactctgcctacaaagctgaaactgcccagagcagcagcagtagtcacaagaccttagatgggggctcactttgcctctaggtggtgcagtcatgattgccagggagctgggcctggagagagagttggcaacctatctatctcttcatagaaatggtagtgtcctagaaacaggtgcggttacaatgctgaatgaagccctaggttaatgatttttaaacatttagcagaggaagcttttttttcccccaaatgaaatctcacataaaacatcaactcttaaacacacaaaaatattgttgatcatgatgaagctctc

SEQ ID NO: 43051 - DNA, 599 bp, Homo sapiens
ttccatctgagcagcaagagtgactggaaggtactgatatctgacccataaatgactgacgagccccagtggtgaccccgtcactctgaagctgtctcctgaggctcactcagttgactccattcaccccatcagaaaacaacctgacaaaccttacccatttcaaatgcacaacatgacaaaatcttagccacacagtaactagcatacaaatattgccaattaaacacagatactaccgcaagaaatttaatgaaagctggagtaatttacgactaaataaataaaatattccattaacaaratatctttttgtaagggccaatctgtatttagtttcaactcatcactttggaggagatgtgacacatcttgttgagttttctttaaattttatttttttatagggatggtgtcttgctatgttgctcaggctggtctcaaactcctgagctcatgccatcttcccatcctggcctccaaaaatgctgggattacaggtgtgagccactgcacccagccatatcttggttttattagtgtgatctttggcatttttataattcacaattaaaaacacatgattatctaggacacaa

SEQ ID NO: 43052 - DNA, 599 bp, Homo sapiens
ttccatctgagcagcaagagtgactggaaggtactgatatctgacccataaatgactgacgagccccagtggtgaccccgtcactctgaagctgtctcctgaggctcactcagttgactccattcaccccatcagaaaacaacctgacaaaccttacccatttcaaatgcacaacatgacaaaatcttagccacacagtaactagcatacaaatattgccaattaaacacagatactaccgcaagaaatttaatgaaagctggagtaatttacgactaaataaataaaatattccattaacaaaatatctttttgtaagggccaatctgtatttagtttcaactcatcactttggaggagatgtgacayatcttgttgagttttctttaaattttatttttttatagggatggtgtcttgctatgttgctcaggctggtctcaaactcctgagctcatgccatcttcccatcctggcctccaaaaatgctgggattacaggtgtgagccactgcacccagccatatcttggttttattagtgtgatctttggcatttttataattcacaattaaaaacacatgattatctaggacacaa

SEQ ID NO: 43053 - DNA, 586 bp, Homo sapiens
aattttgtcatagttgactgcaggctttatcttccttgccctactatatccagtgtattagtctgttctcatgctggtaataaagacatacctgagactgggtaatttataaaggaaagaggtttgatggactcacagttccacatcgctggggaggcctcacaataatggctgaaggcaaataaggagtaaagtcatgtcttacatggcagcaggcaagagtgcatgtgcagggcaactcccctttataaaaccatsagatccgtgaaacgtattcactgtcacaagaacagcacaggaaagacccgcccccattattcaattacctcccaccaggtccctcccatgacatgtgggaattctgggagctacaattcaagatgagatttgggtagagacccagccaagccgtatcacactgtaaaccagcacgagcttatttactttttcttttctctccttatcctatgcaggaagtcaccacattctggtaattcttcctcttcctctctcttgcatcagctccttgttctccatggctgtttctctcatcccaattaggcccttatttccagaccatcaaaac

SEQ ID NO: 43054 - DNA, 586 bp, Homo sapiens
aattttgtcatagttgactgcaggctttatcttccttgccctactatatccagtgtattagtctgttctcatgctggtaataaagacatacctgagactgggtaatttataaaggaaagaggtttgatggactcacagttccacatcgctggggaggcctcacaataatggctgaaggcaaataaggagtaaagtcatgtcttacatggcagcaggcaagagtgcatgtgcagggcaactcccctttataaaaccatcagatccgtgaaacgtattcactgtcacaagaacagcacaggaaagacccgcccccattattcaattacctcccaccaggtccctcccatgacatgtgggaattctgggagctacaattcaagatgagatttgggtagagacccagccaagccgtatcacactgtaaaccagcacgagcttatttactttttcttttctctccttatcctatgcaggaagtcacsacattctggtaattcttcctcttcctctctcttgcatcagctccttgttctccatggctgtttctctcatcccaattaggcccttatttccagaccatcaaaac

SEQ ID NO: 43055 - DNA, 566 bp, Homo sapiens
taaattaaaatggacacaagccttcattcatcagacatttgagtgtctgtcctctgagttcccatagaatctgaattacaccactttattcayacttacattatgtgtttacttttctgagtgtcctattaatctttattccttaaaggaaagcctgagggcatcttgtttaacaatgcatctctctcttcatcaatcaacgctgcaggtgcttacaagacttataacttaaaaaaattataatacaaggctcagcgcagtgcctcaagtgccaacagtttctgtgggcctggcaggcggatcacttgaggccaagagttcgagactagcctggccaacatggtgaaacaccgtctgtactaaaaatacaaaaattagctgggtgtggtggcacgcgcctgtagtctcagctacttgggaggctgaggcaggagaatcacttgaacctgggaggcagaggttgcaatgagctgagattgcgccattgcacaccagcctgggtgacaagagtctcaaaaaaaaaattataatacaagtaattactttcgaattctgccatgggtatc

SEQ ID NO: 43056 - DNA, 1276 bp, Homo sapiens
  misc_feature (1)...(1276): n = A,T,C or G
agcttcacattaaatgaaaaaaataaatcatctaagttcaactgcagaactccctgtagattttaaagccacttagttacttaagttattactgtgttttcatcagactagatttttgttagggcatacttaacaaaaacctctgaagatatatttttctaagtatatttttttcatctgagtacagaagaaaataatgtaaaaatattaagaaaagtgataaagtcacctgactcatactgatgcagttctgttagcactaacttttgatgtaaagatagaagtaggctagcagcaccgctaccgtagttggctgcttaataagacaagtgtaggggtcctntagagtcgacctgcaggcagcaagtctgnnnnnnnnnnnnnnnnnnnnnnnnnnnnnnnnnnnnnnnnnnnnnnnnnnnnnnnnnnnnnnnnnnnnnnnnnnnnnnnnnnnnnnnnnnnnnnnnnnnnagcaaagcagacactaagttcatcataccgtgaaactgagtgggtaggaggtggctggtgtttgagaaagtctaggaggaaatgacacagttgattgtcttgccaataaaaaaagagaatttcctttatattttagcttgaagaaagactagttaaaaataaccaccatcatcaatagctaaccaaaattcagaaccagaacttagtagaagggtgtagacaggatggcatgagttggatttttaaaaaatttggtaaaggatacataacacaattattattgtagtcatttcaactgtacaattcaatggctytaaacatattcaccatgttgtttaactatcaccactctgtatttccagaacttttcatcatccaacatccaatgggctctgtgcccattaaacaataactctccattctcctccatcctccacctcccaccccttagtaaactctcttcttcctatgtctctgaatttacctattctatatacctcacataagtggaatcacataatatttgtccgtttatgtttggcttatttcacttagcaaaatgttgaaaggttgtacatatagcaggtatcaggattcctttttacggctctataatatcccactgtatgttcataccacatttgtttatctgctaacagacacctgagttgcttctactttttggctatcataagtaaaacttctttgaacattgttgtacaaatatgtgtttgagtccctaatttcagttcttctgggtatatacctagaagtagaattgctggatcgtatgataattatagtg

SEQ ID NO: 43057 - DNA, 653 bp, Homo sapiens
ctcgctgacttgtgtttttcacactggctttatcttggtttctgagggagaatcaattctctttaactctcttccagaatacctcactaccttcagaaaggaagaaggagggaaaaaaggacagagggaaggaggaggattagaattcctcatatcagagaatcccagagctttgaagctttaaagtgaattcaagagtgggattcaagagaccaaaccatggggtctaggggaaataaggaacccctctcccagaaggtggagaagcttctcaaagcaactggcccaggcagccttgtacttgcttcattctggggtcaggaagaagctgcaggccctccttcccaccctcgcttcccttctcctccacactgtcaactctgctccaggaaggggcagtakccccagtgtctgctgggccagcacagccatctctcacccacctgagttcataatgactcctgtgtagagcagacttcccttggcttcactgaaaccattccttcttgtcttagaaagcaatcagaaatatagttaactgccttaaagttcccttatcattgaaatgaactagatcacagaagtgcctatttgcattttttattcttattcactgggtttttaaaaggagccaagagaggggagaggaaatg

SEQ ID NO: 43058 - DNA, 653 bp, Homo sapiens
ctcgctgacttgtgtttttcacactggctttatcttggtttctgagggagaatcaattctctttaactctcttccagaatacctcactaccttcagaaaggaagaaggagggaaaaaaggacagagggaaggaggaggattagaattcctcatatcagagaatcccagagctttgaagctttaaagtgaattcaagagtgggattcaagagaccaaaccatggggtctaggggaaataaggaacccctctcccagaaggtggagaagcttctcaaagcaactggcccaggcagccttgtacttgcttcattctggggtcaggaagaagctgcaggccctccttcccaccctcgcttcccttctcctccacactgtcaactctgctccaggaaggggcagtatccccagtgtctgctgggccagcacagccatctctcacccacctgagttcataatgactcctgtgtagagcagacttcccttggcttcactgaaaccattccttcttgtcttagaaagcaatcagaaatatagttaacygccttaaagttcccttatcattgaaatgaactagatcacagaagtgcctatttgcattttttattcttattcactgggtttttaaaaggagccaagagaggggagaggaaatg

SEQ ID NO: 43059 - DNA, 1233 bp, Homo sapiens
tgcatcacaggacttaatacggtgaggtcattgttgtggttggttttaatatgaggggtttttttttgtgtgctgttgtaggacacagtttgcaattctggtgaaagtactttcctcctatttaactatgccctctaaacttaggtggtctcataacaatgatggagctactaattaaaaagaattccagtcttcacttgtgcctctgaaagaacataggagggaaccaattcataacccacagagacacttcttaatattccctttcttttttccatcacartttttctaaaacggctcccaccccacccctacccagtctaccaagcaatttctttccttccttacctctttcccaagataagttactttatttctttcacccttggatctccctgttgtaaaatgggtttcattgtagtacctggctgatatgttgttgtgaagattaactgagataaaacatgtaaatactaccaacagagtgcatggaacattgaaaatgctcctaacaattagatgttataattttcaattcagcctccccagcctcaattttgatcttctcagtggaaacactagagaaaaaaaaaaaaaacctggaagctgagaaaatggttcctaaagaataataacaatggatatcatttaccgagtgtgactcacgtcccaagcttgtggaaccatttctgtgcattatctttaatcctgaccacaacgctgagagatagatagatactattattacccctatttcacaaatgaggagactcggactaagagcgatgaagcaacctgccctgggccacagcctgtaggcagaggagctggagttcagaccctggcctgactgacttccaagttcatggtttaatggctctgcagaaagctgcaaggcagtggtgcagccagcatcagaaaggccagtgttctctgtgtgggttttgactcacaatggccatgaccccctgctcagagacatagggccttgatgacgactggcctgtccttgcaaacagctgccaggttggagccagaccccgcagggtggggtgaaaccacctggcctgtgccaaggtgaagtctctgaaggcctccttggttttcaatgagagacagagagaaatgtgtttttttctgcaaaggttggcatttatttcttaataatccgtttttaaaaatgtatgtggcctccctaatcagcaaaacaaaggcttactgtccttttatgca

SEQ ID NO: 43060 - DNA, 1233 bp, Homo sapiens
tgcatcacaggacttaatacggtgaggtcattgttgtggttggttttaatatgaggggtttttttttgtgtgctgttgtaggacacagtttgcaattctggtgaaagtactttcctcctatttaactatgccctctaaacttaggtggtctcataacaatgatggagctactaattaaaaagaattccagtcttcacttgtgcctctgaaagaacataggagggaaccaattcataacccacagagacacttcttaatattccctttcttttttccatcacaatttttctaaamcggctcccaccccacccctacccagtctaccaagcaatttctttccttccttacctctttcccaagataagttactttatttctttcacccttggatctccctgttgtaaaatgggtttcattgtagtacctggctgatatgttgttgtgaagattaactgagataaaacatgtaaatactaccaacagagtgcatggaacattgaaaatgctcctaacaattagatgttataattttcaattcagcctccccagcctcaattttgatcttctcagtggaaacactagagaaaaaaaaaaaaaacctggaagctgagaaaatggttcctaaagaataataacaatggatatcatttaccgagtgtgactcacgtcccaagcttgtggaaccatttctgtgcattatctttaatcctgaccacaacgctgagagatagatagatactattattacccctatttcacaaatgaggagactcggactaagagcgatgaagcaacctgccctgggccacagcctgtaggcagaggagctggagttcagaccctggcctgactgacttccaagttcatggtttaatggctctgcagaaagctgcaaggcagtggtgcagccagcatcagaaaggccagtgttctctgtgtgggttttgactcacaatggccatgaccccctgctcagagacatagggccttgatgacgactggcctgtccttgcaaacagctgccaggttggagccagaccccgcagggtggggtgaaaccacctggcctgtgccaaggtgaagtctctgaaggcctccttggttttcaatgagagacagagagaaatgtgtttttttctgcaaaggttggcatttatttcttaataatccgtttttaaaaatgtatgtggcctccctaatcagcaaaacaaaggcttactgtccttttatgca

SEQ ID NO: 43061 - DNA, 1233 bp, Homo sapiens
tgcatcacaggacttaatacggtgaggtcattgttgtggttggttttaatatgaggggtttttttttgtgtgctgttgtaggacacagtttgcaattctggtgaaagtactttcctcctatttaactatgccctctaaacttaggtggtctcataacaatgatggagctactaattaaaaagaattccagtcttcacttgtgcctctgaaagaacataggagggaaccaattcataacccacagagacacttcttaatattccctttcttttttccatcacaatttttctaaaacggctcccaccccacccytacccagtctaccaagcaatttctttccttccttacctctttcccaagataagttactttatttctttcacccttggatctccctgttgtaaaatgggtttcattgtagtacctggctgatatgttgttgtgaagattaactgagataaaacatgtaaatactaccaacagagtgcatggaacattgaaaatgctcctaacaattagatgttataattttcaattcagcctccccagcctcaattttgatcttctcagtggaaacactagagaaaaaaaaaaaaaacctggaagctgagaaaatggttcctaaagaataataacaatggatatcatttaccgagtgtgactcacgtcccaagcttgtggaaccatttctgtgcattatctttaatcctgaccacaacgctgagagatagatagatactattattacccctatttcacaaatgaggagactcggactaagagcgatgaagcaacctgccctgggccacagcctgtaggcagaggagctggagttcagaccctggcctgactgacttccaagttcatggtttaatggctctgcagaaagctgcaaggcagtggtgcagccagcatcagaaaggccagtgttctctgtgtgggttttgactcacaatggccatgaccccctgctcagagacatagggccttgatgacgactggcctgtccttgcaaacagctgccaggttggagccagaccccgcagggtggggtgaaaccacctggcctgtgccaaggtgaagtctctgaaggcctccttggttttcaatgagagacagagagaaatgtgtttttttctgcaaaggttggcatttatttcttaataatccgtttttaaaaatgtatgtggcctccctaatcagcaaaacaaaggcttactgtccttttatgca

SEQ ID NO: 43062 - DNA, 622 bp, Homo sapiens
cacctgtttgctttgttccttctctcagttgtgggtccagacacatcaactatgtaggaagcarggcctagagaggccccacctacactcttaaatccttataccctagttcacaaaaatcttcatgttccacagggctaaaagccctatgttgactagagacacggcaaaggaaccacaggttcagaaatatttgtcctgcaactctatcaagaatgtaactgtcagggcagccttcatcacagccagggttgtagatgctcatcccgcttctgcaagccaagggccaaggacccttgtggatggcagctctcttattaggatgggggattggaggtccttgagggcagagatggaaacaaagatttaacctcacagcccttaatccagagaagcacttcctgggtctggccattttctctcttgaagaataacatgattgtggaccagggtgatcaaaagaactagagaaatcaaaatgcacaattgatctttgatactcaccaaagtggggcataaagtacaatgaatgaagtttcaagtacaatcctctgtgggcctgtgggaggtgtttctagagtctgggaactccaaatggtaccatatcacggcctccttttac

SEQ ID NO: 43063 - DNA, 636 bp, Homo sapiens
tgcatgcagtgagcagctcccagcatccagtgggcagggagggggaaggaaaggtaagacacagtcctggggttcggggtgggtgactgtgagctcccctccggagctcactgtgaggctgacaggacagagccagcaggagaaaaccaaaaacctcagagactgagacggtgccaagaggaaggggctggggctctctggggcttcaggaagggctccgaggatgaggctgccctygcactgagccttaaaggatgagaaaaggcctgacaagctccaactaaagcgtggattccaggcagaggccacagcaaagacagagaacaaacaccaagtgccccgggggtgctgaagacacgcgcaggaatgaaggtcattagacagttgacaaggtgcgtggggaatcccctactcaggaatttgaatttaatttgggaaggtaatgggaagctctcagagaatgagaaaatggcaaagagctgggttcacccagatgatactagccagcaatattagaaagagctggaacaacaaatatttgtcaaatgtttgctgaacagaacagaattgacttagtcataaatttttttttctcactccccatgttcaggttcaggcctcttggtggggagagga

SEQ ID NO: 43064 - DNA, 525 bp, Homo sapiens
gaccctgcaaatgttcgtagtcttgtttgctggaccatgggttattggagcgtaaaacttcaccatatctttrtacccatccatcaccccacagcactgagtcaagtgcttccacatcataggcacttggtaaattatttttgaataaattattggaaaaaggtgaatttcttaacagagtttttactagctggaatcttggaactatatttcattagtaaaggtatttatgggaagtggaaaacaaacctccgatggtttccttttgcacctagagtaacagtcctaactaacatggcctcttccacaccctcctaaacaggccaagttcatctggcctcagggcttttgcatttgctgtagctcctacccggaatacttttccctcagatccttgcagggggagctcctgcttgtcattcaggtctggcttaaatgtctctcttcagagaggcctccctgaccacctgcagctaacgaatcctgtacccccacccccacatacaccctctctacccctcatcc

SEQ ID NO: 43065 - DNA, 592 bp, Homo sapiens
atgcacaattatatctccattttaataaatttctctttttgtttaaaaccaagatttaaaaatgtgttccccaactatcctgagctcagagcataaaccttccagagtggagcatgtgaaagacacagtgctgtattttccatgaatattgttaatggcaggaactgagaggtatccatgtggctgaggctaaaaagcccaagcagggctttaccgggctatcttgatcttcaccactgagcctgctctcagatgcacctgtagctttatgagattcaaattcagttccaactgggctttgtccatttctctggctttagcagtcctwttgcatggggtaaactggttcttgatgagtcttgcaccctctaggaccccttatgttgaaggcagctccagggacctcttaacacccattctttacattcattcattccagtagagaggggcctcgacagacaagccacgccctagaacttcagtctcactcctgatgcacagaaaccagatatgagcagatgaaatttgcctggaaatctcaagagccattaacttctctgaagtggggtccatcatgataagtctgaacatc

SEQ ID NO: 43066 - DNA, 626 bp, Homo sapiens
ttctggggcctctgtttcagccaccctgctcccgtgtgggtgcagcccccacacagggttatgggtggtacaactcttgcggtttaytctgtttccagaaacccttagtgaaattacagctttaattaaatacagctggctgtatgttatactctgtataattatcacttagacaaaagttcaaacaaagtttattgtaaattctatttgacagaaacaactggaagagctgagggctattggcctgcctgagtgacagagaggtggagccactgctgctcagtgggaatggaaagaaggagccctctgagggatacaggtgtgcatggggcatttgggaagacagcaccctggatccaggtcagactaggttgccatgtgatactggacaagtccctgccccatctctagggctcagttcccttccctggggtagagaggtttcatttctcttgcagatattgactgagagctactatgtgtcaggcactgttgtaggccctggagctcggtggccaaccaagcagataaaagtcctgacttcagctgggctcagtggctcaagcctgtaatcccagcactttgggaggctgaggcggatggatcacctgaggtcaggagttcga

SEQ ID NO: 43067 - DNA, 2065 bp, Homo sapiens
ccactgaattaacccatgtgatcttttaaaaactaatcttggccaagtgtggtggcttactcctgtaaccccagcactttgggaggccaaggcgggcagatctcttgaggtcaggatttcragaccagcctggccaatatgatgaaacctcatctctactgaaaaattaaaaaaattagctgagtgtggtggtgcccacttgtaatcctagctgctctggaggctgaggcatgagaatcgcttgagcctgggagacagaggttgcagtgagctgagatcatgccactgcacttcagcctgggcgacagagcaagactctgtctcaaaaaaaataaatacataaaaaataaacaaaaacaaacaaacaaacaaatgaatctgataaaataacacaggttaaaaaaactttactaaccctcttagattaatatttcaaagctctttaacatctgcccactttacctctacagaattttcaacataacatctttgcataaaacattcattccaaccaaccggttctactccctgccatgcaatcttgactgttccttctcattgccactgtgccctgtgtgtgtcctggccttagctgctttcatttttctctctgattatctcctaggctaaattcaagtcatgcttcctccacaaagtttgtgcaaatgactttctctctgaatctctagagtactgatggtccatcctcaacaatttaagatctcttagattattgctatcattttatgtctgtattactatttccaattgaccaggcacttttattttatgtgcttccaggagattttcagttcctaaagatgtcttgtacttgtcattgtgtctctccaataccttacccaatggcttgcacatggctgactgtctcatacattctctaatctgtatagtccagctgatctagttaaatcatttaacctgaatcaaaagactaagtgatggactgttatggaatagtggtaaaaattttaatcatatttgtagtccaggtgcctttaatagatagatttccagatctgccacttactagatagtgacttatcttggacaagtcatttcaccttttatagccccagttttcttcatctgtaaaattgaaagaataataatgactctcttgcctatttcactagattactgagagaagcaaatgatgtaatgtctttgaaggtgtttatacaaagtcaagtatcttacaaatatgaatgatcctagttgggcaaatgaaacactatttttagaaatcccatatcaaatgcagtcaggaactcctaaactgatcaagactggtgtgatcaagatcattttaaggcatattatgatcaattttaaacagtgctgtgagtcagattgctatccttgccttacaggtggaagtttgatgttatctagaagcaaatggtttaagtaaaatcactgacagcaccactatgagatgtctttactgttccagttggtagctttcagtctatttagcaccactgcttcctcctaaacttttctttaagcctcattaaagttctgattcttagggattaatataagcagacactgataatatcaagctctcctctctataattccaagaacccttggaattagcataaattacattcctgaatccatcatttggttccatatctcttcaaagtcttttctgacccttctcatcaccctcaaatccatgtccctttctcataagctcagttctttgccattccatcattactaacttcctgtaagacatctccacttggatgtctcacaaaaatcttgaatttaagaaaatcaaggggctaaggcaagcagactgcttgaggtcagaagttcaggatcaatctggaaacatggtgaaaccccatctctacaaaaaatacaaaatttaaccaggcatggtggtaagcacctgtagtcccagctacttgggcggctgagacaggaggatcacttgagctggggaggtcaaggctgtagtgaacgtattcaggccactgaactcaagcctgggtgacagagcaagcctctgtctccaaaaaaaaaaaag

SEQ ID NO: 43068 - DNA, 1981 bp, Homo sapiens
cctcttcctggtgctgagagtgctgtaggcaggagtctctctgctgcagacagctgccttgcctgaagttaccctcccttcctgaggtggcctgtctccaatatgtgagatgacagggtctgacctcttgtccgtgctgaagacatctctgaaggaccaacttagccccgcctcctattggggtgggatacacttatatatctttcaggtatctcatattttagaataaaattaaagtaagcatgatgcatggccttcataaatctgggctgcctggtttattctcccaccataacagtgtttctytaatttttaattttaatctcaatggtctttcactttcagaatggtagattccgcacaagtgtacaccttcatcatgctactacccactatgctttacttcctagtagatctttttcttttaaacaaatagtaacatttacttcccattttagaaacctaaattctgtatttactttgtctttaatatgcatacatagattgttcctgacaaatttccgaagataatcacctctttggaagctgctcttccactttgttgcagtcatattgtccatacaatttatctttagttgttttttttttcttctggatttcttactctctgttccttgaattcagtgtcctttctttttgatggcatctcggagcctctgacaaaaaatttcccacgtgttctttgcaaaataaactcctcttgtcagtcagtatactttccattaaaccataactctaacatgagaaaggattatctctcttcctatatatattgtatttttttcattgaatataagtcacaagggcttaatttagaaaaaaaatggtgattattactctaccatcgactgaactgattgttaacaactctaacatattttctgaagtcaggtcttcttatgatgaaagaggaattcagacattacctgtgcccccaggtctctgtttcttgacctgagcttcaaagtctccagagatacatggtagatttttaacgatcgtatcatgtgttcctacatgaatcagcagaggtgggtagtgatcattgtctgattagtctggcaggttgtcggccgtagcttgcaggggtgctatgtgaagatggcggaattcccaacgtgcttctgcaaaattttatgtattcatccccctctgctctcagtagggtgttaccacctgcggatcctttgctttccccgctggatactaacagcctttttcataattgctagcacctatggaattgagtgttgaactgaacaaacaatagtctttctctgtaatgtcagagttattcataagacgaggcagtgttagacataagaaagagcactgggcaaagaatcagacaaccaggatttggttccattcttttattatcaaagaataaaaaaaaacaatattattttaagatgcagtcccaagtcttataaggaatttgaaggcttctgggatctaatctaggtcatgcccattctgccttcccttgctgtgtgcccctgacacaagcatggaaacatgtattcacttacctttgcccttgggaacactttggtggggaaaaatgttgatataggttagcatttttataaactgtcaagttgtacgtatataaattaataggaaagttttaacgaaaagtgtccttccctgaggtaaataattcctccctttctttctgctgtgctctgtcactccacactcctacccactggcatctcttcccttatcctctgggaaacttcctctttctggctttcttcctagaatctttttctcccttcttctctaagaatcctttattgtacaaactgggcaacatggtgaaagcctgtctctactagaagtacaaaatggtggtacatgcctgtacttcagctaccagaggctgaggtgggatgatcgcccaagcctgggaggtccaggctgcagtgagctgagatcagaccagtgccctcca

SEQ ID NO: 43069 - DNA, 477 bp, Homo sapiens
aaaaagacaaatttctgcagctgctttcagaaaaacacattgccatgagctatgcctacactataatgacaaatcatatttcatatatatgtacatatatattcaatccacacatattccatttacatttttgaaaataacacatgtattcaatcaaattaacaagagtaatagaagacattttctaaaatrtatacactaagtatatcacagttttctagtgatcattttgatacagcaacttagaatctatggcttcaacacacaaagaggcttacgtaagagaaaagcaccacataattcaagatttgaaatgtgatcatcattgctacttttaactggcaattacccaggaaatgtattgtaaactcctttgtgactatggcgactcatttaatctttgtgatccttggtctgattttctcaaaaagatgagtaacaccattttataaacttgctctaaaaattaaatgatag

SEQ ID NO: 43070 - DNA, 477 bp, Homo sapiens
aaaaagacaaatttctgcagctgctttcagaaaaacacattgccatgagctatgcctacactataatgacaaatcatatttcatatatatgtacatatatattcaatccacacatattccatttacatttttgaaaataacacatgtattcaatcaaattaacaagagtaatagaagacattttctaaaatatatacactaagtatatcacagttttctagtgatcattttgatacagcaacttagaatctatggcttcaacacacaaagaggcttacgtaagagaaaagcaccacataattcaagatttgaaatgtgatcatcattgctacttttaactggcaattacccaggaaatgtattgtaaactcctttgtgactatggcgactcatttaatctttgtgatccttggtctkattttctcaaaaagatgagtaacaccattttataaacttgctctaaaaattaaatgatag

SEQ ID NO: 43071 - DNA, 1376 bp, Homo sapiens
atgggagctctctgtactatctttgtaattattctgtaaatttaacattgctctaaaatgaaaagcttattttaaaaactagagttgttaggccgggtgcagtggctcacacctgtaatcccagcactttgggagtctgaggcgggtggatcacgaggtcaggagatcgagaccagactggctaacacggtgaaaccccgtctctactaaaaatacaaaaaattagccaggcgtggtggtgggcacctgtagtcccagctactcgggaggctgaggcaggagaatggcgtgaatctgggaggtggagcttgctgtgagccgagatcacgccaatgcactccagcctgggagacagtgagactccatctcmaaaaaaaaaaaaaaaaaaaaaaaaaaaaaaaaactagagttttaacatggctgaaacttggccaatgtttttaattattgcggtgattagttttcataattgatgatgaagatagtttgaaacctgtatgagaatatttgaataagatattttataagtaaataataatatgcactcaggtaaatgacaatatgcattcagatgacttttccttcaattttgtagagattttgcggtcatctttggctcgaattatttagatgattgtctcaatattccatgctgtttatattttgaaaataacctatctttataaaaacttgaacaaagagatggcaaatcaaaaaaagtaagagagcaacattggttttaactgataagtggaataaataaagaacagataaggatcctactcaaaaaagaatgctgtgataaatatttttgaaaactgatcatctccttgtaacacatacaaccactggattttttctcttcataaataccgacttctgtgcactatgtttatttaaggtgatgtgtatctctacaaacagaagactataaagtatatccactggtatcaaaccaaaaatcaccctagaatgcaggggtcaccagccaaattaccacagagatcagagagctctgggcctatttacaccatcagaaacagagcaccagccagaaggaaaacatcctgcacctgagaactgatgataaatccatcatcatcccacaggagctaatgcagttgagcccaatcagagcaacaagctgaacgaacatgaccttatacatgaagtcagcctttttactcatcaccctagctagtgtcaaggcagaaaggtcaagcaaagagcggggagcaaagaaattttgggatgtctatctcagcattgctacgaagttgagaggacaaatcctcaaaccgtgactctccataactatcttgcagggtgtacagaccctcaaggagcattgtatttgtctgttttcacactgctga

SEQ ID NO: 43072 - DNA, 1376 bp, Homo sapiens
atgggagctctctgtactatctttgtaattattctgtaaatttaacattgctctaaaatgaaaagcttattttaaaaactagagttgttaggccgggtgcagtggctcacacctgtaatcccagcactttgggagtctgaggcgggtggatcacgaggtcaggagatcgagaccagactggctaacacggtgaaaccccgtctctactaaaaatacaaaaaattagccaggcgtggtggtgggcacctgtagtcccagctactcgggaggctgaggcaggagaatggcgtgaatctgggaggtggagcttgctgtgagccgagatcacgccaatgcactccagcctgggagacagtgagactccatctcaaaaaaaaaaaaaaaaaaaaaaaaaaaaaaaaaactagagttttaacatggctgaaacttggccaatgtttttaattattgcggtgattagttttcataattgatgatgaagatagtttgaaacctgtatgagaatatttgaataagatattttataagtaaataataatatgcactcaggtaaatgacaatatgcattcagatgacttttccttcaattttgtagagattttgcggtcatctttggctcgaattatttagatgattgtctcaatattccatgctgtttatattttgaaaataacctatctttataaaaacttgaacaaagagatggcaaatcaaaaaaagtaagagagcaacattggttttaactgataagtggaataaataaagaacagataaggatcctactcaaaaaagaatgctgtgataaatatttttgaaaactgatcatctccttgtaacacatacaaccactggattttttctcttcataaataccgacttctgtgcactatgtttatttaaggtgatgtgtatctctacaaacagaagactataaagtatatccactggtatcaaaccaaaaatcaccctagaatgcaggggtcaccagccaaattaccacagagatcagagagctctgggcctatttacaccatcagaaacagagcaccagccagaaggaaaacatcctgcacctgagaactgatgataaatccatcatcatcccacaggagctaatgcagttgagcccaatcagagcaacaagctgaacgaacatgaccttatacatgaagtcagcctttttactcatcaccctagctagtgtcaaggcagaaaggtcaagcaaagagcggggagcaaagaaattttgggatgtctatctcagcattgctacgaagttgagaggacaaatcctcaaaccgtgactctccataactatcttgcagggtgtacagaccctcaaggagcattgtatttgtctgttttcacrctgctga

SEQ ID NO: 43073 - DNA, 555 bp, Homo sapiens
catgaaatagttgccgtaagtgttttatttccacttttgtcacttgtactttcatctccattaattctcatcttagcaatgatttcttccacggctgcccatgggcaggcccagtgttagcatggagtttaaatgttgtgtttctgcttgagaaacagtctaaccagctgctggcagccagcacctcactccatctcttagtttgcaacaagaggggcctaggagactttgagcctgtcccaaggcaagaacagaagagagttgaagaaagaactgctagaataagagctaaaacagcatttattacagaatggccaaaggtaaatcctccctctccccccattaggtttcccaaaagaaaacacaaatgcagcctaattagaccccgaaaaaaaatgcagagaatgtttgacataaaakaattaatgccaaacgccgcaaagcccaataactaggtggtaacattcaggttcctccattcgtttactgtgaaacagtcttaaccacacggttatgttacatattcatgttcctatacatcatgtgttaatatac

SEQ ID NO: 43074 - DNA, 318 bp, Homo sapiens
acctcatgatccgcccatctcggcctcccaaatatattgcttcttaattctctccttctcccacagaagagttgcgacaagttctggaagggtggtggatgggttgtggcaaactggaattttgattcaaagcaaagacaactagattcattgctgtcaggaacccaaagcacatggctgcctgtctcaacaaaacaagagaacctagaccccaagttaatgtcagcaaattgggatgcacctcctggcactatcacaaaggtattgacacagtgactgaaacasggggatccctcagaagcagtctggaaagaactt

SEQ ID NO: 43075 - DNA, 1193 bp, Homo sapiens
cttgagtccaggaggttgaggctacagtgagctgtgatcacaccactgtactccagcctgggcaacagacagagacactgtctcaaaaataatgaagaataaaaacgaagaaaatgtgtagtatgagttaacaattttacgtataatccatatgacactcctttgtataagaaatatcttcaacagtcaccatcattttaaaagatgtttcccacagaagattcattaattgaggcctcaaaggcctcaatagtatctgtatttacataacaggatacatagttttttatagctaagaaacaccatacataacatttctcaagtaaatctaccagtccttagactgatacatcggctgttagtttaaaattctttcggcagttgaggccggtgaataagtctctgacattatcagaaagggttgttaacggacacacgaataaaggaaatagagcaattttgatctcaatatttgactgctgaacatattggatcaatttcgcacttgcatctttagaaacaaagcattttaaagtatgtcagctataaactacaatttttcctcactctcaacagtacacgtacattctctgtaagtgtatgaacgatatgtttatttccattggtgtctatataggcaaatgcatttttttcccactactggaatgtaattaacttaggcagcagagggtagcagtgtcttaatggcacaaacaagtagccaaactcccattatttctctaacagactttaatataaagtacggaggttcccacaccaccttgcagtctcatggctaaaggggcatatgaagacctattggataaatgacagaaaactgagtggaggatttatctccttagctttcatcttcaataatgacatggctgatggtgagcaaataacttaattcccatttctcttttccacagacagtgatatgattcacttcacaaagctaccgatggttagaactagaaattaacagtttttgaaacaactggaacctatttccttcttagtgtacatgaatgattcataccactgttaataacagttgaattcttgcattagaaagaaaaatctcctcaatgtggaatgttgacccaactcagtaaaaagcctctaaagcaataaactgctgagattcaatgaaacaaaaccacctaatatccaagaaaacyatattagaa

SEQ ID NO: 43076 - DNA, 1226 bp, Homo sapiens
tgtgagacatatatgtacacagaatgactgaaaacgatgagaaagaggcatatgtgcatttattcacacacaaggggccaaacaatcatctgtgcctatagagcacctatgtgaccttcttaaagcaaaaaatgaaataaagtttcagaaggatagagaaaaaaagccttctaggcatatgatactgcattatcagataaatatctctacagcagctgagaggaattgatgataatctaagatcattaagatgtagttgaattacagttggccagcctgggcaacatggcgaaaccccatctttacaaaaaatacaaaatttagctgggcgtggtagcaatgtgcctgtagtcccagctattcaggagggtggggtgggatgatcacctgagcccaggaggtcgaggctgcagtaagctgtgatcataccattgcactccagctggggtaacagagtgartccccatctcaaataaataaataaataaataaataaataaataaataaaaaactaacagttggagctgggcgcagtggctcacgccggtaatcctagcactttgggaggcctaggtgggcggattacctgaggtcaggagttcgagaccagcctggccaacatggtgaaaccccgtctctactaaaaatacaaaaattagccgggcgtggtggcacatgcttgtaatcccagctacacaggaggctgaggcaggaaaatcgctttagcccaggaggcggaggttgcagtgagctgagattgtgccactgcactccagcctggctgacagagcaagactctgtctcaaaaataaataaataaataaataaataaataaataaataaataaataacagttggaacatcctatttacaaaggtccataagctataagaatgtatagttatagtgcctaataaaacgcctagcacatggctggtgctcaatataataatgcactttagaaggcttttccttaaaaaaatattctagcattcaaatggttaatgctcaaatttggaaaatcctggttatctataaacagatatatgcttactagaattccagataattgagatttcactgaataactgttcaaagtgtttcacagcgttttattgcacaggatactaaaaacatgaaatgaatggcttatggcaattatctgtgatgtaactgacaacttaatagggacattttgattgatctggaaatagtcagctatga

SEQ ID NO: 43077 - DNA, 1226 bp, Homo sapiens
tgtgagacatatatgtacacagaatgactgaaaacgatgagaaagaggcatatgtgcatttattcacacacaaggggccaaacaatcatctgtgcctatagagcacctatgtgaccttcttaaagcaaaaaatgaaataaagtttcagaaggatagagaaaaaaagccttctaggcatatgatactgcattatcagataaatatctctacagcagctgagaggaattgatgataatctaagatcattaagatgtagttgaattacagttggccagcctgggcaacatggcgaaaccccatctttacaaaaaatacaaaatttagctgggcgtggtagcaatgtgcctgtagtcccagctattcaggagggtggggtgggatgatcacctgagcccaggaggtcgaggctgcagtaagctgtgatcataccattgcactccagctggggtaacagagtgagtccccatctcaaataaataaataaataaataaataaataaataaataaaaaactaacagttggagctgggcgcagtggctcacgccggtaatcctagcactttgggaggcctaggtgggcggattacctgaggtcaggagttcgagaccagcctggccaacatggtgaaaccccgtctctactaaaaatacaaaaattagccgggcgtggtggcacatgcttgtaatcccagctacacaggaggctgaggcaggaaaatcgctttagcccaggaggcggaggttgcagtgagctgagattgtgccactgcactccagcctggctgacagagcaagactctgtctcaaaaataaataaataaataaataaataaataaataaataaataaataacagttggaacatcctatttacaaaggtccataagctataagaatgtatagttatagtgcctaataaaacgcctagcacatggctggtgctcaatataataatgcactttagaaggcttttccttaaaaaaatattctagcattcaaatggttaatgctcaaatttggaaaatcctggttatctataaacagatatatgcttactagaattccagataattgagatttcactgaataactgttcaaagtgtttcayagcgttttattgcacaggatactaaaaacatgaaatgaatggcttatggcaattatctgtgatgtaactgacaacttaatagggacattttgattgatctggaaatagtcagctatga

SEQ ID NO: 43078 - DNA, 559 bp, Homo sapiens
  misc_feature (1)...(559): n = A,T,C or G
ttctaaaccctcctctctcagctgtgtgtcctcttgcctcaggaggaggctactgacaaatggacctgatgcacctgtgttttctggacacagtatcaatccacatggtgctttttttkgggggaggggggcaggttcataatataaggcaaggttcaaaactgnaggacttacatacacatctagatttctatcttttcttgaaaaccctggaaatctgggaagactagatccaaatttccttgattggaacaactggccagagttgagttctcactacactttgccacagtctccagcactccctacagccatgcactgaggatgattaccacttgccagtcactgggatgcttctacacctgtgtttatcgctcccaagcttcacttctcagtacataatcttcttggcccatgttagcatttgagtttgcaacctcgactcaacatcatatttttttcataaaatggtagctttgtcagaggtgtttgaaatagggcgactccatcttaaatagagagtggataaaataaggctgagacctactgggctgcattc

SEQ ID NO: 43079 - DNA, 1053 bp, Homo sapiens
aaaagtgtctggctcatggtaggttctccatgtctcttctgattgcatggtcaagacttggaagatggaagttaatgctgtgcactgagcatactgaggccagagagcgctcaagcaaggccaggcaagaaagcagcatggtgaatcctgggtaagcgtggtgggagatgagtgacattctgatatgctgcagagagaaatagagggagtggctccccttctcacaagggtgtcctggtatcccggactggactagtcaaccctccacctcaccctctgctgtccccctgtctggctatagtaattggaggaaaggtaagcacttcatacaacagagcagtaacagcccctctccccaaggtagctgtccactgcaggggccacagrgccatgtcccagtgggaagctgccctgtgattttctgaaatttccaaattgaaactcagaagtcctggccaggcgtggtggctcatgcctataatcctagcactttgggaggccaaggcgggtggatcacttgaggtcaggagttcgaggccagcatggccaatgtggcgaaatcccttctctactaaaaattaaaaaaaaaaattatacaggcgttgtggcgcatgcctgtagtccccgctactcaggaggctgaggcagtagaattgcttgaacccaggatgtggaggctgtagtgagcagagatccagcctgggtgacagagtgagattccgtcccaaaaaaaggtccttttaggagtccagagatgttggcagctatgaaccaatgtagttttacagaaaatccaacccagaagtcaaaatctgagtaatcagcagttcattcctgttgatatctgattgtccctatagtcagtgcctctcttgacccattcctttcctaacccttacatgatctggtttgagttatatgcaaccaaagagacttgactagcacaccttctgctggctcactctcagcctaataccaccactactaaaactcataacactctgtttcaacacagaaatagaaatacttacaaaaatatgttgctttgactac

SEQ ID NO: 43080 - DNA, 1053 bp, Homo sapiens
aaaagtgtctggctcatggtaggttctccatgtctcttctgattgcatggtcaagacttggaagatggaagttaatgctgtgcactgagcatactgaggccagagagcgctcaagcaaggccaggcaagaaagcagcatggtgaatcctgggtaagcgtggtgggagatgagtgacattctgatatgctgcagagagaaatagagggagtggctccccttctcacaagggtgtcctggtatcccggactggactagtcaaccctccacctcaccctctgctgtccccctgtctggctatagtaattggaggaaaggtaagcacttcatacaacagagcagtaacagcccctctccccaaggtagctgtccactgcaggggccacagagccatgtcccagtgggaagctgccctgtgattttctgaaatttccaaattgaaactcagaagtcctggccaggcgtggtggctcatgcctataatcctagcactttgggaggccaaggcgggtggatcacttgaggtcaggagttcgaggccagcatggccaatgtggcgaaatcccttctctactaaaaattaaaaaaaaaaattatacaggcgttgtggcgcatgcctgtagtccccgctactcaggaggctgaggcagtagaattgcttgaacccaggatgtggaggctgtagtgagcagagatccagcctgggtgacagagtgagattccgtcccaaaaaaaggtccttttaggagtccagagatgttggcagctatgaaccaatgtagttttacagaaaatccaacccagaagtcaaaatctgagtaatcagcagttcattcctgttgrtatctgattgtccctatagtcagtgcctctcttgacccattcctttcctaacccttacatgatctggtttgagttatatgcaaccaaagagacttgactagcacaccttctgctggctcactctcagcctaataccaccactactaaaactcataacactctgtttcaacacagaaatagaaatacttacaaaaatatgttgctttgactac

SEQ ID NO: 43081 - DNA, 537 bp, Homo sapiens
acttggatttttaagtaaaatactataaaagaagaaaaaacaaaaagaaaaacatcgttctctaaaaacaaaacaattctattcagtcaccacccctgctttcataaggaggcacatatgtatttctagtcaccaatgttgacattattaaaagttttccattgtcattttctattttgaggaagagaaatattgtgcaatatttatcattcaatgcagccaatgctcaagtgtccagctcaatagcccttcagctccctgcatagtggtccctgtagcacttcacrtttaaaaactattctatacgttaaatcagttcatcaccatcagaaccttaggaggcccaaagaatactatgccccagggcacctagcaaactgcaaagtacttgaattaaattatttcccctgaagcaaccaccattgcacctatgccatgtgataacctgatcaaagagatttgtgtttcatcaggagtcaaggataaaattggtaacggattgagagatgcttgtgagcagtgtgcagtaataattag

SEQ ID NO: 43082 - DNA, 567 bp, Homo sapiens
tggctgttggacargaatgcatggccgggtctgagctgctgaccccacagagacactgtgacaagtcctcaggctgcccaggcagagccagcaccctgggcaacgtgtcttccagaatgtttggacgagacactaggccatcacagacatttgtaaatcttgttgttttatccaacgataacacagagcaaaaatattaatgccataattttaaaaacacattactttcaaaatgtttttaattgacacataatcattgtccacgttattggggtccacagtgctctttcaatgtatatcatacatacagaccagatcagggtaattagcatatccattattcccaacacaaagaaataggaagtaatactttttatacctaattacttcagcaatgattggactgcactgaaaacaagcatgaaaatgctcagctccaaagacatctatgccgaaagtcaagggagactaaaagaggaaatgtcgagtaaaacttccttttcaaccagagcaacactacaatacatacatgattaaattaagtccctaacacattatttaggcttt

SEQ ID NO: 43083 - DNA, 567 bp, Homo sapiens
tggctgttggacaggaatgcrtggccgggtctgagctgctgaccccacagagacactgtgacaagtcctcaggctgcccaggcagagccagcaccctgggcaacgtgtcttccagaatgtttggacgagacactaggccatcacagacatttgtaaatcttgttgttttatccaacgataacacagagcaaaaatattaatgccataattttaaaaacacattactttcaaaatgtttttaattgacacataatcattgtccacgttattggggtccacagtgctctttcaatgtatatcatacatacagaccagatcagggtaattagcatatccattattcccaacacaaagaaataggaagtaatactttttatacctaattacttcagcaatgattggactgcactgaaaacaagcatgaaaatgctcagctccaaagacatctatgccgaaagtcaagggagactaaaagaggaaatgtcgagtaaaacttccttttcaaccagagcaacactacaatacatacatgattaaattaagtccctaacacattatttaggcttt

SEQ ID NO: 43084 - DNA, 567 bp, Homo sapiens
tggctgttggacaggaatgcatggccgggtctgagctgctgaccccacagagacactgtgacargtcctcaggctgcccaggcagagccagcaccctgggcaacgtgtcttccagaatgtttggacgagacactaggccatcacagacatttgtaaatcttgttgttttatccaacgataacacagagcaaaaatattaatgccataattttaaaaacacattactttcaaaatgtttttaattgacacataatcattgtccacgttattggggtccacagtgctctttcaatgtatatcatacatacagaccagatcagggtaattagcatatccattattcccaacacaaagaaataggaagtaatactttttatacctaattacttcagcaatgattggactgcactgaaaacaagcatgaaaatgctcagctccaaagacatctatgccgaaagtcaagggagactaaaagaggaaatgtcgagtaaaacttccttttcaaccagagcaacactacaatacatacatgattaaattaagtccctaacacattatttaggcttt

SEQ ID NO: 43085 - DNA, 567 bp, Homo sapiens
tggctgttggacaggaatgcatggccgggtctgagctgctgaccccacagagacactgtgacaagtcctcaggctgcccaggcagagccrgcaccctgggcaacgtgtcttccagaatgtttggacgagacactaggccatcacagacatttgtaaatcttgttgttttatccaacgataacacagagcaaaaatattaatgccataattttaaaaacacattactttcaaaatgtttttaattgacacataatcattgtccacgttattggggtccacagtgctctttcaatgtatatcatacatacagaccagatcagggtaattagcatatccattattcccaacacaaagaaataggaagtaatactttttatacctaattacttcagcaatgattggactgcactgaaaacaagcatgaaaatgctcagctccaaagacatctatgccgaaagtcaagggagactaaaagaggaaatgtcgagtaaaacttccttttcaaccagagcaacactacaatacatacatgattaaattaagtccctaacacattatttaggcttt

SEQ ID NO: 43086 - DNA, 567 bp, Homo sapiens
tggctgttggacaggaatgcatggccgggtctgagctgctgaccccacagagacactgtgacaagtcctcaggctgcccaggcagagccagcaccctgggcaacgtgtcttccagaatgtttggamgagacactaggccatcacagacatttgtaaatcttgttgttttatccaacgataacacagagcaaaaatattaatgccataattttaaaaacacattactttcaaaatgtttttaattgacacataatcattgtccacgttattggggtccacagtgctctttcaatgtatatcatacatacagaccagatcagggtaattagcatatccattattcccaacacaaagaaataggaagtaatactttttatacctaattacttcagcaatgattggactgcactgaaaacaagcatgaaaatgctcagctccaaagacatctatgccgaaagtcaagggagactaaaagaggaaatgtcgagtaaaacttccttttcaaccagagcaacactacaatacatacatgattaaattaagtccctaacacattatttaggcttt

SEQ ID NO: 43087 - DNA, 1083 bp, Homo sapiens
ccacttgaagcacacaaagagtcttgactttttagttttttttttttttttttgcggtgcctgccctctgcctcctgaccacccctscggtatttattcctattgagcagactgggaagtgacgctaggtgcgtgtgagcagagatactgtattttatgaacaatcttcataactccctgtgggtcaatcccataactccctggctgccactccagcctttccagccattatgacaattcaccccacctggcttgtgacagttaagcattaccatgtggcctctacttttcgaggttcgagtatccctattgatcctcataagccaggtcttgaaactgaaccacccaccatcagtcctggcctgcagaaaggagcaagatcagagcctcccaggatgtgaggaccacgcccccggcatgctgtttattgtgttgctgtgcccattgccagccagtcagcctggtgcaggctgattaaaactcttaggcagttgcctcaaagagacattaagccttgcttgaattaaatgctgacacacattagacactagaactttcatatggttccatgtcattgtgaaattgatggagtttctctgtttgtttctttaattttaatttttctaaagcacaagattgaaataagcctcgctattaggtagttgagagataagcttggtattcactgtgggaaatctttatgacagacgttattgtttggggtatgtattaagagaaatggttaaactgtgaaggcctctaagctaaactctggcttttggatcataaaacctcttccatttacacaaataaattacattatgttactttctcctgttttatagctgaaaataccaagtgttttggtagacaaatgacaagctatcagcctgtccctattgcaagttgcagacagatgtttgataaccacagttatcacagatggaaggggctgtgtcgagacaccttctcctggggggctattagtctctgatctgtgatatgctgtgggggaagagagaagaaaataggaagcaccagcattacagccatttatcacccaccactgtgtgtggaataaat

SEQ ID NO: 43088 - DNA, 1083 bp, Homo sapiens
ccacttgaagcacacaaagagtcttgactttttagttttttttttttttttttgcggtgcctgccctctgcctcctgaccacccctgcggtatttattcytattgagcagactgggaagtgacgctaggtgcgtgtgagcagagatactgtattttatgaacaatcttcataactccctgtgggtcaatcccataactccctggctgccactccagcctttccagccattatgacaattcaccccacctggcttgtgacagttaagcattaccatgtggcctctacttttcgaggttcgagtatccctattgatcctcataagccaggtcttgaaactgaaccacccaccatcagtcctggcctgcagaaaggagcaagatcagagcctcccaggatgtgaggaccacgcccccggcatgctgtttattgtgttgctgtgcccattgccagccagtcagcctggtgcaggctgattaaaactcttaggcagttgcctcaaagagacattaagccttgcttgaattaaatgctgacacacattagacactagaactttcatatggttccatgtcattgtgaaattgatggagtttctctgtttgtttctttaattttaatttttctaaagcacaagattgaaataagcctcgctattaggtagttgagagataagcttggtattcactgtgggaaatctttatgacagacgttattgtttggggtatgtattaagagaaatggttaaactgtgaaggcctctaagctaaactctggcttttggatcataaaacctcttccatttacacaaataaattacattatgttactttctcctgttttatagctgaaaataccaagtgttttggtagacaaatgacaagctatcagcctgtccctattgcaagttgcagacagatgtttgataaccacagttatcacagatggaaggggctgtgtcgagacaccttctcctggggggctattagtctctgatctgtgatatgctgtgggggaagagagaagaaaataggaagcaccagcattacagccatttatcacccaccactgtgtgtggaataaat

SEQ ID NO: 43089 - DNA, 1083 bp, Homo sapiens
ccacttgaagcacacaaagagtcttgactttttagttttttttttttttttttgcggtgcctgccctctgcctcctgaccacccctgcggtatttattcctattgagcagactgggaagtgacgctaggtgcgtgtgagcagagatactgtattttatgaacaatcttcataactccctgtgggtcaatcccataactccctggctgccactccagcctttccagccattatgacaattcaccccacctggcttgtgacagttaagcattaccatgtggcctctacttttcgaggttcsagtatccctattgatcctcataagccaggtcttgaaactgaaccacccaccatcagtcctggcctgcagaaaggagcaagatcagagcctcccaggatgtgaggaccacgcccccggcatgctgtttattgtgttgctgtgcccattgccagccagtcagcctggtgcaggctgattaaaactcttaggcagttgcctcaaagagacattaagccttgcttgaattaaatgctgacacacattagacactagaactttcatatggttccatgtcattgtgaaattgatggagtttctctgtttgtttctttaattttaatttttctaaagcacaagattgaaataagcctcgctattaggtagttgagagataagcttggtattcactgtgggaaatctttatgacagacgttattgtttggggtatgtattaagagaaatggttaaactgtgaaggcctctaagctaaactctggcttttggatcataaaacctcttccatttacacaaataaattacattatgttactttctcctgttttatagctgaaaataccaagtgttttggtagacaaatgacaagctatcagcctgtccctattgcaagttgcagacagatgtttgataaccacagttatcacagatggaaggggctgtgtcgagacaccttctcctggggggctattagtctctgatctgtgatatgctgtgggggaagagagaagaaaataggaagcaccagcattacagccatttatcacccaccactgtgtgtggaataaat

SEQ ID NO: 43090 - DNA, 1083 bp, Homo sapiens
ccacttgaagcacacaaagagtcttgactttttagttttttttttttttttttgcggtgcctgccctctgcctcctgaccacccctgcggtatttattcctattgagcagactgggaagtgacgctaggtgcgtgtgagcagagatactgtattttatgaacaatcttcataactccctgtgggtcaatcccataactccctggctgccactccagcctttccagccattatgacaattcaccccacctggcttgtgacagttaagcattaccatgtggcctctacttttcgaggttcgagtatccctattgatcctcataagccaggtcttgaaactgaaccacccaccatcagtcctggcctgcagaaaggagcaagatcagagcctcccaggatgtgaggaccacgcccccggcatgctgtttattgtgttgctgtgcccattgccagccagtcagcctggtgcaggctgattaaaactcttaggcagttgcctcaaagagacattaagccttgcttgaattaaatgctgacacacattagacactagaactttcatatggttccatgtcattgtgaaattgatggagtttctctgtttgtttctttaattttaatttttctaaagcacaagattgaaataagcctcgctattaggtagttgagagataagcttggtattcactgtgggaaatctttatgacagacgttattgtttggggtatgtattaagagaaatggttaaactgtgaaggcctctaagctaaactctggcttttggatcataaaacctcttccatttacacaaataaattacattatgttactttctcctgttttatagctgaaaataccaagtgttttggtagacaaatgacaagctatcagcctgtccctattgcaagttgcagacagatgtttgataaccacagttatcacagatggaaggggctgtgtcgagacaccttctyctggggggctattagtctctgatctgtgatatgctgtgggggaagagagaagaaaataggaagcaccagcattacagccatttatcacccaccactgtgtgtggaataaat

SEQ ID NO: 43091 - DNA, 1279 bp, Homo sapiens
tttcatataaatgtcctgttgtttgagaaaaagaaaaaatatccctctctgttcagctccaattctatgtatcacactggcccacaatgctggggaccttccaggtcctttggttcttgtctattgcttccctatggggcttctcctgatacaacttgcagatcatttctcaaaaggaagtcactggagaaaaaaagatctactaagatgttaatatttgctaaaacttttttaaattttgggggctttaaaagtcttttctgccttgtcagcatgttttggaggaacaaagaagtgtgagattaacagggtatggtaaagacatggggatgcaaatgagcatttgattttgaggctagaaggggaccaaccatgttggtcaagaatttatgttaggaggagaagggagatgaggctagaaaagaaataaaagaaagattggactgggagataatttttctgctgggattaggggcttgaacttcatctcataggtaattaagagaatatgagagattttaagccacaggagtcagtgaaaggatgccgtctttaaccataggtttggcagggaaggctatggagattttacccactttgttcctttgcccactcttatgggaggaagttctttagtactagaaagtggaaagacatatactatacaggcaaaatgaaaaatatctactaaaaaacaattaatacaagaggtattaacaaggttatagtgttgctacaatgtgaatgggtgggtgttgtagaaaaccgttcataggctggcagaaagacagcatccttaatgcagttgygagtgatgagggaatgttagtaatctattgctaattaattatctattgttatataatggatgattttaacacttagtgcccaagaatccaggcatggcttagttggatcttctgcttcaggtctctcacaagactataattaaggtgtcagccagagctggagtctcatctgaggcttgacaggaacagtctacttacaagggcatattgttgtgtataggatttagtttcttgcaggctgtcagaaggcttcagttccttgatggctgttggccacaagtcacaccctcagttccttgccatgtgagcctctccatagggcagttcacaacatgggggcttgattcatcaaagccagcaagggagataatcgatagaaagtgcctgctagcaaagagaagatgtaatcttatttcctataactatggaagtgatatactaccattctgttggttaggaggaagtcataa

SEQ ID NO: 43092 - DNA, 613 bp, Homo sapiens
aagatagagctccaattcctgaagcactgcatgagggaaagtgaattcccatccaaaatactttcactggacagatatatgggggagaaatcacttctattatgttaagccactttacttcagggaattaggttataggaactagcattactctaacacatgaagcaccaagttttgatcccagyattaagttgcctcttggcacctaggctactacaagtatatactgtcagtcttgaaaatgatatggaatctcaagtatgttctatgtaacattatttctgcaaatgttttgagaaaaaagggaattctatatacaaataaatttgggcaacgttgtataaccacagtagtatattaacctgtctgagaaactgcagtttaattttgtttaatatggaattcccatagaacagatctactttataaaattccaaattagactttcaaacttttagactttcaagccagatttttttccagtgatggccacataacggtttcctgcaaaatctgccaagatttgcttttccatcagaataatataggaaatcaaatttttattctatgttgactaatttccaattacttttaactttatatatttaaaata

SEQ ID NO: 43093 - DNA, 613 bp, Homo sapiens
aagatagagctccaattcctgaagcactgcatgagggaaagtgaattcccatccaaaatactttcactggacagatatatgggggagaaatcacttctattatgttaagccactttacttcagggaattaggttataggaactagcattactctaacacatgaagcaccaagttttgatcccagtattaagttgcctcttggcacctaggctactacaagtatrtactgtcagtcttgaaaatgatatggaatctcaagtatgttctatgtaacattatttctgcaaatgttttgagaaaaaagggaattctatatacaaataaatttgggcaacgttgtataaccacagtagtatattaacctgtctgagaaactgcagtttaattttgtttaatatggaattcccatagaacagatctactttataaaattccaaattagactttcaaacttttagactttcaagccagatttttttccagtgatggccacataacggtttcctgcaaaatctgccaagatttgcttttccatcagaataatataggaaatcaaatttttattctatgttgactaatttccaattacttttaactttatatatttaaaata

SEQ ID NO: 43094 - DNA, 613 bp, Homo sapiens
aagatagagctccaattcctgaagcactgcatgagggaaagtgaattcccatccaaaatactttcactggacagatatatgggggagaaatcacttctattatgttaagccactttacttcagggaattaggttataggaactagcattactctaacacatgaagcaccaagttttgatcccagtattaagttgcctcttggcacctaggctactacaagtatatactgtcagtcttgaaaatgatatggaatctcaagtatgttctatgtaacattatttctgcaaatgttttgagaaaaaagggaattctatatacaaataaatttgggcaacgttgtataaccacagtagtatattaacctgtctgagaaactgcagtttaattttgtttaatatggaattcccatagaacagatctactttataaaattccaaattagactttcaaacttttagactttcaagccagatttttttccagtgatggccacataacrgtttcctgcaaaatctgccaagatttgcttttccatcagaataatataggaaatcaaatttttattctatgttgactaatttccaattacttttaactttatatatttaaaata

SEQ ID NO: 43095 - DNA, 1277 bp, Homo sapiens
tagcacttttattaactttttctttttggttcaaaatatgagagaatattttgataagtgcatatagaggtgcacagtttcccttttgcctcagaattcagtatggctcagcacaaaccgaaggaagtctcactaaaaccaggtcctataaaggaactgctctccaagctttgtccagcctggagccagataatggaatagtaggattgaaatagtccataaaacaacataagcaatagatacagagtatttatgaggatgacaaarggatttgttttaagtcactaaagcattctcttagatgagaaatttattaatttttttcatgtattgattgaaatataaatactttttagcagaattctgcaattggcttctattttttttcttctctaatgactcagccaatctgtttaaagttatgatctctgatctggtcccacctggaaaatgctggctacctgtgtgtattccctagccagacagttctgcctttctctgcctctttaaccatacaaatgtggtgtctgggacacccttgttctctgcctactgcatcctctctgccaggggcagcattttaaagtccctttttggtgggaaggttcccttccttagttgatccatatcattcagaatctaaccagaaaaacaaaaccacttcagacattaggttgccatattccagaccaaaatcacaaatatcaggaatttcaaatggctcaaactattgtttacaaaaaaagaaatttatctttatttgtttatatttaaatgacaaaaattgtatatatttattgtgtgcaacattgtgttaggctgttcttgcattactataaagaaatacctgaagctgggttatttataaagaaaagagattaaattggcttgccgttctgcaggctgtacaaacatggcaccaacattggcttggcttctggtgagggtctagggaagcttgtaatcatggtggaagatgaggtgggagcaagcatgtcacatggcaagagtgggagcaagggtaggggaagttgccatgctcttttaaacaactagatctcacatgaactaccagagcaagaactcaatcctagccaaggggatggcactaagccattcgtgaaggatctgtccccatgatccaaacaccttctccagaccccaactccaacactggggattcacatttcaacataagatttggaggggataaatatccaaactatatcaaaaatgatattttgaaatatgtacacattctgtaataccaaaatcaa

SEQ ID NO: 43096 - DNA, 1277 bp, Homo sapiens
tagcacttttattaactttttctttttggttcaaaatatgagagaatattttgataagtgcatatagaggtgcacagtttcccttttgcctcagaattcagtatggctcagcacaaaccgaaggaagtctcactaaaaccaggtcctataaaggaactgctctccaagctttgtccagcctggagccagataatggaatagtaggattgaaatagtccataaaacaacataagcaatagatacagagtatttatgaggatgacaaaaggatttgttttaagtcactaaagcattctcttagatgagaaatttattaatttttttcatgtattgattgaaatataaatactttttagcagaattctgcaattggcttctattttttttcttcyctaatgactcagccaatctgtttaaagttatgatctctgatctggtcccacctggaaaatgctggctacctgtgtgtattccctagccagacagttctgcctttctctgcctctttaaccatacaaatgtggtgtctgggacacccttgttctctgcctactgcatcctctctgccaggggcagcattttaaagtccctttttggtgggaaggttcccttccttagttgatccatatcattcagaatctaaccagaaaaacaaaaccacttcagacattaggttgccatattccagaccaaaatcacaaatatcaggaatttcaaatggctcaaactattgtttacaaaaaaagaaatttatctttatttgtttatatttaaatgacaaaaattgtatatatttattgtgtgcaacattgtgttaggctgttcttgcattactataaagaaatacctgaagctgggttatttataaagaaaagagattaaattggcttgccgttctgcaggctgtacaaacatggcaccaacattggcttggcttctggtgagggtctagggaagcttgtaatcatggtggaagatgaggtgggagcaagcatgtcacatggcaagagtgggagcaagggtaggggaagttgccatgctcttttaaacaactagatctcacatgaactaccagagcaagaactcaatcctagccaaggggatggcactaagccattcgtgaaggatctgtccccatgatccaaacaccttctccagaccccaactccaacactggggattcacatttcaacataagatttggaggggataaatatccaaactatatcaaaaatgatattttgaaatatgtacacattctgtaataccaaaatcaa

SEQ ID NO: 43097 - DNA, 663 bp, Homo sapiens
aaaaaaaaaaaaaagaaacagaaggtgtgattcactgaagcctcatttttgcctggctcttttgctctttatgaatttacattytgaggcactaaaggaagtccagtataaatttaggcctcagtagaaagatagaagacctcttcccatgctaacccagccagcctctgtggcctctgctttgcttaggaaactttccatgctccctgtctccagaagcccggggattctttggctgactccaagtgccctgtgcatgggtctcttggctaacgggggttgactgctgccagcttggttttttattccgcttcatttatcctcccaggttcaggtctgactgtagctcatccattatttgggccagcttggggctgacaatgcccaattttaaaaaggaaggcttggtctgagcaggaaggccaggcagactcacctcgtggaatggacgtagtggggactccggacccgcaggtctggcgtggacggcatgctggactgggagttccagtgcgggaggccgcggatggggctgttctgcaaggagttgcttcctccgccggcttccgcacagcttcctgtgctggggaagcgcttgtggctgctgcaaagccaaggatgccacgtggtcaccgccagacagacagcacctttcctgggggg

SEQ ID NO: 43098 - DNA, 663 bp, Homo sapiens
aaaaaaaaaaaaaagaaacagaaggtgtgattcactgaagcctcatttttgcctggctcttttgctctttatgaatttacattttgaggcactaamggaagtccagtataaatttaggcctcagtagaaagatagaagacctcttcccatgctaacccagccagcctctgtggcctctgctttgcttaggaaactttccatgctccctgtctccagaagcccggggattctttggctgactccaagtgccctgtgcatgggtctcttggctaacgggggttgactgctgccagcttggttttttattccgcttcatttatcctcccaggttcaggtctgactgtagctcatccattatttgggccagcttggggctgacaatgcccaattttaaaaaggaaggcttggtctgagcaggaaggccaggcagactcacctcgtggaatggacgtagtggggactccggacccgcaggtctggcgtggacggcatgctggactgggagttccagtgcgggaggccgcggatggggctgttctgcaaggagttgcttcctccgccggcttccgcacagcttcctgtgctggggaagcgcttgtggctgctgcaaagccaaggatgccacgtggtcaccgccagacagacagcacctttcctgggggg

SEQ ID NO: 43099 - DNA, 663 bp, Homo sapiens
aaaaaaaaaaaaaagaaacagaaggtgtgattcactgaagcctcatttttgcctggctcttttgctctttatgaatttacattttgaggcactaaaggaagtccagtataaatttaggcctcagtagaaagatagaagacctcttcccatgctaacccagccagcctctgtggcctctgctttgcttaggaaactttccatgctccctgtctccagragcccggggattctttggctgactccaagtgccctgtgcatgggtctcttggctaacgggggttgactgctgccagcttggttttttattccgcttcatttatcctcccaggttcaggtctgactgtagctcatccattatttgggccagcttggggctgacaatgcccaattttaaaaaggaaggcttggtctgagcaggaaggccaggcagactcacctcgtggaatggacgtagtggggactccggacccgcaggtctggcgtggacggcatgctggactgggagttccagtgcgggaggccgcggatggggctgttctgcaaggagttgcttcctccgccggcttccgcacagcttcctgtgctggggaagcgcttgtggctgctgcaaagccaaggatgccacgtggtcaccgccagacagacagcacctttcctgggggg

SEQ ID NO: 43100 - DNA, 1136 bp, Homo sapiens
tgcactgcaatgccgctgtgcccaaacgtcctccttgtcactgaagccctggggaagcaagaatcacaaggttcaatcccatttctrttgagagaaaccatttctcagtcaacagcttctgtagagaacccactgcgtcctagaagccctggcgtaaagatgatagatgagctctcacatacacctaggcgtacacacacacacatgcgcacacagcttacagacatcattggctgggcaaaggccaccttctgattttctgactccctagagttcagaatctggccaagcctcggccttgtctgggataagatgggtcattctaggtcaatggatggtcctttttcgatcctggacttggcactgggccaagacaaacttcgcagacaggaaaaccttcaatgatgctccctatgagacaggaaatgtgcctacggtggggatgagtaaattattttctaatcaccacaggctacagcgtcccagggaattgggacttcttatataactaacccaatgttccttgaagatttggtgatcaatttccaatctattcagagggcagggagggtataaagaatcaggagaagaaaggcagagagaaatgtgcccagccccaattcccccaacgtctgtcgatacatttcatttatatttttcagatggagtcttgccctgtcacccaggctggagcgtgctggcaagatctcagctcactgcaacctccacctcccaggttcaaccaattctcctgcttcagccttctaagtagctgggatgacagatgccccccaccactccgggctacttttttgtatttttagtagagacagggtttcatcaggctggtctctaactcccggcctcaggtgatccacctgcctcggcctcccaaagtgctcggattacaggcatgagccaccgcacctggccctgtctatacatttttaaatctacatggagtaatcagactttaaaagtgaaaacgggaactgttcatctccacattcatggagttagggggagttatatggtcatgctcttagtgaagtatattttataggataggcagattattttgcaaatgaaatctaagaatgtgtgtttgcatgtgtgtgtgtgtgtgtgtgtgtgtg

SEQ ID NO: 43101 - DNA, 1136 bp, Homo sapiens
tgcactgcaatgccgctgtgcccaaacgtcctccttgtcactgaagccctggggaagcaagaatcacaaggttcaatcccatttctgttgagagaaaccatttctcagtcaacagcttctgtagagaacccactgcgtcctagaagccctggcgtaaagatgatagatgagctctcacatacacctaggcgtacacacacacacatgcgcacacascttacagacatcattggctgggcaaaggccaccttctgattttctgactccctagagttcagaatctggccaagcctcggccttgtctgggataagatgggtcattctaggtcaatggatggtcctttttcgatcctggacttggcactgggccaagacaaacttcgcagacaggaaaaccttcaatgatgctccctatgagacaggaaatgtgcctacggtggggatgagtaaattattttctaatcaccacaggctacagcgtcccagggaattgggacttcttatataactaacccaatgttccttgaagatttggtgatcaatttccaatctattcagagggcagggagggtataaagaatcaggagaagaaaggcagagagaaatgtgcccagccccaattcccccaacgtctgtcgatacatttcatttatatttttcagatggagtcttgccctgtcacccaggctggagcgtgctggcaagatctcagctcactgcaacctccacctcccaggttcaaccaattctcctgcttcagccttctaagtagctgggatgacagatgccccccaccactccgggctacttttttgtatttttagtagagacagggtttcatcaggctggtctctaactcccggcctcaggtgatccacctgcctcggcctcccaaagtgctcggattacaggcatgagccaccgcacctggccctgtctatacatttttaaatctacatggagtaatcagactttaaaagtgaaaacgggaactgttcatctccacattcatggagttagggggagttatatggtcatgctcttagtgaagtatattttataggataggcagattattttgcaaatgaaatctaagaatgtgtgtttgcatgtgtgtgtgtgtgtgtgtgtgtgtg

SEQ ID NO: 43102 - DNA, 1136 bp, Homo sapiens
tgcactgcaatgccgctgtgcccaaacgtcctccttgtcactgaagccctggggaagcaagaatcacaaggttcaatcccatttctgttgagagaaaccatttctcagtcaacagcttctgtagagaacccactgcgtcctagaagccctggcgtaaagatgatagatgagctctcacatacacctaggcgtacacacacacacatgcgcacacagcttacagacatcattggctgggcaaaggccaccttctgattttctgactccctagagttcagaatctggccaagcctcggccttgtctgggataagatgggtcattctaggtcaatggatggtcctttttcgatcctggacttggcactgggccaagacaaacttcgcagacaggaaaaccttcaatgatgctccctatgagacaggaaaygtgcctacggtggggatgagtaaattattttctaatcaccacaggctacagcgtcccagggaattgggacttcttatataactaacccaatgttccttgaagatttggtgatcaatttccaatctattcagagggcagggagggtataaagaatcaggagaagaaaggcagagagaaatgtgcccagccccaattcccccaacgtctgtcgatacatttcatttatatttttcagatggagtcttgccctgtcacccaggctggagcgtgctggcaagatctcagctcactgcaacctccacctcccaggttcaaccaattctcctgcttcagccttctaagtagctgggatgacagatgccccccaccactccgggctacttttttgtatttttagtagagacagggtttcatcaggctggtctctaactcccggcctcaggtgatccacctgcctcggcctcccaaagtgctcggattacaggcatgagccaccgcacctggccctgtctatacatttttaaatctacatggagtaatcagactttaaaagtgaaaacgggaactgttcatctccacattcatggagttagggggagttatatggtcatgctcttagtgaagtatattttataggataggcagattattttgcaaatgaaatctaagaatgtgtgtttgcatgtgtgtgtgtgtgtgtgtgtgtgtg

SEQ ID NO: 43103 - DNA, 1136 bp, Homo sapiens
tgcactgcaatgccgctgtgcccaaacgtcctccttgtcactgaagccctggggaagcaagaatcacaaggttcaatcccatttctgttgagagaaaccatttctcagtcaacagcttctgtagagaacccactgcgtcctagaagccctggcgtaaagatgatagatgagctctcacatacacctaggcgtacacacacacacatgcgcacacagcttacagacatcattggctgggcaaaggccaccttctgattttctgactccctagagttcagaatctggccaagcctcggccttgtctgggataagatgggtcattctaggtcaatggatggtcctttttcgatcctggacttggcactgggccaagacaaacttcgcagacaggaaaaccttcaatgatgctccctatgagacaggaaatgtgcctacggtggggatgagtaaattattttctaatcaccacaggctacagcgtcccagggaattgggacttcttatataactaacccaatgttccttgaagatttggtgatcaatttccaatctattcagagggcagggagggtataaagaatcaggagaagaaaggcagagagaaatgtgcccagccccaattcccccaacgtctgtckatacatttcatttatatttttcagatggagtcttgccctgtcacccaggctggagcgtgctggcaagatctcagctcactgcaacctccacctcccaggttcaaccaattctcctgcttcagccttctaagtagctgggatgacagatgccccccaccactccgggctacttttttgtatttttagtagagacagggtttcatcaggctggtctctaactcccggcctcaggtgatccacctgcctcggcctcccaaagtgctcggattacaggcatgagccaccgcacctggccctgtctatacatttttaaatctacatggagtaatcagactttaaaagtgaaaacgggaactgttcatctccacattcatggagttagggggagttatatggtcatgctcttagtgaagtatattttataggataggcagattattttgcaaatgaaatctaagaatgtgtgtttgcatgtgtgtgtgtgtgtgtgtgtgtgtg

SEQ ID NO: 43104 - DNA, 1136 bp, Homo sapiens
tgcactgcaatgccgctgtgcccaaacgtcctccttgtcactgaagccctggggaagcaagaatcacaaggttcaatcccatttctgttgagagaaaccatttctcagtcaacagcttctgtagagaacccactgcgtcctagaagccctggcgtaaagatgatagatgagctctcacatacacctaggcgtacacacacacacatgcgcacacagcttacagacatcattggctgggcaaaggccaccttctgattttctgactccctagagttcagaatctggccaagcctcggccttgtctgggataagatgggtcattctaggtcaatggatggtcctttttcgatcctggacttggcactgggccaagacaaacttcgcagacaggaaaaccttcaatgatgctccctatgagacaggaaatgtgcctacggtggggatgagtaaattattttctaatcaccacaggctacagcgtcccagggaattgggacttcttatataactaacccaatgttccttgaagatttggtgatcaatttccaatctattcagagggcagggagggtataaagaatcaggagaagaaaggcagagagaaatgtgcccagccccaattcccccaacgtctgtcgatacatttyatttatatttttcagatggagtcttgccctgtcacccaggctggagcgtgctggcaagatctcagctcactgcaacctccacctcccaggttcaaccaattctcctgcttcagccttctaagtagctgggatgacagatgccccccaccactccgggctacttttttgtatttttagtagagacagggtttcatcaggctggtctctaactcccggcctcaggtgatccacctgcctcggcctcccaaagtgctcggattacaggcatgagccaccgcacctggccctgtctatacatttttaaatctacatggagtaatcagactttaaaagtgaaaacgggaactgttcatctccacattcatggagttagggggagttatatggtcatgctcttagtgaagtatattttataggataggcagattattttgcaaatgaaatctaagaatgtgtgtttgcatgtgtgtgtgtgtgtgtgtgtgtgtg

SEQ ID NO: 43105 - DNA, 590 bp, Homo sapiens
gtctagtggctctgatgcttgactaggactttggagaacctcgtcttcccccgctgcccctgaggctgagtcaccaagcttcttaatgatctccctatgagtaacttcctgtttcatccaggggggctattacacagaatcacagcagccatctggtccacctcctccttgcacagataaagtaaccccagtagagagaggttragggattggcagaggttaaataagtaattgatgatgggacccacatcttgtgacttctggtcctgggctctttctaacacaccatgaagctctgacaatgaacgagaacaaagttgtttcaagcttcttgttctgagtctctatataagaagaattagactcatggacaggaataatctccaagctcagaagaaaacatacaaactgaaaaactcacttccttatttcatttctgccctttttactttctagagcagactggcacttgcaaatctttagacggatttacattttcagcaaatacaaatgagttgtttcacatctagagggctgcagggcaaaagaaaggagtcactgaacccgaatcagatggaatttaaaatgtg

SEQ ID NO: 43106 - DNA, 590 bp, Homo sapiens
gtctagtggctctgatgcttgactaggactttggagaacctcgtcttcccccgctgcccctgaggctgagtcaccaagcttcttaatgatctccctatgagtaacttcctgtttcatccaggggggctattacacagaatcacagcagccatctggtccacctcctccttgcacagataaagtaaccccagtagagagaggttaagggattggcagaggttaaataagtaattgatgatgggacccacatcttgtgacttctggtcctgggctctttctaacacaccatgaagctctgacaatgaacgagaacaaagttgtttcaagcttcttgttctgagtctctatataagaagaattagactcatggacaggaataatctccaagctcagaagaaaacatacaaactgaaaaactcacttccttatttcatttctgccctttttactttctagagcagactggcacttgcaaatctttagayggatttacattttcagcaaatacaaatgagttgtttcacatctagagggctgcagggcaaaagaaaggagtcactgaacccgaatcagatggaatttaaaatgtg

SEQ ID NO: 43107 - DNA, 544 bp, Homo sapiens
cccttgggtttcaggcagcattgaattcccattccctttccaaccattcatgtagtagtcttctactttgtactggactgttctcataggcaagaggaaacacatggtgcctaatacatgtttatatttgtagcgagcttacaatctacttgggaagacaagacatacataaagtagctgtattcatgctacaggaacccatgrttcctatagccagagatggaaaccatctctggtttctgtaccaggctttacaaactctatagaagtgccgcactgcaggctgggcatggtggctcatgcctgtaatcccagcactttgggaggcagaggtgggcccatcgtgaggtcagaagttcaagaccagcctggccaacatggtgaacctctgtctctactaaaaatacaaaaaattagctgggcgtggtggctcacgcctgtagtcccagctattcgggaggctgaggcaagagaatcacttgaacccaggaggcagaggttgcagtgagcggagatcatgccactgcactccagcctgggcgac

SEQ ID NO: 43108 - DNA, 544 bp, Homo sapiens
cccttgggtttcaggcagcattgaattcccattccctttccaaccattcatgtagtagtcttctactttgtactggactgttctcataggcaagaggaaacacatggtgcctaatacatgtttatatttgtagcgagcttacaatctacttgggaagacaagacatacataaagtagctgtattcatgctacaggaacccatgattcctatagccagagatggaaaccatctctggtttctgtaccaggctttacaaactctatagaagtgccgcactgcaggctgggcatggtggctcaygcctgtaatcccagcactttgggaggcagaggtgggcccatcgtgaggtcagaagttcaagaccagcctggccaacatggtgaacctctgtctctactaaaaatacaaaaaattagctgggcgtggtggctcacgcctgtagtcccagctattcgggaggctgaggcaagagaatcacttgaacccaggaggcagaggttgcagtgagcggagatcatgccactgcactccagcctgggcgac

SEQ ID NO: 43109 - DNA, 897 bp, Homo sapiens
accaacaaaaaaataaccctcttcacaaagagacgttgtttgcttttcgaggccatcccacctcttgttttcagtataaatgactgtaacaatatttgctatgtcaaggccaatgccacttttatcctggggaatgagaaactctgtgacaagtaaacttattcaagatggagaaaattagactacatctattctgtgtctcttagtccccacttcacagatataaaaagagaggcacagrgaggttaaataaattgctaatcatgactttctaaaataaactggaagtgagttagtgccaaggaagtgagttagcgccaaaattctttggtcaagaaaattcttctttgggggcctgggcaacatggcaaaaccctgtctctgcaaaaaatacaaaaattagccgagtgtgttgcacacgcccgtggctccagctactagggaggctgaggtgggaggattgcttgagcccaggaggtcaaggctgcagtgagctatgatggcaccactgcattccagcctgggagacagagtgagaccttgtctcaaaaaaacaaaacaaaaacaaaacaaaacaaaaaagaaacttctgttttgggtcttggagtggatatggaggtcatgaaggtcgtgaatttacaaaacatctctctctttttgtttagaagtgtaactgctctaggaaagaatttgactttaactcagactaaaatgtcttcataacaacagcaaaacaacgaagtaggatctcatagaaaggtcctcgttaactgcctgtatgcagagcagtgggccttaagctccactgcctgtgctcaagtcaccttcaaggcttgtggaattagattgcggagtcccatcctcagagtttctgagctcgtaagtctcaggcgggga

SEQ ID NO: 43110 - DNA, 625 bp, Homo sapiens
atttcttttcaagcttytgggtatatgatttcttaaaactttaaaggtgggataaaatccttgtattaaacccctgcctctgggaagcagctgtgtgcactgcaacggtttcagagaacagaacaagaggaaacccaatgccactgcaacagcagattgaccagagaagggctgtcatcacaccataaaacatggcatcagtgagaccacaaggccaccagacagggagcctggtgcagctgggccaggtttcctggattcgtgctcttttccaaattagtagcagagccattgcttatgctttgaggttctaagtgccaaacacctctactcctttggcactttgaaaatcacaagccctgcttttgatctttaccaaactgaaataaagagcacagttttgaagttttcttggaaggcagaaagcatatatatcagaggcagcctttctgttaagttctagggctgacaaagaaatggaccacaggttgaagcaagttaactggatgaagttttctgtatttgaaattgtctccccgcagtgtgcaatcttcctgaccaagtcctccacaacctccattcccaccaggaattataaagaaaaaaacaatgagggccaggcgcg

SEQ ID NO: 43111 - DNA, 625 bp, Homo sapiens
atttcttttcaagcttctgggtatatgatttcttaaaactttaaaggtgggataaaatccttgtattaaacccctgcctctgggaagcagctgtgtgcactgcaacggtttcagagaacagaacaagaggaaacccaatgccactgcaacagcagattgaccagagaagggctgtcatcacaccataaaacatggcatcagtgagaccacaaggccaccagacagggagcctggtgcagctgggccaggtttcctggattcgtgctcttttccaaattagtagcagagccattgcttatgctttgaggttctaagtgccaaacacctctactcctttggcactttgaaaatcacaagccctgcttytgatctttaccaaactgaaataaagagcacagttttgaagttttcttggaaggcagaaagcatatatatcagaggcagcctttctgttaagttctagggctgacaaagaaatggaccacaggttgaagcaagttaactggatgaagttttctgtatttgaaattgtctccccgcagtgtgcaatcttcctgaccaagtcctccacaacctccattcccaccaggaattataaagaaaaaaacaatgagggccaggcgcg

SEQ ID NO: 43112 - DNA, 1161 bp, Homo sapiens
tcccaagttcaagcaattatcctgcctcagtcttccgaatagctgggattataggtgtgcaccaccacgcctggctaatttttgtatttttagtagagatgaggtttcaccacattgaccaggctggtctcaaactcctgacctcaaataatctgcccatctcagcctcctgaaatgctgggattacaggtgtgagtcactatacccggccctattatctattatccatcagcccaggatctacctaaagccttcttttacccacctttttgttttcagttttagcaaggccagtgttgggggtaacaggttctacacattcatcacctagtccttgggggtaatttatttctcttccaatgactaccttaacctccaactagtatcttttaattttaatactctggaatttgatgcatagaggacagtgagaggtcttgataaagaagggtctttataaatacccagaatgaggaccagccagctacagggggccttgcctcagttggagagtcacttctgtggggtctggatatcctctattcagaaaggggcagacccagccatctctctccttggctcccacatgccgaggaagttctatatcaagtgtgacaaggtcgtctcctgaagacgattctcgaaaagcatgctccccaagggcaggcccagcctcactaatcctgcagaactgcgtcaggaggttcagcggctccacttccttccatcccactcactaaatcaacagctgccttggcgtgtttcctaccacgtgayatggggttttgtgaagtcgactcctagatccagggtcaagcaactcagtgtagatagggacctttttcctttgcagcactagggagagagggtccctggggtgagttcaggaggtgcaagtcaacatagcactgtagccatgaacacacagaaggctcaggagaaacaccagtgaaagaaagtcaaaaccactgtcagaaagccgcgtcgctgtttaaccacgacatgtcctgaccacagggttctgggtggccgacagcagcagaaatctttgccgccccctgtttgccctgtaactcctgctctctgaggccatctgtgaagccacaataattgccttctccatcctcagcttttcctgcttgttttgcccccttaaacatg

SEQ ID NO: 43113 - DNA, 625 bp, Homo sapiens
tagtagagaaaacaagcgtgctaaatacaggctccatctctccaaagcttatttttatagatgccattcaattaaccgggagaacacacccaaaagggagatggtaaaataatcctccctgtttcactgctggggaaactgaggggtaggaagggaagagtggtttgtccgaggtggttttgctctccagcaatgtgagcaaaggtcccaagtcttcagattccaagtttggtgttttatctctaaaataatacgctaaggaactagcaagaaccttaattactcctctagttcaagtgggtccttggatgtttctataggaaacatgtttctgttgggaacccctaagtgccttggagggggcagagggtctcaaatggagtgtcagaaagaggttggctgagggagctttactaggaggtaggggaaaagttgtgtggtcttggccaaggacaacaggatgagatagggaaagatggtcattccaaatttcctagagcaaaagaattttaaaaaattmtctttttaactagaaattcactttatttatgttgcatgatggactatgagcaaccaggagctctgacttcggcatcttggaatcttcagcacatcactgctacgc

SEQ ID NO: 43114 - DNA, 642 bp, Homo sapiens
ccttggttaccaggctgcagcctgcaggttgcccatccaatgtgcgaactccagcgggggcaggaaagcccccgaagaatggtgagtacagctccttagttcaggaatgatcaggggaacttgacactctgggtaactgtgatgagacgggtaaaaacgtctcccccaccagtgaggggtcctggttaaccttgctgagtggtgaatctgaggcccagagggaaaagcagtgaacaagctgtgtgcacctgctctctcttcattctgtatctgtaggaaggaggaacagcacttatccctctccttgcggctttgctttttaaaaatctatgtatatatagggatatgaaaatagttagmtagaaggaatatgttctagcatttgatagaacagtagggaaattatagttaacaataatttgttgcatatgtcaaagtagccaaaagtgaagacttgtaatgttcccaacacaaagaaaagataaatgttcgaggtgatggatatcccagttaccctgatttgaccactgcacattatgtacagatatcagagtatatatacgtgaaaaatatgtacaactattatgtatcaataagaatcaaagtccatataaataaggttgaaatattagagccaacatc

SEQ ID NO: 43115 - DNA, 1816 bp, Homo sapiens
aaagcatatcaagctgcttttcccaaaatgatgaaaccagagccatgtattttctgaagtatctttcacatctataacagatactcagaagagagactaattctctcaaagtctcttcttactctgatggagatttggagagaacacaagaggaatcagagctaaatgcttttgtccaataaattgagtgattcagaatcttgatgacagggcagaagaactccttttggcatctgctccagtacctggttgtccttgaggtgcttttaacatcagttccatctgtggcttttctgtaactgaaatcacaatgtaccaacatccacagaaccacttcaagtaaatgctctcacatctattttatcttaggaggatgtggcaaagtccgattttattccagtcgaaatgaacaaagacctcagcaccatggcacacttgccacaagtcacttgatgattttgaaggtcaagaagtttgagtaatgcatacattgcttggggactgagttcagcagaatataatggaaacccaacttacccaatactgttctcatataacatgaggcccacagaaggcagctgtgatggttaattttgtgtcaacttcactggggaagacggtacccaaatatttggttaaacatcattccaaaggtatctgtgagggtgtttttggatgagattaacatttgaattggtagaccgagtaaacacatggcccttatcagtgcatacgggcatcattcaatccactggtggcctgaatagatcaaaaagatggggtaaagaagaattagctctctttacgctccagtccacctgcagactggaattacaccatcagctctcctggttctcaggcctttggacttagactagaatatacaccattgactctcttggttctcaggcctttggatcagacgggagctacaccaccaactttcctgggtctccagcttgcggggtacagatcactggacttagcctccataactgtttcaaccaattccttataataaatctctctccctcccccgcaacaactttctctttctccctatctcctatctcttctgtttttctgtagaaccttaaaaaagcagttcatgttttatacaaaatgatttcatgatgccataaaaaaaaaaaaaaaaaaagaaaagccaagctttatcttctgctctgccatctttagcacatcttcattgtcaagattgcaggatggccaccaagcatctacgcatcatgatcacaggcaaaggacaaagtatgtatgtcagctaagtctgtctctttctcttagtaaagcaacaggtttccaggcagtcccactcacccacagacttctatccgtatcttcttcgcaggaccatgtcayacgaccaaccctaactgcaaaaggtcctgagaggacaagttgttttaactgtgcatattacagttctaaacaaattagggctctgttagtagagaaggagagagaatgaacattgcgtaagtaactagtagtgtctacaccacacatttatggcacatgaacttgcacatcaaaagaagcaaaacaaaaacagccatatctgaaatgaaataatccaatacaacagttaacaaaaaagtgcaaacattcacataatttcctcttctcacaaatcttacactcttaaacatgccactatgatgacatcattaaacaagaggaagaattgttatttaagcttgacatatgatttgatttttataaaatctattgggcaaagatagttggcaaaggttatgtcaatatctgagtcagtcataagattatttctccaatg

SEQ ID NO: 43116 - DNA, 1816 bp, Homo sapiens
aaagcatatcaagctgcttttcccaaaatgatgaaaccagagccatgtattttctgaagtatctttcacatctataacagatactcagaagagagactaattctctcaaagtctcttcttactctgatggagatttggagagaacacaagaggaatcagagctaaatgcttttgtccaataaattgagtgattcagaatcttgatgacagggcagaagaactccttttggcatctgctccagtacctggttgtccttgaggtgcttttaacatcagttccatctgtggcttttctgtaactgaaatcacaatgtaccaacatccacagaaccacttcaagtaaatgctctcacatctattttatcttaggaggatgtggcaaagtccgattttattccagtcgaaatgaacaaagacctcagcaccatggcacacttgccacaagtcacttgatgattttgaaggtcaagaagtttgagtaatgcatacattgcttggggactgagttcagcagaatataatggaaacccaacttacccaatactgttctcatataacatgaggcccacagaaggcagctgtgatggttaattttgtgtcaacttcactggggaagacggtacccaaatatttggttaaacatcattccaaaggtatctgtgagggtgtttttggatgagattaacatttgaattggtagaccgagtaaacacatggcccttatcagtgcatacgggcatcattcaatccactggtggcctgaatagatcaaaaagatggggtaaagaagaattagctctctttacgctccagtccacctgcagactggaattacaccatcagctctcctggttctcaggcctttggacttagactagaatatacaccattgactctcttggttctcaggcctttggatcagacgggagctacaccaccaactttcctgggtctccagcttgcggggtacagatcactggacttagcctccataactgtttcaaccaattccttataataaatctctctccctcccccgcaacaactttctctttctccctatctcctatctcttctgtttttctgtagaaccttaaaaaagcagttcatgttttatacaaaatgatttcatgatgccataaaaaaaaaaaaaaaaaaagaaaagccaagctttatcttctgctctgccatctttagcacatcttcattgtcaagattgcaggatggccaccaagcatctacgcatcatgatcacaggcaaaggacaaagtatgtatgtcagctaagtctgtctctttctcttagtaaagcaacaggtttccaggcagtcccactcacccacagacttctatccgtatcttcttcgcaggaccatgtcatacgaccaaccctaactgcaaaaggtcctgagaggacaagttgttttaactgtgcatattacagttctaaacaaattagggctctgttagtagagaaggagagagaatgaacattgcgtaagtaactagtagtgtctacaccacacatttatggcacatgaacttgcacatcaaaagaagcaaaacaaaaacagccatatctgaaatgaaataatccaatacaacagttaacaaaaaagtgcaaacattcacataatttcctcttctcacaaatcttacactcttaaacatgccactatgatgacatcattaaacaagaggaagaattgttatttaagcttgacatatgatttgatttttataaaatctatygggcaaagatagttggcaaaggttatgtcaatatctgagtcagtcataagattatttctccaatg

SEQ ID NO: 43117 - DNA, 598 bp, Homo sapiens
gcaccagatcctgaaattcacaacacacaagtgggcacatgagcggattccacttttcacccttggacctgacattcccgacagcttgccatgggsattgtgaaacgctctggggggtacctgaagacacttaagtgtgaccagcaggccttcttgcactgcgtggttctactgatgcttttttttttttttttcccttccactatttgattcctgggagcagttttctcagattcgcatttggatcccaaccttggtctggaaagcaaagccagctttggagcagcttgccctgcagtctccccagctgcagctctccccaccttcctgggtcccctctggggtcccagccatgctcagggggcgtccctccagctggcctctgcctacctgaagacagcaggctgccgctgctgccgctgatgatcttccccttgctacccatgttggccagcttcgaggtcttcagcgtccccgtctcggtcaggtcgatggcgatctcactcaggctgcgtgctgcatggattttggactggaatggaaagggaagcaggtcaaagaagtgacgctcaccttgcggaaaggacagtcatccctc

SEQ ID NO: 43118 - DNA, 531 bp, Homo sapiens
tggtaggttctgaatgagtagttgagtgtattagcattagcactggtgctgttacccattgattggttcattcaagcaaacattcaccttccttgtttcattcagcaagcacaaatgttgaaggaaatgtgggagaagtaaagtgcctgtctcagggcttgggggatttaaggaagttgctgtcatcaaagaaaagttgcctgattccctcgggacaggagaagaaggcggtgtggttcaaggaggagaccttggcttcaaggaggagatctccgagcacttggacacatctctgcagtaattagcacagaagcaccatgagttatttgttatctgacccacagtttctgaggcctggttgactgggtcaaatagtcagagtttccgtaaccctaaaatgagtaactcacagggtaagacccttttggagaacaactgtgccttactcaacacttgttaaacaacaacgaaatgatggggtggtkgggtggagggatctagttattttgtctttacttagaagggaaaaaa

SEQ ID NO: 43119 - DNA, 681 bp, Homo sapiens
ggtttcactatgttagctaggctggtcttgaacttctgacctcaagtgaaccgcccacctcggcctcccaaagtgctgggattacaggcatgagccaccgtgcctggccaggggatgatctctttctagaaattcatatccttcaattctggaaatgtttctcatgatagttctttgataactgaccctccttccttcactgtatttctctttctgggacttttactagtcagtgtatttctgggttggtctctctcttttctcttttattggcaaccctgatctaaggaactaaggtatagaggtggttgagtcctgaccagagccgtgagggtctagatttatgtaaatgatggagccatacacgttactttatttatagyaagatattgtaaagattttgaaatgtcatttatatgaaatgtcaagattattaaattcgtagttcactgtaacctcaaactcctgggctcaagcaatcctcccacctcagcctccaaagtagctgggactacaggcacatcccaccatgcccagctaatttttgtattttttgtagagacggggtttcaccatgttgcctagccttgtctcgaactcctggactcaagcaatcctcctgccttgacctcccaaagtgtggggattacaggcactgagccactgcacctggtcaatgca

SEQ ID NO: 43120 - DNA, 526 bp, Homo sapiens
ggagagaagttcttgcagaggaagaactgccccagcgtccctccattgtggttcccaaagttagtcatgatatgcatgactttcctctccgtgtccagctgaagtgcttcctgcctccttttcgtctcatgaatttcttttatgtttcacgtcaagatactaacttctccttcttctagacagattggccaaagactcagaccttcctcccactctaaccaccgtcaccctggagacccacaggaagagctgtgagccctgaaggcaatgcttgcaccatccttcccccacctgggccaggactgccactgtcagctgctgctccagcctcacgctgagcataggggacatggcccagatgcagccaccacccacttgatatggttcctgcctgccacrtgccataccactgcggtccatgttggacaggtgcaatatgaggtctaagtccctctggctccattctagccagcaccatggcaccaacctaaccacagcctgtgtgacagtccaggaggtcaaccag

SEQ ID NO: 43121 - DNA, 661 bp, Homo sapiens
ggtcagcagttagtggcaggagaaccccctgagggtgccttgtatgcagggagagtgcatttcctgtttggtttgggacgagcctggtccaggtgtaattagtaacagaggcttcctccttactcagcaatgactgctgtggtcgacaattaatatggtcaccctactcacgagtacttggttgcagagaagtatttgttatgtgtatgagtgaagatcctgaccaaagatttgaccacacaaggttctgtggtgagtccatggtttacctgtctcatgggcggagcttggctgcctstctttgtgtacttgttatttgaattccaaagaacgttctgcgccacacttttcagagctcttttctcccagtgtgtgttttagatggccgtctgttttgtcattgataagctaattctgtaaacctcagggcagctgcacatgcagcatctgtaattgcacctctgtaattggctggagtgctcgagagactgtacttgcttttcctggcgccccccagggtccgtggcttcacctaaaggcttggtggcagggactggtgagagagggaagaggaagagaggagggagaggattcttggtcttctactcatcagcctggttgacaggggctgggaaagtctgattcttagttgactgccggg

SEQ ID NO: 43122 - DNA, 748 bp, Homo sapiens
tcgcactgtgaccagtttagtacaaataaaaatgtttatagactgcatcttttctccatgcacaatttattgaggtatttcatcactttaacagatgataattgaacatttagaattcctagccttgaagatccagcgaggtacaaaccagaaatggccctggcccctaggtagctaaatatctagaggggagaagataaaaaacacacatggggctggcaataaattaaacaattacagatggtgagagttgggaaacaagcttaggacagagactgaccacggagggacccgtgttggattgttgatccgagaaggtgatgttgaaatacagactgagaaggtgaggaagagccaggggtcaggagaagtgtgggaagggggctggcttgggagggtcatgcgctccaggtggggacatcatgtgcaccaagacatgcagcccagaaagagtttggtgtgttccaggaatgaaggcaagcctgtgtggctaaagcrcagggagcaaggaggcgagagactggcatgaggcatgagaagcaggcccaggtcagatcaggtggggagtgagggccgctgccagggcattgggaaagctattgagaggccctgacaatcccatggggggaaagtcattcttagtgcacgtttcctgctttgaactttttctattcaataacgaaaacctgggtgctatatttgttttagccacaaaactatctgggtatctttgagaagtggcacttgc

SEQ ID NO: 43123 - DNA, 1679 bp, Homo sapiens
acaggagagaaggtcaagtaaccccagaatctttttctctgaggatttgctgttgcagatcaaagacactgcttttcactgcaaacatgtgaacctcccccttctctgatcaaggatgctgtggttttgatgatattcacttgataagggagagcttggtagtttcacagaaaatcggaagtgtttgtagaaacaggttcccatctatgaaagaaccactgggctgggtgttaaaactgagtcctgaacgtaaagatcatcacaaacctatgaaacatcattcccaaacaagatagcgtaatagtatctaggagattacaaacaatatgcagaaaagggaaccaaccaaataaaccaaagaaatctatcttgatactgaatagcctataactctccttataagtgagatgacttgagtaagaacattgaggcaatccaaaggatcacattattttagtgtttctaaaatcttcctaaacatgccatgtcttagatttggatttttaaaaattcttttcaattcaaaattaattccctaccaaaagagtttgtatcttaccacttgaccgaatgttgatgaatgggtagttgggcatcaccagcttgttgaagttaaatttataggtaaatcttttcccttttgttttatgaaggatcctcttgttgtaatagtatctgtaaaaacaggaatacatgtccattcgtcttgtagctactgacagctttcaatacacttaggtagccactgagaccaacaattcttgctctgagtattacttacaaaaatcactaccaatctttcgcagcctggccctccaggtagatctaggagacctaacagcttaattttcttactcaattttcaactcagctcgtttttgcctagaggtttacaaagacaacttcactttaagattctgaacacttatcctagccccaaacattttcttctccatctctctacaatttcgattctacagtccatttccgtccggttgcactgcatgtcactaactgcttagtttttctttttggtcttgcccaggtgggggcagacaaatcactagggagacctgatgtggttagtctggaggcctaagctcaaaagacagacaaaggaatgtacaactgttttatggtggcaggtcaaacaatggcatgccctgatctggaaaacagcagctagtgtggcccgcctcaccttcaaagactcaaagggatgtgaaagaatacagcaaagccactgtacagagtttacatttcaggtcaggagaacttcaattatctggaacctttagtcttacatctatgcagtagcagaggtcataaactgccttctagccccttgagggctaaaggactatgaaatgtaagaccgacaaggggaaaaaagaacctgagaaaacttatagtgatcaatctttagacatattgcagcaggctatggrcaacctgagctcacagacacagttccggaatagataggtcagtatcactgaatcttcctcccgtgacttgcttcatccttttctaagtttctttcagggaagcccaaagaaagaaattctaacagattctaatagagaagtctaaactaatcctttggattataaatgaactccaatccatgtttcaccatatactctcgcccactacagagcagaatcagctgtctgtca

SEQ ID NO: 43124 - DNA, 353 bp, Homo sapiens
ccatgtagctcatggcttttatgattgagacagcattaataaaaatctgacatcgtggaaagacacaaatatgtggggacctggttatctctgacctgcgccattcatgataaaattgtttgcagtatttactgaatgctttaagaaatctatrtttttagttatgttcctttttggtcctaatattattgatttattctacctatacagttttttgtttggtttctgcttattttggtgatcagtcttactattagtttgtctattttattagtattttcaagtaatactttatttagctttatctgttgttcattttctagcttattgagtttaatgtttaattaatttaa

SEQ ID NO: 43125 - DNA, 571 bp, Homo sapiens
acatgccatctttggtctcatggaacccagcaaactcttatgacagtgcttaataacatagtactgcccttgccagtttctttatcaatctttgcaagctatatgcttttagaagataggatctatacctgtttactcttgtacactgcaattagcacaagcttgtccatcaatatttactgaaaatatgcattaccatcacagtaacagtagttaacatttggacaacatgttacggttaacaaagcacttttttggagtacatatattatctcatttaataattaaaataatcacttacaattttagcatgcatcagaatcatctggaaagtttgttaaaacacagattatttattctyctccccagagtttctgattcattaagtctggggtggcccaataatttcatttctaacactctcaagtaatgctgcctccgctggtctggggtacacactttgagaaccactgccttagaacatccctgtgaaaggttaaatgttattcccaatttacagaggaaattgaagctcagagagcaatggctttgtaagtagtaaattcacggc

SEQ ID NO: 43126 - DNA, 625 bp, Homo sapiens
ctgggattggttggaggggaatggggtgttaatgctcactggccatggagcttcagttcagagttataaaaacattttggaaatagtggtaatggtagcacaacactgtgagtggaattaatggcattgaattgtatacttgaaatggttaaaatggcaaattttatgtgatatataccactgttttaaaaattaaaaattaataaaagtaacattactgaaaaccattgaattgtgtactttaagtttgtgaattgtatggcatgtgatttatagctccataaagctgttaaaaataaaaatacaaaatattcacctcraagtcatgtttactggatgtaacatagattggtttttgttttattctttttttctcctttcccatttgtaatagtttcagactattataaacacttccatgcttttatcaacactaaaacaatgttgtcagttaataagtgaattccattagaagtataaatatgctcgctaaattaaaattggaaactgccatcagaattatcttagttctgcattgatctaggtctcttgtcacacattcagaatgccacttcgcacagtatctgcacgtaatggatataagataaacttaataataatttat

SEQ ID NO: 43127 - DNA, 1278 bp, Homo sapiens
aataataatgccataatttctcaattatgctccaatcttaagctacatttcttccattctatagtaactgcactagtatttggagcagtaacataatttagatgtaccattattccatttccaaaaatgttggtggtctttcatctgtgtcagcattatggacagtaatagagcatttagaaaaaaaaatgamaaatcttagaagagattttattttcaacacaagctatcaatgtagcattggataagctctttattttctttaaacattcagttccaactctataaaacaaaaatttggaccaaatggtatggaagttgaacaattatatatactttcatgatctgagatgaaaatgttcatttatctctagaattgttttagaggtaaagcatgttcaattcaatacatgcccacttgaaacacagagttaaataaaagatcttgttgctatcataaaactgtatctttcatatgaaaaatataaacaatgaaatattggatacttgaatttaaattttggttcctctgcttttgacttttctgcttttaaaataagtcagatgtgtggttataagaaggattggaaaagttgagctgacaagccaagttgccctgagtccaatttttgaagaactgtgaacacttcaaataaatggttattgccatttgtaaatcactgggtaaaaacaagaataatatttatgacacatgaaaattatatgcattttaaattttactgttcataagtaaagttttattggaacactgccacagttatttgtttatatgctgtctgtgattgcctccatgccaccacacagaattgagtagctgtgacagcaactgtgtgagcctcaaagtctatcatttttactgtctggctatttacagaaagtttgctttcccctgagatatactgaaacaagaagaatctatgttcaaagggaaaacgacataaatgagctaggtcatctgaaggtctggagactggaaagaaaacataattagaaaggtctaatgtaaaaggcaagttattctaggatgtatgtgtgtatgtttgtgtgttttgattatgaactatgaagatctttggcccactgaatacaaagtcagcagtatttgccaacacttgcagaaagtgatcctcaggatttgagattgccttggaacgtattcttaaatattctcaaaataactgactttcaagtgtacttgtctcattcccacagggcagatcccttttgtacttgggttataaattcatgaagaattct

SEQ ID NO: 43128 - DNA, 526 bp, Homo sapiens
gttcattaatcagccaatgaactgatgataccttcagtcatagttttgcgtatgaataacccaagtttataacrtcattgattaattcagttaatatgtggggcaagcctctcacatgtgccaggtactctgcaaggtatgaggattgcaacagtctcttgccttcacagagtttcaaatctgatgacaaaagtcaacaatatacaaaaaaacaaaagagtctcatctgtgttgcaataaaaacaattgtcttaagcaaataattagaaagcacttattccagagctaggaggtcaatgtaggcttttcagaataattaatatctaggttcatacctgactggtgagtggaaagagtctggcagaggaacaagaaagagatgggcgatgagaaaggacaggagctgggagtggcaggcagggacacactgcaaaagacataagttaagtaggaaacataatgatctaggcaacataggacagtggccttactgaagtttgtatcatggaaatggaaaagtgaatgg

SEQ ID NO: 43129 - DNA, 583 bp, Homo sapiens
atcatagtactcagtagttagttttcaactcttaccctcctctttctcacccctctagtattccccagtgtctgtttttcccatctttgtgtccacgagtagttgatcttttgctcccacttataagtgagagcaaacttttaaacttttaagacatattttgataaacagaatattttaattttagtgtagtcaatttaatatatgatatataagatatggtttgtgttttatcgcattttacattaaaaattcttctctgcctccaaatcacaaatatagttccatatatttccttgtaagatgaagttcaattcctctatgtctgtttattcaactttattttttaaatgataactaatgttctaaataccattgagtgcaattacagttcagtatcagacattgaacttcaaaatatgtctggatattttcctgggctccattttctattcaattaatcttttatctctttccaagccagtactgcactcatagttcttgtagctggattcaggaaaaaaaaatcactttgtcttattaatctgaatggtcttggctactttgataatttggygtctta

SEQ ID NO: 43130 - DNA, 577 bp, Homo sapiens
ccttgacagacccagaccctgttggtttgttaatcaaacatcgttctcagctccttctcccccatgcgcatccattttagacgcatatgtgttctcctcattttcgtagctggtagtgagttttgaattgtttatggcacagaatgtgtatgaggtatgagcatggattgagcgaaagcagctcagatggttgcagggctctgacagtaattccgtgtaccagatcatggtgcttgggtcgaggaaattgcaatggagttggggagaagggatatacttgagcgatatgtaggagtttgccttgacaggaattgatgactgtaaatcgaggtggagacataaagaagttgtcaagaatgactcggtttctgactttagcaacccaacagatgaaggtattgtttgctgagatctgaaatgttgaagtagawttagtttggaagatgattttatgtttggatgcataaactctgaggtgcctgtgagacacttaacgagattgtcaaataagcagtcagctttcagttctagagagctttggtctggagatggagacttgggagtcatcagtcatggc

SEQ ID NO: 43131 - DNA, 504 bp, Homo sapiens
gaagaacctgattcaatattgagggtgatcaaatatggagagtgggaggttcttgctaaactaacttaaaaggattcttgctaaagctggagtttacaaagaagtatccagatgggcctaagagaaagttcaaggacctaactttggtcaagcaaagaatctttgtcacaactactcttatgacttayggtaatcaggtccttactcttctatttttaaatatgtcttttatgttcctaacccttttagtttatagattcctttttccaactcccacaactcttgcctgacaatttgttgaggaaacaacactggattttttttttccttaaaatttcccacagtgtaggattgtgtttgttgactgtatttccacaatggagactaatatttttctgtgtcatatgtatatatatatatttgtctacatatctgtgcatctgtctagctagctagcaagaatacttcacaggtaggatgcattctttgtcaaaggcagataac

SEQ ID NO: 43132 - DNA, 582 bp, Homo sapiens
tgctacaatagaatatgtatcatgttactttctgcttagcatcttccttgactagctccccatcagacttaattaaaaaatccaaagtctttaacccagcttacacagtgtacacaaatttcagagttctcktgatttgacccatgtataggtctacaactttatctccattaaataaataagttggtattttagatctgaaaactcagatgttgttgttcttgatgttttaatgtatagaaatattattctactttttgttctgttatttcctgtccacctatcattcctgtccttctgaagttcctattctgtgtatatttgacccctggtatcgttgctacatgcctttttgccttattttaaaattcatcaaatgatattacttatttgtaatcttagctccagatcatgtcttattgttaattaggttgaacaatttttcccctggaagtattagacaattgcttttgttaaactgatgtcttttcatacctttcccccaatattgacgtgtcctcttattataagatatttacacaggaagaataccctttgcttgtattacataatattttgtca

SEQ ID NO: 43133 - DNA, 1927 bp, Homo sapiens
cctcaaaattctgcaccagttaattggccatatcgggaaagtctcctcctgcccctttcaaggacagaacctagggagatgtctacacaggcttgaggctgtttaggtatggaattccgaggtcctggggagtagtttaggaacagagacgacctcttggcttcacaggaaggagtgtggtttgagaaaggccaaagggaggattctaagtgaggggctgggcggaacccctcttgcttgggtctaaggtttaggacatggaatgaacaattttccaattaaataagttgtgagttggatttgtgtttaggtatcttgaagtctcaactttactaataattttggattgaccacagaaaagagcactctcctgtgaccagctaggcttatcttctctggagctccatttcctttgctgcaaaatgaggggatctgacttgataacctctaccacccctccctactctaaaattcttgatccatggagtctgtcattwtaaggaaaacaaaagaacataacaaatcattagttgtcaatggaatattactgagcaatgaaaaatgagttctcaagccacagaaagaaaagaagaacccttaaatgcatattcttaagtgaaagaagcctatctgaaaaggctacaacctgaatagtctccctcttgtctggtttctccatctctggctcaagcatttcccatgattctcatcccttacactctgcagtcataatgagcttccatcttctgaaaactctttctggaagatttctgtatcaccactgaatctgcctatccaccactcactccttcacactgtattgtctgttcctcctccatgacacattccacactcagtttttgattgtcaactcttcaccacattaaatatatgatcctttctctcttgaaattctttcctctcctgtcctccgatactcctaactcctctgttcctcttcttaccaccccaagggatcctccctatcacctttcccccctgctcttcctcctactttgtaaaagagggcttttctgtggtttagcacttgaatttctgcagtacgttgattctgacgctcatatattcccacagtttcccctgaagagtcccatgcgtgtcacctcctcaggatgggaactgtaatcacctcaaatacaacgtaatgttgggtctaataaggaaactccactctgctccactttaggaagaaatcgttgctaggaacaacacatattaaactgctctatgctatttatcagatatttctctaagactggtggtggagaagaggttcctgaagtgacagaagttttaagggggagagacaaggagatggagaagaacgattttgccatcaaggatcaaggcagaggccaagcgcggtggctcatgcctataatcccagcattttgggagcctgaggtgggtggatcactagaggtcaggagttcaagaccagcctggccaatatggtgaaatcccatctctaccaaaaatacaaaaattagccaggcatggtggcacacacctgtaaccccagctacttgggaggctgaggcaggagaatcacttgaacccaggaggtggaggttgtattgagccgcctgggcaacagagtgagactgtcgcaaaaaaaaaaaaaaatcaaggcagagacctgatagctacagtgggtacaagatcatgtgaactctgggatgaaggggaaaataatgaaacaggaggtcagagaggggtgggaagagggtttgtcaaagatagacttctcctctgcagttctattcgggaccagccttcctggcacctgagttagccagtatgatctacagtcagaccatttatctttctttttctcttccgctcccccctgtgcccagcccctgaacattatctagcactctacgggcaaatgaaacaaaagaaa

SEQ ID NO: 43134 - DNA, 573 bp, Homo sapiens
gcaacacagcgaaactgtgtctctactaaaaatacaaaaagttagctgggtgtggtggtgtgcacctgtaatcctagctactcaggaggctgaggtgggaggatcacctgagcctgggaggtgcagcctacattgagctgagattgtgctgtactccagcctggacmaccagagtgagaccctgtctcaaaaaaaaaaaaaaaaaaaaaaaaaaagaaacaagaaaaaaagaaatgtttccttgaataagggtatctttttgaactttttggaatcttgtgcttcaggaccctgtcaaatattactaaacaatacatatctgagacaatcagaaatttgacgtgaacctacaattgatttacatacacagaaacacactgactcaaaagtcaattaaaaagttacaaaggcctatgccaaaaaataatttatgtagatctcacagtatgacagaatagattacttttttaaattctcagaacggctccataaagttgaagttcaaacctccaagttatgactcaagaatgttaatctggccaccattctcgctggtttttaattaaacaaact

SEQ ID NO: 43135 - DNA, 593 bp, Homo sapiens
ttttttctctcccagcaccaatgctgtggatgcacttgtggctcaggtcttggtaaagcatcccagctgcacggaactcatttatgcctagtgttccattattggaacgctaagcatgtgggagttatttatatcctactgctcaaggtcatcaccaaggtctgatttcaaaattcaaaaagttgcaacctcaggcataaatgggttaaggagatctctcataagagggacagaaacaaatgctgcctgaagctgtgatggacaggcaagagaaaggagcatacctatcttctacaaagtgggattcccaatagccttccccgtaagacatgaaaactgtcatacatgcaaatcaaaaaaaaaaaaaaaaatggggaaaaggcaccaagagaagcacaactgcctaagtgcccagaagcccagtctaaartgtgtttatagtaacatacacagaaagatataataaaaataaaatcagttataatcctacctcccaattaacaactgttagtttttcattatttttcatgcttatacatgcaaatgttcttgcttaaaaggaaatactatatattctcacttatgatttcata

SEQ ID NO: 43136 - DNA, 519 bp, Homo sapiens
ccttctccaacccccatccatcctgcataggccattcctgagacaaaatggagcacttctctggtttcggacatgacatcactatttcatactatctttgtactctttccaagggttcacaaaattattaagcaattgaatggatttttaaaagtgtgccctgcctgctcagggatctgagtgaaggtacaataaaaatccagagagataaagtgcacagtgaagaaagaagagttgagtgtggagaggagaaactgtactcgaaacatcactgcaagtgcacataaatcctagctttacgttttacccagtttttccaggccaaaagaagaatggagggatatagttctccttgtgtacttaaaaaataaacacyggccaggtgcggtggctcaagcctataatcccagcactttgggaggtcaaggcaggcagatcatctgaggttaggagttcgagaccagcctggccaacatggtgaaaccccgtctcgactaaaaaaaaaaaaaaaaaaaaaaa

SEQ ID NO: 43137 - DNA, 936 bp, Homo sapiens
tccctccttggcctctcaaagcactggaattagaggcgtgagccacctcacctggcctcgcaccaaactctttattgacttcttggttattgtcgcctgttactagtcgctacgctagttcagaaaggctttgcacagaggtctgttttgagacttctgtgccttacctagatctcagatcaagaaagtcctgtgatggctgaggacggtggtgggaggtcagtgggattggggctcaggaccatcgctgatttaggtcttcacactgggccttctgtgatctcagaacatcacacacccataaataaacctccaaggaccagtgtctgcaacttattgctaacaaaaaatttaagatgcagaacaaaaacagtttttgtttatatatttttaatatagggtcttgctccgtcacccaggctggagtgtagtggygcaatcatggctcactgcagcctctacctcctgggctccagtaatcctcctgcctcagcctcccaagtagccgaaactacagggatgtgccagtttttttccttttttaatgtgagcatacacatctatgctagtagatgtaaagaaaaatccagaagaatataaatcagattattaaagtacttgtatttggttagtggtattatttatgatttttgattcctagattatatatctttgtagtgattgcattttttacgtagatcaggtgttactattttttaaactgcttttttgtgatattttacatatatatataaaatgtgtttgtgtatgtatgtatataataatatatgccataaaatacgctcatgtaagtgaacaataatttctttaattattatttttttattttttagagacaaggtctcactttgtcaccaggttggagtgcagtagtatgatcacaactcactgcagactcgaactcctgggctcaag

SEQ ID NO: 43138 - DNA, 936 bp, Homo sapiens
tccctccttggcctctcaaagcactggaattagaggcgtgagccacctcacctggcctcgcaccaaactctttattgacttcttggttattgtcgcctgttactagtcgctacgctagttcagaaaggctttgcacagaggtctgttttgagacttctgtgccttacctagatctcagatcaagaaagtcctgtgatggctgaggacggtggtgggaggtcagtgggattggggctcaggaccatcgctgatttaggtcttcacactgggccttctgtgatctcagaacatcacacacccataaataaacctccaaggaccagtgtctgcaacttattgctaacaaaaaatttaagatgcagaacaaaaacagtttttgtttatatatttttaatatagggtcttgctccgtcacccaggctggagtgtagtggtgcaatcatggctcactgcagcctctacctcctgggctccagtaatcctcctgcctcagcctcccaagtagccgaaactacagggatgtgccagtttttttccttttttaatgtgagcatacacatctatgctagtagatgtaaagaaaaatccagaagaatataaatcagattattaaagtacttgtatttggttagtggtattatttatgatttttgattcctagattatatatctttgtagtgattgcattttttacgtagatcaggtgttactattttttaaactgcttttttgtgatattttacatatatatataaaatgtgtttgtgtatgtatgtatataataatatatgccataaaatacgctcatgtaagtgaacaataatttctttaattattatttttttattttttagagacaaggtctcactttgtcaccaggttggagtgcagtagtatgatcacaactcactgcagactcraactcctgggctcaag

SEQ ID NO: 43139 - DNA, 561 bp, Homo sapiens
aatctcataacaccccatacacgaggatcctgcccccatgatcctcgtggcttaactctttgtaccttcttgattcaattcggtgccttttcatttaatatctcttttaaacctttctccatacacatttccctctccccaaaagaaagaaatttcttataatatatataactgtaagcagcagaacgttttctgcaaatgtcacatccttgttctttttgttttttgttttgttttgctttgcttttgagacagagtctcgctctgttgcccargctggagggcagtggcgcaatctcggctcactgcaacctccacctcctgggttcaggcgattcacctgcctcagcctcccaagtagctgggattacaggcatgtgccaccacgcccagctaatttttgtatttttagtggagatgggatttcaccaggttggccaggctgatgtcgaactcctgacctcaggtgatccacccgcctccaccttccaaagtgctaggattacaggcatgaaccactgccccctgttccttgttcttatttcatattctgttcctctc

SEQ ID NO: 43140 - DNA, 561 bp, Homo sapiens
aatctcataacaccccatacacgaggatcctgcccccatgatcctcgtggcttaactctttgtaccttcttgattcaattcggtgccttttcatttaatatctcttttaaacctttctccatacacatttccctctccccaaaagaaagaaatttcttataatatatataactgtaagcagcagaacgttttctgcaaatgtcacatccttgttctttttgttttttgttttgttttgctttgcttttgagacagagtctcgctctgttgcccaagctggagggcagtggcgcaatctyggctcactgcaacctccacctcctgggttcaggcgattcacctgcctcagcctcccaagtagctgggattacaggcatgtgccaccacgcccagctaatttttgtatttttagtggagatgggatttcaccaggttggccaggctgatgtcgaactcctgacctcaggtgatccacccgcctccaccttccaaagtgctaggattacaggcatgaaccactgccccctgttccttgttcttatttcatattctgttcctctc

SEQ ID NO: 43141 - DNA, 2132 bp, Homo sapiens
gggtggcttctccctcgactgtctcgaaaaatcgtacctctgttcccctaggatgccggaagagttttctcaatgtgcatctgcccgtgtcctaagtgatctgtgaccgagccctgtccgttctgtctcaaatatgtacgtgcaaacacttctctccatttccacaactacccacggccccttgtggaaccactggctctttgaaaaaaatcccagaagtggttttggctttttggctaggaggcctaagcctgctgagaactttcctgcccaggatcctgtgtgaccaaaagtgcctctgctgggagctgggatcctcgggaccatgcttgctagcgctggatgagtctctggaaggacgcacgggactccgcaaagctgacctgtcccaccgaggtcaaatggatacctctgcattggcccgaggcctccgaagtacatcaccgtcaccaaccgtcaccgtcagcatccttgtgagcctgcccaaggccccgcctccggggagactcttgggagcccggccttcgtcggctaaagtccaaagggatggtgacttccacccacaaggtccccactgaacggcgaagatgtggagcgtaggtcagagaggggaccaggaggggagacgtcccgacaggcgatgagttcccaaggctctggccaccccacccacgccccacgccccacgtcccgggcacccgcgggacaccgccgctttatcccctcctctgtccacagccggccccaccccaccacgcaacccacgcacacacgctggaggttccaaaaccacacggtgtgactagagcctgacggagcgagagcccatttcacgaggtgggaggggtgggggtggggtgggttgggggttgtggggtctgtggcgagcccgattctccctcttgggtggctacaggctagaaatgaatatcgcttcttgggcggaggggcttccttaggccatcaccgcttgcgggactacctctcaaaccctcccttgaggccacaaaatagattccaccccacccatcgacgtttcccccgggtgctggatgtatcctgtcaagagacctgagcctgacaccgtcgaattaaacaccttgactggctttgtgtgtttgtttgtttctgagatggagtcttgctctgtcccccaggctggagtgcagtggcgtgatctcagctcactggaacctctgcctcctgggttcaagtgattctcctgtctcagcgccaccatggccggctcattttttttttttttttttttttttttttttttggtagacacggggtttcaccctctttcattggttttcactggagattctagattcgagccacacctcattccgtgccacagagagacttctttttttttttttttttaagcgcaacgcaacatgtctgccttatttgagtggcttcctatatcattataattgtgttatagatgaagaaacggtattaaacmctgtgctaatgatagtgaaagtgaagacaaaagaaaggctatctattttgtggttagaataaagttgctcagtatttagagctacctaaatacgtcagcatttacactcttcctagtaaaagctggccaatctgaataatcctcctttaaacaaacacaatttttgatagggttaagatttttttaagaatgcgactcctgcaaaatagctgaacagacgatacacatttaaaaaaataacaacacaaggatcaaccagacttgggaaaaaatcgaaaaccacacaagtcttatgaagaactgagttcttaaaataggacggagaacgtagctatcggaagagaaggcagtattggcaagttgattgttacgttggtcagcagtagctggcactatctttttggccatctttcgggcaatgtaactactacagcaaaatgagatacgatccattaaacaacatattcgcaaatcaaaaagtgtttcagtaatataatgcttcagatttagaagcaaatcaaatgatagaactccactgctgtaataagtcaccccaaagatcaccgtatctgacaaaataactaccacagggttatgacttcagaatcatactttctcttgatatttacttatgtatgtatttattttttttaattta

SEQ ID NO: 43142 - DNA, 2132 bp, Homo sapiens
gggtggcttctccctcgactgtctcgaaaaatcgtacctctgttcccctaggatgccggaagagttttctcaatgtgcatctgcccgtgtcctaagtgatctgtgaccgagccctgtccgttctgtctcaaatatgtacgtgcaaacacttctctccatttccacaactacccacggccccttgtggaaccactggctctttgaaaaaaatcccagaagtggttttggctttttggctaggaggcctaagcctgctgagaactttcctgcccaggatcctgtgtgaccaaaagtgcctctgctgggagctgggatcctcgggaccatgcttgctagcgctggatgagtctctggaaggacgcacgggactccgcaaagctgacctgtcccaccgaggtcaaatggatacctctgcattggcccgaggcctccgaagtacatcaccgtcaccaaccgtcaccgtcagcatccttgtgagcctgcccaaggccccgcctccggggagactcttgggagcccggccttcgtcggctaaagtccaaagggatggtgacttccacccacaaggtccccactgaacggcgaagatgtggagcgtaggtcagagaggggaccaggaggggagacgtcccgacaggcgatgagttcccaaggctctggccaccccacccacgccccacgccccacgtcccgggcacccgcgggacaccgccgctttatcccctcctctgtccacagccggccccaccccaccacgcaacccacgcacacacgctggaggttccaaaaccacacggtgtgactagagcctgacggagcgagagcccatttcacgaggtgggaggggtgggggtggggtgggttgggggttgtggggtctgtggcgagcccgattctccctcttgggtggctacaggctagaaatgaatatcgcttcttgggcggaggggcttccttaggccatcaccgcttgcgggactacctctcaaaccctcccttgaggccacaaaatagattccaccccacccatcgacgtttcccccgggtgctggatgtatcctgtcaagagacctgagcctgacaccgtcgaattaaacaccttgactggctttgtgtgtttgtttgtttctgagatggagtcttgctctgtcccccaggctggagtgcagtggcgtgatctcagctcactggaacctctgcctcctgggttcaagtgattctcctgtctcagcgccaccatggccggctcattttttttttttttttttttttttttttttttggtagacacggggtttcaccctctttcattggttttcactggagattctagattcgagccacacctcattccgtgccacagagagacttctttttttttttttttttaagcgcaacgcaacatgtctgccttatttgagtggcttcctatatcattataattgtgttatagatgaagaaacggtattaaacactgtgctaatgatagtgaaagtgaagacaaaagaaaggctatctattttgtggttagaataaagttgctcagtatttagagctacctaaatacgtcagcatttacactcttcctagtaaaagctggccaatctgaataatcctcctttaaacaaacacaatttttgatagggttaagatttttttaagaatgcgactcctgcaaaatagctgaacagacgatacacatttaaaaaaataacaacacaaggatcaaccagacttgggaaaaaatcgaaaaccacacaagtcttatgaagaactgagttcttaaaataggacggagaacgtagctatcggaagagaaggcagtattggcaagttgattgttacgttggtcagcagtagctggcactatctttttggccatctttcgggcaatgtaactactacagcaaaatgagataygatccattaaacaacatattcgcaaatcaaaaagtgtttcagtaatataatgcttcagatttagaagcaaatcaaatgatagaactccactgctgtaataagtcaccccaaagatcaccgtatctgacaaaataactaccacagggttatgacttcagaatcatactttctcttgatatttacttatgtatgtatttattttttttaattta

SEQ ID NO: 43143 - DNA, 534 bp, Homo sapiens
acacayacacacacacacacacacacacacacacacacacaccccgtagtgataaaactatgtaaatgatatttccataattaatacgtttatattatgttacttttaatggatgaatatgtatcgaagccccatttcatttacatacacgtgtatgtatatccttcctcccttccttcattcattatttattaataattttcgtttatttattttcttttcttttggggccggcccgcctggtcttctgtctctgcgctctggtgacctcagcctcccaaatagctgggactacagggatctcttaagcccgggagggagaggttaacgtgggctgtgatcgcacacttccactccagcttacgtgggctgcggtggggtggggtggggtggggtggggtggggtggggtggggtggggtggggtgcagagaaaacgattgattgcgatctcaattgccttttagcttcattcataccctgttatttgctcgtttattctcatgggttcttctgtgtcattgtcacgttcatc

SEQ ID NO: 43144 - DNA, 1511 bp, Homo sapiens
caggcccgggaagcgaggcgcacccgggggacgcgccgacccggttcggaagagcgggccgggagaagacgagagaccacgggcgaggccggggcgacggggaaggcgcgagaaaggcggccggcggggaaggggacgccacggggaccccgcgagcgcggccgaccgcagccgggacacacgcgcggggcctcaccgccgccggcggcaccgcgcggcacccggggcggccgaccggccctcggcgatccccgcggctccccccaccaccgccgccgcagtcgcggccggtcccccggaaccgtctcctcccccgcacgcgccgcaggccgacccccggaaccctcckggaagcccaccgggccccacgcggggcgccaccgacccggtccccaaggcgcgcgccgggggacgcggacgccgggccgatcagtggccggcggcggcgccccacgaggcggtgccgggttcggtcccaggcggggccaccaacggacgtgaagccggtgagccgctcggggggaagaagaggatcggcgggcggcgggcggggaagagggcacagacgggcgagggccggggaccgcgagggcaagggcacccgggagcccgcagaggcggcggctcggggagaaacctcaggcacggccgggccaccaggaaaacacggccgcgggatcccaccgccacagacacgagggcggtcccgcggcgccccgcctgggacgccggacggccctcggcccccaccgagaaccgcctcgcgagccccggggccccgccaccgggggccccggagcgaccgcagccacgaacccgacacgcccgcaccaccgtcgctcgtgattctcgtccatcctccgacccggtcccgctccgggagaccggcgcgcccccaccgtgggacgctttcccagggccaggcgggcccgaccccgtgccacgcaaacgcggtcgtcggcaccggtcacgactcggcacgggagcgggcggagagccgactcgcggcggagggggtcacgcgccggacagagcgccgggcgcgcacacccaccgcccgccggccgccgcgtcccaacccgctgggaacgccgggcccggcccggcgggatcctcccccgactcggaaggggggaggcgcgggccacagtaggcgacgagccgcactcggccaccaccgcggtggccggcggaaccctcgcttctcccccccaaccccgtcgagggggaagcggaggagggtcctctgcgagcgggtcgctaacggcagcgctaccataacggaggcagagacagaggcggcggcccgggggatccggtacccccaaggcacgcctctcagatcgctagagaaggcttttctcaccgagggtgggtcacactccccccacccgccagccgctcctcctcgggcccgcagaggcgccgagggacgcctggggaagggagggggccctgcggtacgaggaaacacctgcgcgcggccacctcgagcgttcgcgttcagggcg

SEQ ID NO: 43145 - DNA, 1511 bp, Homo sapiens
caggcccgggaagcgaggcgcacccgggggacgcgccgacccggttcggaagagcgggccgggagaagacgagagaccacgggcgaggccggggcgacggggaaggcgcgagaaaggcggccggcggggaaggggacgccacggggaccccgcgagcgcggccgaccgcagccgggacacacgcgcggggcctcaccgccgccggcggcaccgcgcggcacccggggcggccgaccggccctcggcgatccccgcggctccccccaccaccgccgccgcagtcgcggccggtcccccggaaccgtctcctcccccgcacgcgccgcaggccgacccccggaaccctccgggaagcccaccgggccccacgcggggcgccaccgmcccggtccccaaggcgcgcgccgggggacgcggacgccgggccgatcagtggccggcggcggcgccccacgaggcggtgccgggttcggtcccaggcggggccaccaacggacgtgaagccggtgagccgctcggggggaagaagaggatcggcgggcggcgggcggggaagagggcacagacgggcgagggccggggaccgcgagggcaagggcacccgggagcccgcagaggcggcggctcggggagaaacctcaggcacggccgggccaccaggaaaacacggccgcgggatcccaccgccacagacacgagggcggtcccgcggcgccccgcctgggacgccggacggccctcggcccccaccgagaaccgcctcgcgagccccggggccccgccaccgggggccccggagcgaccgcagccacgaacccgacacgcccgcaccaccgtcgctcgtgattctcgtccatcctccgacccggtcccgctccgggagaccggcgcgcccccaccgtgggacgctttcccagggccaggcgggcccgaccccgtgccacgcaaacgcggtcgtcggcaccggtcacgactcggcacgggagcgggcggagagccgactcgcggcggagggggtcacgcgccggacagagcgccgggcgcgcacacccaccgcccgccggccgccgcgtcccaacccgctgggaacgccgggcccggcccggcgggatcctcccccgactcggaaggggggaggcgcgggccacagtaggcgacgagccgcactcggccaccaccgcggtggccggcggaaccctcgcttctcccccccaaccccgtcgagggggaagcggaggagggtcctctgcgagcgggtcgctaacggcagcgctaccataacggaggcagagacagaggcggcggcccgggggatccggtacccccaaggcacgcctctcagatcgctagagaaggcttttctcaccgagggtgggtcacactccccccacccgccagccgctcctcctcgggcccgcagaggcgccgagggacgcctggggaagggagggggccctgcggtacgaggaaacacctgcgcgcggccacctcgagcgttcgcgttcagggcg

SEQ ID NO: 43146 - DNA, 1511 bp, Homo sapiens
caggcccgggaagcgaggcgcacccgggggacgcgccgacccggttcggaagagcgggccgggagaagacgagagaccacgggcgaggccggggcgacggggaaggcgcgagaaaggcggccggcggggaaggggacgccacggggaccccgcgagcgcggccgaccgcagccgggacacacgcgcggggcctcaccgccgccggcggcaccgcgcggcacccggggcggccgaccggccctcggcgatccccgcggctccccccaccaccgccgccgcagtcgcggccggtcccccggaaccgtctcctcccccgcacgcgccgcaggccgacccccggaaccctccgggaagcccaccgggccccacgcggggcgccaccgacccggtccccaaggcgcgcgccgggggacgcggacgccgggccgatcagyggccggcggcggcgccccacgaggcggtgccgggttcggtcccaggcggggccaccaacggacgtgaagccggtgagccgctcggggggaagaagaggatcggcgggcggcgggcggggaagagggcacagacgggcgagggccggggaccgcgagggcaagggcacccgggagcccgcagaggcggcggctcggggagaaacctcaggcacggccgggccaccaggaaaacacggccgcgggatcccaccgccacagacacgagggcggtcccgcggcgccccgcctgggacgccggacggccctcggcccccaccgagaaccgcctcgcgagccccggggccccgccaccgggggccccggagcgaccgcagccacgaacccgacacgcccgcaccaccgtcgctcgtgattctcgtccatcctccgacccggtcccgctccgggagaccggcgcgcccccaccgtgggacgctttcccagggccaggcgggcccgaccccgtgccacgcaaacgcggtcgtcggcaccggtcacgactcggcacgggagcgggcggagagccgactcgcggcggagggggtcacgcgccggacagagcgccgggcgcgcacacccaccgcccgccggccgccgcgtcccaacccgctgggaacgccgggcccggcccggcgggatcctcccccgactcggaaggggggaggcgcgggccacagtaggcgacgagccgcactcggccaccaccgcggtggccggcggaaccctcgcttctcccccccaaccccgtcgagggggaagcggaggagggtcctctgcgagcgggtcgctaacggcagcgctaccataacggaggcagagacagaggcggcggcccgggggatccggtacccccaaggcacgcctctcagatcgctagagaaggcttttctcaccgagggtgggtcacactccccccacccgccagccgctcctcctcgggcccgcagaggcgccgagggacgcctggggaagggagggggccctgcggtacgaggaaacacctgcgcgcggccacctcgagcgttcgcgttcagggcg

SEQ ID NO: 43147 - DNA, 1511 bp, Homo sapiens
caggcccgggaagcgaggcgcacccgggggacgcgccgacccggttcggaagagcgggccgggagaagacgagagaccacgggcgaggccggggcgacggggaaggcgcgagaaaggcggccggcggggaaggggacgccacggggaccccgcgagcgcggccgaccgcagccgggacacacgcgcggggcctcaccgccgccggcggcaccgcgcggcacccggggcggccgaccggccctcggcgatccccgcggctccccccaccaccgccgccgcagtcgcggccggtcccccggaaccgtctcctcccccgcacgcgccgcaggccgacccccggaaccctccgggaagcccaccgggccccacgcggggcgccaccgacccggtccccaaggcgcgcgccgggggacgcggacgccgggccgatcagtggccggcggcggcgccccacgaggcggtgccgggttcggtcccaggcggggccaccaacggacgtgaagccggtgagccgctcggggggaagaagaggatcggcgggcggcgggcggggaagagggcacagacgggcgagggccggggaccgcgagggcragggcacccgggagcccgcagaggcggcggctcggggagaaacctcaggcacggccgggccaccaggaaaacacggccgcgggatcccaccgccacagacacgagggcggtcccgcggcgccccgcctgggacgccggacggccctcggcccccaccgagaaccgcctcgcgagccccggggccccgccaccgggggccccggagcgaccgcagccacgaacccgacacgcccgcaccaccgtcgctcgtgattctcgtccatcctccgacccggtcccgctccgggagaccggcgcgcccccaccgtgggacgctttcccagggccaggcgggcccgaccccgtgccacgcaaacgcggtcgtcggcaccggtcacgactcggcacgggagcgggcggagagccgactcgcggcggagggggtcacgcgccggacagagcgccgggcgcgcacacccaccgcccgccggccgccgcgtcccaacccgctgggaacgccgggcccggcccggcgggatcctcccccgactcggaaggggggaggcgcgggccacagtaggcgacgagccgcactcggccaccaccgcggtggccggcggaaccctcgcttctcccccccaaccccgtcgagggggaagcggaggagggtcctctgcgagcgggtcgctaacggcagcgctaccataacggaggcagagacagaggcggcggcccgggggatccggtacccccaaggcacgcctctcagatcgctagagaaggcttttctcaccgagggtgggtcacactccccccacccgccagccgctcctcctcgggcccgcagaggcgccgagggacgcctggggaagggagggggccctgcggtacgaggaaacacctgcgcgcggccacctcgagcgttcgcgttcagggcg

SEQ ID NO: 43148 - DNA, 547 bp, Homo sapiens
ggcttaaagagcaggagttacccagctgaaattcattctttttttttttttccttaaactgccaactttttattctttcttcctgataaacaagcaaaaccagctttgccccgaaggcagaaccgggctgctttccagccttttgccaagggggcaggggrcctgttcacaattcctgccctgggccctgacagtcactggctctttcatgaggagcctggagagggcagagtgagtcaggctgggctcagggaggcctcaggagaggaggaagatgctgagggaagagcctgtctcagccaaaagtttaaatggtagaggaggggcatagacctcctcagaatcttttttttctttttcttttgagtcaaggtcttgctctgtcacgcaggctggagtgcagtggtgcgatcatggctcactgcagcctcgatctcctgggctcaagcgatcctcccatctcagtctcccgagtagctgggaccacaggcgtgggtcaccacgcatggctaattttttttttttttgtcctcctcagaatctctac

SEQ ID NO: 43149 - DNA, 672 bp, Homo sapiens
gccagagcaggagaaagcaggcccgggatgggtgagcctgcgtcttcctcattcctcagggttggcactctgaggccgtgtggactttccagcctcagtttaccctcctacaaaataaggacgtcatccctgcccttcccccatcgtagggtggctgggagggctctccctgcctaactgggagatggacgacttttctttgactttttcttcctcctctttatctgtattcttgggtttttctcggtgggggtagggtgtgcttcttgctaggtgtggcagctactgataactttgcctccctggggcaggccctctcagaggagccacctgggctaggactggctgcctggtgggaggggactcctggggctgcccaaggtgtggttgtggggcccttatgcctcccagccaggagtggggagagaggactcccccaccaccgattaccagaaagacctcctggccccttccagagaaccctggctcaggagcctggcgttggyggacacagtgcctagctgcagcttctgggcattgagctttgcttggacacaggaactttcacttttgtttctttttacttcccatattctgggagtgcagtgacctagtttttagcggccttatatgtccctctctgccgaggagacttgagggcctccagcacta

SEQ ID NO: 43150 - DNA, 562 bp, Homo sapiens
ttttagatgatctaagaaatcatgtgcatatatctttcagatttytattttgggaaaatgaaggtttctacaacatattgtttcagtgttcaaataaactgaaggactcaacattacatttgaactatatccttcctagtgggttagtgtgaaaaagagtttggctgattcctaaaactctgccagccctgcagtaatctccagggcctggttattgttcagacattccatggtgattcctgggaaggaagcttggctgctcagtttctgagtctggggtgagataatgttctgggaagggacatctgttctttggtgtaatctctcatggtgaaatctgctctgtacatcagacaattgcattgctaccaagtttcataccaaatatttgaaaggatggtattgaatctaaaaccaaatattagtttttattaaactcatgggaaggctaatatattccaacgtaaattattacatatggttaagtaattgcatgttaatttattttaatgtaaatatttttgttactgttctgagccaaattctaaagaaaaaataaata

SEQ ID NO: 43151 - DNA, 665 bp, Homo sapiens
cgagcattaccacctgagctctgcctcctgtcagattagcagtggcattagattctcataggagcttgaacactattgtgaactgcgcatgtgaaggatctaggttgcatgctccttatgagaatctaatgcctaatgaatgatctgaggtgaaacggtttcatcttgaaaccatccaccatctgccccttcccccagcccccgccctgcacctccaccccattatccgtggaaaatttgtcttcctcaaaamtggtttctgatgccaaaaaggttgggaaccgctggtttaatggattcagagtttctgtttgggatgacaaaaaaaattctaaaatggatagtggtggtgatcgcagaacattgtgaatatacttataggatgccactgaattgtacacttaaaaatgattaaaatggtctttttatgttagatatattttaccacaatcaaaaaattaaaataaccaaccaaacaacaacaaaatagatttactcagataatacctgttcagtgtcttttcctcacagatatcttctcatttgttactgaagtatccgtctcagaattgtgtgggtgcttattagatgtttaagattgtttacctgtgggtttgtattgcctttgaattacaaatggtgtggggttttttacattatttttg

SEQ ID NO: 43152 - DNA, 665 bp, Homo sapiens
cgagcattaccacctgagctctgcctcctgtcagattagcagtggcattagattctcataggagcttgaacactattgtgaactgcgcatgtgaaggatctaggttgcatgctccttatgagaatctaatgcctaatgaatgatctgaggtgaaacggtttcatcttgaaaccatccaccatctgccccttcccccagcccccgccctgcacctccaccccattatccgtggaaaatttgtcttcctcaaaaatggtttctgatgccaaaaaggttgggaaccgctggtttaatggattcagagtttctgtttgggatgacaaaaaaaattctaaaatggatagtggtggtgatcgcagaacattgtgaatatacttataggatgccactgaattgtacacttaaaaatgattaaaatggtctttttatgttagatatattttaccacaatcaaaaaattaaaataaccaaccaaacaacaacaaaatagatttactcagataatacctgttcagtgtcttttcctcacagatatcttctcatttgttactgaagtatccgtctcaraattgtgtgggtgcttattagatgtttaagattgtttacctgtgggtttgtattgcctttgaattacaaatggtgtggggttttttacattatttttg

SEQ ID NO: 43153 - DNA, 1010 bp, Homo sapiens
cccatcccctgaacccccagccccagaagtttttacttaagagtcactgtggtagtgaatcattgttaacagattatagtgtgagctgccatcttaattatcattataatgtatttaggacttttatatatcaagaatcttgctaaagcctttcatataagtcacatttagtctgtctgacaacattttatagatgaagaaatggaggctaagtttacataactaatagctaatgacattcctgattttttcagctttattcttaatcacctaactgtatttcctcatcttctgaagaagttcatcatattcctcaatatttagggggagaagaaagttggagaactatcagtctgaagtctcctgtgtctcttggaatatggaagttatcgtcatactatcagatatagtttatttcaaaaactgaacatattgtagcagaggaataaagtagtgaaatacagcagagaactaatggtctgttcagtttgccaattgtacaaaaagaaatagaaacacgtgtaccttgactttttttttggagacggagtctccccctgtcgccctgctggagtgcaatggcgtgatcttggctcactgcaacctccgcctcccgggttcaagtgattctcctgcctcagcctcttgagcagctgggattacaggcgtgcaccaccatgcccagctaatttttttgtatttttagtagagatggggtttcaccatgttggtcaggctggtctcgaaatcctgacctcaagttatccgcccgcctcagcctcccaaagtgctgagattacgagcatgagctaccgtgcctggccatamcttgacattttctatcagattatgacaaaattttaaaaataaagaatgagcaaaaattatagattacagccatgtaatttaataggttacgtggcatttagggatatataagagagtatacttttcaaataaataaccactcaaaaatgtgtgtgtctaggaaagttcagtgtgtactagaa

SEQ ID NO: 43154 - DNA, 1010 bp, Homo sapiens
cccatcccctgaacccccagccccagaagtttttacttaagagtcactgtggtagtgaatcattgttaacagattatagtgtgagctgccatcttaattatcattataatgtatttaggacttttatatatcaagaatcttgctaaagcctttcatataagtcacatttagtctgtctgacaacattttatagatgaagaaatggaggctaagtttacataactaatagctaatgacattcctgattttttcagctttattcttaatcacctaactgtatttcctcatcttctgaagaagttcatcatattcctcaatatttagggggagaagaaagttggagaactatcagtctgaagtctcctgtgtctcttggaatatggaagttatcgtcatactatcagatatagtttatttcaaaaactgaacatattgtagcagaggaataaagtagtgaaatacagcagagaactaatggtctgttcagtttgccaattgtacaaaaagaaatagaaacacgtgtaccttgactttttttttggagacggagtctccccctgtcgccctgctggagtgcaatggcgtgatcttggctcactgcaacctccgcctcccgggttcaagtgattctcctgcctcagcctcttgagcagctgggattacaggcgtgcaccaccatgcccagctaatttttttgtatttttagtagagatggggtttcaccatgttggtcaggctggtctcgaaatcctgacctcaagttatccgcccgcctcagcctcccaaagtgctgagattacgagcatgagctaccgtgcctggccataacttgacattttctatcagattatgacaaaattttaaaaataaagaatgagcaaaaattatagattacagccatgtaatttaataggttacgtggcatttagggatatataagagagtatacttttcaaataaataaccactcaaaaatrtgtgtgtctaggaaagttcagtgtgtactagaa

SEQ ID NO: 43155 - DNA, 552 bp, Homo sapiens
  misc_feature (1)...(552): n = A,T,C or G
cactgacagaaatataacagagctgttgtccagttgctacttctgtgtttgatacccgagtgaccattcccctcagaggtaacttanggtgagcagggggttggggtgtrgctcctcagggagcatctagggaccccccttcctgtgctccaccacttggagtccactggctttaataatggggatccattattaaactcagagaaaaatgactgaccccagtagaagcctacagcttgtgactgtgtttatggatccacctggcatccacacctttccttccttttctgacccccgatagactgcacagccctcgacaggcaggagctgagaggagatgcaggaagaccctttctcctgggacactttgctgcacgataagttcaccaggattgacgtgctcttccctaggcctgtgatgacgaatgctgcagccaagaaagacagacatgctgcaagcattcagaaaatagagtgtctcattctcttccagctctgtgctgctgttattgttgtttaatcaacaaccacagttgtaaatctgtgcccctg

SEQ ID NO: 43156 - DNA, 562 bp, Homo sapiens
agggtctgctatatgcacaccattgtacttagtttaggatttgttaagagtagaaatgaaatattttcagctttaaattctaaattggcaaatagatcttacctctactaatagttcttttgagtacaaatttaatwtgaatgaaagtaaatctgtatcttgtgaatgaaaggaatttactttgttgtgtacagagaaacccatttgcctggcttttgtcaataattcatttgaatttataaccctttttttttttttttttttttgagacggagtcttgctctgtcgcccaggcaagagtgcagtggcgcgatctcggctcactgcagcctctgcctcccgggttcaagcaattctcctgcctcagcctcctgagtagctgggactatagccgcgtgccgccatgcccagctaatttttgtatttttagtagagacaggatttaactatgttggccaggctggtcttgatttcctgacctcgtgatccgtcctcctcagcctcccaacatgctgggattataggcatgagccaccacacccggccgaatttataatccatg

SEQ ID NO: 43157 - DNA, 673 bp, Homo sapiens
ggagatgaagggaagaaggcagggaaattttgattgacttaatgtaaagagttcatagttaacagaataaaagattccacaagtawgtgctttcttaaagaagggtataattacacagcattataacatttacactaccttggtgtggctgggattcctctgtttctagctctgtcactttctcccattttatccatccatgtgccacaattgaaacgatttcctccataaacaaatcctgtttcttcatcaactcctgcagttatattaaaacctaaaaaacaaaatgtgtataaaataaaattttataagtattatatatagtatatacaaatattttaaaacatttacaaaattttaaatataataaactaggacaaccactctaaagctcagtttggtggtatcttattattttgtatccagaatatacaagcacaaagttggagatgtgtatattctaccacataggaatttcatttctatatatattctagagaaacccttacttatgtgcacatggagatgtgtacaaggatattcactgccacattgcttgcattcacaaaaaataactgctcaatagaggaatggataaacactgtagtttattcatacaatgggaaaccctctataccatttgaaattaatgaactggatttacatgtatcaa

SEQ ID NO: 43158 - DNA, 620 bp, Homo sapiens
tgcacttgtgctgttaaagggacctcttaaatctgggaatgggggctacaactcyagtaaagttgggcctcatttaccagtcctagtgtacatttgattacgaagttcatatgcaattggattgtgctgttcaccaactatttcccactctcaacctgcagggcacttcttaaagtaggttgcactctcaggctctcttgtggttgagtgagaccacatgtccagttctggccaattacctcagggccagggcactgaattgccaatttgcgactgtttagactcctctttctctctgcctttgagtctggcaatgtgcagcattgcttcatcatcagactgtatcctagaattaggagatgtataacctgcagtaaacgtatagcatgaacaagaaatacattttttattattttatgttacaaatgagaaaagaaaatagctcagggcagtctgagctttgggaggtatgcagtcccaaagagacaagagcatgggattttggtcattcttgccttccatcctgcaactcccactctacatccatgcttggggacaattatttaaagtaattttcttcctgactagctgcctcacccatgatctttgtgttcccagaa

SEQ ID NO: 43159 - DNA, 997 bp, Homo sapiens
  misc_feature (1)...(997): n = A,T,C or G
aaagacactccatgaagagaaatagccaaaaatattttactatttgtagcagaatggaaggataaagncaacatagaaatttcaggactgggcacagttgacaatggcaaatactttctaaatgaagcctttaataatattttaaaaaatcaaaccaagcctatccctgtcatacctatctttaaaatctctaaatggattgagatatcacctagtaagtcctttcaattggatgaaatggctaaatgaacagggaataaaggtgttggtctcccaccaagcttgataggctcaaggtacctagaattaagtagacagataaatggagatatgtcaaggaaagaactgtgttatggccattggcaaatgaagctgattggaatctaagagataagaaaccagtaatgtttataagataattgtattgccaaaggagccaagagcctagacaaaacttaacatgtctctttggcctacagccctctatacacaggaaatgagctcaggatactggttagcctccaaagagtgcatattctccaataccctcttcacatataactaaaaaatataataaaggaagaactgtctcccagaaggtcaaatcaaggaacataaagaacaatgaattgggaacccccttctagagggcagaattagcatctaattcaagaactatttaatatcacctacacccaggatagcaggacttcacaatgtgttgccactgagcagtgtcarctctgttcattgactttactctcattttttcccaatgactcaccacatctcttccctctaatatactttctgtgatctaagaatttgcctgttctagatattttatatgtgttatcatacaatatttgtccttttttatttaacttctttcatttagcaccatgttttcaaggttcatccatattgtaatctgtatcagaacttattccttcttctggctgaacaataacccattttatggatataccacatttta

SEQ ID NO: 43160 - DNA, 602 bp, Homo sapiens
tgcatgcctttacatgaaaggtagctaagactgtggacatcaccaagagcatcaacattttagcctcaagaaactcagtgagttttaccaacctcttggaatccactggattggttaccctcagatttaacttctgaagctattactttaatacagcttttcatattaatatttctctttttcattttaggcatcctttttaagatgcttgatgtccaggactttgaaacagctgatttctttttaaccacctctcaataggtarttcaattgatttttacaggaacagcaccagtgagggttctcaagagattgtttcttagcccttgcttggtcccacccacgtttattctcacctgagttgttcagtgtcgaacaaaaggctaaccatgttaaactttacctgagtcgtgtgctcttggagaacagcaacagttaagaaatccctccaaccttggcattccaggaaaggactttctgcaaataaccatctttcttcatatgacttagataggactcactttccactttttctcatgactcccataacagttgaggataactccaccatttacctgtgtcaggaacaaacagagaacttt

SEQ ID NO: 43161 - DNA, 830 bp, Homo sapiens
tttgatgaaagtttcatcaatgttaaatttactggagttaactgtactgtgcgtgtgtgtgaagaggaataattaagaaaataagacagatggggtaaaatgtgagcaataaatagttttcaaaaactctcagtcattgttatcattttccttgattctgagactccaattacaagtgtgtgagactgtttgacactgtcccatgtgtctcacaagcggtgcttggttctttccgttatttttctctttttacattagtttcgatatttttaattgattggcctttgatttcattacttgtagcactcagtctgctgttaaaactactctatatataaattcttaatttcagattaatatttttcagttctagaatgtccttctgatacttttatatagattccaattctcttttggaattctctgtgttttcctttatttactaatttagagayagggtctccctatgttgctcaggctggtcttgagctcctggcttcaagcaatcctcctgcttttgcctcccaaagtgttgggattacaggtgtaagccaccatttccttctcttattttttaacatgtctataatcttatttgaaaaggcctatcagctaacctctgcaagtgcatcattttgatctgcatctcgtctgttttttcttttgattatttatcacagttgcttttctcttcaaatgtttctttattttgggtaatatgccacatattgtgaacaaaagaactgtacagcctaaagctggccaggcatggtggctcatgtctgtaatcccagcactttgggaggccgaggttgagggggaggggatcc

SEQ ID NO: 43162 - DNA, 1019 bp, Homo sapiens
tctgctgtcagtcaaatatgtcataatagagtggtttccttatgattaagcctcatctccttagtgaagatctgagagaaaaatgtcaacaaaaacatacactacaaaagaatgcctgtgaaagattgtataaaggaacaaacaggcccagaagataagtatagtgtttacatacagacccagactggcagctgagctgtcctgtaagagggaagccttctcatagcccagttccctgcgctgctataacctcaagccttccacacgtccctctgctgacaacctgattctagggtgcactagttcatcattattaatgaagcagttcctttgtattagtgaggcaatcacaaagaagtagacgctgtacagaatctagagagactttcacatctaaagtctgaaaacccataaaagtagacacaatgctccttaggtttgctttcagcttttgagtactgggctcttcaggatgcagaaagcgctggaaaggagaagctaaatactaggtcaagcctgggaaaacagaagatttgggcacctgcaaaggatcagtaatgagagcagaaatcgcccctcctgcggcagaggcatgacctttgcccctgcatacctccctgttccctcccacaacaacccttccctcgtcttattcctgtccgctgcgtccttagcccaccttggctcgcccaatttaagggcccttcccactaattccctattgcgatgtcagggcggccttcacgacaccggaactctaggaagagacttcgctgacctgtcagcggatccaaaatggcggggcctagtcccaggaccggcagccgctgctcatgtccagcccgcaccccggaggcgtctccgagcagctctcccggctctggtagcagatgggagaagagaaggagcctgtttcctggaaattgaggcygaagtcagggtgggactgcacagtccgccaggatgagtcgtccgggacgggcagtagagccgggtaccttccctgtcagctcactgac

SEQ ID NO: 43163 - DNA, 1112 bp, Homo sapiens
attaggtcctgagctttggggtgtctagggtgtccatggccactgccagggactcatgaaaagaatgatggggaggaaaaggaaaagatcatcagtggggtaagagttgggggaagacagagaggaataactttcaaaactctatctctcctttcccattgtcctgccccggggccttttttacacctttcagttaatagtttctcctttcctatttcttccctgcccaaccctttatgctcaccatggtcaaataaaggtcacaaagatgctgttttttgtcacacccctggatacaagcctccagtgacccctactgcttggtgcattgcttctcatagtggggtggrcgggggaggagggcagtacgggagtggaggaggcatgacacacagtctaaacagggcccatcttcctggtgtggtgatatcacttgaagattggggggttttatattaaaaaaagctttatttttatattaaaatattttataatccatgactaaagtatggaatagaacgaaaaatttgtttgcatttttaacataaagctggtgacctcaaaacaatttcatactagtggcagctgtttcaggtcatgcttctgttttctagtagatgttgtttttgactggtcttagggtttttttctttattcagggctgttgctcagtgtgaatcttagcggtttttgatgaaaaagctggacatactgtagcctagactttgtcaaatctgaaccactgccccttgtcccccattggaggccccctcggtttgactcgtttctctctgcagatctcccgtggcctacactgagactctgactaacctaggctcaccactgccctcccagcctgccagcttattcccaacactgctgattatttagaatgccataccccttctcttcctcttgaactcccaattcagtcacgtgcctatattctctgagctcccaacactcggtaccaccttccatgggcttccctctctctgatctcccacagtctgggagtcagacccatgcggtccatctttccatcctgtgctctgtttgcctccctacactgcagactcctacaagatagggtctctgccttactgttcttg

SEQ ID NO: 43164 - DNA, 1112 bp, Homo sapiens
attaggtcctgagctttggggtgtctagggtgtccatggccactgccagggactcatgaaaagaatgatggggaggaaaaggaaaagatcatcagtggggtaagagttgggggaagacagagaggaataactttcaaaactctatctctcctttcccattgtcctgccccggggccttttttacacctttcagttaatagtttctcctttcctatttcttccctgcccaaccctttatgctcaccatggtcaaataaaggtcacaaagatgctgttttttgtcacacccctggatacaagcctccagtgacccctactgcttggtgcattgcttctcatagtggggtgggsgggggaggagggcagtacgggagtggaggaggcatgacacacagtctaaacagggcccatcttcctggtgtggtgatatcacttgaagattggggggttttatattaaaaaaagctttatttttatattaaaatattttataatccatgactaaagtatggaatagaacgaaaaatttgtttgcatttttaacataaagctggtgacctcaaaacaatttcatactagtggcagctgtttcaggtcatgcttctgttttctagtagatgttgtttttgactggtcttagggtttttttctttattcagggctgttgctcagtgtgaatcttagcggtttttgatgaaaaagctggacatactgtagcctagactttgtcaaatctgaaccactgccccttgtcccccattggaggccccctcggtttgactcgtttctctctgcagatctcccgtggcctacactgagactctgactaacctaggctcaccactgccctcccagcctgccagcttattcccaacactgctgattatttagaatgccataccccttctcttcctcttgaactcccaattcagtcacgtgcctatattctctgagctcccaacactcggtaccaccttccatgggcttccctctctctgatctcccacagtctgggagtcagacccatgcggtccatctttccatcctgtgctctgtttgcctccctacactgcagactcctacaagatagggtctctgccttactgttcttg

SEQ ID NO: 43165 - DNA, 1112 bp, Homo sapiens
attaggtcctgagctttggggtgtctagggtgtccatggccactgccagggactcatgaaaagaatgatggggaggaaaaggaaaagatcatcagtggggtaagagttgggggaagacagagaggaataactttcaaaactctatctctcctttcccattgtcctgccccggggccttttttacacctttcagttaatagtttctcctttcctatttcttccctgcccaaccctttatgctcaccatggtcaaataaaggtcacaaagatgctgttttttgtcacacccctggatacaagcctccagtgacccctactgcttggtgcattgcttctcatagtggggtgggcgggggaggagggcagtacgggagtggaggaggcatgacacacagtctaaacagggcccatcttcctggtgtggtgatatcacttgaagattggggggttttatattaaaaaaagctttatttttatattaaaatattttataatccatgactaaagtatggaatagaacgaaaaatttgtttgcatttttaacataaagctggtgacctcaaaacaatttcatactagtggcagctgtttcaggtcatgcttctgttttctagtagatgttgtttttgactggtcttagggtttttttctttattcagggctgttgctcagtgtgaatcttagcggtttttgatgaaaaagctggacatactgtagcctagactttgtcaaatctgaaccactgccccttgtcccccattggaggccccctcggtttgactcgtttctctctgcagatctcccgtggcctacactgagactctgactaacctaggctcaccactgccctcccagcctgccagcttattcccaacactgctgattatttagaatgccataccccttctctkcctcttgaactcccaattcagtcacgtgcctatattctctgagctcccaacactcggtaccaccttccatgggcttccctctctctgatctcccacagtctgggagtcagacccatgcggtccatctttccatcctgtgctctgtttgcctccctacactgcagactcctacaagatagggtctctgccttactgttcttg

SEQ ID NO: 43166 - DNA, 520 bp, Homo sapiens
ggacacaaggaaagggactggtcttccccactcctccctattctgtttttttatggtgtcactcaattaatttgggtttactggggrcatcgtcctccaacagggacctatgtcatgttagtctcagctacctctggttgcaccttggagagagttgaccacctgaccccttccagcccctttcatatttatttgggagggggtgttcatcatatatagtatgtgctaattttaagagattcaaacagtgcagaagtataaaagaaaaaatttaagatcttttttctaccttagaggtaaatgctgttaacagtttgccatgtgtccttccaggattttattttccatgctttaaatgtgcatgggggaccgtgcgccatggctcacacctgtcatcacagcactttgggaggccgaggcaggtggatcacttgagcccaagagttctagaccagcttgggaaacatggtgaaaccttgtctctactaaacctataaaaatcaactgggcatggtggcac

SEQ ID NO: 43167 - DNA, 640 bp, Homo sapiens
gagaagtgaggagcccctccgcccggcagccgccccgtctgggaggtgtacccaacagctcactgagaacgggtcatgatgacgatggcggttttgtcgaatagaaaagggggaaatgtggggaaaagatagagaaatcagattgttgctgtgtctgtgtagaaagaagtagacacaggagactccactttgttctgtactaagaaaaattcttctgccttgggatgctgttaatctataaccttacccccaaccccgtgctctctgaaacatgtrctgtgtccactcagggttaaatggattaagggtggtgcaagatgtgctttgttaaacagatgcttgaaggcagcatgctcattaagagtcatcaccactccctaatctcaagtacccagggacacaaacactgcggaaggccacagggtcctctgcctaggaaaaccagagacctctgttcacttgtttatttgctgaccttccctccactattgtcctgtgaccctgccaaatccccctctgcgagaaacacccaagaatgatcaataaatacttaaaaaaaaaaaaaaaaagaaaagaaaatactgattctcttatatattttaaaccactgtcctaacaaactactcttagcataattaac

SEQ ID NO: 43168 - DNA, 825 bp, Homo sapiens
ggggaggccaacagctctttaaacacttgtccatgcagagggaggggaagagaaggaaatgcttctggcagtgccattgcacacccctctgcgggagccctggtttctgatgagcaaatatacacgacagatggggatgacatcattagtcccacagagccagctctccctctagctgggggaccacactgctgaggccatcacacaagctgggcaacacccactgaggagctggggatacatgacatcatcgcagccgcygccttctgtggaccacgcagccagccctcagggcgacccttgctggactgaaccaagccaggtcttcccttctttgagaatggggcccagctctaagctgggctcagaagctctcatttgggaatttggagtagagattccatttctaggtcatagaagttctctgctggatgtgtcaactgaggccagggaagcctggggctgtgtggctaatgtgaccacacacattgaaacggtgacagctgtgctgccaagaaaatcgaagcagaactatgctagtgaagcagggagagggcggggacagagggggccaggcaagtcccagaagtgtggagcagttaggggagctaggagaaaaccgaatttccaggagaactctccttattacttttatgacagatttaccgttggaaaatattcaaaacttcagctccaaccctgggctccaataacatcatatattaaaatgtctggtccaagaagtgtgctgaattactcctgctgggcaaccccagcttccaagtcattctgggagcatgaacagagacagtgtgctctagacag

SEQ ID NO: 43169 - DNA, 825 bp, Homo sapiens
ggggaggccaacagctctttaaacacttgtccatgcagagggaggggaagagaaggaaatgcttctggcagtgccattgcacacccctctgcgggagccctggtttctgatgagcaaatatacacgacagatggggatgacatcattagtcccacagagccagctctccctctagctgggggaccacactgctgaggccatcacacaagctgggcaacacccactgaggagctggggatacatgacatcatcgcagccgccgccttctgtggaccacgcagccagccctcagggcgayccttgctggactgaaccaagccaggtcttcccttctttgagaatggggcccagctctaagctgggctcagaagctctcatttgggaatttggagtagagattccatttctaggtcatagaagttctctgctggatgtgtcaactgaggccagggaagcctggggctgtgtggctaatgtgaccacacacattgaaacggtgacagctgtgctgccaagaaaatcgaagcagaactatgctagtgaagcagggagagggcggggacagagggggccaggcaagtcccagaagtgtggagcagttaggggagctaggagaaaaccgaatttccaggagaactctccttattacttttatgacagatttaccgttggaaaatattcaaaacttcagctccaaccctgggctccaataacatcatatattaaaatgtctggtccaagaagtgtgctgaattactcctgctgggcaaccccagcttccaagtcattctgggagcatgaacagagacagtgtgctctagacag

SEQ ID NO: 43170 - DNA, 825 bp, Homo sapiens
ggggaggccaacagctctttaaacacttgtccatgcagagggaggggaagagaaggaaatgcttctggcagtgccattgcacacccctctgcgggagccctggtttctgatgagcaaatatacacgacagatggggatgacatcattagtcccacagagccagctctccctctagctgggggaccacactgctgaggccatcacacaagctgggcaacacccactgaggagctggggatacatgacatcatcgcagccgccgccttctgtggaccacgcagccagccctcagggcgacccttgctggactgaaccaagccaggtcttcccttctttgagaatggggcccagctctaagstgggctcagaagctctcatttgggaatttggagtagagattccatttctaggtcatagaagttctctgctggatgtgtcaactgaggccagggaagcctggggctgtgtggctaatgtgaccacacacattgaaacggtgacagctgtgctgccaagaaaatcgaagcagaactatgctagtgaagcagggagagggcggggacagagggggccaggcaagtcccagaagtgtggagcagttaggggagctaggagaaaaccgaatttccaggagaactctccttattacttttatgacagatttaccgttggaaaatattcaaaacttcagctccaaccctgggctccaataacatcatatattaaaatgtctggtccaagaagtgtgctgaattactcctgctgggcaaccccagcttccaagtcattctgggagcatgaacagagacagtgtgctctagacag

SEQ ID NO: 43171 - DNA, 543 bp, Homo sapiens
tcaatgaagaaccaggaatgttttcctktatcaacagatgcaaacaacacagacttctctctgttccttttgccctgcttgtaaagaagagtgaatctgaaagtggggcatccagggcactgtgttctggcgctctttaactccctctaaggccgtgatgctcctctttggggcctggcgttgtgcttttaggaagagctgcttctcccaccgtcctccctcctccaggcggtagggtgcaagggagctgcctcttttctaactgctctcttcactgattgtgtagtctctcctcctccatcttgtcctgtttgtaatcaccagctagatggctgtcccttaaatattaacttctaaattgtgctaacatgcaagtattaaggttctcctttcttgctagtacttggctcttagagattttgcttctccacatttcttcaagaatagacatctgaatggggtaacaactgtcacagagtagggtaacactgaacctgcatctgtggatatgcctggctgagcgtggtggctcacacctgtaat

SEQ ID NO: 43172 - DNA, 651 bp, Homo sapiens
attaagcagttcaaaaatgggcaattaagcagttcaaaaatgttaatctaacgctgtatttttcatgatagggttctggattccaaccctggctctagcttaacttggaacaaatggctcagcttctctctcctggcttctccatctctagaactgcagtgaaccatttgatcacagaataggaaggaaggccctcgatagggaaacagtagcctgacgtggaagtaaaggcgagaggcactggacgtggaactggccctcaggatgcgtgtcagtgcacgacctttacaaggaatggggatcctgtgggtaccagccttccaagaaggtttgtgtctatttcctataactttatcttaaaacttctcctctgtaattttccccaccaccctgactgaactcccacatgacagtttgcctgtcatggatggagtcagaagtacaaccacggccaggtgctacagtgacactactgtgcctgaagctggtcaaggggcaccgatcagccaaaatgccaggctgtaaacaataaagattctcaaagtctacaaccaggggttggaaacagctgcatcagagtggttgcttttgaaagcccccaatgcgaggcactctcagctctgttcctgctgtcaaggctgtgaccartcc

SEQ ID NO: 43173 - DNA, 536 bp, Homo sapiens
gtggtgaaaccccatctctactaaaaatacaaaaaattagctgggcgttgtggagggcggctgtaatcccagctactccggaggctgaggcaggagaacgcttgaacctgggaggcggaggttgcagtgagccgagatcgtgccactgaactccagtctgggcaacagagcaagactccatctcaaaaacaaaaacaaaaaaccaaaagccatgacgcactcagacccaaaattaattaatatgtgtgcagatgttctttggttctgcgcaggcttcatgcccgtcttcctcagcctgctgaccygtggccctgctttgctcggggccatcctcctcaactgcatgtcttttgcaacccggcctggaaaagttgatgtcctgagcttgctgaattaaacccatccctggtatcagggaaggagtgaatgagaatacttctcagtatccacctccatttaaattgttccacacaggtttagtgccctacaaattcccttggcaagaggttttcaatggttagaatcttttagtggaa

SEQ ID NO: 43174 - DNA, 612 bp, Homo sapiens
tgaaagcacagctcagaggttgcaataaatctttccaaccttcttcttatcaagaatactatgggcttatgtagtcatggagttttccttagcttttgtaaataactgccaaaccagagtagatgtaagtttaataaaaatgaagacactagtttttggaaatctcagacttcagtcagttcatttatgaaatttaaaagtgatttttcagaagggagtatatattacacttatgatgaaaaggagtaaataaaaggggaaaggtcatctgtttattcatttgtgcaaatgtgatgtcatttatcaaaataaactttcagctgtaatactagattaaaataaaattaataatcatctatgaaacggtgtttcagcaggctgctggtagcagaaacacccamttctaattggtttcagcaagaagaaaatgcattccttcatgtatggagcagtccagtggtagggaaggctccagatgtcagctcagggccctggctgcagcctctttgggatcctgttgccttaggcccttagcaagcccgccacagggcttccagctccacagccatatgcagccagactagagacaaaaaggtctctctcttgcagtgt

SEQ ID NO: 43175 - DNA, 592 bp, Homo sapiens
cagggaatgaatgagaatggaaaaagaaagattccaaaaagaatgcagactgaaatttaaggtggaagggaacgtgatctgtctttgtgcacattactgatattcaatcactattggtccatggagtggaaaatatgaaaggaatgacttgaaatggcatgaattcatcaagaaaggtactgggttcctttgaaaccatgtcctatttttgctctcctaaagcagacagagaaagcagtgtcatcacctttctgatattccaagggaagcttggtaattgccacttggttctgctsgtccttttagtatgtacccaagtggtgcaactcaacatcacattaattttaaaaatatgtgccattctatttatacatttttttgtaggcaagaagaaataacttctgggcttaaattcaatttagtgacattccattgaaaaagaaataatgtcagagatttggaagcttgttttagagaatatactgaaaagtgacaattcacttttaaatttagagtaaaatttctgtatcttttctcttcatgcataaatattagctttatcaacatatttataaatgcatatgatgttacc

SEQ ID NO: 43176 - DNA, 601 bp, Homo sapiens
gtttatcgattgctctatgccaagtactttctttactagcattatcttatttaatcctcataaaacctgtgaggcaggcactattattagtcacattttatagataagggaaatgaaatttagagaagtgatataacttggtcaaagtcacatagtgagtaaagggcagaattaatatttggactctggtcagcttccaaagccttttgtacttacgggggtaagcagaaacttaccgcaggcacagcactgcctcctcaaaktatctagctctgttctgtcacgtgtagggtatgtatataaaatcttctgtaaaaagtcactcaactgctctgagctcagtttcctcatctttaaaatagagataataatacctcctagataggtttatatgtgaaacttttataaaaataaaaccctatatacaaccagttattattaccatgttgaaaaaagatggtttcaattgaagcaagtaaacacagttgccaaataaatcttttaaaaacatcattttcttagtgacttgatccttcttaacactctatggtggctctctgttgtctatcagaaaaggtccagacgcctgagcctggaaaga

SEQ ID NO: 43177 - DNA, 644 bp, Homo sapiens
caattgtttcatatttccaaaacaattggagaagagtagtagagtggttaagaatacggcttgagaatgagcgcatctgaattcagatccaagctttgccactccttgatctgtttctccctctgtaaaataaggatgacagtaatgttagtatctaactcacaaattataatccgtttataggaataccatttacataataaacattaagtgcttatttgttatttcaatttctcaagggcagctactgttgtatcagtctcattttgcatttatatagtgctggacacataaactagctcattgagagtatatctacagatatgtatacatttttttttttttttgaaatggagtctcgctctgtcacccaggctggagtgcagtggtgcgatcttggctcactgcaacctctgcctcctgggttcaagcgattctcctgtctcagcctcctgagtagccggaactacaggtgcacgccagcacgcttggctaatttttttttttttyttctatttttagtggagatgaggtttcaccatattagtcgggctggtctcgagctcctgacgtcaggtgatccaccggcctcggcctgccaaggtgctgggattataggcttttgtattttctgcaggttagca

SEQ ID NO: 43178 - DNA, 1647 bp, Homo sapiens
tgcatacaaaagtaaaatggcaaaatgttaacaactgccaaacacaggtgctgttcactgtattattctctcaatttttctcaatgtataaattttcataattaaaaacaagaaacggctgggcrcagtggctcacacctgtaatcccagcacttcgggaggccgaggtgggtggatcacctgaggtcaggagtttgagaccagcatggccaacatggtgaaactctgtctctattaataatacaaaaaaattagccaagcgtggtggccagcacctgtagtcccagctactagggaggctgaggcgggagaattgcttgaatctgggaggcagaggttgcagtgagcagagattgtgccactgcactccagcctgggcaacagagcgagactctgtctcgataaaaaaaaagaaaagaaatgactgcttctattataatactaatatctttcacttataaagatttcatgtaaatgaaaatattaacacagagcaaagagaattcacagacaaaaccaaatggtcaataaacagaaggaaattatttcgcctatctcacaaatgttaactgagcacttattatgttgcgatcacagctccaggtgctggtgacacaagccgtgaacaagaggttaaaatcgtctctcatgtagtataccttcacgttgggaaagacagaggcaaagcaggacagaagggttggagactgaatgagggggctggttttgttagggtagttaaggaaggcctcttcaagaaggtgacacacaaacaatgacctggatgaagcgagggaggtgatatgtgagaacacctgaagaagggtgtggcaggagaagggaatggtcaagatggttgaagaattgcagctaatggggtaacatgataagcaaaacctaaagtcaaaagaggctttagaaactcctctgtgtgtattaagtccctgcgaatactcttgcacacctgtccagtagacatgcccagccaagagaacatgccagcataaaagtgctgccaggcttgcctatcagtgctaccaagccatttgttttgcacttccaagaagaaatatttattgtatgcagcccttctccctagagaaaatgctcctcatcactggtcctatctgaaatttttttcagggaataatatacgaatcttaagagtataatctttctctgtcttaatgtatgtgtatgtccttacacatataaatatcatcaaggttccacttgcttagggtatgaaccccccattccctaaatttaccactgctcctatgctctcaagccaagagctccttttgaaatgaatggacaaatgacatatgcaaaatattattctgtagcagggagaaaattagactgtatataattaatatttaaagcagataaagatcttcacatacagctgtggaaaataatttcaaaaagcccacaataaactatttcagattttataacaacctggtgaagagtcttaaaaataaacttgaaaggaggactgtaataagggagaaagaaaaaaaaatccccaagatagggctaaacatgatatccggttttagcatgaagaaaatttctttgctaacaaagaatttactatgatgttagactgaattgtttagtgaaaagataaacaatgca

SEQ ID NO: 43179 - DNA, 1647 bp, Homo sapiens
tgcatacaaaagtaaaatggcaaaatgttaacaactgccaaacacaggtgctgttcactgtattattctctcaatttttctcaatgtataaattttcataattaaaaacaagaaacggctgggcgcagtggctcacacctgtaatcccagcacttcgggaggccgaggtgggtggatcacctgaggtcaggagtttgagaccagcatggccaacatggtgaaactctgtctctattaataatacaaaaaaattagccaagcgtggtggccagcacctgtagtcccagctactagggaggctgaggcgggagaattgcttgaatctgggaggcagaggttgcagtgagcagagattgtgccactgcactccagcctgggcaacagagcgagactctgtctcgataaaaaaaaagaaaagaaatgactgcttctattataatactaatatctttcacttataaagatttcatgtaaatgaaaatattaacacagagcaaagagaattcacagacaaaaccaaatggtcaataaacagaaggaaattatttcgcctatctcacaaatgttaactgagcacttattatgttgcgatcacagctccaggtgctggtgacacaagccgtgaacaagaggttaaaatcgtctctcatgtagtataccttcacgttgggaaagacagaggcaaagcaggacagaagggttggagactgaatgagggggctggttttgttagggtagttaaggaaggcctcttcaagaaggtgacacacaaacaatgacctggatgaagcgagggaggtgatatgtgagaacacctgaagaagggtgtggcaggagaagggaatggtcaagatggttgaagaattgcagctaatggggtaacatgataagcaaaacctaaagtcaaaagaggctttagaaactcctctgtgtgtattaagtccctgcgaatactcttgcacacctgtccagtagacatgcccagccaagagaacatgccagcataaaagtgctgccaggcttgcctatcagtgctaccaagccatttgttttgcacttccaagaagaaatatttattgtatgcagcccttctccctagagaaaatgctcctcatcactggtcctatctgaaatttttttcagggaataatatacgaatcttaagagtataatctttctctgtcttaatgtatgtgtatgtccttacacatayaaatatcatcaaggttccacttgcttagggtatgaaccccccattccctaaatttaccactgctcctatgctctcaagccaagagctccttttgaaatgaatggacaaatgacatatgcaaaatattattctgtagcagggagaaaattagactgtatataattaatatttaaagcagataaagatcttcacatacagctgtggaaaataatttcaaaaagcccacaataaactatttcagattttataacaacctggtgaagagtcttaaaaataaacttgaaaggaggactgtaataagggagaaagaaaaaaaaatccccaagatagggctaaacatgatatccggttttagcatgaagaaaatttctttgctaacaaagaatttactatgatgttagactgaattgtttagtgaaaagataaacaatgca

SEQ ID NO: 43180 - DNA, 1324 bp, Homo sapiens
atatcctgcctgtggttcagacctgtgggtaagatttgatctggccactcctttcattacacttagagatgtagcycccaccccatggctatgactggtcttcggcagtgacaaatgctcatcagcatcacgtggatgggcataaactcacctacccactttcaaacattagtcattccccacagcgtggctctttgtagatatgatatcagtatcaaaagctttgctgtatcagatttccgggaatatatttaccaggaaccctggaggaaaaagagattaaattaggcaatgttcatgctatttttttttcctagaaagcccttcctttcccttttatgctctgttcaatggatattttctttgctccctagagagacactgaaaaggaaggttagtgggaaccgttgcgccagccctgttactggtccaggttcaaagagggatgctcacttctgcgctgtctgcagcgattacgcatcgggatatcactatggagtctggtcgtgtgaaggatgtaaggccttttttaaaagaagcattcaaggtacaagagaattgttaactgcttctttagtttcctacttttgatttcaaacaattttgcagagatgacttggcagaaatgtcactactggcctgtttggcacacaaagtatttgatgagcagttcagaggatcatgtgtgtttggaagtgggttgggtggtggggtggaattgcagatttctaccccagaaccccaagattatacagccaactcgaatgggtcttacccctcgttcacccacatgggtgttggatagaagacatcgagttacaaccttgtgaagatgtctcttggaaaaaatgtgctcacaaggagttgcaaagattgtttctttcttttacttaaatttaatatatagcatgcttaacagtcatgatggtgggctggctcctgaggaagaaagaataaacacattttttggaaatggtcagaaatcaggaattcagctacagtggactttgagaattgatctagacacatttcttcccctaggctaggagggtctcagttcacaatccccttgttttctgggctgtgtttagattatttccctaactttctctaaacgccttctggatttttttttttaaatcaacttgttgatgaaaagaatcaaactctgtaaaatatttgaagagatttattctgagccaaatatgagtgacaaatggcctgtgacatagccctcaggagatctgagaacatgtgcccaaggtggtcaggccacaacttggtcttatacattttagggagacataaggcattaatcaatgca

SEQ ID NO: 43181 - DNA, 1324 bp, Homo sapiens
atatcctgcctgtggttcagacctgtgggtaagatttgatctggccactcctttcattacacttagagatgtagctcccaccccatggctatgactggtcttcggcagtgacaaatgctcatcagcatcacgtggatgggcataaactcacctacccactttcaaacattagtcattccccacagcgtggctctttgtagatatgatatcagtatcaaaagctttgctgtatcagatttccgggaatatatttaccaggaaccctggaggaaaaagagattaaattaggcaatgttcatgctatttttttttcctagaaagcccttcctttcccttttatgctctgttcaatggatattttctttgctccctagagagacactgaaaaggaaggttagtgggaaccgttgcgccagccctgttactggtccaggttcaaagagggatgctcacttctgcgctgtctgcagcgattacgcwtcgggatatcactatggagtctggtcgtgtgaaggatgtaaggccttttttaaaagaagcattcaaggtacaagagaattgttaactgcttctttagtttcctacttttgatttcaaacaattttgcagagatgacttggcagaaatgtcactactggcctgtttggcacacaaagtatttgatgagcagttcagaggatcatgtgtgtttggaagtgggttgggtggtggggtggaattgcagatttctaccccagaaccccaagattatacagccaactcgaatgggtcttacccctcgttcacccacatgggtgttggatagaagacatcgagttacaaccttgtgaagatgtctcttggaaaaaatgtgctcacaaggagttgcaaagattgtttctttcttttacttaaatttaatatatagcatgcttaacagtcatgatggtgggctggctcctgaggaagaaagaataaacacattttttggaaatggtcagaaatcaggaattcagctacagtggactttgagaattgatctagacacatttcttcccctaggctaggagggtctcagttcacaatccccttgttttctgggctgtgtttagattatttccctaactttctctaaacgccttctggatttttttttttaaatcaacttgttgatgaaaagaatcaaactctgtaaaatatttgaagagatttattctgagccaaatatgagtgacaaatggcctgtgacatagccctcaggagatctgagaacatgtgcccaaggtggtcaggccacaacttggtcttatacattttagggagacataaggcattaatcaatgca

SEQ ID NO: 43182 - DNA, 1324 bp, Homo sapiens
atatcctgcctgtggttcagacctgtgggtaagatttgatctggccactcctttcattacacttagagatgtagctcccaccccatggctatgactggtcttcggcagtgacaaatgctcatcagcatcacgtggatgggcataaactcacctacccactttcaaacattagtcattccccacagcgtggctctttgtagatatgatatcagtatcaaaagctttgctgtatcagatttccgggaatatatttaccaggaaccctggaggaaaaagagattaaattaggcaatgttcatgctatttttttttcctagaaagcccttcctttcccttttatgctctgttcaatggatattttctttgctccctagagagacactgaaaaggaaggttagtgggaaccgttgcgccagccctgttactggtccaggttcaaagagggatgctcacttctgcgctgtctgcagcgattacgcatcgggatatcactatggagtctggtcgtgtgaaggatgtaaggccttttttaaaagaagcattcaaggtacaagagaattgttaactgcttctttagtttcctacttttgatttcaaacaattttgcagagatgacttggcagaaatgtcactactggcctgtttggcacacaaagtatttgatgagcagttcagaggatcatgtgtgtttggaagtgggttgggtggtggggtggaattgcagatttctaccccagaaccccaagattatacagccaactcgaatgggtcttacccctcgttcacccacatgggtgttggatagaagacatcgagttacaaccttgtgaagatgtctcttggaaaaaatgtgctcacaaggagttgcaaagattgtttctttcttttacttaaatttaatatatagcatgcttaacagtcatgatggtgggctggctcctgaggaagaaagaataaacacattttttggaaatggtcagaaatcaggaattcagctacagtggactttgagaattgatctagacacatttcttcccctaggctaggagggtctcagttcacaatcyccttgttttctgggctgtgtttagattatttccctaactttctctaaacgccttctggatttttttttttaaatcaacttgttgatgaaaagaatcaaactctgtaaaatatttgaagagatttattctgagccaaatatgagtgacaaatggcctgtgacatagccctcaggagatctgagaacatgtgcccaaggtggtcaggccacaacttggtcttatacattttagggagacataaggcattaatcaatgca

SEQ ID NO: 43183 - DNA, 1324 bp, Homo sapiens
atatcctgcctgtggttcagacctgtgggtaagatttgatctggccactcctttcattacacttagagatgtagctcccaccccatggctatgactggtcttcggcagtgacaaatgctcatcagcatcacgtggatgggcataaactcacctacccactttcaaacattagtcattccccacagcgtggctctttgtagatatgatatcagtatcaaaagctttgctgtatcagatttccgggaatatatttaccaggaaccctggaggaaaaagagattaaattaggcaatgttcatgctatttttttttcctagaaagcccttcctttcccttttatgctctgttcaatggatattttctttgctccctagagagacactgaaaaggaaggttagtgggaaccgttgcgccagccctgttactggtccaggttcaaagagggatgctcacttctgcgctgtctgcagcgattacgcatcgggatatcactatggagtctggtcgtgtgaaggatgtaaggccttttttaaaagaagcattcaaggtacaagagaattgttaactgcttctttagtttcctacttttgatttcaaacaattttgcagagatgacttggcagaaatgtcactactggcctgtttggcacacaaagtatttgatgagcagttcagaggatcatgtgtgtttggaagtgggttgggtggtggggtggaattgcagatttctaccccagaaccccaagattatacagccaactcgaatgggtcttacccctcgttcacccacatgggtgttggatagaagacatcgagttacaaccttgtgaagatgtctcttggaaaaaatgtgctcacaaggagttgcaaagattgtttctttcttttacttaaatttaatatatagcatgcttaacagtcatgatggtgggctggctcctgaggaagaaagaataaacacattttttggaaatggtcagaaatcaggaattcagctacagtggactttgagaattgatctagacacatttcttcccctaggctaggagggtctcagttcacaatccccttgttttctgggctgtgtttagattatttccctaactttctctaaacgccttctggatttttttttttaaatcaacttgttgatgaaaagaatcaaactctgtaaaatatttgaagagatttattctgagccaaatatgagtgacaaatggcytgtgacatagccctcaggagatctgagaacatgtgcccaaggtggtcaggccacaacttggtcttatacattttagggagacataaggcattaatcaatgca

SEQ ID NO: 43184 - DNA, 888 bp, Homo sapiens
tgatcatatcatatgatgcttattctgtcaaaggccagagggactgtggttaagctgggatgtgagtcatgttctctccctgaccttgctgccagctgcacacagatttgtccctctcgatttgtattcacagagcctgccaataatttggggtatgtgtgtatgagcgtgtgatcattttcatgcaggactgtgggagatacaaatctcgctgcttctggagctgctcttccttaaacctgttgtcccatggggccagcgtgggtgctggagaaaggccgtgtttgcaggaatggggttctctcctgtgggtgtgggtgacagccacagtgtttccctggggcaatgtggatgcagtttccatcttgtacaacctcataagtagcagccacaattgccmcatcagtcaccacaagtagtcagggatactttgggctgtggatgtgtgcagtgtgctgttttatggatggatgagtagctatgcaccccagtgtgtcagctctggggccacactgtatagccttgatgagtacgccccttgaacaagacccagtttgtgaactctccttaaagagaaatatttagggataattatttatagcaagaaagaattcttttacacttgagagctcttttaaaaatattttcttattggaaaatttatatggtgggcagggtgaaaaagaaacagtaaaaatattagttcttattccaagtggaacataaataggacatgaagaagggcacctctgaaatgacaactttaactcaccttttaaaagatgtgaaatttccagttttggatacacggtgaatatgtaaaatgagtaacagcatactatggaagccagcaattaaataatcatgtttcattattgcagtaacgtt

SEQ ID NO: 43185 - DNA, 517 bp, Homo sapiens
tgaattattaatactccttggtattccacatctgcataaaatgtttgcatgtcaaaatcaccagaaaatctggccagcattcagcagctggctacaaaattgagggcaatattccagataaaaagcaacagtttctcttagtttcatttttggaaactggaatgagtaggctctcaataatcctaatgctataaagcttaatttaagatacaaacataaactttgccaccaagtgaaagaaaatcctgttttcatccagaggggaaaagcctgtccccaaacaaactggatgctgccccagagacatatgacgttgtcatcgctctgcaggacagtgcagccctctggaggccggargagaaggtgttggtttgcatttaatttagttaatttatgcacagtgacgagggaatttaagctatgccccccagaatccaccgggcattaagggcagagaagagattcatgaccactcggaggcagcctaggtgtgccaatcacctagggacccagagtg

SEQ ID NO: 43186 - DNA, 395 bp, Homo sapiens
tcaaactcctggcctcacacaatcttcccccttcagcctcccaaactgttgggattacaggcgtgagccagcatgccccgccttgcatgatgcctayggtttacattgattgtcgattgattgattgagacagggtcttgctctgtcagccaggctggagtgtagtggtgtgaacatgactcacctcagccttaacctcctgggttcaagcgatcttcctcaagcgatcttccaccccagactcccaagtagctgggactacagccatgtgtcacaatactcagctaatttttaaaatttttatagacagggtcttgccttgttgcccaggctggtctccaactcttggccttggcctcaggcaattcttcaccttagcctcccaaagtgctggg

SEQ ID NO: 43187 - DNA, 1500 bp, Homo sapiens
tttctccgacagcagctgaccagctctttaattaggtcctggcccaggtggccaaagtgggttttctcttggtaactccagggaagctgctctgaggagctctcctgggaagacaagaaaggcatgggtgactacaagggagcggggggtccttagtgttcacacagccagctctcctctgcaaaatgaggaaaccaaggcagagggtgtaggaagccaacctatatccaggcccaccatgggccaggcatttcctccttatctccaaaacaagcctgtgagaactatcaccctcccacgacagcagaggcacagggaagagggacttccctgtggcacacaatgaggcgggggcagcagcaggaccagaactcaagtcccaccatttctcactgccttccagcagccacacctgtcactgtgggacggatgttttctcccctgactgtgggtttcccagaatctttccaaggttagctatcatcatcaccctcggagcataacttttgctcatttcttttaaggtttcaatgaacatattcatttagcagatatttaccaagtgcttattctgtgccaggcaccgagctagccactggggatatggcagctgctcagaagagacaagggtcctggctgcatacagcacagatcccaggtcacaatgccttcactgagaaaggctaagctcgcattccaaggctggacggtgaccccacggacccaggatccttctctctgcccttctagccttagctgcagctttcctcctcagggtcacaaaatgaaggctccactcccaggtgacttgaaggaatttcttctatttttttaaatgaacattttattggagtacaacatatgtgtagaaaagtatacaaatcattaagtatacagttagccctctgtatccatgggttccacatttgtggattcaaccaactgtggattgaaaatattttttaaaaaacattaaaaaataacaatatagcaatagaaacacacaaaaaatacagtataagagctatttactcaacatttacattgtattaggtattataatttagagataatttaagtcacatgggaggatgtgcatagattacatgcaaataccacaccattttatatcaaggactcgagcatcctcagattttgctatctgcagggggtcctggagtcaatccyccatgaataccaagggacaactatatatagtctgaagaatttaaatgaaaaaaccatcttacaagcccacaaaaaaacaaaatccagaacagagccatcactctgcagatcctatgaaggcaagttgctagttcctggggctaggcacaaagacaggattggtggggagtggagctccactgccactttcctgctgagtgactgtgacctctcaggatcatgattgtgaggagagtatccactatggaaagccactgtccagagagccgtggtgctggtgtaagccctgggagaggccctgtgaggagaggc

SEQ ID NO: 43188 - DNA, 553 bp, Homo sapiens
catgttggtggtcccagctgcttgggaggctgaggcaggaggattacttgagcctgggaggtcaaggctacagtgacccatggtggaaccactgcactccagcctgggcaacagagaaagaccctgtctcaaaatttaaaaaaaaaaatttaaacaaggaaatcatactttccaagscttaatgaaataatggatccagacaacattatcaaaccctgttctaatcactgagtaaaaagttgatgaaaggtaaaacatgatttggttatacaggcattccctgtaaaattctttcaactttgctaaatgtttgaatttttttttactggtcaaataagccaggcaaataaaaatttttataattaaaaatatatagccaggtgtcctcagcactttgggaggctgaggcaggaggatcacttgaacccagtatttcaagaccagcctaggcatagcaagaccccaacctctaaaaaaaaagaaaaaaagaaaaaaaaaattcacttcagctgactatttgacagtgaaaaaaaaaaaactgaaaaagttaatt

SEQ ID NO: 43189 - DNA, 620 bp, Homo sapiens
gtaattctatgaaatcagtaccattattactagcatttaatatataaagaaactgagacacagagaaattaacttttcttagtcacatagtaaatggaagaattgggattctctcacttgctattctagaaatgcctttcagttgtgtgtgtgtgtgtgtgtgtgtgtgtgtgtgtgataatatcctatacagtattttataaggcactcttttcatttattttttattgtggcaaaacacataactttatcatcttaaccatttctaagtgtacagttcagtagtgttaagtgtagttacattgctgtgcaagagatctctagaactttttmatcttgcaacactgaatttctgtgtccaacttttcacttaattttttttttttttttgacacagagtctcgctctgttgcccaggctggagtgcaatggcgcaatctcggctcactgcaacctccacctcccgggttcaagcgattctcctgactcagcctcctgagtagctgggattacaggcacgcgccaccatgcccaactaatttttgtatttttagtagagacggggtttcatcatgttgaccaggctggttttaaactgctgacctcaggtgatccacccg

SEQ ID NO: 43190 - DNA, 1810 bp, Homo sapiens
gctgttggaaagatgtcctgctgtagctccattcctgttgaatgtgctgttccctctgcctaggatcccctggccccatagtctatcagtgaatccccattctgcytctagaagccactttggcatcacctcctatgaaaacttgtctttatatgttcgtctcccaatccctgccaagcctgagtaagatgtttctccctctgtgctcccccagcatcttgatcttacgtctgtcatagcacttactatattatatttatgtactacaacaataaacagtcatggcccaataaaatgctgattgcatttaaaagaggcagttccacttaaaagaggccccagagatggatgacttagtgaaaaactgaaggcctctgaaggaagcctagaaaaaataaaaaccacaggggaaagtttctgctaaatatgactcattttagatatgattcaatctgccctcagcattcttcccttagccacgatcttgataccttccctgtggtcttccaactacattctctggtggcaaatactgtctacattgacctaatggatcgacaggcctacttcttgcactgtctccctttcagaagaggaacatcttctgatactgtgcaacaattaatacaaaataaaacaaataatttgtatttatggaatggggaaaaaagaagagggcttccaatgctagaatataaatctcgtgaggttagggatgacatattaatcaggtgtgtatcctcacactggggcacaatgcctggtatacaacatatgctcagtgaattcattctaagtacgtggatgactacagtacattctaagtacattctaagtactagctgttctcccaagggctgaaaacctgtctgtaagtggtatcctatagaccactgcaaacatcccagatgactagcacaagttcaagtcaccttcaattcctgaacatcaactagattcccccaactatactgtacccagttgaatagaccttgcctaagttttgctatgtcttttagaaaccgggggtccaactgcctggatatatctttggaatacatttctacagccaggccagttcttccagctcatgaagtaatgcaaagttctaagcatatggcactagacacacaatattaacagcagcatctttctttgaataatttctgcaagatcttattgtgaatgcattatttaaaaactaagaactagacataactgagctctgtttcagagcaactgtaccaggggctaacattagaattcacagacacacaacgaagtgcagcctgatacacagcatgagtctagcgtatcattgaaatctagactgcattgcctcaaataagtattacctaaaggcttctctaggaagttcaggctggcacaaggtgaataccacaaatcagacctgattctagcatcatttatccttggtttggctcagaggacctgctgaagctgagaccacagaaggtcttctgctctgttcttactgccttattagtaaacacgggcactgtatctttatgaactgcaaataactataccataaagagtaataacttttgatatctaaggacattcatgttttaggtgataaaaccacctttatgcattgaatatttatcataggcctattttatgccaggatggtcaaccacattgacacatttaaggggtggcaatgtcctctattgaataccaacttagtgtaccattaactagattatgcttacctttctgcaatttttcaacattttttcatgaagataagccacttaagtttttgtgtttttttttttttttt

SEQ ID NO: 43191 - DNA, 1810 bp, Homo sapiens
gctgttggaaagatgtcctgctgtagctccattcctgttgaatgtgctgttccctctgcctaggatcccctggccccatagtctatcagtgaatccccattctgcctctagaagccactttggcatcacctcctatgaaaacttgtctttatatgttcgtctcccaatccctgccaagcctgagtaagatgtttctccctctgtgctcccccagcatcttgatcttacgtctgtcatagcacttactatattatatttatgtactacaacaataaacagtcatggcccaataaaatgctgattgcatttaaaagaggcagttccacttaaaagaggccccagagatggatgacttagtgaaaaactgaaggcctctgaaggaagcctagaaaaaataaaaaccacaggggaaagtttctgctaaatatgactcattttagatatgattcaatctgccctcagcattcttcccttagccacgatcttgataccttccctgtggtcttccaactacattctctggtggcaaatactgtctacattgacctaatggatcgacaggcctacttcttgcactgtctccctttcagaagaggaacatcttctgatactgtgcaacaattaatacaaaataaaacaaataatttgtatttatggaatggggaaaaaagaagagggcttccaatgctagaatataaatctcgtgaggttagggatgacatattaatcaggtgtgtatcctcacactggggcacaatgcctggtatacaacatatgctcagtgaattcattctaagtacgtggatgactacagtacattctaagtacattctaagtactagctgttctcccaagggctgaaaacctgtctgtaagtggtatcctatagaccactgcaaacatcccagatgactagcacaagttcaagtcaccttcaattcctgaacatcaactagattcccccaactatactgtacccagttgaatagaccttgcctaagttttgctatgtcttttagaaaccgggggtccaactgcctggatatatctttggaatacatttctacagccaggccagttcttccagctcatgaagtaatgcaaagttctaagcatatggcactagacacacaatattaacagcagcatctttctttgaataatttctgcaagatcttattgtgaatgcattatttaaaaactaagaactagacataactgagctctgtttcagagcaactgtaccaggggctaacattagaattcacagacacacaacgaagtgcagcctgatacacagcatgagtctagcgtatcattgaaatctagactgcattgcctcaaataagtattacctaaaggcttctctaggaagttcaggctggcacaaggtgaataccacaaatcagacctgattctagcatcatttatccttggtttggctcagaggacctgctgaagctgagaccacagaaggtcttctgctctgttcttactgccttattagtaaacacgggcactgtatctttatgaactgcaaataactataccataaagagtaataacttttgatatctaaggacattcatgttttaggtgataaaaccacctttatgcattgaatatttatcataggcctattttatgccaggatggtcaaccacattgacacatttaaggggtggcaatgycctctattgaataccaacttagtgtaccattaactagattatgcttacctttctgcaatttttcaacattttttcatgaagataagccacttaagtttttgtgtttttttttttttttt

SEQ ID NO: 43192 - DNA, 1020 bp, Homo sapiens
ggttttggaagagatcacaaggccatgtttggaaacgctgagtttgatatttctacyagcaagacattgaggagatggtgggatatttgagtctgaaatccatggagaatgtgtgggctagaggcataaatttgaaggaactaataaacttgagcacattactctcttgattttatctcctcaacagtaaattgaggtgggtgggagaggatattaggcaagatattcgaataaatgattatctgcaattatttcctgtgctaacatcaggcatttatctgaaagacaattcagcatcccacattgctcacctctggcattctgcctttgctggcctctccgcttgtgattccatttttcaggcttctgtgagacatcactcaaatgagagcccagatgtgacagcagagccagctggtggcaatggatggtgacacagctcttagatacactgggctactggctgtaaagagggcaaagcaggcaaaggaagatacaactgctttatcacgaaacggcagacccagagatagcaacggctgcagagggcaggtatgaggctgccctctttgcaaaagaagccagtgctgtccaccaggcagtgccacaaatggcattgttctttccaacactgagcaggaggctctttgcaggattactttagaagcaggataaatatatgccttgctttgcccaggacagtctgaattggcatcatttattccagtgtaattgttaacagcagcttctttcactttcaaaattatcccagttcgaatgataaattacatgatcgctcatcttataagcttgcctcttcacatctttttcccagaaaagccctagcgtggtctttccctcacgacccagaactttctgacttttgatcagttatgaattgactcaatgtccatgggccaaccctggaaacatagcaaaagctccaaattttcttcttgctgcttccaattcccaacccactgaaaagcgagggacccaggctttgcttcaatggagcga

SEQ ID NO: 43193 - DNA, 1020 bp, Homo sapiens
ggttttggaagagatcacaaggccatgtttggaaacgctgagtttgatatttctactagcaagacattgaggagatggtgggatatttgagtctgaaatccatggagaatgtgtgggctagaggcataaatttgaaggaactaataaacttgagcacattactctcttgattttatctcctcaacagtaaattgaggtgggtgggagaggatattaggcaagatattcgaataaatgattatctgcaattatttcctgtgctaacatcaggcatttatctgaaagacaattcagcatcccacattgctcacctctggcattctgcctttgctggcctctccgcttgtgattccatttttcaggcttctgtgagacatcactcaaatgagagcccagatgtgacagcagagccagctggtggcaatggatggtgacacagctcttagatacactgggctactggctgtaaagagggcaaagcaggcaaaggaagatacaactgctttatcacgaaacggcagacccagagatagcaacggctgcagagggcaggyatgaggctgccctctttgcaaaagaagccagtgctgtccaccaggcagtgccacaaatggcattgttctttccaacactgagcaggaggctctttgcaggattactttagaagcaggataaatatatgccttgctttgcccaggacagtctgaattggcatcatttattccagtgtaattgttaacagcagcttctttcactttcaaaattatcccagttcgaatgataaattacatgatcgctcatcttataagcttgcctcttcacatctttttcccagaaaagccctagcgtggtctttccctcacgacccagaactttctgacttttgatcagttatgaattgactcaatgtccatgggccaaccctggaaacatagcaaaagctccaaattttcttcttgctgcttccaattcccaacccactgaaaagcgagggacccaggctttgcttcaatggagcga

SEQ ID NO: 43194 - DNA, 1020 bp, Homo sapiens
ggttttggaagagatcacaaggccatgtttggaaacgctgagtttgatatttctactagcaagacattgaggagatggtgggatatttgagtctgaaatccatggagaatgtgtgggctagaggcataaatttgaaggaactaataaacttgagcacattactctcttgattttatctcctcaacagtaaattgaggtgggtgggagaggatattaggcaagatattcgaataaatgattatctgcaattatttcctgtgctaacatcaggcatttatctgaaagacaattcagcatcccacattgctcacctctggcattctgcctttgctggcctctccgcttgtgattccatttttcaggcttctgtgagacatcactcaaatgagagcccagatgtgacagcagagccagctggtggcaatggatggtgacacagctcttagatacactgggctactggctgtaaagagggcaaagcaggcaaaggaagatacaactgctttatcacgaaacggcagacccagagatagcaacggctgcagagggcaggtatgaggctgccctctttgcaaaagaagccagtgctgtccaccaggcagtgccacaaatggcattgttctttccaacactgagcaggaggctctttgcaggattactttagaagcaggataaatatatgccttgctttgcccaggacagtctgaattggcatcatttattccagtgtaattgttaacagcagcttctttcactttcaaaattatcccagttcgaatgataaattacatgatcgctcatcttataagcttgcctcttcacatctttttcccagaaaagccctagcgtggtctttccctcacgacccagaactttctgacttttgatcagttatgaattgactcaatgtccatgggccaaccctggaaacrtagcaaaagctccaaattttcttcttgctgcttccaattcccaacccactgaaaagcgagggacccaggctttgcttcaatggagcga

SEQ ID NO: 43195 - DNA, 511 bp, Homo sapiens
ttttttctaccaccagtcagagcatcttgagtacggctattcttttcccccatttttagctgtatttctatctgacgcttctcccaggggcccaagagctaattaagagcttcagtttcaaagacctttccttctcacccctgttgtgccacagcatctatgtgaactgtaaagggcagcaaaatgagaaaatattaaaagggtatttaattaagcaaagtaaacagtgaggtcaatagcaactggaagctaacatctgtcttcgaacaaggcaggcaagccaccttcaggtacaggcaacagaggagtgagtttatgcaggatgctccttttgtctacgccacttgtgatatctacttctgcttcagaggcgatgagacatttaataaaagaaaacaaatagtgatgccwtgctttatctaggtggagaggagaaacaaccctccagctgtttagcactgtgatgttcaggcttcattttgcttttaaaattaacccaggaaaatgaaaa

SEQ ID NO: 43196 - DNA, 623 bp, Homo sapiens
ggggtggggctgggagagccacttgggcctattctgctccccatcccacactctagattgacacagagccggtgaaagggaacaaagttggtctggggaaaggaaagctggagtgatgccccctctacctcccctggaggaggagactttctcgcctggcacagattgtagaaaaaaaggrgagatggcagggaagaggagggggctgtacctttttctttcctaaaagcttaggcttgctttctctccaagatacctgcctgtctcccttacccttattcatgccatgaaagaagcttcttgttgtgtcagatggtgtgcacaaccccctaggtcccatctctgcctggtcttcctagatgcaggaatctaggttgattaggcatcaaccctaagcccctgcctgtgaacttgagcctgcagtggtagagcagtctcagggagatgttacatcctggagatattgaggtctgtctgcttggtgctggagcttagaatcaaggttaggagccctaagggaaatgaaggaagcagtaggggcttttctggaggtggaaacctggctggacaaaatccagcgcagaaaacagctgccctgagagtgaggatgggatagcgagtcc

SEQ ID NO: 43197 - DNA, 572 bp, Homo sapiens
cagctgcctggccccagtccttccaccagcaagggcatgtgtagaagccagaggatgagaataaagagatgccaagtaaggaaaggaaggcagttgaatacggcaaatttcttttctcagcttatttccttttcttctcagacatccagaaagtaacattttccaacatcaggcttctctccacatggttaaaaataggagaattaaaaacaaaatgacaaatgagataaatttattgtgaggtagtgtgtccttctgatgatgttcacagagccctggactctgtgctacgagatgtgtgccaatctgcccccactaccagcgggtcccatgatcatctgtaggaagatgaattmtctgagactgtttccttgcctctgtaaaataagaaggtaggaataatcgcccccatggtactagcgttgaagttctgtgtatccagaaacaatattcgtaaaaacagacacacagcattcactcatgccttatattcagtgtttgggggcccttaggtccaaagattcattattttcatggcattgtttgatttttttctttgaggtaagaataaa

SEQ ID NO: 43198 - DNA, 694 bp, Homo sapiens
tatataaacatctataaatattttaatgtatctatatgaagctgtatctatatgtatctgtatctatatgtatctgtatctatatgaagctaacatgaatttataccgatgtctctaatcctatcaccacatcaattactctagcctcctctccttgcatgtctgtagcctctcatttcaacagtgagaaatctggcttttactatttgcaattcatttatttaattgttcaattccaggagttgtgtgtatgtgtgtaacctgcacacttttgcgaactagatagtatcacagtagtctatattgcctttagtcctagactccactcaatttcagtcacttaggtcatcaccttttcccacacctccgtcagtgaggctgtttcatattttttgtaatgcagttaaatgttttgtcacattctacatttcatcctagaactctcctgacctcctaaacaattttttaatttgcataaattaagattcatgctatgtgctgtagaattccatgatatttgacaaatgcatatwgtcatgtatccaacattacaccatcacgcgtaatagtttcaccactacaaaatttgtctgtgcttcaccaattcatcactgcccccactaccaccaaactctggaaaccaatgattgctttactatttatagtttgccttttccagaatgtcaaaaaatta

SEQ ID NO: 43199 - DNA, 1196 bp, Homo sapiens
agtttaagaatctaaattaccaagtttctgtggtctttcttttttagaaacttctattgaacatttaaagaaacttcttaatctagcactcatacttttacattgaacttttatttatttaacatttacttacctctgtcttgcatcttaatttctcaggatcatctcattcccatttggaatattttgattgttcttgttggtaatagactggttggttttattttgtttctgccttttttgcaagaattaatttttacctctattatccctctgtttatctctttgaagaaaccaacatactcatattaaagtgtattatacacatattttatttgaaattcacacatattctgctttgttaatgtacgtccttcttaacattaggtrtatgtacatattatgcccagttggatttatttgtgtgaaattatattttgatcatttttccattacttgctttctccttctataccttcatcctgtccagctttattatttcttttttcagttagctgttccctgtggccttctgtccaaaatataggtctttaatcttggtttgggctgatctgtgtgcttactttggggatgtagggaatttattcttcaaaacagtaggtggtttgactcaatccctggtcaagggtttgtgatttttctcttcccaccagcctagactataggttcataaaagcttgagtttggagcaaaggtcagtgttagcattctgaagctttctttttgaagcgtgggaggagaatatgaactacacatttgacctctagtttccatccatgagcttgactccagtcatttttgaattgaattttgaatgaaagtttgttttttttctccttgtttccctcaggttaccttgcatgaacagaacttctggcaactcctacccgattctagaccaagagaataagctctggtgttagccctgttccctgctctctattttagttttgatctttactctcaaagatctaattttgtacagctgacttttgcatttttattgtacattttgtccagtatttccgtgatttagaatgaaaatggggtgcttgaagttataatgttacaatgaatggaagttgaaactttaattatacaattattaactgaaatattttcattcttcctgcagtttgttccatagagctatagaaaaatatgattgaacaaac

SEQ ID NO: 43200 - DNA, 1196 bp, Homo sapiens
agtttaagaatctaaattaccaagtttctgtggtctttcttttttagaaacttctattgaacatttaaagaaacttcttaatctagcactcatacttttacattgaacttttatttatttaacatttacttacctctgtcttgcatcttaatttctcaggatcatctcattcccatttggaatattttgattgttcttgttggtaatagactggttggttttattttgtttctgccttttttgcaagaattaatttttacctctattatccctctgtttatctctttgaagaaaccaacatactcatattaaagtgtattatacacatattttatttgaaattcacacatattctgctttgttaatgtacgtccttcttaacattaggtatatgtacatattatgcmcagttggatttatttgtgtgaaattatattttgatcatttttccattacttgctttctccttctataccttcatcctgtccagctttattatttcttttttcagttagctgttccctgtggccttctgtccaaaatataggtctttaatcttggtttgggctgatctgtgtgcttactttggggatgtagggaatttattcttcaaaacagtaggtggtttgactcaatccctggtcaagggtttgtgatttttctcttcccaccagcctagactataggttcataaaagcttgagtttggagcaaaggtcagtgttagcattctgaagctttctttttgaagcgtgggaggagaatatgaactacacatttgacctctagtttccatccatgagcttgactccagtcatttttgaattgaattttgaatgaaagtttgttttttttctccttgtttccctcaggttaccttgcatgaacagaacttctggcaactcctacccgattctagaccaagagaataagctctggtgttagccctgttccctgctctctattttagttttgatctttactctcaaagatctaattttgtacagctgacttttgcatttttattgtacattttgtccagtatttccgtgatttagaatgaaaatggggtgcttgaagttataatgttacaatgaatggaagttgaaactttaattatacaattattaactgaaatattttcattcttcctgcagtttgttccatagagctatagaaaaatatgattgaacaaac

SEQ ID NO: 43201 - DNA, 526 bp, Homo sapiens
gtcttactgtctagattcagtccaaatgaattgtgacagtttaccaaaagatagatcaatctaccaatgtataatgaaaaaacttaaagtcttggaaaaattatactaaacagcaaaaaagcaggaataaacttggtagagataatacaaactgtgaaattctgtatcctttatatggctgcaactcaaccttgtcagtgatagttttaagctcgtcagtctgtttggccaaccaaagagaaattcaatcatacaatttaacatgataaggagagcaaaacraccccaaaaactacttaatacaaattgttttgatttttttttttttttgagatggaatctcgctctgttgccccacctggagtgcagtggtatgatctctgatcactgcaagctccacctgctgagttcacgccattctcccacctcagcctcccgaatagctgggactacaggcgcccgccaccacactcggctaattttttgtattttttttagtagagacgaggtttcaccatgttagcca

SEQ ID NO: 43202 - DNA, 526 bp, Homo sapiens
gtcttactgtctagattcagtccaaatgaattgtgacagtttaccaaaagatagatcaatctaccaatgtataatgaaaaaacttaaagtcttggaaaaattatactaaacagcaaaaaagcaggaataaacttggtagagataatacaaactgtgaaattctgtatcctttatatggctgcaactcaaccttgtcagtgatagttttaagctcgtcagtctgtttggccaaccaaagagaaattcaatcatacaatttaacatgataaggagagcaaaacgaccccaaaaactacttaatacaaattgttttgatttttttttttttttgagatggaatctcgctctgttgccccrcctggagtgcagtggtatgatctctgatcactgcaagctccacctgctgagttcacgccattctcccacctcagcctcccgaatagctgggactacaggcgcccgccaccacactcggctaattttttgtattttttttagtagagacgaggtttcaccatgttagcca

SEQ ID NO: 43203 - DNA, 560 bp, Homo sapiens
gtcagaataatgacaaaatttgattaaaatcaaatttgttaataattttaaacatctggtagaaataatatttactactaaacccaagtaaaataaaaatgtatgcttgtatcatatttaatggagagaactcagaaaacaaagcagtttttattaaatcaaaaatattaaactagtcttatttgacaaagatttatctgattcatgtgaaattaaaattttaaaacatttgggcaagattttataatatttttwaaaaatacattgtaagtattaaaaattcaactttaaaaatttttgacaggtttaggaatatttaatttatgtaagcacttatgtgtgtctataatttagcacacgaggtcatcacatatgtggtctccacaatcaaaaagaactctaaatgttaaataaacaaagttcgatcaaacaaaagctcattacaataagagcatgtgtattagtccattttcacactgctaataaagacatacccaagactgagtaatttatacaggaaaaagggtttattgggcttacatttccacatggctggggag

SEQ ID NO: 43204 - DNA, 560 bp, Homo sapiens
gtcagaataatgacaaaatttgattaaaatcaaatttgttaataattttaaacatctggtagaaataatatttactactaaacccaagtaaaataaaaatgtatgcttgtatcatatttaatggagagaactcagaaaacaaagcagtttttattaaatcaaaaatattaaactagtcttatttgacaaagatttatctgattcatgtgaaattaaaattttaaaacatttgggcaagattttataatatttttaaaaaatacattgtaagtattaaaaattcaactttaaaaatttttgacaggtttaggaatatttaatttatgtaagcacttatgtgtgtctataatttagcacacgaggtcatcacatatgtggtctccacaatcaaaaagaactctaaatgttaaataaacaaagttcgatcaaacaaaagctcattacaataagagcatgtgtrttagtccattttcacactgctaataaagacatacccaagactgagtaatttatacaggaaaaagggtttattgggcttacatttccacatggctggggag

SEQ ID NO: 43205 - DNA, 478 bp, Homo sapiens
cactggagtgagctagtggaaagttctagaagactttggtagagagatttgtcctgtgattaggtcatccatctgtgtttgctaattggcacttgttgaaattagacccctaccttccacagagactgggagtaagcagactacatttttagactattatattccaaagaaatgtcccctaggcccatgcaatagacattccttggttgtaaaactagcaagaggctgagagaagatttgtatgtaatttaagggtcagagaaagaatttgaacttacaagttttctaagaaaagggaggtcaggggcctagagttaggaagatactttttaaaatttagctaagctgaggggaatgtcttggtgagttaatgtgggtcatgtacagcctcataattatgtgtcataatgatcactaattgaagsaaataaaattttttaagagaaataaggaaaaaagcattccattttatacatta

SEQ ID NO: 43206 - DNA, 1116 bp, Homo sapiens
atatgcatgagattagtattcttttgaaaaacaatcaaaattagaaagcagaagaaaagaaaataaacaatgatccaagatatattgaaaaaaaaagtctagcattcttgagctgaagaattttgagttggcacaattgtaaaagcttaccaagtactgcagaaaaaaatagcaacatgactaaacatattttgtcaaaaattttgaattttaaagatgagggaaaaattctgttttgccaggtaggaaaaaaatacctatatatgctgaaaatattttgttctgcaaaatcagctttaaaaatttaagtaggcagggcacagtggctcacgcctataatcccagcactttgggaggccaaggcgggttgatcacgaggtcagaagttcgagaccagcctggccaaaatggtgaaacctcgtctctactaaaaatgcaaaaattagccgagcatggtggcaggcgcctctaatcccagctactcaggaggctgagacaggataattgcttgagagaagaagacagaggttgcagtgagccgagattgtaccactgcaactccagcctgggcaacaagagagaaactccatctcaaaaaaagaaaaaaaaattaagtaaagaaaaaatggagaaccacctatgaagcttggagaggaaatgattatacgctgttatttccatactgaaacaattatttatgagacacagcaagaattattaccataaatataccacaaatacaagtattacaagatgaactacctctagaaaaggagacattgtacttccaattgccatatttctttactggaaaaatccaaggaaataaatagagaatttggaaacacaaaagcaatattaataataagtaaatataaaatttttatggtaataaaacatttgaacaaatgaaaaaagatgtgacttatatcacatctgcaacacagaggtttttgttgtggttgttttgttttctaaattaactgagaatttaattaaaatttctaaaccgagagtttttgtaaatattcagaaacagatttaagctttgtatagaaaaataagtgaatgagactgtcagcatttaaaaaataaataataaaatktatattagaa

SEQ ID NO: 43207 - DNA, 744 bp, Homo sapiens
tgaaacaaatggggtattaatttcaccttcagggtgctttctgaattggggaagaaatggacatagagaccagtataacagtaggatgtaggttgtttttaaaaatgactatgcaaactcaagtcataaagattccagctcacagtatcagaagtaatttrggagaggtaagaatgttagagttgatttttaaagatgattaagacacaaaaactgcgttaaattttgtaacctatttgtataacttatcttaatttgtactgcttgacattgtgcaaagaaataaaattgctgggtgagagagcgagactccgtctcaaaaaaaaaaaaaaaaaaaagaaattaaattagtctgcaacatttgaacttaactaggctgtgttaaataatgtaccagaccaagaaatttaagtgatttcttcattggttccagctatgctattaagtgctatgtaaccttaagagagtcacttaacttctctgggccttgctctcctcatctgtaaaatatggcattaaattagatgaactatgagattctaattagttccttactggatgattactgtttatcacctttgacaagtctgaatagccacagaagtttttattaactttcccaaattctccaaagaataaaatttatatagaaaaattaatcccggagtctatttaattcctgattaatgcaattttgttctaaaaaacagtcatgaaatgagaaaacaatattcaaaaatttaa

SEQ ID NO: 43208 - DNA, 599 bp, Homo sapiens
acttgaaatattttgcggggccagaaattgagaaaaaaaataaacaaaatgatggggcatgttaaaaagacagaggagccaactgaaaaagcttccaatgcctccaatcagaacaattggagccaaaatgtaatagtgtagtgtataggtctgtatctttacaaagtaaaaaataaatatttttaagtccatacttatataagtaaacggttgtagaaatcaaacaatgtggaaatcagtgtgtatttttgcagaagaattaaaaaaaaaattatatacatgctctagactcaacgaagtgcagcataacctcccattccctaattgtgggctgcatataatgacytccttccaaagtgcacaatagggaaaagggcaaaacaaactaacagtggaaaaacctaccaaactctagttctactaagtaatgaagctcaatagaaacagtgataagtcatattgatggcttatcaacaataacaatagataaagttctattgtcacattatatcaagggtgaatgtgacaaagtttctgaccaggattcaaaactgtttagaatataaacgacagtgtcacagccaggagaaatctagcaa

SEQ ID NO: 43209 - DNA, 1654 bp, Homo sapiens
agtgtttacttatctaattatctgaaaaataagaaagtttatgtttaagaaatcaaaattccaagaccatacatcttatattgcctagataccacaacacttttacacgacagaatttatgctggagtgaaaaattttccaaatcttaatcttccccacgtttctttgccaagggccatatctgtcagtgtcttgtatttaatgcaatgcacaagatatttttgaaatacagaatacatttgctattcacaacaacaaaggcaaaaggggtgataataccaaatttacaaaaaatttggtccacatagaaaaagaaaatgaactttggaaaagctaacatatatagtttatctacagtctgagaaacaattaatctgccaaaaaagatggctacaagctagcagagatggtaattacctgatctaaaagacacgtgagttaagtaagaaatatgcattcatttactggaaatgcaagaagactctctcataataagagtaagaatcattacaaataattgcttatttttatttttattttgagacagggtctccctctgtcacccaggctggattgcagtggcacgatcgtggttcacgcagcctcgctcttttgggctcaagcagtcctcccaccccaacctcccaagtagctgagaatataagcacataacaccatacctggctaatttttttagcacttttttttttttgtagcaacagggtttcatgttttccaggctggtctcaaactccttggctcaaacaatccacctacctcagtttcccaaatttctgggattacaggcatgagacactgtgcccagctaaaaaaaaaaaaatggttttatactagaaaaataattgaaaagaaataatatattctattgccaaaaatagtcttcttacatgaaatacttttacatctaatgtttgttataatggarcattatattaggcagcatataaggaaaaacatcatggtaaaaactatctgcatgaacagtggtgttttgaattttctgtagaaaagttacactctctaatatatagcattaattgaagggttaaaaggtgtctgtattctttaagtaagtaaagtcttgtatagagatgacagtatatacacaaatctgtgaggtattatatttctatgaaaaagtaaatagccaaaaatgtccctgtgtgacatgaatggagtagctctgagcttcaagtactcaagataaaaatattaccatagagttagaatttgtttaaaataacttggaatacatatatacacacacacacacacacacacacacacacgcacacacgcacacaccatgtatatgtgcatgcgtgtgtgtgtgtatatcatgaaaacaatgctaaggaattcagtgaaaacaatgttcaagaatagagaatttacaaagttaaggaaattgttactaaaagtatatccaagcaaggggagtaaactcaattacaaggaacaaattttgtaaccatgtaaagtgttagagaaatggcagggcattctctatgttttaatataaaatatgatgggaggtgaaggagagaaggagaagagagaggagatatgaaaataaagatcctacagaaatctcccttttgtttctgtgttaatgttaatcgcttagccatgc

SEQ ID NO: 43210 - DNA, 1654 bp, Homo sapiens
agtgtttacttatctaattatctgaaaaataagaaagtttatgtttaagaaatcaaaattccaagaccatacatcttatattgcctagataccacaacacttttacacgacagaatttatgctggagtgaaaaattttccaaatcttaatcttccccacgtttctttgccaagggccatatctgtcagtgtcttgtatttaatgcaatgcacaagatatttttgaaatacagaatacatttgctattcacaacaacaaaggcaaaaggggtgataataccaaatttacaaaaaatttggtccacatagaaaaagaaaatgaactttggaaaagctaacatatatagtttatctacagtctgagaaacaattaatctgccaaaaaagatggctacaagctagcagagatggtaattacctgatctaaaagacacgtgagttaagtaagaaatatgcattcatttactggaaatgcaagaagactctctcataataagagtaagaatcattacaaataattgcttatttttatttttattttgagacagggtctccctctgtcacccaggctggattgcagtggcacgatcgtggttcacgcagcctcgctcttttgggctcaagcagtcctcccaccccaacctcccaagtagctgagaatataagcacataacaccatacctggctaatttttttagcacttttttttttttgtagcaacagggtttcatgttttccaggctggtctcaaactccttggctcaaacaatccacctacctcagtttcccaaatttctgggattacaggcatgagacactgtgcccagctaaaaaaaaaaaaatggttttatactagaaaaataattgaaaagaaataatatattctattgccaaaaatagtcttcttacatgaaatacttttacatctaatgtttgttataatggagcattatattaggcagcatataaggaaaaacatcatggtaaaaactatctgcatgaacagtggtgttttgaattttctgtagaaaagttacactctctaatatatagcattaattgaagggttaaaaggtgtctgtattctttaagtaagtaaagtcttgtatagagatgacagtatatacacaaatctgtgaggtattatatttctatgaaaaagtaaatagccaaaaatgtccctgtgtgacatgaatggagtagctctgagcttcaagtactcaagataaaaatattaccatagagttagaatttgtttaaaataacttggaatacatatatacacacacacacacacacacacacacacacgcacacacgcacacaccatgtatatgtgcatgcgtgtgtgtgtgtatatyatgaaaacaatgctaaggaattcagtgaaaacaatgttcaagaatagagaatttacaaagttaaggaaattgttactaaaagtatatccaagcaaggggagtaaactcaattacaaggaacaaattttgtaaccatgtaaagtgttagagaaatggcagggcattctctatgttttaatataaaatatgatgggaggtgaaggagagaaggagaagagagaggagatatgaaaataaagatcctacagaaatctcccttttgtttctgtgttaatgttaatcgcttagccatgc

SEQ ID NO: 43211 - DNA, 1182 bp, Homo sapiens
tgaaagtagagacaggagattttgttaacatactgaatgtgagataaatatatatatatataatattgaatgtgatatatataattgtatatattgcaaatatattttgaatgggttcaaagaggatgtgaaaattggagtataatatttttaaagaaatttgatgaagaaaattgggcaatagctaaaggagaaagttatatatatattgaatagtcataaatgattccatgtttttttttttttttttttttttgagayggagtctcgctctgtcgcccaggctggagtgcagtggcgcaatctcggctcactgcaagctccgcttcccgggttcacgccattctcctgcctcagcctcccgagtagctgggactacaggcgcccgccaccgcgcccggctaattttttgtatttttagtagagacggggtttcgccttgttaaccaggatggtctcgatctcctgacctcatgatccacccgcctcggcctcccaaagtgctgggattacaggcgtgagccaccgcgcccggccctccatgtttttataatctgtgcagctaggaaggtgagggtgaattgtttactgttatcagaaagactgcaggaagagcagattttctatataatacaggatcttttggacataagtttgagatacaaagaaactgacaggagacatacagtcagaaattctatgtatatatgattatattttatatatatggaatttggaagtttatgggagagttctggcaggaaacacgtatttggaattattctctttacaaatgatattaaagctataaataggatgagattaataaagggttacttgcagattgaaaagttatgatttccaaagactgaatctgggatatttcaacatcaagaagcaaataatcaaagaggaaactttaaaggagacaaagaataagtggtcagtaggataagaggaaagtcttgagagtattgttctgaaatccagtggaaaaaaatatgtaggtacatgtgtatagaaatcactaatacttttgggtttctcagtctccttgtatttccttagttgttttcttaatatttaaatatttatctatctacctatccctccatagatatagatatacctttctgtatatatagtgagagagcaatcattttaaggaatctatttaaatga

SEQ ID NO: 43212 - DNA, 1182 bp, Homo sapiens
tgaaagtagagacaggagattttgttaacatactgaatgtgagataaatatatatatatataatattgaatgtgatatatataattgtatatattgcaaatatattttgaatgggttcaaagaggatgtgaaaattggagtataatatttttaaagaaatttgatgaagaaaattgggcaatagctaaaggagaaagttatatatatattgaatagtcataaatgattccatgtttttttttttttttttttttttgagatggagtctcgctctgtcgcccaggctggagtgcagtggcgcaatctcggctcactgcaagctccgcttcccgggttcacgccattctcctgcctcagcctcccgagtagctgggactacaggcgcccgccaccgcgcccggctaattttttgtatttttagtagagacggggtttcgccttgttaaccaggatggtctcgatctcctgacctcatgatccacccgcctcggcctcccaaagtgctgggattacaggcgtgagccaccgcgcccggccctccatgtttttataatctgtgcagctaggaaggtgagggtgaattgtttactgttatcagaaagactgcaggaagagcagattttctatataatacaggatcttttggacataagtttgagatacaaagaaactgacaggagacatacagtcagaaattctatgtatatatgattatattttatatatatggaatttggaagtttatgggagagttctggcaggaaacacgtatttggaattattctctttacaaatgatattaaagctataaataggatgagattaataaagggttacttgcagattgaaaagttatgatttccaaagactgaatctgggatatttcaacatcaagaagcaaataatcaaagaggaaactttaaaggagacaaagaataagtggtcagtaggataagaggaaagtcttgagagtattgttctgaaatccagtggaaaaaaatatgtaggtacatgtgtatagaaatcactaatactttwgggtttctcagtctccttgtatttccttagttgttttcttaatatttaaatatttatctatctacctatccctccatagatatagatatacctttctgtatatatagtgagagagcaatcattttaaggaatctatttaaatga

SEQ ID NO: 43213 - DNA, 597 bp, Homo sapiens
gctactcacacatgcagcaattaccatgtggcattagctgaccttgccgggcacagtgttattattgtcattattttttcttttttgagacagagtcttgctctgtcgcccaggctggagtgcagtggcrcgatctcggctcactgcaagctctgcctcccgggttcacgccattcttctgcctcagcctcccgagtagccggggctacaggtgccggccaccacaccacactaattttttgtatttttagtagagacggggtttcaccgtgtttgccaggatggtctccatctcctgacctcgtgatctgccctcctcggcctcccaaagtgctgggattacaggcgtgagccaccgcgccctgcccgggcgcagtgttatttggggctgttgacctgaagtaggtctgactgagatgctttgagttacaagcactggaagcaaattctgacgtaagcaggaaagatggttccatttactcatttataaaacagactggggtccatgcttgatagagagagggggagaaacttgcaggccagtgagaaaactgggaaagggtggtgctcccacagttaacaacaagcacatgggtg

SEQ ID NO: 43214 - DNA, 601 bp, Homo sapiens
tatatctataactattgctttatgtaaccatctgtaacctatattaagctaattatgatgtctcctctgagggattttaaaatgtagaatattgcttaaaaattagatctatttcttagaaagaacattctaagaggattctaatctagactattagaggaagaaacttgaaccacagatatctgtataaatgtgtttcagaaggtcaaggcctgattaagctagtggyagagtatatcctaagaccttgaatagccaacagatggaattaagcagttttaaaaaataaggcttattgtcattgttaagaatttgcttccactaaactttgtattttttaccccttagaagtcacagatgtgaattcaccacttttttaaatttttcaaatattttatttggctttttataaaatagaatattttttagagcagctttagcttcacagcaaaattgagtggaaggtacgaagattttccatataccccctaccctcacacatgcacacccaactttgtggcttgctgggttagataacacccagttcatgatgagcagctcaggtctcatggtaacttggtggcccatggctaagtgttca

SEQ ID NO: 43215 - DNA, 514 bp, Homo sapiens
tataattgagtactgtacctggcatgtgctagtacccccaaaattgtagtgaagaaggttggagctgggggtcacagagactggtgcagctcagcacctttaattggaggcttgaaaaaacttgagtaaaaagtttgaaataactgaaaattattaggaaagagaacatgtcacatacagggaattctgtttaacaattaatattttatctgagmctattgtgcactgtaatttttatgaacttactattttgttttatacgttggccgctccctctcattcacctaagctagaaaggtttgcttggctaaatgcacaacatggtcacgctgttactcaaaaataatctgtaggaagaggtgagtgtaaggtgctataagctatagcagtgggcaagtgggacgttgcccacattcccaggatagctgtctttaaggtggactggtggatttcattcagcctcagtctgataactttgatgtatggtgcaggtctctcacaaaaccagtgacat

SEQ ID NO: 43216 - DNA, 514 bp, Homo sapiens
tataattgagtactgtacctggcatgtgctagtacccccaaaattgtagtgaagaaggttggagctgggggtcacagagactggtgcagctcagcacctttaattggaggcttgaaaaaacttgagtaaaaagtttgaaataactgaaaattattaggaaagagaacatgtcacatacagggaattctgtttaacaattaatattttatctgagactattgtgcactgtaatttttatgaacttactattttgttttatacgttggccgctccctctcattcacctaagctagaaaggtttgcttggctaaatgcacaacatggtcacgctgttactcaaaaataatctgtaggaagaggtgagtgtaaggtgctataagctatagcagtggkcaagtgggacgttgcccacattcccaggatagctgtctttaaggtggactggtggatttcattcagcctcagtctgataactttgatgtatggtgcaggtctctcacaaaaccagtgacat

SEQ ID NO: 43217 - DNA, 874 bp, Homo sapiens
agatggtcccctcttccaaggtaaatgttgaactggaaggtaaccctttgctggaaaaataaagatgaatgatgggcatgaggcccccagaacaaaatctaaagacacctccaaagtcctaaagagggtgaggtgggcagcttttggggataaacaattttgagaatttgaaggaaatatggttatgcctggagacatggtcacttgagtttaaagagtttgggtttagcccaggcgcggtggctcatgcctgtaatcccaggactttgggaggctgaggccggcggatcacraggtcaagagatcaagaccatcctggccaacatggtgaaaccccgtctctactaaaaatacaaaaattagctgggtgtggtggtgcacacctgtagtcccagctactcaggaggctgaggcagaagaatcactggaactcaggaggtggaggttgcagtgagctgagatcgcaccactgcactctagcccggcaacaaagtgagactctgtctcaaaaaaaaaatatatagtattcagttttactagaagtgcattttctctctctaccagcacacgagatacctcattgcatttgggagaggggatctgtgggtcccatgccttgtgagtggtgggaggatgtgaatctaggggctcattagttatctttgactttgaatgattagttcttgctgcttcaatttacagtatttacactaccctagtttacaaaagataaccttgtgcatcattagcactgatgatttttctttttttcccctttttactctttttttcttctttttcaattacatcagtggttctcaaacttacatgtgcctcagaatcccctggtgggctggttagaatgaaatttctt

SEQ ID NO: 43218 - DNA, 874 bp, Homo sapiens
agatggtcccctcttccaaggtaaatgttgaactggaaggtaaccctttgctggaaaaataaagatgaatgatgggcatgaggcccccagaacaaaatctaaagacacctccaaagtcctaaagagggtgaggtgggcagcttttggggataaacaattttgagaatttgaaggaaatatggttatgcctggagacatggtcacttgagtttaaagagtttgggtttagcccaggcgcggtggctcatgcctgtaatcccaggactttgggaggctgaggccggcggatcacgaggtcaagagatcaagaccatcctggccaacatggtgaaaccccgtctctackaaaaatacaaaaattagctgggtgtggtggtgcacacctgtagtcccagctactcaggaggctgaggcagaagaatcactggaactcaggaggtggaggttgcagtgagctgagatcgcaccactgcactctagcccggcaacaaagtgagactctgtctcaaaaaaaaaatatatagtattcagttttactagaagtgcattttctctctctaccagcacacgagatacctcattgcatttgggagaggggatctgtgggtcccatgccttgtgagtggtgggaggatgtgaatctaggggctcattagttatctttgactttgaatgattagttcttgctgcttcaatttacagtatttacactaccctagtttacaaaagataaccttgtgcatcattagcactgatgatttttctttttttcccctttttactctttttttcttctttttcaattacatcagtggttctcaaacttacatgtgcctcagaatcccctggtgggctggttagaatgaaatttctt

SEQ ID NO: 43219 - DNA, 564 bp, Homo sapiens
cagaaaaccaaacactgcatgttctcactcgtaagtgggaattgaataatgagaacatatgggcacagggaagggaacatcatacactggggcctgtcggggagtggggggcactctatcattaggagaattacctaatggagatgacgggttgaggggtgcagcaaaccaccatggcacatgtatacctatgtaacaaacctgcacgttctgcatacgtatcccagaacttaaagtataataaaataaataaatcaataaataaatacrtaaataataaaaatcgctgttcttaacaactggcttgcaaaatttgactctagcaagcaagaagatgtgggctctggcatgctactgcatgaaggcaagaggaaaacattaggagccaattttagcataatattttgaagttgctgcttccattggagtcactgtggctgctggcaacatgctggagaggtggatatcagttaggcagccacagatcctggtgggaccccagaaaaatcgcagggggtgctcaaatccatatgtttatatgtgatttcttaacagagagtaaaa

SEQ ID NO: 43220 - DNA, 564 bp, Homo sapiens
cagaaaaccaaacactgcatgttctcactcgtaagtgggaattgaataatgagaacatatgggcacagggaagggaacatcatacactggggcctgtcggggagtggggggcactctatcattaggagaattacctaatggagatgacgggttgaggggtgcagcaaaccaccatggcacatgtatacctatgtaacaaacctgcacgttctgcatacgtatcccagaacttaaagtataataaaataaataaatcaataaataaatacataaataataaaaatcgctgttcttaacaactggcttgcaaaatttgactctrgcaagcaagaagatgtgggctctggcatgctactgcatgaaggcaagaggaaaacattaggagccaattttagcataatattttgaagttgctgcttccattggagtcactgtggctgctggcaacatgctggagaggtggatatcagttaggcagccacagatcctggtgggaccccagaaaaatcgcagggggtgctcaaatccatatgtttatatgtgatttcttaacagagagtaaaa

SEQ ID NO: 43221 - DNA, 802 bp, Homo sapiens
gcctttaaactgtgggtccagtcatggaaccgtgttacagcagcaatggtataacagatttaaaactctaagtaaaaccctattttcctggccagagcatcagaaaaaaaaaggtcctctgtgagctgggtcaaaggggaaaggaattccctaattctgtgtatgagactgcacaagtctcaggcttaatcttgagctgtgcatacacaggaaagacccagagcaacacagaaaaggttttgggaactgaattattatttaatcgccccagtttaatattaacccctaagtggcacaaacaattaggggttaatatgaggcttgggtgattaattagacagacccaaaacaccatagcaaaggtttgaaaaataaatttacattggaacaaccacccacggaaggggatgaagaacttgcaatttggatctaatgggatctgctggaacataaaaatcaacattttctatagattttaatgagacccagagtcataaaataatatttttaaatgtcccagaatacaatccaaaattactcaatatagaaaaaagaagaaaaacatgtctaattctcaatggaaagacaaaagatgccaacccttagatgacccagatgttgyattatcaaacaaagatgttaaagcaactatcataaccatagtccatgagataaagatgaacactcttgaaattaatagcaaggtaaaaattatcagcagggaaataaatcctataaaaagaaccaaatggaaatgctgaaatttaaaaatatgtaatctgaaatagatgattcactagat

SEQ ID NO: 43222 - DNA, 802 bp, Homo sapiens
gcctttaaactgtgggtccagtcatggaaccgtgttacagcagcaatggtataacagatttaaaactctaagtaaaaccctattttcctggccagagcatcagaaaaaaaaaggtcctctgtgagctgggtcaaaggggaaaggaattccctaattctgtgtatgagactgcacaagtctcaggcttaatcttgagctgtgcatacacaggaaagacccagagcaacacagaaaaggttttgggaactgaattattatttaatcgccccagtttaatattaacccctaagtggcacaaacaattaggggttaatatgaggcttgggtgattaattagacagacccaaaacaccatagcaaaggtttgaaaaataaatttacattggaacaaccacccacggaaggggatgaagaacttgcaatttggatctaatgggatctgctggaacataaaaatcaacattttctatagattttaatgagacccagagtcataaaataatatttttaaatgtcccagaatacaatccaaaattactcaatatagaaaaaagaagaaaaacatgtctaattctcaatggaaagacaaaagatgccaacccttagatgacccagatgttgcattatcaaacaaagatgttaaagcaactatcataaccatagtccatgagataaagatgaacactcttgaaattaatagcaaggtaaaaattatcagcagrgaaataaatcctataaaaagaaccaaatggaaatgctgaaatttaaaaatatgtaatctgaaatagatgattcactagat

SEQ ID NO: 43223 - DNA, 355 bp, Homo sapiens
ttggagagagactaaaacgatgcacgtgcagacactgtagtccactgtaatcatacctcttctccttctccatccaccaaggaaagttctgtcytgttttccttgggctctccttcttctaccccaccaccccacccctcatcccagcatgtaaaggatggttctgtcttcactagatttttcccccaggtctgttacgtaactcaaagtaatttttttaatatttcaacttatatgggaaagacatagagctactaggttgcagggaaaagaagaaagaatgaagaaggaggagaaggagaaggaggaggaggaggaaggagaaggggaagaggaagaggaaggggaaggggaa

SEQ ID NO: 43224 - DNA, 529 bp, Homo sapiens
taggccccttgcgcctgtacctccttcacatagctaccagaaaaacgttcccttaaaaagcacagaagatcacctcattctgtgcaggctccatctggccttgcttttccccatcttttctccaaccctgcaaaatgtatgctataagccagggcttcccaagttttcatgttaaaatgcaaatacatactcagcaggtttgggctgggtcctktactctgcctttccagcaccgtcccaggtgatgccaggatggggtccgtaagccaccacatgttgagtggctggactctaggggagatctgtgtttcacagagtcctgcagacctgtcttcagtctgttcatactgcaagaatttccaagttctgtgttgtcattgtaatgttttctgttgtatgtaaagttaaccttaaatgttttcaatcgtaaacttagatttgctgttgcagtggttatttgctattgaaagaattttcaaagaccaggaaaggcttcagttttcttcagagttactaaataggtccaggt

SEQ ID NO: 43225 - DNA, 567 bp, Homo sapiens
acttttgcccctcaattctagctcctagccaagtggctgttcctcacttcagattcagatgtccatcctcagctccaagtttccacagaggtggctcggccaggctgcygtgctcagtgttagctctcagcacaggtggtgagcctgggaccatcaccgggcccccactccctcactccagggccctgctcgagcctcctgagtttcggtctccacctctccacactggaatgccagtggtgtctccacctcacaaggtcgtgtgatgatcccgtggtgacacagcagcatgctgagtactcaggcagtactggctcagctgtctggacagagggactgctgtgggacatgtgtccacagcttgaggtggagagagctgtggttggtgtgcgccacccagggcagggtggggctcaggcaattctgcctgaggtggacactgcagaggttggctttagttcactgcgtagatgtcaaaggcaccaaaagatggcagctcgcgacagagtgaagaggaggaagttggaattggagtggagaacgcagcctgtcacactttatacaaaa

SEQ ID NO: 43226 - DNA, 2126 bp, Homo sapiens
atgtcgtaactctaatattattactttgattataattaactacccacaatgtattgaacacctggccttgagagacagtataacatacatttgctgattcacacctatttggtattggaatctccatcttttccacctaggagaacatcatcagttctttctagtttgtttctatgtttatccaagctgacattcaaccagaattaagtgttctctcctcctacaatgctactgagagaaaaaaagagaaaggagagttatagataatccaatggtgaacccgggctttcattgacaagctcagctaatcagtatgtcttcctagggatataaatgagaagataaacgtggagatcaccactcaccaaatgctgccttgtcatatattgagcaaagtttctgagtcaaccccatggcatcatacacaaagaaactagaatagtggaacccaacccgagcttgggagacttcctaggaatcttgaaggagcctagttttgagattgccagtatataaaattctgcaaagaatgatctaaatttatcagaaacagcagttgtggaggctcacaatgaagaagatatttatttaacaattagaatacaggatagttctttagaagagatgcctgggatgcctaacttcagaaatgtaatgacctctcttgtgggtaccccacctgtgacctcaacttcagaaaaatgtaatgacctctctgcctagatccttaacaaacaaacaaaaactaacagataccacctctatacatcttctttgactcttgagagctaaaatttccttcagagggaatttccttaaacaggaactacaaagctggggtaagataactatgttccaggaatataggtaaaatcttttaagtttttttatttttcatttttttaatttttaatttttttaaagcatgtgaattaatggtagaagcctggtccaagataagatgatctggcagctagtcgtggtggtatgtgcctataatcccagctactcaggaggctgagggaggatcctttgagtccaggagtttgaggccagtctgggcaacatagcaagaccctgtttcaaaawatatatatatatatctggcagtcctggtggcccaccagctctataagagttatgggggtggctcccaccatggctcctgttgcagtaagataaatctggtgcccaaatcccagaaggtcatagttacattctactccacaacgggataccacccttcttaagatggaaggtgggggtggggtgtcagttgtcaaccagtgaattttagaagagacagacacacactgtttattactcattctgtgctaaaatctgcctccctgtagcctccacccactggccacaattctacgaccctgcacatctagttccccttttcccatgactactcttcggacacctgaaggcagccttcatttgtgcccgaggcttctctccatcatgaatgccctacatttccacagatgtccctcaaatgacaggaaggctcagcaggaagattttgtcagctcccagagaagtgggcttctcttccacagcgtatggaagtggatggccaatggccaggatgggccctggagacaaactcctaggttgcactggccgtaggaaacctctccctcaagtttggccactggagggctctaatgtgcccagtggatgccacaaacctggggctctagtgttatgggaaagcaggaggcaggtgacaatcactagtttaggcagtgccgtccaaacttggggttggaacctcccagttggtggtacaatcaatttaatgcgtcacagttggcaagtttttaaaaaaaggaagtaaggccgggcacagaggctcatgcctgtaatcccagcactttgggaggccgaggcgggcagatcacaaggtcaagagatcgagaccatcctggccaacatggtgaaaccccacctctcctaaagatacaaaaattagctgggcttgatggcacacgcctgtagtcctagctactcaggaggctgaggcaggagaatcgcttgaacccgggaggccgaggttacagtgagctgagagcgcgccactgcactccagcctgggtgacagagcgagctccgtc

SEQ ID NO: 43227 - DNA, 2126 bp, Homo sapiens
atgtcgtaactctaatattattactttgattataattaactacccacaatgtattgaacacctggccttgagagacagtataacatacatttgctgattcacacctatttggtattggaatctccatcttttccacctaggagaacatcatcagttctttctagtttgtttctatgtttatccaagctgacattcaaccagaattaagtgttctctcctcctacaatgctactgagagaaaaaaagagaaaggagagttatagataatccaatggtgaacccgggctttcattgacaagctcagctaatcagtatgtcttcctagggatataaatgagaagataaacgtggagatcaccactcaccaaatgctgccttgtcatatattgagcaaagtttctgagtcaaccccatggcatcatacacaaagaaactagaatagtggaacccaacccgagcttgggagacttcctaggaatcttgaaggagcctagttttgagattgccagtatataaaattctgcaaagaatgatctaaatttatcagaaacagcagttgtggaggctcacaatgaagaagatatttatttaacaattagaatacaggatagttctttagaagagatgcctgggatgcctaacttcagaaatgtaatgacctctcttgtgggtaccccacctgtgacctcaacttcagaaaaatgtaatgacctctctgcctagatccttaacaaacaaacaaaaactaacagataccacctctatacatcttctttgactcttgagagctaaaatttccttcagagggaatttccttaaacaggaactacaaagctggggtaagataactatgttccaggaatataggtaaaatcttttaagtttttttatttttcatttttttaatttttaatttttttaaagcatgtgaattaatggtagaagcctggtccaagataagatgatctggcagctagtcgtggtggtatgtgcctataatcccagctactcaggaggctgagggaggatcctttgagtccaggagtttgaggccagtctgggcaacatagcaagaccctgtttcaaaaaatatatatatatatctggcagtcctggtggcccaccagctctataagagttatgggggtggctcccaccatggctcctgttgcagtaagataaatctggtgcccaaatcccagaaggtcatagttacattctactccacaacgggataccacccttcttaagatggaaggtgggggtgggrtgtcagttgtcaaccagtgaattttagaagagacagacacacactgtttattactcattctgtgctaaaatctgcctccctgtagcctccacccactggccacaattctacgaccctgcacatctagttccccttttcccatgactactcttcggacacctgaaggcagccttcatttgtgcccgaggcttctctccatcatgaatgccctacatttccacagatgtccctcaaatgacaggaaggctcagcaggaagattttgtcagctcccagagaagtgggcttctcttccacagcgtatggaagtggatggccaatggccaggatgggccctggagacaaactcctaggttgcactggccgtaggaaacctctccctcaagtttggccactggagggctctaatgtgcccagtggatgccacaaacctggggctctagtgttatgggaaagcaggaggcaggtgacaatcactagtttaggcagtgccgtccaaacttggggttggaacctcccagttggtggtacaatcaatttaatgcgtcacagttggcaagtttttaaaaaaaggaagtaaggccgggcacagaggctcatgcctgtaatcccagcactttgggaggccgaggcgggcagatcacaaggtcaagagatcgagaccatcctggccaacatggtgaaaccccacctctcctaaagatacaaaaattagctgggcttgatggcacacgcctgtagtcctagctactcaggaggctgaggcaggagaatcgcttgaacccgggaggccgaggttacagtgagctgagagcgcgccactgcactccagcctgggtgacagagcgagctccgtc

SEQ ID NO: 43228 - DNA, 2126 bp, Homo sapiens
atgtcgtaactctaatattattactttgattataattaactacccacaatgtattgaacacctggccttgagagacagtataacatacatttgctgattcacacctatttggtattggaatctccatcttttccacctaggagaacatcatcagttctttctagtttgtttctatgtttatccaagctgacattcaaccagaattaagtgttctctcctcctacaatgctactgagagaaaaaaagagaaaggagagttatagataatccaatggtgaacccgggctttcattgacaagctcagctaatcagtatgtcttcctagggatataaatgagaagataaacgtggagatcaccactcaccaaatgctgccttgtcatatattgagcaaagtttctgagtcaaccccatggcatcatacacaaagaaactagaatagtggaacccaacccgagcttgggagacttcctaggaatcttgaaggagcctagttttgagattgccagtatataaaattctgcaaagaatgatctaaatttatcagaaacagcagttgtggaggctcacaatgaagaagatatttatttaacaattagaatacaggatagttctttagaagagatgcctgggatgcctaacttcagaaatgtaatgacctctcttgtgggtaccccacctgtgacctcaacttcagaaaaatgtaatgacctctctgcctagatccttaacaaacaaacaaaaactaacagataccacctctatacatcttctttgactcttgagagctaaaatttccttcagagggaatttccttaaacaggaactacaaagctggggtaagataactatgttccaggaatataggtaaaatcttttaagtttttttatttttcatttttttaatttttaatttttttaaagcatgtgaattaatggtagaagcctggtccaagataagatgatctggcagctagtcgtggtggtatgtgcctataatcccagctactcaggaggctgagggaggatcctttgagtccaggagtttgaggccagtctgggcaacatagcaagaccctgtttcaaaaaatatatatatatatctggcagtcctggtggcccaccagctctataagagttatgggggtggctcccaccatggctcctgttgcagtaagataaatctggtgcccaaatcccagaaggtcatagttacattctactccacaacgggataccacccttcttaagatggaaggtgggggtggggtgtcagttgtcaaccagtgaattttagaagagacagacacacactgtttattactcattctgtgctaaaatctgcctccctgtagcctccacccactggccacaattctacgaccctgcacatctagttccccttttcccatgactactcttcggacacctgaaggcagccttcatttgtgcccgaggcttctctccatcatgaatgccctacatttccacagatgtccctcaaatgacaggaaggctcagcaggaagattttgtcagctcccagagaagtgggcttctcttccacagcgtatggaagtggatggccaatggccaggatgggccctggagacaaactcctaggttgcactggccgtaggaaacctctccctcaagtttggccactggagggctctaatgtgcccagtggatgccacaaacctggggctctagtgttatgggaaagcaggaggcaggtgacaatcactagtttaggcagtgccgtccaaacttggggttggaacctcccagttggtggtacaatcaatttaatgcgtcacagttggcawgtttttaaaaaaaggaagtaaggccgggcacagaggctcatgcctgtaatcccagcactttgggaggccgaggcgggcagatcacaaggtcaagagatcgagaccatcctggccaacatggtgaaaccccacctctcctaaagatacaaaaattagctgggcttgatggcacacgcctgtagtcctagctactcaggaggctgaggcaggagaatcgcttgaacccgggaggccgaggttacagtgagctgagagcgcgccactgcactccagcctgggtgacagagcgagctccgtc

SEQ ID NO: 43229 - DNA, 2126 bp, Homo sapiens
atgtcgtaactctaatattattactttgattataattaactacccacaatgtattgaacacctggccttgagagacagtataacatacatttgctgattcacacctatttggtattggaatctccatcttttccacctaggagaacatcatcagttctttctagtttgtttctatgtttatccaagctgacattcaaccagaattaagtgttctctcctcctacaatgctactgagagaaaaaaagagaaaggagagttatagataatccaatggtgaacccgggctttcattgacaagctcagctaatcagtatgtcttcctagggatataaatgagaagataaacgtggagatcaccactcaccaaatgctgccttgtcatatattgagcaaagtttctgagtcaaccccatggcatcatacacaaagaaactagaatagtggaacccaacccgagcttgggagacttcctaggaatcttgaaggagcctagttttgagattgccagtatataaaattctgcaaagaatgatctaaatttatcagaaacagcagttgtggaggctcacaatgaagaagatatttatttaacaattagaatacaggatagttctttagaagagatgcctgggatgcctaacttcagaaatgtaatgacctctcttgtgggtaccccacctgtgacctcaacttcagaaaaatgtaatgacctctctgcctagatccttaacaaacaaacaaaaactaacagataccacctctatacatcttctttgactcttgagagctaaaatttccttcagagggaatttccttaaacaggaactacaaagctggggtaagataactatgttccaggaatataggtaaaatcttttaagtttttttatttttcatttttttaatttttaatttttttaaagcatgtgaattaatggtagaagcctggtccaagataagatgatctggcagctagtcgtggtggtatgtgcctataatcccagctactcaggaggctgagggaggatcctttgagtccaggagtttgaggccagtctgggcaacatagcaagaccctgtttcaaaaaatatatatatatatctggcagtcctggtggcccaccagctctataagagttatgggggtggctcccaccatggctcctgttgcagtaagataaatctggtgcccaaatcccagaaggtcatagttacattctactccacaacgggataccacccttcttaagatggaaggtgggggtggggtgtcagttgtcaaccagtgaattttagaagagacagacacacactgtttattactcattctgtgctaaaatctgcctccctgtagcctccacccactggccacaattctacgaccctgcacatctagttccccttttcccatgactactcttcggacacctgaaggcagccttcatttgtgcccgaggcttctctccatcatgaatgccctacatttccacagatgtccctcaaatgacaggaaggctcagcaggaagattttgtcagctcccagagaagtgggcttctcttccacagcgtatggaagtggatggccaatggccaggatgggccctggagacaaactcctaggttgcactggccgtaggaaacctctccctcaagtttggccactggagggctctaatgtgcccagtggatgccacaaacctggggctctagtgttatgggaaagcaggaggcaggtgacaatcactagtttaggcagtgccgtccaaacttggggttggaacctcccagttggtggtacaatcaatttaatgcgtcacagttggcaagtttttaaaaaaaggaagtaaggccgggcacagaggctcatgcctgtaatcccagcactttgggaggccgaggcgggcagatcacaaggtcaagagatcgagaccatcctggccaacatggtgaaaccccacctctcctaaagatacaaaaattagctgggcttgatggcacacgcctgtagtcctagctactcaggaggctgaggcaggagaatcgcttgaacccgggaggcmgaggttacagtgagctgagagcgcgccactgcactccagcctgggtgacagagcgagctccgtc

SEQ ID NO: 43230 - DNA, 584 bp, Homo sapiens
ttaactccatttttttttaacggttcttgtaccacgggaatttatctctttttcttttgaaaatattggtcctactttcttgtttatatttttaagtatgcattttgaaatgtattatgaaatgttccatacacctaaaaggctctatataacatgcacgtaacgtgaagaataacacaggtatgaaggcccaaggacaaaggtgtactaacacccctgagggagcctcatatttggcagrgactagtagtgcagactgcccagggtaatttgggtctggttttccactcatgagttttggcagggcttccagtaccccatgaagacatgaaaaggcatcattcttgaaggctaagatgaaacttgctctttaactcaggaacaaggctccccttttctggaactgaaagatacacaaagtttccttgtttccctaaagtggggctcaggtggaaatggcaggtctttttccactgtccactctcagcacaagaaagcacaatgacttttttttaaatgcctttcatatttctgaggtccccaagttgtgctgtgacaaacaagtgattgccttctttgatact

SEQ ID NO: 43231 - DNA, 623 bp, Homo sapiens
tacacaagctcccaggtaccaacatccttcatggattcttacctggccccaagtttcctcagggcttggtcttgagtccttatctcttctcacttttcaattctctccctgagtgatctcattcactcccacacataggaagatccatatctccatctccaggcccagcctctccctgaacgtcagaatctgttttccaattctcaagtgaactcctcacattgcaaaacatggacatcagagtcaacatgtccaaaattcaccatcccacataacttcatcccaaatctgtgctgtgggcttcacttcggcaaattccckgtcaccaccccttcagtcacctaagttggaagcactgggatacatttagaagcattgtgctgataccacttgcattaatgctgcttctttaaaaaaaaaaaatttttttttgagacagagttttgctcttattgcccaggctagagtgcaatggtctcagctcactgcaacctccacctcccaggttcaggcaattctcctgcttcagcctcccaagtagctgggattacaggcatgcaccaccattcctggctaatttttgtatttttagtagagacagggttttgtcatgttggcaaggc

SEQ ID NO: 43232 - DNA, 1239 bp, Homo sapiens
ctcaattttttaatggtatggcaaatcaataattctgtatcactcctctatatcccaacagaaaattccctggaagcaacacaaaagagtgtagactttgggaaaagatggagcatttttaaattcttcccttccactatgacctccagaacctgagcattttatttaacttctctaagcatcagctttcttacctgtaaaatgaaggcaagattacctatcttataaagttgttgtgaggattaaatgaaaccatctaagtaaaacagctagtcctctaccacacatttaataggtatgaataaatgactgctcttatcattatgcttttattattactataattattttcacatatttctgatctttcatatctaataactttagtaatatttttatttgacacttctaatcacagaggtatcaaattttcttttctgtgaacataatcttgatgaattcttagaaaatatggcttaaaggaaaatctatttttagcacactgagacatctactgtgccccctccatggaataaataataattaacaaagcagctgcggggaaaaaagcacatcccatgaatttattcaatgcattatgaatagcaatagaattgtttgcccattgcacccccttgtgagagctcaaggtaactacctttattcaagagagtaggtggttttgagccttgcaattcaaagtttggtccttagttcagcagtatgggcatcacataaatgattgttagaaacttatttacttatttttctctctttaattttaggttattttagggtcagggggtacatgtgcaggtttgttacattggcaaattgtgtgttgcagggatttggtgtacagattattgcatcacccagctaataagcatggtatctgataggcagtttttcattccttacccccctcccaccttccattctcaaataggtcccagtgtctattgttcccttccttgtgtctaygtgtactcaatggttagctcccatttataatgagaacatgtggcatttggttttctgttcctgtgttaattcacttagggtaatggcctccagctccatccatgttgctgcaaaggacatgatctcattctcttttatggctgcatcatattccatggtgtatatgtacaacattttctttattcagttcaccattgatgggcgtttaggttgattccatgtctttgctattgtgaatattgctgcaatgcacat

SEQ ID NO: 43233 - DNA, 611 bp, Homo sapiens
aggttatatttgattatgatagttaacagtgggcccatgaagatttagaaaggtaggttgctaatctactccaattcagtagtagccctcctctcctctttttctcctcctgctttgtctcsttctttcctttctttttcctcttcctaccctacatccacctttttcccttttctttctagaaaagtatttctcgcattttgattcatgaaagaattacctgggaagcctattaaatgcagatctccaggctctaaccacagttacattttcttaggtcaggagtagggcccaagaatctgcatcttaacaagtataccagttgattctgatcccactttgcaaaacactatcttagaaaatgtagaagtcttcattttccttatctactaacatcaactgagtgaggtgtgaatggtgttatctacaacatcctccatttcccagtgatatttcctgatcctacaaactcaaacttatctcattgattcagacttcacatacattttgagatacagagcagcttctggcttgtttcaagtatgtactgcggctaagaaacatcttcccaaggcttcagtgtggtggcctgactcacagtgtggtgactt

SEQ ID NO: 43234 - DNA, 611 bp, Homo sapiens
aggttatatttgattatgatagttaacagtgggcccatgaagatttagaaaggtaggttgctaatctactccaattcagtagtagccctcctctcctctttttctcctcctgctttgtctccttctttcctttctttttcctcttcctaccctacatccacctttttcccttttctttctagaaaagtatttctcrcattttgattcatgaaagaattacctgggaagcctattaaatgcagatctccaggctctaaccacagttacattttcttaggtcaggagtagggcccaagaatctgcatcttaacaagtataccagttgattctgatcccactttgcaaaacactatcttagaaaatgtagaagtcttcattttccttatctactaacatcaactgagtgaggtgtgaatggtgttatctacaacatcctccatttcccagtgatatttcctgatcctacaaactcaaacttatctcattgattcagacttcacatacattttgagatacagagcagcttctggcttgtttcaagtatgtactgcggctaagaaacatcttcccaaggcttcagtgtggtggcctgactcacagtgtggtgactt

SEQ ID NO: 43235 - DNA, 611 bp, Homo sapiens
aggttatatttgattatgatagttaacagtgggcccatgaagatttagaaaggtaggttgctaatctactccaattcagtagtagccctcctctcctctttttctcctcctgctttgtctccttctttcctttctttttcctcttcctaccctacatccacctttttcccttttctttctagaaaagtatttctcgcattttgattcatgaaagaattacctgggaagcctattaaatgcagatctccaggctctaaccacagttacattttcttaggtcaggagtagggcccaagaatctgcatcttaacaagtataccagttgattctgatcccactttgcaaaacactatcttagaaaatgtagaagtcttcattttccttatctactaacatyaactgagtgaggtgtgaatggtgttatctacaacatcctccatttcccagtgatatttcctgatcctacaaactcaaacttatctcattgattcagacttcacatacattttgagatacagagcagcttctggcttgtttcaagtatgtactgcggctaagaaacatcttcccaaggcttcagtgtggtggcctgactcacagtgtggtgactt

SEQ ID NO: 43236 - DNA, 651 bp, Homo sapiens
atccctgtatccataaatattcattgcccaaatgtgccccgtttgaaatattttccaatgcccttaggtctttttaattgggtcttcaagtcataaagccagattacctggaagagatctccaagccctcagacactgtctctcacagacgccctaagcacccccatcaggaagacttctggcagtcggcgggcccctagagctctatgcgattgcccttttccatcagctccatctctctctgcccgtttgcagtraatcaccttcccaattagtgatttccacagtaggacagcagcatctattcttgtttattgggcttcagacactgagaagtgtctataggctgaggtttatacagaggacaagatgccagagaaacctcaaaggcaggatttgtgactcacctgggtatgcaggttgggggtattggggaataggaaagggcgactcggcaagaaggaaggaatggcagcaaggagtgaggctcccactgagctctgccagtaaggggaggcagagacatcagtttaccaggtaattccataatattctctggctcgatggtcttatgttaaaagacatgtgaaggtttttttttttaaattgtaaatcaacaatatctataaattataatgtataattgaatat

SEQ ID NO: 43237 - DNA, 555 bp, Homo sapiens
tcgtaaaattacatttcatcaataatacaaagcttttgcctatccttgctatcaggtgcctgaattagtacacatacacacacacacttgcctaaaaggtgaactttcttgtcaagtaaaataaactactgccttctctaagacattctttcacaaactccaaaattcaggtctcagcatagtggttctcaaaatgtggatcttcaccaacagcatcagcacgacctgagagcctattaaaaaatgttgacctactgaatgagaaactcygggggatgggcttagccatgttttaacatgcctttccaggcagtcttggcagacgcagaactttgacaccaaactcctggcagattaccgctaattcaacttgcaaataaaaaagaaaaagatcgttactttttggagagcctcctcttccaaccttcgctttttttctagttgcttgttgagattttttgctaatccgccacttgaagacagatgctcctcttctgcacgaaacatggaagactttgctttctcatattcatcttgacgttgcatgcataataa

SEQ ID NO: 43238 - DNA, 555 bp, Homo sapiens
tcgtaaaattacatttcatcaataatacaaagcttttgcctatccttgctatcaggtgcctgaattagtacacatacacacacacacttgcctaaaaggtgaactttcttgtcaagtaaaataaactactgccttctctaagacattctttcacaaactccaaaattcaggtctcagcatagtggttctcaaaatgtggatcttcaccaacagcatcagcacgacctgagagcctattaaaaaatgttgacctactgaatgagaaactctgggggatgggcttagccatgttttaacatgcctttccaggcagtcttggcagacgcagaactttgacaccaaactyctggcagattaccgctaattcaacttgcaaataaaaaagaaaaagatcgttactttttggagagcctcctcttccaaccttcgctttttttctagttgcttgttgagattttttgctaatccgccacttgaagacagatgctcctcttctgcacgaaacatggaagactttgctttctcatattcatcttgacgttgcatgcataataa

SEQ ID NO: 43239 - DNA, 650 bp, Homo sapiens
caatctaatcatgaaaaaatatcagacaaaactgaggacactctgtaacaatacttgctaatattcaacaaaagttaaaggccaagaaagaggaaaaagaaaaaaggctgagaggggctggtgacaattaaagaaaaatagaggccaggcacagtggctcacgcctgtaatcccaacactttgggaggccaaggcagatggatcatgaggtcaagagatggagaccatcctggctaacacggtgaaaccccgtctctactaaaaaatacaaaaaaattagccaggtttggtggcgggtgcctgtagttccaattacttgggaggctgaggcaggagaatagcgtgaacccgggaggcggagcttgcagtgagttgagattgcgccactgcactccagcctgggcgacagagcgagactctgtctcaaaaagaaaagaaaaagaaaagaaaaaaaagaaacctagaaagatacaaccacttaaacacaacgcatgagcctgaactggattctggtctacggagcaaaatatatctaaaaagatgttactatagacctgactagayaatgctatcttataaatgttaaatttgctgattagtaactataattatgattatgtggagaaattctaaaaagatacagtaggatc

SEQ ID NO: 43240 - DNA, 584 bp, Homo sapiens
ttgagctaaaaacaaacgaaatcacaaaattggctaagtattgaaaaggaaaaattattatttccttattttattatccatgaggttaaacccttcttccagtttttatttcttcttttgaaaacttgcatttcttcctctgaaaatctgtcttggatacataaacatttttaagagtgataatatatatattgccaagctgcctttctgaaactctaggttgttgcatttaacattttacacaccaatcagcaacatacaaattttgcccaytgacaaacaagccattcccacaggatcttaaggtttggttacagcagaaatgttatcaagtaggaaagaaagtaataaaatatgtttccaacaggtttttaaatagatttgtaagtaatttaactatgtatgtgctaaaatgtttaatgatttaataatgccatcatcctaccctaagatccatttttctccatggctccttattagggttcagttcataaatattatttcttcttacagcctcaatataagcttcatgaccctgtcgaaaatatattacctacaaaagggaaatatgcatttaaaaatta

SEQ ID NO: 43241 - DNA, 2105 bp, Homo sapiens
ccagctactcaggaggctgaggcaggagaatcgcttgatcccgggaggtggaggttgcagtgagccgagatcatgccaccgcactccagcctgcgcaacgagagcgaaactccgtctcgaaaaaaaaaaagaaaagaagcaagactggctctgaaaacctttaatgtagtaaaaacattagagaataattctgacattttcctaccacaattaagatagtaagattcccactcattactaatatatttatacaattatttacacaattaatggaatacagaatgtgtaaataaccatataaatatattttcacagatagaaacattataaatagatatcctaaaacaaacctaaatatgcctagtggtacctctggtacaaccactcttcgtttccaagcctgcaggtcacgttctgtagcaatctgactgcgtggagcgttttgatgcatctgacgaacaccttcaacttgtccactacgacgcagaccaatatttggaggggactgaatgtctaagctcagccttctaaaacctaggaaaatatgatggggaagtgattccaatacacttttaaactaatatacatttagcatgtaacaagcacacgttcacctaagatgcgcaccaaaaataaagaactaagagaagatagtatctactgaaaaaactttgtgagaaaaatctttttaaaatttattttctgtacagacaaggtcttgctatgttgcccgggctagtcgcaaatgcctggcctcaagcaatcctcttaaccacggcttcccaaagtgctgggattataggcatgagccactgcacccagcctgacagaatcttaacatgactaagatcaaaatgtagaatacggaacaaacattaactattaaacctcaatttcaatttttactagactttctgaaattataaaatgtacatttcacattacattatatatgcattcctaaaaactgtgccttcttaaaaattgcacactaaaaaaagtctttttgaaaaatttgcactgaagacagatacctgaaatcaaagtggttttacaagagctcttgcaacagtaatcatgattctcatgattctcaagagataatctgagccaccaaggcaagtagctgtcaagatggttattaaaaagtcaaacaaataaaatgttgtgggtaaatgccagtcgtgcttaaactaaagctgggcaggtgggtgatgaggcaatgaagacaacactgacgctctgagcctgaggggctgctgttaaggtgggtataggaggctgcgcaacctcccatgagctggaagccacagaggctgttaaggtgggtataggaggctgcgcaacctcccatgagctggaagccacagagagactagcctctgaggaggaagtcctagacaaagtgctcattttcttacaacagaaggtgaaggggctcctgctactaacacaacagaaaaactgagggtgatattgattcttgtgggaggctatggagctgtactccagctgtgccagctcttcttgcctagggaaaaatcyacgagtgaatgcaacttctgcactcttctatgtaccacactctatttaccaatcacatgtgtaccaatgtgcattagagaacacactatgcttcaccaacttcaaatggcattaaatgccccgctagtaaaccaagcatttatattaaaatactatatattgaagaaacatttttgaactgagaaatataaattctaaatttaactgcccaagtcatagcattattctccaacaatctgaaaacatgcataaagttatttatcacatcacttataacagcaaagcataagaaacaacctaaatgcccataaagagattagaaaggttaattactccacacagaggagtagtatgaagctatttaaaaaaaaaaaaaaaaaaataggatgaagaattctgtgaactgatacgatttctagaatatattgttaaggcaatacagtaggtgccagaagaatgcgtttatgtatcttgtgcctcttgccatgacagactgaggacatagcatcaactattcagtattcctgtctaaatgcttaacctgaacccaattatgagga

SEQ ID NO: 43242 - DNA, 825 bp, Homo sapiens
catgcccacagaagaatatttcccagttgctggcacaaagcaggtgctcaaacagcagcaggcagcactgggcagcggttcagcccctgacctctgagactagactctagatccaaactcaggctcagccactcactctccatgacctggaggaagctattgaaggttctgtgcctcagtttccccatctgcaaatgcagataatagtaacacctacctccagggcattccatgagttaatactaatgaagtgcttcatgcttagcataaaatgagtgctatataactttccattaaataagaggaattataaagctgataaacatttaacaacctgctgaaggaaaagagggctgtcttgattcgcaggtttgccttcggtaagtattcccaggctaccaacatgaagcccaccacggagccaagtagagtggggccggcttcagtacaccatcgctttcctgtgtcctaagcagaactggttgctgaatcattaaactataaaaccccaacagcctgccatgaatgaaaatgagtatatggctttttagtctcgagaaacctcacccaacaggttacaacaaacatgcaccaatcatttatttactcttcaattacagataaaaatacaagaaccaggtcatgttgtagctttgggactttttctaggattaaaactaaagttcacaccttcctgggtataaggaaaggaaagtgactaatgtacaggtgggaaggatcaccatttaaaatgtatcaaaaacgtttaagccttttagccacatcttaacagaccttgcctatgtctgctttgygaagagagag

SEQ ID NO: 43243 - DNA, 1093 bp, Homo sapiens
cagccctagtgaaggacttgacagaatgattgcagctccttcgctgtgtgcgtgtgccaggtactgctccaagtgctttacaggtattggcccatttaagccccagagcggctccaggcagctgcccttatccctgtttcacagggaaggaagcaaaggaacaagtcactcggctggcaagtggcagagcctgtctcccatcgtgtttgctttgctttaccgcctctcaagaaggtgggtagaacaccagctgggggcacccccaggcccaccctataatcccaagaggtgattttgtctcactggttgacccaaacgcccacaagtgttctgacagagattgcatatggaaatcgtgctagattctgcctcggaattctgcagaagctgagatgaaacaagtaggaggtcaaacacaaatggactacaccaatgggaagatctgtatctattccatggtggagttcccctctcactccctctggaatcacagttttagttctcacggatagtaaataatcattcctgtgaatgaccatgggcacccaggggatgcctatagcgtctgtgctactatagttaattacattttcatcaaaaactaacaactcatggtcaccaactccagtgtctcccagttgtcaaagccaaaatctaaactcaggtctatcactgacttcctacatgaccaccggcacccctggcacaccggcacctcacagctgtttacggaccttcccgcttccctttgagtctctctggagaaatgagggcatcctctgtatgtcttgctggatgtgagggagacacagagcacacgagggcttctgaaatctggccttgggggaataagaagccttttatgcttctggagtatagatttgtgcctttcctgcttctttcctgccagagttcatctggcagagctaagcctcaccccaggctctggggtccgggggatactgtcctcccaggtcagccacctctcatttgcatggtggacagctgcggctgacaggcaaacaaaratgtctgcggccatggcagctcctagagaaactcttctctccttactctcaaatgcctaagatta

SEQ ID NO: 43244 - DNA, 1285 bp, Homo sapiens
  misc_feature (1)...(1285): n = A,T,C or G
atnnnnnnnnnnnnnnnnnnnnnnnnnnnnnnnnnnnnnnnnnnnnnnnnnnnnnnnnnnnnnnnnnnnnnnnnnnnnnnnnnnnnnnnnnnnnnnnnnnnngatacgtatcatataatatactacgtgtgagcacaaaaacgtcaaactcatagaaatagagtaaatggtggttactagaggctgggagtataggattaggaagatattggtcaaaaggcacagaattttcatgaaacaggaggcataagttcaaaaggtctattgtatatcatgttgaacacaattaataacactatattgcatattttgaaaaatgctgggaattgattttaagtgttcttgccacaaaagaataagtgaggtaatgtatgtgctaaaaagcttgatttagccattccacaatgtatacatatatcagatcatcatattgtacaccataagtatgtacaattttactagccaattaaataagagaaaaatgaatgcataagttttcatcatatataggtattgatttttccagagagatgatcagtcacaaataatggtatcctcattcatgcttttttaaaaaagccaaatgtagacttgaggctctagcaaatgagtgctgacttctatcttactgcatccttgaatgcatatacgcttactcagtgatcgtttgtaaaagacaaagcagggtgcagaatggtttcatttcacacctggaatcagctctctggggaaattttaagatcaaaacagtaaaacaaacagcaaggtccagtagaaattagttcttaacttgctgcattttaacacctctctggccatacaaatatgcccrcacaggtaactagggtagagaagtggacaccacctagtgtatgctaagtaattggatcatcacctgaatgaattcttccacccttatatggtactttcaatataacttgggaaaacttctctctcattcaactcattgtcactagatttaataattcataatgtagttatctctaatgctaaaggataggatgttttggctgataacagtatcagtgtataaatccgtcagaaaagggcaaaatcttaggagctcactatggatcacaaggttatgggtccaaggtagaacaagcatgattgctctaatgcttaaactatcatgctaatttctatatataaaataatttttnnnnnnnnnnnnnnnnnnnnnnnnnnnnnnnnnnnnnnnnnnnnnnnnnnnnnnnnnnnnnnnnnnnnnnnnnnnnnnnnnnnnnnnnnnnnnnnnnnnnaa

SEQ ID NO: 43245 - DNA, 672 bp, Homo sapiens
tttacattcaaatctacagtcttttgtaattctctatatgacctaagatttgcttacctacttctacttgctgtataaggttgttttcatgattaaatgagatgatataatggttaatacatagtaagtattsaataccagttagttataattgataataaaatattaatgtcaaattagaagtaaaaaattcacttaagtcttgatatgagacagaaagtaagagcactaatatcagttgctgatgtattagtcagggtttcccagagggacagaaataacaggatatatatatatatatatgagtttattaagtattaacttatacaatcataacatcccacagcaagctgaagagcaaggagagctggtctgagtctcaaaactgaagaacttggagtctgatgtttgagggcagtaagcatccagcacaggagaaaggtgtaggctgggtggctcggctagtctcaccttttcacatttttctgcctgctttatatttgctggcagctgattagattgtgaccaccagattaagggtgggtctgtcttctccagcccactgactcaaatgttaacctcctttggcgacaccctcatagacacaacctggatcaatccttggcatcctttaatccaaacaagttgacagtcagtattaaccgtcacact

SEQ ID NO: 43246 - DNA, 679 bp, Homo sapiens
ggaataaaatccttttctgatgattttcaatggccttactgatttaaaaagagaaaaagtaagtctaaaggcatgagtttgtaaaggtgggttgtcagtatatgagtcaaatgtggggcattatcttaattcactgtctcacgcttatattactcagaccattattctagtcagccaaggccaaaaatgaacatattttcagactcaagtacaaaccatctttccttgaatattctagaggtttgacaggcctcgaaagaagtacctaagtgtatgggaggcctaagaaaatcagtttttaccagattcaagaatcaaatgaaggcattttaactctattacctactctgcagttcaaatacatttgccaagagattatttatagttgtggacaatgaaaatatgatcygtaaactgcctgtggtgagagttgctttaagaatcacaaacctgggtggagggagccgtatggtgacgctcagcagcacagtgacacagcaggctgagagagaactccagagacttctgttttcatagcagctctgcccccacagccttgccacataaccctgggcagtcttttaacctgttccagatgtactttcctccatagtttgtgagttaatcagcagctcttggaaagaaatactaatttaaataatttgtaaacaaaaggttt

SEQ ID NO: 43247 - DNA, 586 bp, Homo sapiens
tggctagttggaaaggcctgtggaaaggtagacaaaaaagtcttgactataaaactcccacacaatggagagaggactccattacagaaccatacagcaagatcctcccagggtatcaagccctcagcagataygaattattttaacctgtggctttcttgttcacactgcccttgtttctgatggaatgcaataggagttacactcaagacatgtatagcactgtggtcaagctaacaaaaggaatatggatcacaattaccagcaaccaatagtaatagaggctaatacctctaccggatatgttttataaacaaaactaggaaaccccacaaaaacctgaggcaaataccgggcatgtgctaccagtcagacactacaattaaggtgtagatattcatgaaaagcaagatttctgctatctggcatggcccagagaaagaacataaaattcctattttttagtcattccatgaacaaggtaagtttgaaacacatacaaaaaaagataaaatagttcattgagagaagaaagaataagaaaaatatctaggtgacagaatagaattgaggaataaggttagta

SEQ ID NO: 43248 - DNA, 586 bp, Homo sapiens
tggctagttggaaaggcctgtggaaaggtagacaaaaaagtcttgactataaaactcccacacaatggagagaggactccattacagaaccatacagcaagatcctcccagggtatcaagccctcagcagatacgaattattttaacctgtggctttcttgttcacactgcccttgtttctgatggaatgcaataggagttacactcaagacatgtatagcactgtggtcaagctaacaaaaggaatatggatcacaattaccagcaaccaatagtaatagaggctaatayctctaccggatatgttttataaacaaaactaggaaaccccacaaaaacctgaggcaaataccgggcatgtgctaccagtcagacactacaattaaggtgtagatattcatgaaaagcaagatttctgctatctggcatggcccagagaaagaacataaaattcctattttttagtcattccatgaacaaggtaagtttgaaacacatacaaaaaaagataaaatagttcattgagagaagaaagaataagaaaaatatctaggtgacagaatagaattgaggaataaggttagta

SEQ ID NO: 43249 - DNA, 586 bp, Homo sapiens
tggctagttggaaaggcctgtggaaaggtagacaaaaaagtcttgactataaaactcccacacaatggagagaggactccattacagaaccatacagcaagatcctcccagggtatcaagccctcagcagatacgaattattttaacctgtggctttcttgttcacactgcccttgtttctgatggaatgcaataggagttacactcaagacatgtatagcactgtggtcaagctaacaaaaggaatatggatcacaattaccagcaaccaatagtaatagaggctaatacctctaccggatatgttttataaacaaaactaggaaaccccacaaaaacctgaggcaaataccgggcatgtgctaccartcagacactacaattaaggtgtagatattcatgaaaagcaagatttctgctatctggcatggcccagagaaagaacataaaattcctattttttagtcattccatgaacaaggtaagtttgaaacacatacaaaaaaagataaaatagttcattgagagaagaaagaataagaaaaatatctaggtgacagaatagaattgaggaataaggttagta

SEQ ID NO: 43250 - DNA, 611 bp, Homo sapiens
ggaktgcggctgggagaagcaggcggagggctggcccattttatttctgcacgactttgcctgatcacctgctgaggattctaaggcctgacccagacctagatgccagcccttagatgacaatctctaaaagcagagttcatgctgaggcaggtgccaagaaatcggttcacacccctgataaacggttgttgaaaatgtgtgtcacctgcaccaccagcgaccagaaccactcttcctcactggaacgagagcaatgtctggggttccacacgcagactccaccctgccctgggggtggcccgcgcgccgccacctcccggccattacccaaacccgcaacgccccgttccacacatcccggactctcgagcagccggggagggtcggatccgggcgcggaggaggcaggaggtccggctggagcgaagcacccaccccgggcccaaccccgtcttcccggcccctccctcggcccgtggccgcccgcgctcacctccagccgcagggaagccccgcagccgcgcaggaactcgcggatgttgctcaggcactcgctctcgctccggggctcggggtagacctgcaatacagagcacaagcgctgagcg

SEQ ID NO: 43251 - DNA, 2053 bp, Homo sapiens
attttttggcctgaggtgtctggacatatcacagaaggtagaccctgaggacaaaagtcagacatttccagaatcgagagatgagggcttagggccacccttatttaataacaaaaggactgtgaccttgttctataacccaggctggctgaggaatgtttagcaaactgaacacactttgcttccccagttcccgtcgttgtagacagaaacctgtttgcttcctctgtaggttctgtgtttccagtgagtaggatcttgttagaggcttcattcattcatagccacaacaaatgtccaagtccccccaaactgccccagttttctaagtgagtgagtttccaagttcctggaacttggagtcagaataaaaggtgagccaccagagggcaccccaggcataattaaattgctcaggaattctccccccttccccactgcgcaccccaattctgaactggatggctggcaacccgccaagggtaggtctggtcaaatgtgcagttagaggtcagtgctggtgcggccccgccccagctccacacccctccccagctccaaaacccctcccctgagtgtccttcggtttttcccgcaacctcggcctctttgcaccctaccacccctactccacacacatgaacaggtgcacacaacgcacacacctgcacacacacgcacacacatgcatgtgcacacacacacccctgtaatcctgcccttccgcctccatctccaggggacaggaccaaagcgagtacggtttctctcatggtcccctcatcaccagtgctctttgggtcaaagaaccaggcagcccagccttgtcccctcgggcagcttgatgtcataagaggaagatgtggagaagctgcgggggcctcgcagcctctgcagaagtggtaggggccgctgtatcaaccaagatgcggcagcctacgagcctgaagtcaggtgyagagaccaagacgacctgcaactccatttgttccatagagctgtgcttaaaattgccaattttctcaaaattggtgagaagtctaatgcagccctgccttagaaatgtgtatggtgactggccccaaacactctgtcatccttgcccatggctagcctggcacccagtaattccacatggacccttttgctgtggaagcccacgtcacagcactgaggccagctgaacctgactgtgactggacgggaccgcattgttctatacacatgaaacttgcaaataccgggatgctgctgcattgtccccggggtgacatggggctgggagtcagttgcagagagatgacccttcaggccacgtgtgggtgaaaccactcacagagggccaggcgcggtggctcacgcctgtaatcccagcactttgggaggctgaggcaggcggatcacttgaggtcaggagttcaagaccagcctggccaacatggcgaaaccccatctctactaaaaatacaaaaattagccggacttggtggtgcacgcctgtagtcctagcttctcaggaggctgagcagtagaatcacttgaacctgggaggtggtggtttcagtgagccaagatcatgccactacactccagcatggccaacagagcgagactccatctgaaaaaaaaacaaaaaaacaaaaaaacccactcacagagaccaagtggaatgggaaatgtgagaagagaacagagctcaaggaacgaggccgttgaagtcccaagtcctccacatgcagcagggccctcactggtgagagttccccaagagggaggcgaacagggtagacaaactccagggctgtgcagtgaagccttctttcttttgaaaggattttctgcagttgccttccctggaatacttaggcttaagtttacatggggctggtcaatttgcttacaaagacccatagctgttttccatcatatttctgtaggtggtatttaatgaaatttctccatgatgcttctaggagctgatattgtggagtatgtccctacacctacatcatttctacttctgctgaaaatgttttgacaaggatgtgctcac

SEQ ID NO: 43252 - DNA, 2053 bp, Homo sapiens
attttttggcctgaggtgtctggacatatcacagaaggtagaccctgaggacaaaagtcagacatttccagaatcgagagatgagggcttagggccacccttatttaataacaaaaggactgtgaccttgttctataacccaggctggctgaggaatgtttagcaaactgaacacactttgcttccccagttcccgtcgttgtagacagaaacctgtttgcttcctctgtaggttctgtgtttccagtgagtaggatcttgttagaggcttcattcattcatagccacaacaaatgtccaagtccccccaaactgccccagttttctaagtgagtgagtttccaagttcctggaacttggagtcagaataaaaggtgagccaccagagggcaccccaggcataattaaattgctcaggaattctccccccttccccactgcgcaccccaattctgaactggatggctggcaacccgccaagggtaggtctggtcaaatgtgcagttagaggtcagtgctggtgcggccccgccccagctccacacccctccccagctccaaaacccctcccctgagtgtccttcggtttttcccgcaacctcggcctctttgcaccctaccacccctactccacacacatgaacaggtgcacacaacgcacacacctgcacacacacgcacacacatgcatgtgcacacacacacccctgtaatcctgcccttccgcctccatctccaggggacaggaccaaagcgagtacggtttctctcatggtcccctcatcaccagtgctctttgggtcaaagaaccaggcagcccagccttgtcccctcgggcagcttgatgtcataagaggaagatgtggagaagctgcgggggcctcgcagcctctgcagaagtggtaggggccgctgtatcaaccaagatgcggcagcctacgagcctgaagtcaggtgcagagaccaagacgacctgcaacwccatttgttccatagagctgtgcttaaaattgccaattttctcaaaattggtgagaagtctaatgcagccctgccttagaaatgtgtatggtgactggccccaaacactctgtcatccttgcccatggctagcctggcacccagtaattccacatggacccttttgctgtggaagcccacgtcacagcactgaggccagctgaacctgactgtgactggacgggaccgcattgttctatacacatgaaacttgcaaataccgggatgctgctgcattgtccccggggtgacatggggctgggagtcagttgcagagagatgacccttcaggccacgtgtgggtgaaaccactcacagagggccaggcgcggtggctcacgcctgtaatcccagcactttgggaggctgaggcaggcggatcacttgaggtcaggagttcaagaccagcctggccaacatggcgaaaccccatctctactaaaaatacaaaaattagccggacttggtggtgcacgcctgtagtcctagcttctcaggaggctgagcagtagaatcacttgaacctgggaggtggtggtttcagtgagccaagatcatgccactacactccagcatggccaacagagcgagactccatctgaaaaaaaaacaaaaaaacaaaaaaacccactcacagagaccaagtggaatgggaaatgtgagaagagaacagagctcaaggaacgaggccgttgaagtcccaagtcctccacatgcagcagggccctcactggtgagagttccccaagagggaggcgaacagggtagacaaactccagggctgtgcagtgaagccttctttcttttgaaaggattttctgcagttgccttccctggaatacttaggcttaagtttacatggggctggtcaatttgcttacaaagacccatagctgttttccatcatatttctgtaggtggtatttaatgaaatttctccatgatgcttctaggagctgatattgtggagtatgtccctacacctacatcatttctacttctgctgaaaatgttttgacaaggatgtgctcac

SEQ ID NO: 43253 - DNA, 1265 bp, Homo sapiens
tggaacttcaaaactgaataatcaaggtgcaactagatacataaaattaaaccccctttaaacattaaacctcagataattgatttaaattcatttggtctactcagtgattcattctaaaatttctaactgctgttagttttcagatgtcaaaatcaattactttacttaaatgagctgggctttctcttgtggccatagttgccatttgcctatggggagagaaaaggtggaaagaggtaaaggatttaggagcagcatgtggaaaacggtctcaatttttacagcaaccacatttgggagggctttagacctcctttagaggctatggttaagaccttaaattggtgcagctgggtgttggagcggctcacttttctaccccgtgacaaagaggaagaagaagaggttaaagtcggctttaatgccatgtctatcagtgccgtcccaaatgccacgagcttagtgtccttctggctgcctgggctggaaagcatctgtccggaggggacggtgcccaatgacatcttggtccaacgatggcacgagtgccaagttaggaagacaggctccacgggcaggctgagaaccctgttggcagcatccttgagcgcatcccggatgcgttctctgtgcgcygggcatcagggccgccaactgctccagccacactgctgcaattcgatggcacaaagcggtgagtccacggatgctttgcccacgaagacagggagttctgccctgtaaccgtggctggagcgtggggatggtaggcactctctggagagagtggcgacccaggatggcagtcccaacggctgagggcagtgagccctgcagccatgctgtgcccacacacccagggagttccacagcgctgggcagcagggactgctcgaggcccatcgtggcgatgtgggacaaaggcacaagaccgaacgtaggtgtgcagcctccagcagagcctgggaggactcggaaacagcctgtcacgggtcccactgggctctggccagaatttcactgtaaaaaaagtgctcagctagcatcactagcacagaatgggacagcaaccttttcctaggtcagcaacaaggtaggggttaaaaacacttttaaaccctgcagatcggggttgaaaaccctttgtcaaagaaccagtggagagcggtgattacaaggcagttggaccagtagaggcgttagggagaggacccgagtggcaggaatgcccagcactgacctggcgtgtatctggaaatgca

SEQ ID NO: 43254 - DNA, 541 bp, Homo sapiens
acataaggaacraaaggattcaaatgttaccactacagaaaaccagcaaacaataataataaaaaataaaagagaaggaaaggaacaaaaggtatccacaacagccagtaatcaattataaaatgacaggaataagctctcaggtatcaaaaataaccttgaatgtaagcaaattaaacttttcaattaaaagatacagattggctgaatagattttttttaaatgacccaaccatatgctgcctacaagaaactcatctcacctgtaaagatacacatggactgaaaataaagagatggaaagatatttcatgcaaacagagactaagagtgagaaggaatagctatatataaatcagataaaacagactttaagtcaaaaacagtaaaaagagacaaaaaagactctacagtggccacaagtacaagcaaacttgcatgacttctagattcttaaattgcagaaataaggaggtgattactagtttccagtaaggacctgtcactgcagaaatttacaatggaagttctttaaatatgt

SEQ ID NO: 43255 - DNA, 566 bp, Homo sapiens
tttctttgtttgcttaaaaaaataaacatggaacatgaagcaataacttttgaattgtctgcaaaattttattaatttgcttttggatataaatttcactttctgtttctatttacatttcataatttaaaattacataatttttgaggcctctgcaaatcttctcccaaggaactctaattacatgaatagcttttttttccattgcctattgggctccttatctttctataaggaaaaaattcagataccagcatatcacacgaagctcatcaaaattcgatactaacccattttatcaaatttatcgtcaactactctacaacattcccatccactaattcatgtatttattagcacccctaaaatactgactgtrttatttttagcactaatgtcatatctataacaaatgggatatttgttatttgtaatttgtacatttacctttcttttcacattcatttttttttgccattaccatgatctttcaacttattttgttttcttattcttctagggtttgtttatactcatatttttaaatatccttatgcttctaccat

SEQ ID NO: 43256 - DNA, 566 bp, Homo sapiens
tttctttgtttgcttaaaaaaataaacatggaacatgaagcaataacttttgaattgtctgcaaaattttattaatttgcttttggatataaatttcactttctgtttctatttacatttcataatttaaaattacataatttttgaggcctctgcaaatcttctcccaaggaactctaattacatgaatagcttttttttccattgcctattgggctccttatctttctataaggaaaaaattcagataccagcatatcacacgaagctcatcaaaattcgatactaacccattttatcaaatttatcgtcaactactctacaacattcccatccactaattcatgtatttattagcacccctaaaatactgactgtattatttttagcactaatgtcatrtctataacaaatgggatatttgttatttgtaatttgtacatttacctttcttttcacattcatttttttttgccattaccatgatctttcaacttattttgttttcttattcttctagggtttgtttatactcatatttttaaatatccttatgcttctaccat

SEQ ID NO: 43257 - DNA, 554 bp, Homo sapiens
tgggtcaaaggatgagcacattttaaattgtagtatattcttacatgttcctttcatataatayattgcattttaatttttgttttattttacataactgcttcctcactaggttgaattgccagagggtaagcactcttctatttatctatgtagttagcaacaaacattttttatttttttaaattctgaaaataaaaggtttgattagtcagccatattaacatgaccgtattgttccttttctactcccttgtactccatcttaattgaaaacaccttccttaggactgaagctgtcatttgttcttaccttttcttaacatccacaacccctatagtgtgtcacagatcaatgatttgttcaatgctgccctataatcttagctgattatttgtgcacttttttgctgttgtgaatccatattgaccacattttctaaatgatcattctgttcactgtgtattggggatacagttaaaggtacgaggcggtagctttcaactcggccacacattggaatcaaatgcttgggctccacctatgtctgatt

SEQ ID NO: 43258 - DNA, 554 bp, Homo sapiens
tgggtcaaaggatgagcacattttaaattgtagtatattcttacatgttcctttcatataatatattgcattttaatttttgttttattttacataactgcttcctcactaggttgaattgccagagggtaagcactcttctatttatctatgtagttagcaacaaacattttttayttttttaaattctgaaaataaaaggtttgattagtcagccatattaacatgaccgtattgttccttttctactcccttgtactccatcttaattgaaaacaccttccttaggactgaagctgtcatttgttcttaccttttcttaacatccacaacccctatagtgtgtcacagatcaatgatttgttcaatgctgccctataatcttagctgattatttgtgcacttttttgctgttgtgaatccatattgaccacattttctaaatgatcattctgttcactgtgtattggggatacagttaaaggtacgaggcggtagctttcaactcggccacacattggaatcaaatgcttgggctccacctatgtctgatt

SEQ ID NO: 43259 - DNA, 554 bp, Homo sapiens
tgggtcaaaggatgagcacattttaaattgtagtatattcttacatgttcctttcatataatatattgcattttaatttttgttttattttacataactgcttcctcactaggttgaattgccagagggtaagcactcttctatttatctatgtagttagcaacaaacattttttatttttttaaattctgaaaataaaaggtttgattagtcagccatattaacatgaccgtattgttccttttctactcccttgtactccatcttaattgaaaacaccttccttaggactgaagctgtcatttgttcttaccttttcttaacatccacaacccctatagtgtgtcacagatcaatgatttgttcaatgctgccctataatcttagctgattatttgtgcacttttttgctgttgtgaatccatattgaccacattttctaaatgatcattctgttcactgtgtattggggatacagttaaaggtacgaggcrgtagctttcaactcggccacacattggaatcaaatgcttgggctccacctatgtctgatt

SEQ ID NO: 43260 - DNA, 584 bp, Homo sapiens
tgtaatacagctgtggctagtgatggagctagatttataatccacatcttttggctgggcaacggtggctcatgcctgtaatctcagcactttggggggctgaggcaggaggactgctggagccaggagttcgagaccagcctgggaatcctggtgggtccttgtctctacaataagtaaattaaaaaaaaaatagctgggcatggtggcatgtgcctgtggtcccaactattcaggaggctgaggtgagaggatcactgaagcttgggaggtcgaggctgcagtatctcatgattaagccactgccctcctgcctgggcaacagagcaagactcttaaaaraaaaaaaaaaggtctgttattgtctactagggtctgaccacactaaggttcggaagtttccctggttactgttaattccactaattcacatgaaactatgaattatatttaaaatgttgcatatgacaattcttccttcttttccatttaaatagctatgaacaaagaattttttaaagctaaggataagctcttttcctattatctgcagacttaaactgaatatattcaaaaaagccttg

SEQ ID NO: 43261 - DNA, 563 bp, Homo sapiens
ctaaataaattattgggaaattcaatgcaattattatgtaaacactataattatgatgagcagaaaatgaggaaaaataaccttttgtagtaacacaaaagccttttctagtaacacaaaatgctgttcgtgttacaaatatgatggagcagagacaggagtttattttgtgacttttcaggagagatgcattttaatgaataaaacgaatggcatttcttttaatgcatggatgatggggtggagttgaaaaataactgagcctaagtctaaaatgcagagattttttttcctggtagcaaactattttctctaattaagtaagcctgataaacactctttaattgattgctaaatagatgactttacttcaaccacatgagtagtttatatgtaagtgaatggacctgcctgcttcaggaccaaactgctgccaaattagaatatttctagctctggccttctacaaaatcaaggagagaagtaaagactgtttcctcggtcgggcacggtggctcacgcctgtaatcccagcactttggsaggccgaggtgggcggatca

SEQ ID NO: 43262 - DNA, 561 bp, Homo sapiens
attgcytccttaaaccttttgtaagcaaattctttgttcttccttgcacttacctatttaggaaagttttaggctgttagcaaattgggtgtcagtttcagaatatgaggtccagctccagccaatggatgcaggacacagcagtaaggacaacccaaatgcatagggataaatatgcctgcttttcctttgttcaggtgtgctctcgccattgttccatctgcgactgagcaccctttctgcagaaagtaaagattgccttgctgagagatcttttgtctctgtactgtcttttctttgtggcaccaattatctatttctaacaattttggtatttctaacagggagttattggttaataggcatagagtgtcagtttgggaagatgaaaaagtcctggagatggcacaacaacgtgaatgtatttaatgtccctgaagtatatacttaaaagggttcaaatggtaaaatctatgttacattttactataataaaaaaagaataggaggcagaaaagcaacagacacagaagcaactaatacaaggaatacatagagctg

SEQ ID NO: 43263 - DNA, 561 bp, Homo sapiens
attgcctccttaaaccttttgtaagcaaattctttgttcttccttgcacttacctatttaggaaagttttaggctgttagcaaattgggtgtcagtttcagaatatgaggtccagctccagccaatggatgcaggacacagcagtaaggacaacccaaatgcatagggataaatatgyctgcttttcctttgttcaggtgtgctctcgccattgttccatctgcgactgagcaccctttctgcagaaagtaaagattgccttgctgagagatcttttgtctctgtactgtcttttctttgtggcaccaattatctatttctaacaattttggtatttctaacagggagttattggttaataggcatagagtgtcagtttgggaagatgaaaaagtcctggagatggcacaacaacgtgaatgtatttaatgtccctgaagtatatacttaaaagggttcaaatggtaaaatctatgttacattttactataataaaaaaagaataggaggcagaaaagcaacagacacagaagcaactaatacaaggaatacatagagctg

SEQ ID NO: 43264 - DNA, 954 bp, Homo sapiens
agaagaagttcaagatgactccagagctgccgcatggtcagatcatgtttagggacaggaggaggaaagtgaggcccagaaacaactgtattggctagagcttggtgtttgccttattcaaacatggtttaaacagctggctggctgtgattagccagaaatctgtgattggtacaagagtaggttatagtctgtttacacatccatttattattacgttacagttcactattctatgtgaggctgaatcctttatgtaaggaggcagctttaggctaaacttaatctaacaataaccagaccagagaaaagcccactacaagaattctaatgatggagacaaaggcctgagttagggtggtagccacactaaaacaaacaaaaacaaaaacaaaacaaagcaagacaaaaaaaacagttgtaaaagtgagagacaagacatgtggtgttttaatcttccaggctgccataagaaaggatcaccaagtggctagtgagtagtgggcaaaagttctgtcttaaaacatyagaaatgtattcttttacagttctgagggtagcagttcctaatctaagtgtcagcagagccatgttccctccaagcattctggagaagggtctgctctctcccagctgggtgttgtcagcagtccttggcattccttagttggagcttgcatcactccattttctgactccatctccacatggccttcttcccttcgaatcagtgtccctgtatccaatttccttttcctctctcctataaagacaccattgaatttaggccccaccctaatccactatgaccacaccctaattaattatatcagcaaatctctatttccaaataaggtcatattcacaggtaccaaagttaggacttgaacaattcaacccactttatgtagtatccacaaacttgaaaaatgctaacatgttgggagtcataag

SEQ ID NO: 43265 - DNA, 576 bp, Homo sapiens
catcttttctggtgcttatttggccatttgtgtatcatcttgggagaaatcactgttcagatcctttgccagtttttaaatttaattgtcttttcattattgagttgtgagtggtctttatcttctaggtaaaagtccatgatcagatatatgatttgcaaaaatttcccattctgtggttttctcttcacttttttgatactgtcttttgaagcatgatatttttaaattttgatgatgtccaatttatctttttttctcttgttgcttgagttttgggagtcgtatctaagaaaattgcctaatctaagggcacaaaggtttacatctgtgttttcttacaagactgacgtattttttatttttatcccatgcatttaggtctttgatctattttagttatttttgtatatggtgtatttattttttatgttttttttttttgtttttttttttaagagatggtccctcactcaaactccggggctcaaacaatcctcctgcctcagccttctgagtagstgggactaccggctattttttatcttagttttttattttagtatttctcaatac

SEQ ID NO: 43266 - DNA, 508 bp, Homo sapiens
caacgtatgtatcaaattccactttgggcatatggataaccatttatgcccacacaatgtattgaatagattttcccttctccactgtattgcctttgtatatttctcaaaaattattttttgaaatatgtgtgagtatatttcttaaaattccattttatttcattgatagatctatcgatctatcgatctatctatctatctatctatctatctatctatcattatgccagttccactcaatgttgattattggagctttatatgagtgtagaaattacatattgtggtcagagaacatagttcgtataacctgaatatttgtaaatttaccaaggtttgttttatggctcagaatatcatctatttgtgtaaatgcccactgtgcaattgaaaagagttatattctgtatattattatgtattttattttatcttctgtatattattwttcctgtgtattatttttgaaacaattgtaggttcacagaaacttgcaaaaatgtac

SEQ ID NO: 43267 - DNA, 593 bp, Homo sapiens
ttgaaaaataatgactttaaaatgttatttacttctattatgttgggtcatttttaggtatgattcttcctactcaggaatatcaacaataatacaccatacatgtttcatagctattataaacagtctatttctattgtaatgtgctttatcctgtatagtaatacagggggagggagatcagaatgaatgaaacccataaatgggtgtcaaaacttttttttcttctcctttatctcctgacacattctcwttaaaatatgaagcaatgatcaaacatagatttaaaatgataggaagtatgctaaattatttcattttagataataaaggcaaatattagctttgaattacttattaagtggaaatgattattttatcttaatagagttttaaagcaaagtgagaacatttattgctgccttgagtaggaatacacatacatgcacatgactgcgcacttgtgcacacacacatgcgtgtgcacaccctaactttcagtaaaatattttcttctttcacctgaaatctttattgcattaacttatttaaaaattttaaattgcaatagctctgcttttggccattatata

SEQ ID NO: 43268 - DNA, 533 bp, Homo sapiens
ctcagaggaaagacatgacaaagccaagatccagcgccatattagcaaacactggagggtctaccgctgttggtcaggagtgtcgcctttatgtacatgtaacccaacctccaaaaaagtacatttgggagacttcacatttttccctaagtaaattacccagagaacttcattcatcaaaaagtaagagaaaatgttctttataggttatttaatcactaatctcaatgaatattttatctaaatttaggagacatagtagcttcattatttataacccagtagtcatgtttcaaaatcattattgcaattactttttgmttctttacataattaaagctctaatattccatcttgcccagaaggtcactactaaaactcgagacaagataattgctgaaattttaggtgggtgcttaaggtacatcgagggtcctggtggtgaccctagccagagcatacctggcaggggaagtgttaccaccactgctgggagcaggggagccagaggcaaaaccagagtccaaatcctg

SEQ ID NO: 43269 - DNA, 547 bp, Homo sapiens
tcctatttaccctctctataattttaccatttccttgtaacacctctattagtcacttcatatgtgtctttaaattgttttcacttgatgattttatggaaaacttcatatcactctcataaatagaaaacctttatcatttggcataaaatacacatctattttttactaaatctttatccaagtgtcccaataggagatgctgccacagcaggatctgttccctctgtctgaaatgccccttcctctcttcttcaccatacaaacttctgctcatccttcaagacccaaatctaagtgacccctcctctttgaatagggcccttggctacckaacacttaaattgtaactggtccaaattgggttcagccgttaagtgtaaactgcgtgacaaattacgatgatttatttaaaaaaaaaaaagattatttaagtgactgtcagccggatgcagtggctcacacctgtaatcccagcactttgggaggccgaggccaggagttgaagaccagcctggccaacatggtgaaaccccatctctactaa

SEQ ID NO: 43270 - DNA, 570 bp, Homo sapiens
tttagtccatgggaaagttgatgctagtttgctatggcaagagcaacagagtgggaaaagaagtgaatgggtttgataaatatttaaaaaataaatgtaatagaatttgatgataagatttatcaccagaaagagagagagagagaggtgtcaartatgagatcaggtatgatttccagatatttgacttgaaaaggtagggatagataagttcaccaagttagataactttaagactcagagtgaattgattggtgttgaacaatgtaggattttatgtgcccatttgaggcagttgtgatggtcatggattttgtttctagcatatgtaaaggattacttatgttatttttgaagtttaaagtttggtaacagagaacttgcctagaaaaagatggtggtaaggatttcttaattttctagatcttcttgggaagaaattcatgaatcgtgaaggcactcaaagtgagtcagatcgccatctggtgactatttacagaaatagcagacacatgctccctgggtacatacttataactaacatttattgagaaattattaatgcctgga

SEQ ID NO: 43271 - DNA, 977 bp, Homo sapiens
tagatatttgtcctaaacctctccctccacttgacccccatccccggacaggcccccagtgtgtgttgttcccctctctgtgtccaaagcttattcttttctttcataatttctctgaattaaaacactattgtatccataactttaaatattttatattctggtattgagcaagtagatgacctttattagattagggagtggagtactaaaagatagtcactctttcatgaaaagaatgcaaagcagaaagttcttgcttctgttgaattttgtataaggatgtctttgtccagctagtgaactgtattacattttgacaccattgcatatctggtatggttttttgaggtaggaatataaaattaataattaataattttgacaaagtataattttttctttgtttttgactgagcaatgatcaaatggatagattactcatgctaatattttgtaatatctagatatttctataaactaagaataagcatagacaacagcagattgtcccagatcatcattattaatataatcatcgtggattactatataaggtcaagatgtcaattcttcacaaattaacttatgggcttgatgcaattctgcacaarattatatgattatctggaacttgaggaaatcttattaaaattcacctagaagagagaaaaagcaagaagagctaagaaaatattgacaaaaaaagtaatggatggaagccttgtcctatgaactgttaaaaactagaacaattcagtgatgaaaaactgtattttaactgtcaatttaatgtatgtataggtatgtgaaatctcaataacatgtatatgaaaaaatattcaaatctaactaaatcctagtcttcaagtatctatctgaaagtctatctttcatctatgtatatttagaacatttaataaggaaatatgcaaggaccatataaaagatctacatcatttattgagtgatataaa

SEQ ID NO: 43272 - DNA, 977 bp, Homo sapiens
tagatatttgtcctaaacctctccctccacttgacccccatccccggacaggcccccagtgtgtgttgttcccctctctgtgtccaaagcttattcttttctttcataatttctctgaattaaaacactattgtatccataactttaaatattttatattctggtattgagcaagtagatgacctttattagattagggagtggagtactaaaagatagtcactctttcatgaaaagaatgcaaagcagaaagttcttgcttctgttgaattttgtataaggatgtctttgtccagctagtgaactgtattacattttgacaccattgcatatctggtatggttttttgaggtaggaatataaaattaataattaataattttgacaaagtataattttttctttgtttttgactgagcaatgatcaaatggatagattactcatgctaatattttgtaatatctagatatttctataaactaagaataagcatagacaacagcagattgtcccagatcatcattattaatataatcatcgtggattactatataaggtcaagatgtcaattcttcacaaattaacttatgggcttgatgcaattctgcacaagattatatgattatctggaacttgaggaaatcttattaaaattcacctagaagagagaaaaagcaagaagagctaagaaaatattgacaaaaaaagtaatggatggaagccttgtcctatgaactgttaaaaactagaacaattcagtgatgaaaaactgtattttaactgtcaatttaatgtatgtataggtatgtgaaatctcaataacatgtatatkaaaaaatattcaaatctaactaaatcctagtcttcaagtatctatctgaaagtctatctttcatctatgtatatttagaacatttaataaggaaatatgcaaggaccatataaaagatctacatcatttattgagtgatataaa

SEQ ID NO: 43273 - DNA, 977 bp, Homo sapiens
tagatatttgtcctaaacctctccctccacttgacccccatccccggacaggcccccagtgtgtgttgttcccctctctgtgtccaaagcttattcttttctttcataatttctctgaattaaaacactattgtatccataactttaaatattttatattctggtattgagcaagtagatgacctttattagattagggagtggagtactaaaagatagtcactctttcatgaaaagaatgcaaagcagaaagttcttgcttctgttgaattttgtataaggatgtctttgtccagctagtgaactgtattacattttgacaccattgcatatctggtatggttttttgaggtaggaatataaaattaataattaataattttgacaaagtataattttttctttgtttttgactgagcaatgatcaaatggatagattactcatgctaatattttgtaatatctagatatttctataaactaagaataagcatagacaacagcagattgtcccagatcatcattattaatataatcatcgtggattactatataaggtcaagatgtcaattcttcacaaattaacttatgggcttgatgcaattctgcacaagattatatgattatctggaacttgaggaaatcttattaaaattcacctagaagagagaaaaagcaagaagagctaagaaaatattgacaaaaaaagtaatggatggaagccttgtcctatgaactgttaaaaactagaacaattcagtgatgaaaaactgtattttaactgtcaatttaatgtatgtataggtatgtgaaatctcaataacatgtatatgaaaaaatattcaaatctaactaaatcctagtcttcaagtatctatctgaaagtctatctttcatctatgtatatttagaacatttaataaggaaatatgcaaggaccatataaaagatctayatcatttattgagtgatataaa

SEQ ID NO: 43274 - DNA, 601 bp, Homo sapiens
tgtccccaagttggacattcacaaaggccgttattgccgtaaaggctctgacaagccctatagaaaagcttcttgctaaaccttctttaacccatgttttctaaacttatttgaccacagaacccttttcttggggaacagctattaacccccaaggaattattggttcctcaagtgcgttttgggagctgctgccagagagctaaagggcctggggtgtgagctgactctcckctggggaggccgggtgcacacgccacagcccgaggaaagtgctggccaccgcccgtgggcatcgatgaggctttggcccccaggggccggactccgtgtgacctaataggtcgtttccaagtcacccgttttggatgtgcatttcatgtgacaatacagatgacatgcaaatggccctctcccgtgtggctttttccttatgcaattcaattgctctggatgcattcaccttattaacatggaacgggcggaggggtggggtaattcttcggccctagacagtgccatgatgccagggatcgggggctctgggcacagctggcctgctcctggactttaccaggctggccagtccctttgccctggg

SEQ ID NO: 43275 - DNA, 1234 bp, Homo sapiens
tggctatttaggtaatactacaattttacccattctgaacagataaagagcaaagatttaatctaatacatagaccatcaataagtaattattggaagcaaatctccaccaattgtttaaattatggggcttcaccaaaaaattaacaacaatgaagcaccaaaattttctatcaaaatcttgtgctttatttgctaaaggacactagcatttaagctttttggtctactgtaggaaagacttttgtgtgttttgagcagagcctagaagagtgtctggcatatagtgagtgcttgtgtcttgattgagttaattaatgtacttaggagcagtcttctaggagaacctaagctattgatccaatgaacacaaagaggtctgctatggagaaatcagcatgaagttgtttagtcccatgcttctcaaactaataygatttgtaaatcacctcatgttcttgttacattgcagattctgatttaataggtctggtctcaggcctgggattctgcatttctaacaagctctcagctgatgccaatgcactgtaatctaagccatagtttgaagagtgatggtttcctcacttcttcaagaaactggcccttactccttcttacaacgtaacactggagactaatcacattataaaaatgacaaattctatgccagagatattaaagtaagtcaagtacaatgcaaagtgattcttcatagttctcttttgtaaattgtacttggtagaactttgtagtcatggtgtgtttataaagcaatgaagaaagtgtgtcctttgttctaacaaaagggtcttagtcctgattgggaaatagactgaagcctgctgtcagttcacgcaattgactgttcctgctggaacatgtgaatttcctcaggtgagttcagtgaaagaatcactctgttacaaataaatacggttggtttacactttagatcctccctcagtctttcttccccaaactaaaactttgggttttgtgtgtcttttttttccctttatctcctttaataagactttcctatttaggaagtttttagaaagtgtacaaatttggcagagctgaccaaaatttcttttgtatgaatctagagaaagtaaaatgttttgtgttggcagaactgtaacccattccaaacttgtggaacagataagagctataaaatatagtcatctggaatgaagtaattgttcttgggatgtaatgtgccaaag

SEQ ID NO: 43276 - DNA, 519 bp, Homo sapiens
tgggttcactccattctcctgcctcagcctccctagtagctgggactacaggtgcctgtcaccacgcctggctaattttttgtatttgtagtagagagggggtttcactgtgttagccaggatggtctygatctcctgacctcgtgacccacccgcctcggcctcccaaagtgctaggattacaggcgtgagccaccgtgcccggccgaaggttgtccttttaaccaggtagtcacaacaccctttgaagtagggactgctttattccagttttatcagtgaggaatctgaggcacagattaaatatttacccaagatcacacagcagtacactgggattccatcccaagctgccttgctcaagtctgtactctgctgtttgaagaaacctattcctattttaacttcacccattcaactgtgacatgcttggagaaacatatctgcaagtggagaaggcctcagagagtcacagtggaactgaaccattggcaccagtccttctcggtagtttttttt

SEQ ID NO: 43277 - DNA, 545 bp, Homo sapiens
tatattcacacaatagaataaagttattaaaaataacattgtgaacttgtttctgggaaagcaaacacataaggtgccaaaaactaaagagaaatatatgtgttgatggtggccttctgaaaggagatcttttaattttataacagttagtgttattaatgtgtgtgtgtatgtacaaaatcatcaaaagaatagatgagaaaaaaatactgtgatgatgaatactccaaaacattgagtctttagatgwctccatccctaacggacatctgattgcaacttcatgaaaggccacagtcagaaactgcctatctgagcccagtcagctaacagaactgtgagagataataataaattattgttttacaccgctaaattttagggcagtttatgatgcaacaagagataactaaaaccatgtttatatttcctgtgatttacataacaaattaacacaaactcgggggcttacaatactatttattttctcacagttctggagaccagaagtcagaagttaatattatgagactcaaatcaaggtg

SEQ ID NO: 43278 - DNA, 550 bp, Homo sapiens
agggcaggagaagttcagaggaaattacttgcttctaagtccctttcaatttccttgagttcaaaatactcagcggcctaaggtgacatactttgggatattgtgttctgagttccagtatctgcatgccatgctcttctgggaggatcaggaatattctgaagcatcaccatcaaccaattgcttttccatgggtaacaacattggatgggtttgtctgggcctggctcaaagtggattgcaattaggagttaggaagactgtaccctttttcakaaaataataaagtaaaatcttacaggagtatacagagtaaaatgtcaaagttcttcctctcaattgaattctactttacagagttaactgctattaaaagattgatgtgtatccttacagaataaaaacatagttattaaaaaaaatttatttacaattcatgcaggtttgaacatacatgtttttctataatttgctattctatcatagtgatatatcaaaacttattttcaagtcatacatgtgtatctacatcacacattctttataataa

SEQ ID NO: 43279 - DNA, 1113 bp, Homo sapiens
cccctgaaaagaagacttgtcaaatattttgttttaatcttccaaaatcttggaaaccagaggtctctaagtgaataatctacttcaaggtatggcttctacttgtcctaggccaactaaagccaaatacagtccattccatgctcagtggctaagcctcataaatgtggcttcttggactttccttctttatacatctccctttttctcagtatcttcttcttacccctgtactttgtccctcagatgctaagaagtacctgaacaacagccattaatagtaaaactaaaattcattctaacgtattgtttcaggaagctatctgcatagttttcacaaatttgtatatgtgtactgacttgtcctttgaggtttactggttgttkttttttttttaaatgaggtaagtgggggaaaaatagagaagcagatattgcaaatgattaggttacaattaagttgcaattacatcttctaaattcccaatggcaaaactgcaaaatgttaaaatagtcaaatcttaaatatcaatgtttaacagaaggatgccacatgcctatgttttaatctggaggaagaaaattaatctaataactatttaaaatagttttctacccaattgatatggtttggcttcgtgtccccacccagatctcatctcgtaatacccacacgtcaggtgttgggaagggacttggtgggaggtgattgaatcatggggatctgttcccccatgctgttctcacgatagtgagggagttctcatgagatctgatggttttaaaaatggcagtttcccctgcacgcttctctctctcctgctgccatataagatgtgccttgctttcccctcgccttccgccataattataagtttcctggggcctcccagccatgaggaaccgagtcaattaaacctcctttccttataaattacccagtctcaggtggtatttttatagcagtgtgagaacacactaatatgccaattttcttctactccattttctgaggaactgattgagagaaagaagagtcctacctatgggtcaaaagatttttgtaaggatataaaaatgtatgccaactataagtctgtgtatatatatata

SEQ ID NO: 43280 - DNA, 496 bp, Homo sapiens
gaaatctgttgaagggttgattaaaaattgacagtattgagaatatttatgtctataaaattaaggccgctgtaagcattgatgggggaaaggactaacttaaaagtgtaatgtattttcatatgaaatgttaagaaatcattttagtttattttagggaacatactgtttcatattaaacacttttaaaatataatttwaaaaattatatttgtattatgtttcttttcttagcaataattaggaaattatttttacatagtaatgtgtaagatggttttattttgggatggtagctgttactgagttgggttttttccccccttcaaggtgtaataatggtatgcttagttgtaaaaattccttcatttataagatacgtggtagaataaaatacttggagattaaatgttatgatacctaacactttcaagtggtttggtgaaacctagcagctttgtgtgtttgtgtctgtagagagagaacaaatatggct

SEQ ID NO: 43281 - DNA, 649 bp, Homo sapiens
tgatcatcgttaaacaaccatgcgaacacacagggttccgtctggcctaaaccgcaggttggtggtgcggaggagggcaggcctggtgatgctgagggaagcagaaatggcagctccaagctccattactttctcaacgctccccgatcctctttagtctggtggtccactttgatttctgatcttcctccagatctaatttttttcttagcttttctcctaagttacattaaacatgaggccttgtgaaaacttgacttcttgacttctcccctcagtttcttcttcagtgaaatgtgtggggcatggagaatgagayagaagtggggtcttggcccctggacccagctggacacctctgcccgcttaggtcattgaggaactaagctgtgacatgagtacgcaaagaacctatgcctgagctcttctcaaaaatgccaggctgggagccctcggcctcaggaatgctgggtgggagagtgaatcccacatcccccaattttgtgggtgcagtgaggggctggaaggccacctgggccccttcctaactgtgtgaccaggggcaggcttttccagcttccaggtctcaggttcctcatctacaaagcagagctgatgggggttgaaggaagtcaataccaagtggttg

SEQ ID NO: 43282 - DNA, 743 bp, Homo sapiens
ccctagcagggtcaccccaactctgggcagtgatggggcctgcatcaaaggtcacgttcccccacgagtcccatcacttggaacagggtcatttaggccccatgggggagtgtcccttttatttgakgtaacacccaggaaagccggcttagtcttcttggcactggagcctgggatgctgctcactggtttagggaggggctcctccctgagtgccccctaagttttctttttctcttttcttttcttttctgtgtgtgtttttgagacggagttttgctcttgttgccccaagctggagtacaatggcacgatctcggctcaccgcaacctccgcttcccgggttcaagtgattctcctgcctcagcctaccgagtagctgggattacaggcatgtgccaccatgcccagctaattttgtattttttttagtagagacagggtttctccatgttggtcaggctggtcttgaactcccgacctcaggtgatcctcgggccttggcctcccaaagtgctgggattacaggcatgagccactgcacgagtgcctcttaagttttgtaagaacttcagcaccaggggatatggctggcaggggcctaaatgctcttctgacagattaatgcaggtgtcctttccaagttttcattgtcaagaaccacacgtccggctctgcagaatgacatcccatagtcaggaggaaggactgggagatgcaaacagcctggggggcagggcat

SEQ ID NO: 43283 - DNA, 570 bp, Homo sapiens
gggaacgggcatttttatttgtccccatcgcccgggagcctggtcggttgtgtcgcttctcaggcaataagcaactgaatggactggcagtggctcttcaggcttttaggtttgctaaaaacaaaacaagccaaaaaagatgygcctgacttcctctcgtggccaatggcactgcccaagggagcagcggttcctggggccacggtggaggatgcccacctgttcagagtcccaagaagccctgaatcggcaccttgcccaccttgcagcctgtcccccgggagcaggctctggagccccgtttcggggaacgctgagcacacctgaagcctccacgtggggtgggcagtgctggccgtggctcctgctggttccacactctgacatgcagggccttggctatgtgtgtcctccagtgaggcacaccccctccagcggaggggcatcctcgtttcctggagcaccctctttccattctcccatgtttgtttttcttttgtttattccacacctttttcgggtagtgagtaagcctgtcccagccgcccttgaaggtgccagtgggtgctc

SEQ ID NO: 43284 - DNA, 570 bp, Homo sapiens
gggaacgggcatttttatttgtccccatcgcccgggagcctggtcggttgtgtcgcttctcaggcaataagcaactgaatggactggcagtggctcttcaggcttttaggtttgctaaaaacaaaacaagccaaaaaagatgcgcctgacttcctctcgtggccaatggcactgcccaagggagcagcggttcctggggccacggtggaggatgcccacctgttcagagtcccaagaagccctgaatcggcacctygcccaccttgcagcctgtcccccgggagcaggctctggagccccgtttcggggaacgctgagcacacctgaagcctccacgtggggtgggcagtgctggccgtggctcctgctggttccacactctgacatgcagggccttggctatgtgtgtcctccagtgaggcacaccccctccagcggaggggcatcctcgtttcctggagcaccctctttccattctcccatgtttgtttttcttttgtttattccacacctttttcgggtagtgagtaagcctgtcccagccgcccttgaaggtgccagtgggtgctc

SEQ ID NO: 43285 - DNA, 570 bp, Homo sapiens
gggaacgggcatttttatttgtccccatcgcccgggagcctggtcggttgtgtcgcttctcaggcaataagcaactgaatggactggcagtggctcttcaggcttttaggtttgctaaaaacaaaacaagccaaaaaagatgcgcctgacttcctctcgtggccaatggcactgcccaagggagcagcggttcctggggccacggtggaggatgcccacctgttcagagtcccaagaagccctgaatcggcaccttgcccaccttgcagcctgtcccccgggagcaggctctggagccccgtttcrgggaacgctgagcacacctgaagcctccacgtggggtgggcagtgctggccgtggctcctgctggttccacactctgacatgcagggccttggctatgtgtgtcctccagtgaggcacaccccctccagcggaggggcatcctcgtttcctggagcaccctctttccattctcccatgtttgtttttcttttgtttattccacacctttttcgggtagtgagtaagcctgtcccagccgcccttgaaggtgccagtgggtgctc

SEQ ID NO: 43286 - DNA, 1472 bp, Homo sapiens
aaccctccctcatgtagccacgtgattcagggtttcctgagttctgaggccataagttcaagaggtatgcctgattgatctaatgcagtgaygtccccagatcagcagcagcagcatcacctgataacatgctagtaatgtacattcctgggccaccgtggacttgctgaacacaggactctgtgggagcagactagcactttgtattttaaaacaagttcttcaagtgatgctaatgcatgctaaagcatgagaaccattgatctaaggggaccataattccttgctagtgattgggttaagaatggtcctatgacctgattctggccaattatatttgaagtgagaactgctatgtggcttctgggaaaagtttgcacattcctaaaaaacaggcatataaaaatatggtccctgtacatcttctgggtgttattacatctatatctgttgcagccatcttgctgcaaaccttagaataaagcctattctgagaatggcagagcaacagtgatgaaaaatcccaaggttttcatgacatcactggaattgccaaatcaacaatcctaactctagtcttcctgtctcgcgagataatatctttcagtggaaatagataacaatgaagcaaggacaaaactaagaaaaagacagggtagggatgaggtgggtagatgacatttaagggggaaagaataccaaagctctgaatgtttgcagattcagccgctcagattctctatagagtcacaagaaagagctgattactgaataatgacaaccatgtatgtttaagactatacagtaaatacaatacagaaggggaaaagaccccaccagctgcatcctcaccccaagccccgattctctcagctttgggaggtgtccccagtttcataggcaactaagaccatcactaaatattacttagacctgtgcctctcagctttattctcacaaaatcagtgattatgttagattgatgacactgggcatagagcacctgtacaggacagagttcaagcaaaccactgtagaggcaacaaaaatccctggatccagcgctgttggctgactggcagttaatgatggtgtctagtccaacgatctgtgactagaatactgaatagtcaacaaaacagactacaggggcaattatgccaaagcaggaataaaccagttggggatgcccctgcaaatacagtagctatgtgaagagcaagtttggatgtgtcattaatgtatttatttttattacatccaatacaaagttccttaaaccagtggttctgctgggactgaattttaatagtcagcaggcatttacttaaatgtccactctgcttactgaaaaagataaaagttggcaacaggttgggccttaaggctggctgacgccatttcatcatagcttggcaagtccataaactctggaaacatctaacaatggatttgtgaattcaacagagaca

SEQ ID NO: 43287 - DNA, 571 bp, Homo sapiens
gccaccacacacagctagttggtttttttttttttttttttaagagattgagagagagatggagttgttgttgtattgctcaagctggtcttgaacccctgggctcaagtgaccctccagcgtgggcttcctaaagtgctgggatttcaggcatgagtcaccacgtccatcmcatattgttagcaactctgatctgtggcactttaattcccattttatggatgggataactgaggctttgagtgattaagcctggagacaaattccaggcagagggcacagcatgtggtgtgtggaggctaaggccaaaggaacatggagagttcgaagagctaaagagaagcatcatggctagaggtggggagctggggagagtggtcagagctgaggcccagaaggcaggcagcacagcacaggcagagagaggcagagatttgcagcaaatgctaaggatgtgggacttcatcatgtattcctaacactcactgcagtgtgaggaatggattggagggacacttgcagtagttcttgggagattatggtccctggaagattgtgggtggtcagggga

SEQ ID NO: 43288 - DNA, 726 bp, Homo sapiens
tttgtatttttggtggagacgaggtttcaccatgttggccaggctggtctcgaactcctgacctaaagtgatctgcccactttggcctcaggaagtgttaggattacaggcgtgagccacttcacctgactgcctggagcatttctgtgtgcgatagagggtttcaaaggcagaaacragcccaccagtccaaggatgctggtggtgagggcactagtattaatgttagacctgttgtgctctcactggtgtctaggggtcagggctcacttgagactgaactgcctctgacctgactctaagtaccagttaggatctgaattccaaacaatgcctgccctatatcaccacctcaatttagtagtcatgacacccatagggctgcttttgttgcactggaggcagaggaagcgatggccggcccctaaattcaacccaatttttcagactaagtaagtttttctgggctggtcacagtaactcatggttgcaggatctctggcttatcctggctgtggagtttcttcctgatgttgcccttgcagtatatgttccaggtcctgaggcgctttgcccccttttcttggtcaggacagtcacgatgtagtttactcccaggcacttgaccttctctggttggcactgggatctagggctaggcacagtatctaagctagatctcacatgtgacccctggttgggggaacaaccttgggctggggacct

SEQ ID NO: 43289 - DNA, 560 bp, Homo sapiens
tatcctaagtgaattaatgaagggacagtaaaaaaaaaatactacaggtttttacttataagaggaaactaagaattgggtactcgcagatataaagatggcaacaatagacactgaggactactagaggggaatggaaggaatagaggcaagtgttgaaaaactaactattgggtactatgctcactacctgggtgatgggatcaatcataccccaaacttcagcatcatgtaatatacccatgtaacaaccctccacctgtamcccttgaatctaaaataaaatttgaaaaaaatttttttaaaatctgattacagctaatgtggacatagtaacctctgctaatctggaaagaaactgatggcagccccagtcacagttatattgaggattaaaataaatcgaggaccagattgtggatctacatcttaaggataaagaaccactaataagattaactattgaaaatatagtggttctgatttcttgacagaaaaatatgtaaaatttttgtaaacttttccctcaagctgccatttaaatatattatgttgtactt

SEQ ID NO: 43290 - DNA, 1312 bp, Homo sapiens
ataatacagccctatgaaattacttttaaaactctctaaacattttctaaatattaaagtaacatatatctgggatgaacgcaaagctgaatgggatgccagggtgagcgggcaggaaatgggagtgtggcaggcaaggcagcacatacagtaaccctaactacagcacacctctcagaaccacagctcccctgcccacccagaaatgggcaaggctttctaaggtggattggacagactgccagaacgtaagtcaattcacctagtgtgctagcccaacctccaccatcataatgtttttcattcacttaaaaatcaggtatctactgtagacagtgcactatcctagatgctcagtacacagagataaactaagacggggttcttgtccaagaaacccttgatgaacttgcaagaacaaaaagacttaaacagaacaaatgcaatcaaatgtagcatgtgatttttgagaaatctgtactgggtaggcaggggtttgaagagagactgaaatgtcaattccacctgggggagggcggccgctctgaaaaagcttcccaggagaggtgacttgagaaggatgagagagtcagtatagtgtgctggcgttgtgctagatgctgggaatgtgagaccccgtcccaacaaagcaaaaaggtactacgcaagtaaataaatgaatacctccttataaataatataattactgagaaagggaaagactaagatgtttgtgtatggaggggtgctatattgtgayaggcatttgattttcacttaaagtctccatgaaattgttctgtcaattttaaagacaagaaaagagaaatggacagaggtaagtggtttgctcaaggctgtacagaaaactaggctcagagctagaaataacctctaagccctgtaacccagggctggggctctttcaactctgttgaagggtcttccccttttcataatttcacattagggcagtatgtatttgatacatattaaatgtaatatatgtttttactttttcctctcttctttgtcaataattaaaaacataaaaacaaatatgcaatgtcattaaagaagctgataagggcagagaaaggagaaatgaggcatcttttctcatttaaaagaaatataatttttcttttttataaggttgaattttataaggttttcataaaactgttacacatattgacttttaacaaaaagaaaagcaagtcaaaaataaaggggtagatttgagataaaaaatcaaatgcagttcattaaaaatactcttcataaataaaatcataagaaatgtaaaaac

SEQ ID NO: 43291 - DNA, 551 bp, Homo sapiens
ttggctctctgaatcaccacttttcccttctctttccctccactccaacaatatacagctttcaaactagggctcaggagaaaaacaaacttgggtaaggagagtggagtattaaaaatatttcccatcagcaccacatagaagttctcccatatcaagaagaaacatgtatgcatatgtattacagcctgacaaaaagaaacacacacatacagggaataaaaagcaagaaagaacacaaaatgaagaaatgaatagggcatacaaatggcaaagaaccaacccattctggaaggatacataacccaataaaaactaaagaaaattctcaacaacttcatcataatgaagaacttgaaaacaatacaaccttataataaacaagctcaaaagcaagaagaagcagaataagatgaaaatgcagtttgtagtgctaaagaaacttagagcctayatgacttaaccaattaattatttttaattattgacttaaccaattaattaataattattaataatttaattattgacttaaccaattaattaataat

SEQ ID NO: 43292 - DNA, 524 bp, Homo sapiens
tagagatagtaagaatatcttaagtttcataaattgttaaaatgttttaaaaattaaatataaaattatgatctattggattctaaagctatagtctaaaaggtgatgtcatttggactatgctttgwtagtaaagcaaaaaaaaaaaacataatattaaacaagaacttaaattttcatatacctgtggttgcttcttttcacttctttcacacctttcttgctcttcctgtaaagccactggtaaggtttgttctgttgacaaattcattgatttagttcaaatgaactaagaagagttagataaagactataatctttataaaaataaatagagataacatttctttgtattttatattttgagagtttgaatgaaacaatgtttactgaaatatttacttctgtaagaaatacttctaattatccaaaacttcagcaaaccacttggggagacactagatatcaccagattcaagccatgcaaaatcacagggtcactcacaaattgttccacccaacat

SEQ ID NO: 43293 - DNA, 628 bp, Homo sapiens
atactgactacttacaaccatatcacaaagaatgtttttgtttttgttttttggtgacatagcaaatatatttatatgaagattcttacctaatcacatgggaactacatttgatatttcctagtttataaaaggaacaaagaatagaacagtagttacaaagcaattttaattattttttagaagtagattatgcaggtatagaagtctgatgctagaagagaaagaaaaaaaaacacttattttcttatgcagtgaaatataattctaaagccagtattcaaagctctttaaaagttgataaaaaaaaaaaaaaacttaaccacaagtcaagaaaaagggagaataagaataccatttctgaaataacaatagtaatgtttgagtcctgcctcccatcttttggaggtctgaattgtgtctgccaagtttggacaaatcaaggagagtcctttcaggcacagctaaaacttcatttaacttaagaccattttacaaaaatatatagtctgtgatattaataatgtattaatatrtaaggaattactattttagtgtgactcaccctcatttacgtgggactttttggagctttttagtttaccaaggaaagtcccatgtcctcaga

SEQ ID NO: 43294 - DNA, 576 bp, Homo sapiens
ctaagtttaacaagatttccttcttcatcgtggaggtgaaaaacccaagtctctaagatcactttagatagctgggtgaagtaactccaaagggctctacattcttttccattttaggcatgagtctcaacaatttgctgcatcgcaggctatctttcagtgtcagagacatgcttagagctaacactagtaactgggtgcaactcagcaactcagggtctctgatgacttttgttgccattgcctccgagattgtattactaggtagggattgcttccccagctttcctagagtctctcttttggatttataatttaacccaccaagcaagctcagctagggaattggaagctaaaaggaaggatyattagttctccctgagacctgaaaagcttatatatacaatcactagcattccccaaaagcactcccagggcccacaaaatatttcctgagacacattgtcatggctggtgaagtgctctatgggactcccagactcttgcaaaggattcattggcatcatccgtgagtgtcccatgcatttctctaacatctcccaaaaaatttccatg

SEQ ID NO: 43295 - DNA, 1020 bp, Homo sapiens
taaattttctccagttaaattatggcatgtctccccaaaggtctgaatcatttgttgaaaagtaaaatgatacttgagtaagagctgtggaaccaattaaaatcctaccccgcaatactaagtaaatagaaagcctcttacttgtgtcagaccaaagcaaattctaatataatgtgcatagagttgaatacagcgtactctaattttagcagccgaaatcaacagtggctgtgttgagccttcaaatcaagatatattataatggtttgccctcgtataggagctgggggtccactgcacatggaattaaattaacaaataaatgggtcttggacatgttttcaaaagaattaagaatccttcatttaaaaatgtagttgacatagtaaaggtaattaaccttttctaaattaaattttttgaaatgtttaacagctgttctttcaaaatgatacagctcatattcgatttcctcttgtattaagcgatctgtaatattcctaggatttgggggcaagtcttttctgaagtaagttaattctctcctctttctaatattcatccaatttaaaaagagtaacaaaaactctactaggaaaagaatgccaaatttcctcttattttctacaattataataatagtaatagtagtgctatagtagtagwataaatagtgtataagtagtaaaaatagtgcatttttatttgtttgttttgctatataccagatgctttaaatataggccttgaaaggatacaaagattatttcatttaatacaaaaactctgtaagttaggttatgggtatgattcccattttaaaaattaggaagctaaggctgaaaaagcttcaatcatttgcccagtgccacacagcaaccaacagtagaactgggcttagactccaggcaacaacaacttccaaacttaaacaatgaagcccaaaaatactgtgagctgataaaaaaaaaaatatgtgttattaaaatgcgtaatcaagatcttgccactggtctaaag

SEQ ID NO: 43296 - DNA, 1020 bp, Homo sapiens
taaattttctccagttaaattatggcatgtctccccaaaggtctgaatcatttgttgaaaagtaaaatgatacttgagtaagagctgtggaaccaattaaaatcctaccccgcaatactaagtaaatagaaagcctcttacttgtgtcagaccaaagcaaattctaatataatgtgcatagagttgaatacagcgtactctaattttagcagccgaaatcaacagtggctgtgttgagccttcaaatcaagatatattataatggtttgccctcgtataggagctgggggtccactgcacatggaattaaattaacaaataaatgggtcttggacatgttttcaaaagaattaagaatccttcatttaaaaatgtagttgacatagtaaaggtaattaaccttttctaaattaaattttttgaaatgtttaacagctgttctttcaaaatgatacagctcatattcgatttcctcttgtattaagcgatctgtaatattcctaggatttgggggcaagtcttttctgaagtaagttaattctctcctctttctaatattcatccaatttaaaaagagtaacaaaaactctactaggaaaagaatgccaaatttcctcttattttctacaattataataatagtaatagtagtgctatagtagtagtataaatagtgtataagtagtaaaaatagtgcatttttatttgtttgttttgctatataccagatgctttaaatataggccttgaaaggatacaaagattatttcatttaatacaaaaactctgtaagttaggttatgggtatgattcccattttaaaaattaggaagctraggctgaaaaagcttcaatcatttgcccagtgccacacagcaaccaacagtagaactgggcttagactccaggcaacaacaacttccaaacttaaacaatgaagcccaaaaatactgtgagctgataaaaaaaaaaatatgtgttattaaaatgcgtaatcaagatcttgccactggtctaaag

SEQ ID NO: 43297 - DNA, 600 bp, Homo sapiens
ataacctcaaaatggcaccaacaggaaatgagctacacaaaatatgtagctacatagtgtatgcatggccaaatgatttgctgttgatctgaaattcaagtttaactgagcatcctatatttttccttgcatgggaatcctccctaatacccatcttctgtgtatccaatggatcccaagaaaaagggaagattctccagtaggaaatatcagatggccagccacattggctgaccaagattcttcctctcctacctggaaaaagagacttctctatttctatacattcattacttcctcatcaaatatcaattgactaaatgctacatgccaagaaccattctaatttctaaagacatggtagtgaagaaaagtccctatcctcaaggatttgtattctaatggcaagagacagacaacaaatatataaaaaatatgtcagtggtgttaaataaaatgaggagcrtaagagtggaagtctatttgatacaggacagacaaagaaagctggtctatattggagcaaagaactagctggaaatgagggcatggtccaaggggatacctaagagaagagtttcctggaagagaaaacattca

SEQ ID NO: 43298 - DNA, 563 bp, Homo sapiens
gggagagggtaattgatgaatggattagagagaaggaaaaaagaggaagaaagaaacttaaaccaatatagatgaagatatttacagatagatagatctttatctatgtatttatatctatatccagatagaaagagagataagtscatattgtatgttctcacctcattaaatactttttgaaaaactgattatacaactgaaaaaaaagagtaaatgactctctaaaaagagaacaaatcccttcaaaacttcatatcaaaattatatgtgtaatcagcctgtgtttacgatttagatcctattaacctatacatacaaatttcagtaaattcagcaataacacctgcatcatttgggccttagcaatcttcaaagatatccctgtggacatagcatcactgcaaagcccattgagaattttgtgagatcaggatgggccactgaccacttctgccactaaccgtggactgcaccttggtgtttgtcattcactaataccatgagacaaagatgtgcacttctaagccattactcaatgctcagtgagctggtcagcattg

SEQ ID NO: 43299 - DNA, 1344 bp, Homo sapiens
  misc_feature (1)...(1344): n = A,T,C or G
aattaagagcttcatgttagttaacattactttaaaactattttaaaatttatttaaatcacttaaaaagtaacacaaatatatacccmtattttgttttatgnnnnnnnnnnnnnnnnnnnnnnnnnnnnnnnnnnnnnnnnnnnnnnnnnnnnnnnnnnnnnnnnnnnnnnnnnnnnnnnnnnnnnnnnnnnnnnnnnnnntaaatttatcttaaagagaaaataaggaagagaaagtaaaatcattaaagatacaagctttggaatgatacctagatttcagtttcagctgtcttagtttccagctttatgctccgaagacatttatctctctttgattcagcttttaaatttgaaaaatagaatactaaaagtatatacctcgtatgggtgtttaaggaaaaatcaagtagtttgccattgtgcctttgaaaaagtaatcatgcagtaagtgctagtttttaataaaacaataatagcagcattgttagcgttatagatagataatacacctgaaaagtgaagaaggtagttttcccttatgttaaaaaatgtattctttattctgcttttctccccatactagtagtaaaatagtagtcaacattcctcataagagtcctggggattttcccctgggagcattaggctgtggaacaaggtcattgtcacctcacttttttttgttttctactatgacctcatgtgtctcggtcacaagtgggtctgagctgggacttcagctcctggctctctagtcttgacctgggcccttcagaacttgaaagttgtctctctttttttttctcattctgtttagggtccttagtagtgacatatcataggaagctaagctctcaagtcttcagatagccagtgtctcacagcagcatttcactgaaaacagtctctgccttctctttaattacaagaaaatgtcttgggaattgctgtacagttgcaccattttgcgaaaccttcttcaacatctgcaaacttcaacatacatggagaggatctttatcttatgtaacaaatgtgacagatcatcattactcttcacttaaacagtgattctgttatgcagtcatgtttggatatccctggagagtggtttgccagagctagcttacaccagcttgctggaggtcatcaggaattttgtgagcaggttgatgtcatcttggtaggttgaaatgagccatagtgagataatttacaccatgaccagcagatgctataataaatcaagtttcctccctcagccagaactggttcaacttctagtataagacctctgacaccagtattcgaacattttgggctggagtagtagtagatg

SEQ ID NO: 43300 - DNA, 1344 bp, Homo sapiens
  misc_feature (1)...(1344): n = A,T,C or G
aattaagagcttcatgttagttaacattactttaaaactattttaaaatttatttaaatcacttaaaaagtaacacaaatatatacccctattttgttttatgnnnnnnnnnnnnnnnnnnnnnnnnnnnnnnnnnnnnnnnnnnnnnnnnnnnnnnnnnnnnnnnnnnnnnnnnnnnnnnnnnnnnnnnnnnnnnnnnnnnntaaatttatcttaaagagaaaataaggaagagaaagtaaaatcattaaagatacaagctttggaatgatacctagatttcagtttcagctgtcttagtttccagctttatgctccgaagacatttatctctctttgattcagcttttaaatttgaaaaatagaatactaaaagtmtatacctcgtatgggtgtttaaggaaaaatcaagtagtttgccattgtgcctttgaaaaagtaatcatgcagtaagtgctagtttttaataaaacaataatagcagcattgttagcgttatagatagataatacacctgaaaagtgaagaaggtagttttcccttatgttaaaaaatgtattctttattctgcttttctccccatactagtagtaaaatagtagtcaacattcctcataagagtcctggggattttcccctgggagcattaggctgtggaacaaggtcattgtcacctcacttttttttgttttctactatgacctcatgtgtctcggtcacaagtgggtctgagctgggacttcagctcctggctctctagtcttgacctgggcccttcagaacttgaaagttgtctctctttttttttctcattctgtttagggtccttagtagtgacatatcataggaagctaagctctcaagtcttcagatagccagtgtctcacagcagcatttcactgaaaacagtctctgccttctctttaattacaagaaaatgtcttgggaattgctgtacagttgcaccattttgcgaaaccttcttcaacatctgcaaacttcaacatacatggagaggatctttatcttatgtaacaaatgtgacagatcatcattactcttcacttaaacagtgattctgttatgcagtcatgtttggatatccctggagagtggtttgccagagctagcttacaccagcttgctggaggtcatcaggaattttgtgagcaggttgatgtcatcttggtaggttgaaatgagccatagtgagataatttacaccatgaccagcagatgctataataaatcaagtttcctccctcagccagaactggttcaacttctagtataagacctctgacaccagtattcgaacattttgggctggagtagtagtagatg

SEQ ID NO: 43301 - DNA, 574 bp, Homo sapiens
tgtccatttagttttttgaagtttcctaatacaggtcatctattgttaatctcaattgctttaaaaaaaatgaacaagtttgcataaaagtagattgtttaaggtcaaattacagcatraagttgatatctggtaaaatatcaacaagataactatagtgcgactctaagaagtctcaattatgcatttttaagtaattctgtctactaaaacattctgtgaatacagaaatgttctgtatctgcactgtccaatacagtagcccctagccacatgaacacctgaaaggtggtttaacacaactgagaaagtgaattttagtattatttaattttcaactaatatcacttaaaatgtaaatgattccatgaggctagtggctatggttttaaatagcgcagatataaagtattctttagatctagactttattttatttatttttgaccttaaagtgaaatacatagaaagctgtcaataagaatatagaaagtatgagatataaaaactgtgagcattagataaaaataatggtgaccaatccaggtaagaggagttacaaaagaaagacctt

SEQ ID NO: 43302 - DNA, 1432 bp, Homo sapiens
gaggctttttctcccgggtttctgatgcgctcttgttggatgttgaggaattacgttaattaatgcgtgcctgcacacaccgacacagaaaccaggcacgcacatgcacacacacacgcacctgcacacacacacacacacacacacacacacacacacacacacaatcagctttgtcagatcctccttcggcactcaccaagcagttcccatgaaaaggaaggaaggagagagggggaggaggagagatttgaaatctgttgccaggggagaaataaatggtacagcttgatacaaaagaaagtacaaagtttcatctttgctttctggagttgcaaatctaactgttgtttccagtcagtcccaatgtaaaataagacaaggccattgcaaacgcagaactgcctggcctggctcttcccagtggtgaagaaaaagttaaggacagagtttaaatgttggaaataagttgtaaatttgaaaataaagaactcatcaatagtttgtttaagcagggctttaggcaaattccttcaccacagatcatgtgagtctggatcccagaaggagttgttagggtttgtattataccgccgttttcgctgtctttttccctctgtctcttctgtggcttttagatgctgttttcattaggctagctaaattccactttaagatgaattcaccctaaatgtgtttgcatgaaattatatcgagttatggcttacagtgtaaatcatctttaattataggtaatctttatgatattttaacagataggataatatattagcacactggaactgaggtgcagacacctcagttaatggccttaatatcacactgccagcaacagtcatctttccaacctttaatcatctccctcgcctgccccttcctttctgttctcagtgaacacagaatgcccaagcagcccatcagaccctggtccggaagggcccagggctctgtcactaactttcaaatttgtgtatcatgacagtaggttgaaaagtgtattttttctgtgtgtgtgtttttttaatataacccatcaacggatactggttttcatttctagatcttaatatactaaaatatgaagattttgttattttcaaaaattccttcttgattcaagcaatgaataattagcgtagctctcttcatccatcctcacagggtacaaaaagattgggaaatcctgcttcaggcccacactgcttctctagctgaagggaggcaaagcagaaataaatctccaacttccctgaagcatacggaaggcttccctatgcattttgtgacaaactgaaaattagttgttgataatatttctttcacatgaaagtacagaacgtactctattctccatcccagaccccactccaaacaaaatctgttatttgaagtccmcataaataaccgactc

SEQ ID NO: 43303 - DNA, 1273 bp, Homo sapiens
tgcatgagaggtcattattaccacaagatgatacttaaaatgttcaagtgtctcttactaagatttttcgacttgttcagtgactgcaaatcaaagtctccagcttttagttgctgaactttgcctttgattgttctttcaaagttttcaaggaaagggaatggtttttggagccttgactggcattcattcattctttcattcattctacagatatgtaatgaggtgtttaattacccatgtccacgtctaatgcagaatgccatatttaaagcattgtagccggagctctggaggttgggtcacggaatttccagattttagatctggaactgaggcacagagaggctaagtggcttttcccatgtcatattgtgatatatagtcgaggctgggagtcagatctggcaccccgggccaggttagggctggtgagtcaaggcctctgaaaggctcgagggcccaaagtatagggtccccatgggaaccatgatactgaagagttgcattttgacccatttttaacttctagaacttgatattaccatgtggaaatattatatagtgttatcagaaccttcaaggctcttaaacatgagattcacattcagaattgactccagttcaaccctatgcttgcagcaagttccctctgggagaagataaagttttcatctctagaactaataacccaggctgccctgttctccgtgggaaaggagaaatggcagtggaaaccaaaatggagccagagagaggaaaacagttctaccagaagcctcagattttccctctctgggagcaggggcaccaggcaatagcccttgggttctgacaactctttttgtcccaaattaacaaagagtaaagaaagcattyaaaacatttttgcttctgggatcccaatctctgatttacaggcagaatctttggaaagtggaataggtggaaccccccagggtgtgctgtcttccctgttcaaacccagtgtgaccaacgcacccgcagtgtttcccaccaggcttcccccgtgtcctcgggcggatcttgcttgagaacactgcagtaaaagaaagccctgtgaaaggcagtgccaagctctcctcaagtccagggctagtgctctgtcttactgcaggatgactagagtgagcaataatatattatgtacttgcaagcagctggaagaagaatattgaccactctcaacccaaagaaatgataaatgtttgagatgttgcctatgctaattaccctgatctgatcactatgc

SEQ ID NO: 43304 - DNA, 1273 bp, Homo sapiens
tgcatgagaggtcattattaccacaagatgatacttaaaatgttcaagtgtctcttactaagatttttcgacttgttcagtgactgcaaatcaaagtctccagcttttagttgctgaactttgcctttgattgttctttcaaagttttcaaggaaagggaatggtttttggagccttgactggcattcattcattctttcattcattctacagatatgtaatgaggtgtttaattacccatgtccacgtctaatgcagaatgccatatttaaagcattgtagccggagctctggaggttgggtcacggaatttccagattttagatctggaactgaggcacagagaggctaagtggcttttcccatgtcatattgtgatatatagtcgaggctgggagtcagatctggcaccccgggccaggttagggctggtgagtcaaggcctctgaaaggctcgagggcccaaagtatagggtccccatgggaaccatgatactgaagagttgcattttgacccatttttaacttctagaacttgatattaccatgtggaaatattatatagtgttatcagaaccttcaaggctcttaaacatgagattcacattcagaattgactccagttcaaccctatgcttgcagcaagttccctctgggagaagataaagttttcatctctagaactaataacccaggctgccctgttctccgtgggaaaggagaaatggcagtggaaaccaaaatggagccagagagaggaaaacagttctaccagaagcctcagattttccctctctgggagcaggggcaccaggcaatagcccttgggttctgacaactctttttgtcccaaattaacaaagagtaaagaaagcatttaaaacatttttgcttctgggatcccaatctctgatttacaggcagaatctttggaaagtggaataggtggaaccccccagggtgtgctgtcttccctgttcaaacccagtgtgaccaacgcacccgcagtgtttcccaccaggcttcccccgtgtcctcgggcggatcttgcttgagaacactgcagtaaaagaaagccctgtgaaaggcagtgccaagctctcctcaagtccagggctagtgctctgtcttactgcaggatgactagagtgagcaataatatattatgtacttgcaagcagctggaagaagaatattgaccrctctcaacccaaagaaatgataaatgtttgagatgttgcctatgctaattaccctgatctgatcactatgc

SEQ ID NO: 43305 - DNA, 1200 bp, Homo sapiens
agaatgattagcgatacaaactagtgctgacaaagttagcggctgcataatcttgccaccttaattaacccctcaggatttcatcttctgtaaaacagaagggtgacatctaccttgcagggctgttgtgaagacgataagtattacatttaaaacatctgcttctaattattattactatcgttatcctccctaagccaaccattctcacacaggtgaataagtggaaagttgctaactgcccgcactgtgatcaacagacagaaataagtcccttccactgtaagaggcagaaatgtattgctttgactaaaatccttcagcccatcgyggtccttccctctgctctgtgcttggcgggtctcctgcggggggtcggggaggggtcgggctgttggaggaggtctgttcgcaaccttcgctcgactagaattggtacatgcctggcctggctacaggcccgacggtaacagttagctaagaccgagtttgaatttgttttgtttggagcggatcagcatctccaaggcaagagaacagacgtgggagggagggaggaagagatgggacccggggattctcacctccgccggcgcggaaggagggcagttgcccggctcgcgggtgccttaacttctttctgaggcccacgctcagttttcctcggctctcaggcctacccactaactgccgtgcgccgcggcgtatcccggcaacgggggcgggatagcggaggctcctcatcctgagtgaccaatcctccgcctcagcccttggttacacacggagctctcgcgagaattgaggatatgtttgtttcttcaccacgcttcagtgctttttggaaaaagtggaaaacagcggggcggctggaagacaaacattttatgtgaacgtttggttttcttgataatcagagcaacctccgtgtgccttacttgaagtaactctagcgagttttgctatgtccctaggtaacctcacgtcggctaacgttgttaacaggttacatttgaagttaagtggtaggcagcattgtgcaattttctaaactcctaatttgtggtagttttccttcctattaggacggcatagcgtacacaacgcatcatgaagtatggatgcgattctggcaccaactgttccgttcctgctttcaccagaagctttgcgtctttaagcttcctttcattagaattt

SEQ ID NO: 43306 - DNA, 1200 bp, Homo sapiens
agaatgattagcgatacaaactagtgctgacaaagttagcggctgcataatcttgccaccttaattaacccctcaggatttcatcttctgtaaaacagaagggtgacatctaccttgcagggctgttgtgaagacgataagtattacatttaaaacatctgcttctaattattattactatcgttatcctccctaagccaaccattctcacacaggtgaataagtggaaagttgctaactgcccgcactgtgatcaacagacagaaataagtcccttccactgtaagaggcagaaatgtattgctttgactaaaatccttcagcccatcgcggtccttccctctgctctgtgcttggcgggtctcctgcggggggtcggggaggggtcgggctgttggaggaggtctgttcgcaaccttcgctcgactagaattgrtacatgcctggcctggctacaggcccgacggtaacagttagctaagaccgagtttgaatttgttttgtttggagcggatcagcatctccaaggcaagagaacagacgtgggagggagggaggaagagatgggacccggggattctcacctccgccggcgcggaaggagggcagttgcccggctcgcgggtgccttaacttctttctgaggcccacgctcagttttcctcggctctcaggcctacccactaactgccgtgcgccgcggcgtatcccggcaacgggggcgggatagcggaggctcctcatcctgagtgaccaatcctccgcctcagcccttggttacacacggagctctcgcgagaattgaggatatgtttgtttcttcaccacgcttcagtgctttttggaaaaagtggaaaacagcggggcggctggaagacaaacattttatgtgaacgtttggttttcttgataatcagagcaacctccgtgtgccttacttgaagtaactctagcgagttttgctatgtccctaggtaacctcacgtcggctaacgttgttaacaggttacatttgaagttaagtggtaggcagcattgtgcaattttctaaactcctaatttgtggtagttttccttcctattaggacggcatagcgtacacaacgcatcatgaagtatggatgcgattctggcaccaactgttccgttcctgctttcaccagaagctttgcgtctttaagcttcctttcattagaattt

SEQ ID NO: 43307 - DNA, 1075 bp, Homo sapiens
gtttggtgtttgtgtggtgaaaaataccttagatggcaacaactagtaatagatcctgttatggacgtagtcctgagtccaaatagtgacatccctcctagttatggaaatagaagaattctgtagactatttaagccatcatcacactgttactatccaccattgttttggggagaaacctaatatttggttttaattcaaaataattgctttcagaaagtttatttcataacataggctcagcttgtttcatcttctgttgccataggaacaaataaataaattaatgcaattgtctgggcatggcacaaataatttctttcatgtattgtcttctactttagaatagaacacttgtcagattgaagggcaacaattctctcaccaactttatcataattttgataccacataatccatctataattatttttagggatatttggacattttagctttgatttattaatatcatattagacctttgcagagaacatttgcattttattttctttgtcttgaatttcatggtgcactctgtggtatccattttcaagtactttatgtacaaaaaaaggtggcaacattttttcagcaaaatcacagggaacccctggcatatagtaaatcttttcaaattgacttaatagcacaaatagatccttttctaaggtttaagttaaaattcacaccaaaggccttgatgaggtactcttgcacatgccccacggctagaggagggtttcagaatctgatccctactttgtgaatcttgtaatcggcttgagtacctcaggattgcaagcaaagaaagarcagcttaaggtataaaagccttgtccacccttaaaggcatcaaactggggagaagggaggaggaacaatgttagagctatttttaataattttaaaaattaaaatgaacttatagtaaatctgcatgaccagaaactacaaattgagtcattaagggagtacagaattaaaggtcacacctcatgggtgtgtatctcaggttcacaccttgttagctgtgagattttaggcaaattacgtaacctctccaaagctcag

SEQ ID NO: 43308 - DNA, 1075 bp, Homo sapiens
gtttggtgtttgtgtggtgaaaaataccttagatggcaacaactagtaatagatcctgttatggacgtagtcctgagtccaaatagtgacatccctcctagttatggaaatagaagaattctgtagactatttaagccatcatcacactgttactatccaccattgttttggggagaaacctaatatttggttttaattcaaaataattgctttcagaaagtttatttcataacataggctcagcttgtttcatcttctgttgccataggaacaaataaataaattaatgcaattgtctgggcatggcacaaataatttctttcatgtattgtcttctactttagaatagaacacttgtcagattgaagggcaacaattctctcaccaactttatcataattttgataccacataatccatctataattatttttagggatatttggacattttagctttgatttattaatatcatattagacctttgcagagaacatttgcattttattttctttgtcttgaatttcatggtgcactctgtggtatccattttcaagtactttatgtacaaaaaaaggtggcaacattttttcagcaaaatcacagggaacccctggcatatagtaaatcttttcaaattgacttaatagcacaaatagatccttttctaaggtttaagttaaaattcacaccaaaggccttgatgaggtactcttgcacatgccccacggctagaggagggtttcagaatctgatccctactttgtgaatcttgtaatcggcttgagtacctcaggattgcaagcaaagaaagaacagcttaaggtataaaagccttgtccacccttaaaggcatcaaactggggagaaggraggaggaacaatgttagagctatttttaataattttaaaaattaaaatgaacttatagtaaatctgcatgaccagaaactacaaattgagtcattaagggagtacagaattaaaggtcacacctcatgggtgtgtatctcaggttcacaccttgttagctgtgagattttaggcaaattacgtaacctctccaaagctcag

SEQ ID NO: 43309 - DNA, 570 bp, Homo sapiens
tggcacaatgcacaataaatgattatcatgagtataaatattctgtgattattactagcaccactgctattataactattattaccagcaccctgaaccttgcataccccagcctttatcaactaaagaacaattgctgaattctttactccagcacaatcattttttaaatctaatcttttgaaaaattggtccctccagaaatggtttgactgaattatgcttgagaatgagcataatcatacaaaaaagttattatgcaaaggggtcctgtgaaatgtgtcactgttccttttgctgtttgctcttgaggagatcggccatcacgtcccgcaagagaaattcctrgctattctggcttccagaatgctttagatcaagggaatcattttaaaataatgatccctgtcaagagagaaactgataaatcttacctcttagacctccgaagaaccacaactaaattggtagcctgaccaacacatttaagtgtcactagatttccttttactctcttatctttcttcttttgccccatctttaatttataccactttacatgtggtatat

SEQ ID NO: 43310 - DNA, 595 bp, Homo sapiens
tgagcmttggccatctttttatgcagatagcaaagatgtagtcaaagatgaatggaattacatcaaaaggacatcgaaacagtttgaagggtcactcattgaccaaagatgggacaatttgaacatcagaacaaattaactgaggaacacctctgtgaatttacaaaaatatacatgtttataataatagtttttttaaaaagatagcccttaaccccccaaattaaaaaagactcattggtcacattggaagtaacctcactctgaaaattaaagggaaataattaaacatttattttttctttcttggataagcagtatttcaatatgaccaagtagccctagttgacgaagaaaactacttctttatagaggaattccacctaataaatgtaaagggttgaagaagtgacagaattagaacattatcattttgcaacttataataagaatcaataatttaggcaaagattttcaatgaatgaagacatttttaaaaatgaatggagaatttttccatgaaaggtcaggcttttaccatttgaacccactgattaatttaagtaatacttattctagtgaataaaccagaaat

SEQ ID NO: 43311 - DNA, 1363 bp, Homo sapiens
gatagacatgactcctgctggaacttacggtatagggatcacgttttaacattttcagctaactcattctgcaattttcttcatggtcacagcccaacaaatgtcctcacaagctagacatagacacttttataaccaaagaacacagaaatttattctttttatccaccctataaagtgcaaactctatgggcaccagcctagcaatttcacctatggttacagaatcccagtgacttagtgtctctgcaatcattctccctgggtttccggagaagggaaagtaaatggtagactttcaatcttgttttaggcctcgagttttccaaaatctgttctccagactgttttgtttttaattaaaatttacatagaattgaatgagttaacttttggaaatccactaacagagtgccagccatgcagtaggtagtaatgtcagttagcgtcattttaccgaaaataaagctagttatgtttcatttgtgttagcactcccacctctttgctgatccaaataaaacctctcagaggtacacagcaaaagagaattatagacaccatctaaatgtgaacttttgcccacagttttgcttggaagtgagcaggtcgatttcttataccctcattaaagcatttcatattctcatatttgaggaaggataacctgctgcaaagagaagagatgagaacaggtagaaacatgcttgcagatgatcaatgtgcctgggatttgcctgtggcttaggaaaggccagaagccagggcttggtctaacttttagccagtgaacacaccttttactagtgcctggtcattcgtctactcagcagttggaaaccacctccctccaggagcctattgacaaaccacagccctcttttccagttctagggaaatgggcaaaatgtaaggaacaaaatgctgtctgccttcttctaatgctagagccatctcgtgagccaaagagccaaagagggtgacttgtgaatgcactctagaaaagcaaagtgagagctgttatggaaagagtgctagacttggaattagagttccagtcatagtcctgtttcttattagctacatgacctcacaccaatacaygtgcttcagatgtaagacttctaatcatgggtgtttggagcatactctgccttacttacctcacaatgccacagtcatggttttttatgaataatttcaaacatgtatagtacagagaacacctatatactacacccagattcaacagtttcctagattttgccacaccagtatcagacattatgccttcctttctggctaagtgtttttaagcaaatctcagaactcatgtcatttaaccactctatacttcagtatg

SEQ ID NO: 43312 - DNA, 759 bp, Homo sapiens
agggggagcccttccttcctattgcgctggtcgtgctcctggcccgcgtgcccaggaagggcgcagcggagtcgcgtgcccgtccgggcggaggacgccgtctccgcgcggcggtgccgggcccctgcttccggaacgctaattttagggttcgccggcccccctttcttttcacccgctttccgtgcgagccgctgcgcagcagtctgcgcttcgagtgcgctgtgttttaaggaggccccggcgcttkccccttgggctcgggggcttgggtgcgcaggtgggggctggcacgcagcccgttgggcaggtttcgcgcagcgaccctccccacgccggagctaagttctttgggtgagacgtgcaacaacgcaggccccaaagctctctgcgcgcagcgccgcggggcttggccttctccagtcctcgggagtcagccaccgtctctggcttgttataggattcccacctcgtggtgggcaatgatatatacatattcaacattagaaaaagaaggaaaaaaaaaacccactcacaatctaatgccaatggagagaatggtattttaatctacgaaactgtaatgaaggctcttaaacaatcccactttccataattgaggcttcaaaagggccaggtagctgtcggggtttgtattaacatctcataggctctggatcattcacagccacgtattgatctatgtgggttttgacgtttaaatttaatgaagcagcctttagtggggagaaaacagct

SEQ ID NO: 43313 - DNA, 759 bp, Homo sapiens
agggggagcccttccttcctattgcgctggtcgtgctcctggcccgcgtgcccaggaagggcgcagcggagtcgcgtgcccgtccgggcggaggacgccgtctccgcgcggcggtgccgggcccctgcttccggaacgctaattttagggttcgccggcccccctttcttttcacccgctttccgtgcgagccgctgcgcagcagtctgcgcttcgagtgcgctgtgttttaaggaggccccggcgctttccccttgggctcgggggcttgggtgcgcaggtgggggctggcacgcagcccgttgggcaggtttcgcgcagcgaccctccccacgccggagctaagttctttgggtgagacgtgcaacaacgcaggccccaaagctctctgcgcgcagcgccgcggggcttggccttctccagtcctcgggagtcagccaccgtctctggcttgttataggattcccacctcgtggtgggcaatgatatatacatattcaacattagaaaaagaaggaaaaaaaaamcccactcacaatctaatgccaatggagagaatggtattttaatctacgaaactgtaatgaaggctcttaaacaatcccactttccataattgaggcttcaaaagggccaggtagctgtcggggtttgtattaacatctcataggctctggatcattcacagccacgtattgatctatgtgggttttgacgtttaaatttaatgaagcagcctttagtggggagaaaacagct

SEQ ID NO: 43314 - DNA, 276 bp, Homo sapiens
gttaagtacatggaaattttggagaggaaccctaaggaaactccawgtcacccctgggtattgccaatagaacccaagtgtggtaaacacttcaaagcctccatagtgttgtatgaagcatggaatccctcttttgagggtctgaattcaccctccagggaaatgtttttcaaagcgttgtcctactgaaccatgcaatcaagagtcaggatggggaggacttctagtgaaggagagccttcacctgtaataagcatcttggacagaactaatgca

SEQ ID NO: 43315 - DNA, 957 bp, Homo sapiens
acatacaaaattgtgttaatcaactgtttatgttactggtaaggcatctatctggtcagtggtaggctattagtagttcagtttttgtttggagtgttggaagttaaactcaattttaggccaggcacggtggcatatgcctgtaatcctagcactttgggaggccgagttgggcagatcacctgaggtcaggagtttgagaccagcctggccaaaatggtgaagccctgtctctattaaaaatataaaaattagccaggtgtggtggtgcatgcctgtaatcccagctacttgggaggctgagtcaggagaatttcttgaacttgggaggcggaggttgcagtgagccaagatcgtgccactgcactccagcctgagtgacagagcaagactatgtctcaaaaaaaaaaaaaaattcatactcaattttcaactgcatagggaggggtcagcacccctaatccttgcattgttcaaaactgttattcagaaccaacaagaagctatagttggatcagatctttagaatctttgaagttggaaagaatattaaagattgtctagtccagtgtttttcacatgctcctgatgatgctaattccttgttcttattccattcctgttgaatttgaatctccagggatggggactgggaaactgtttacacaacatgatatttttatcatcagggcagttttaaatagatttttaaaatttttrttgcaaatagagatgcaaatagagatgtggccttactatgttgcccaggctcatcttgaactcctgggctcaagcgatccaactgcctcagcctcccaaagggttgagattacaggcgtgagtcactgattctcagccttatgtgtcttatatatcagaattatctgcagagttgttaaaaatacaggaggctgggtagtggacatcatgtccttagattctaattccatctatgca

SEQ ID NO: 43316 - DNA, 1090 bp, Homo sapiens
gtattgggaagtagtcccatcataagtctaggatcatctgtatatatgttttattgtattaaacagcccattttagtatgttggctatttaagcatttcagtctgtcctggtgatgatagcagagtagattgtaatcaaagaaaactgtttgccagcaggcagatgcagatcagaataaaggtgaggttgggtgcttgtcggaaagaccgtctcagccagaaatcagaatgaactacatttttcagggtcgtgttccacatattaaggatatgcaaattagcttctccatcaattaacacaaccacagaagtccaaagaggcaaaatctggagcagcaggtgagcaagaagaggcacggcttggagcaaaccagggggtacctagaagatggcttgtggtcatcacagtgatgagcaagagatgtaagccagaaatattcaccagctggttagtttagccttaaaggctactgactgtgggccaggctagacagaaacaatctgggttaatctactcaatttaaatccaggcagcggggaaaatggatactttcatatgtctctgtacccaactataaacttttggttctcatgcaccattttcattttgccttctcactccaagtaccactgattttaccaattrctctcataattgactttgctactggaagaaactcttagaatgttggaatttctctattacacactttgcctcaaagaatgtgtcagtcaggactaaagcaatagtctcagggcagacagccaacctacatctgatgacaacattgcagtacagtagtcacaatatgctgacttctgagcaagcccgtggcactaccctggaaggatggccccagagaagctgggatatgcaagctacccgcctcatagttcggagaccattgagtggaaagtgcttcccctttgttctttctgtttattcacaagtgggtgaaatggatttctgagtctcctagcctaaagcaagttttggcttgatgacttttatgggcatttatgtttactttgtaaaagtgtaagaaacaataagttatagtaatatgggggagtgggaggttagtagttg

SEQ ID NO: 43317 - DNA, 519 bp, Homo sapiens
acatggtgaaaccccatctctactaaaaataccaaacaactagccaggcatggtggcaggtgcctataatcccagctactcgggaggctgaggcaggagaactgcttgaacccgggaagtggaggtttcagtgagccaaggtctcgccactgcactgtagcttgggcaacagagcaagactttgtctcaaaaacaaacaaacaaaacccmaaaaattcagaaacaaatagtaaattgtagttaatgataggcatgctgaagtgtttagaggtagtgaactctgcaacttctttgaaatgcatcaaaaatcaaaaaaattagatgggactgggcacagtggctcacacctgtaatcctagcactgaggtcaggagtttgagaccagcctggccaacctggtgaaaccctgtctctactaaaaatacagaaattagctgggcatgggggcagacgcctgtaatcccagcttcttgggaggctgaggcaggagaatcacttgaacctgggaagcggaggttg

SEQ ID NO: 43318 - DNA, 676 bp, Homo sapiens
cttaatatctaggtggttgtaagtgattatgtaagtgataagtagaaatgaactgtgattgaccatgtgaatatatctccattgtaggtaggggtgtgtgtgtgtgtgtgtgtgtgtgtgtgtgtgtgtatgtgcgccttttggtgctaaaggtgcatgcatattcttcagaagagtctgtttgctctagaatgctcatggatatcctaaatactgctgcagacctgtttgaagatgtaattgtttgactttgaagctacattcatttctaatataacaaaaccaatatttacttaaagcttagtaaatacttaggcattatgcaaagccaatttcctttatcatagccaatctkcacagttacttttgcaagataggaactattgtaacctcatatgacagatgagggaactgaggctcagaggttcaataacttgcccaaggtcacacagctaataagtggcagagcaataactaaaatctgtatggcatgctcaaaatctttggcaaaattgcacatgtggatttgtgactaagggaataaggaaaaagaggaatgtgacaaaagtcaccattctgaaggattttaatcataaaggagccctcagaacagcatgtctataatcagatgctcaggtactgaatgggatggatgcaagaagtgagcaaagctgat

SEQ ID NO: 43319 - DNA, 634 bp, Homo sapiens
cacaaatggaaggcaaatttgagacaggtgaagtagaccagtagtgtgaaatgcaggtaatttcaggagacccttccttagtctttcctcagcatcttgtaggtagttgggatacaggttcaaatttgtgtgtgtgtgtgtgtgtgtgtgtgtgtgtgtgtgtgtgtgtgtgtagccaaaatctcgctctgtcgcccaggctggagagcagcggcacaatcttggcttactgcaacctctacctctcgggttcaagcaattctcctgcctcagccccctgattagctgggattacaggggcacgcccccatgcctggctaagtttttttgtatttttagtagagacagggtttcaccgtgttagccaggctgatttcgaactcctgagctcaggcaatccacccaccttggcctcccaaagtgctaggataacaggcgtgagccaccgcgcctggcccaggttcakatttgtaatgtgcttccaacttgattttttaagggtgaaatatcatttggactagtttagggaaaccattacagaggcagggaaatggttagaattcacttctcactgttgtttattcattcaactgaaatttattgtcaggttgttaggtgctgcagagatgactaa

SEQ ID NO: 43320 - DNA, 1150 bp, Homo sapiens
aatgcatcttttaacaactggcatggaagattaggaggctattgctaagttatcaatagacggtgcagtttgctgctggaagtggtcttcaattgacttctaagtgcagaagttacatttgtacaacaacagtcagtataaccaactgtaaatgtatatacaatggattagtctgttcaggttgtcataacaaaatcccacaagctgggtggtttaaacaacagaattttattctctcacagtcctggaggctcgaggtccaagatcaaggtgccatctgggttagtgtctagtgagggctctctccctggtttgtaggtggcactttgtgtcttcacatagcctttccttggcacatgtgctcaaaaagggggggaragaaagggagaggggggagagagaaaaggagggaagtgaagagagagtgaacaagagagagaaaatgagagaaagagagataagagaaagatatcttctacttataaggtcaccagccccatcagattagggtcccattctcatgaccttattgacttttaccttctaaaagccctatctccaaatacagtcaataagcttcaacatacaaattttgaggaggcataattcagttaatagcatacaatatagtcaactgtctctgccagctcttgtgaaggcggcatggttcccgttgtcaccaagaagaaaataaaaggctcatataatccatctatgatgcaataactggcctatatttcatggcttggagtcacaatgtcaccattgagaacaccactcctgagggggttgcaggaattgggggaggagtggaagagtggcaaaagaatcacatccttcagcaagtccatgggaacaactagggctaggggctgtgagccagggggttggctccctttcacaggtctctgaaaagtaggaagctttgcctaagtcagtgatcaggcagacagctttggagacaggggagggaccttggggaattgctgaatgctggtgtgttccgggaggaagaggcacctaggtcagtgggctaatggagtgcgggggagagaaaacataatagtatgacatatgttgacatattaagacttcctaaaatacagctctgataatgtcatccacaactttgctcacaaactgtcagcag

SEQ ID NO: 43321 - DNA, 1242 bp, Homo sapiens
  misc_feature (1)...(1242): n = A,T,C or G
ttttggattcgagagtacacatgcaggtttgttacatggtatattgcatgatgctgaggttaaacttaaagggccaaatagcaaatatttgaggtttgcagcccataagatcactatagcacctactcaactctgtcattgaagtgtgaaaacagccacaaacaatacataaacaaatgaatttatagccgtgttccagtaatgtcccattgtgtttataatacaggcagccagctcataggccacagtttgcagacggctattgyagaatgctctttggactcccgcccttgatacctggtgataagtaaggtaaacaggcaaataagcattagtgacctctgagttctcattctgtccaacaaataccttgtgacccaggcctgttaccaggtcctaagtctctatgttttatttatgtcagacatagcccacatgagtcattgattctgccatatattaaaatttgggcatggacataacggtagaacatagatnnnnnnnnnnnnnnnnnnnnnnnnnnnnnnnnnnnnnnnnnnnnnnnnnnnnnnnnnnnnnnnnnnnnnnnnnnnnnnnnnnnnnnnnnnnnnnnnnnnnacatcacggtagaacatagatcacacactccttacttagcttcatggtacaacccattatttaattttaagattgtatcacatatatagagaatttgaggtccattgcattaaatagtggaagtaatctttattcgcagtttctaaaaaatacatgcttttttctactgggcagtttttctatcaaccctctataaaggcaaagagaaaaatattaagtcgtagctcagggaaagcatttctgctatggacttagataatgtgactcaggtattgcctttcaggtaaaaactggagatgaatggatagttagcatgtctattagactttctctatcaaacatcagatagggtaaacgagcctctgagaagtgctgactctcattcgattcacaatcaaatactctaacaaggacttaaagtgcagataatctctattgtggattaaagtaaaagccatagactttggccgctatgtgatgcagataggtaaaatgccattcttttggaaacacttaagaactgattatttattgcgttctcagggaaataaccaaagcacttttgtacaaatgtgatcagaatatcattccctgtggggtgctttggctgcagttctcagaggccaccctcattaaaaactagtg

SEQ ID NO: 43322 - DNA, 1473 bp, Homo sapiens
ttagaggtctgcagagtacaaaagtaacaaggaaagagggtaactaattctgctctgggkcaggatcagaaagtgtttcctagagaaagtgatgcttgggctcagtcttgaaagaaactggtgttaaccaattaagtgaggatgggaatggcacaaatgatatacagataagtgtgagcaagtgggtgataatggctgtgaagttgcatgaagaaccagataatgtgagaacttttatattatgttcaggaatttgcactttacctttgacacaatgggactgttttgaagaattttaaatagtagagagctggcttttaccatagaggataaattagaaggagatgagaagtcatggatagaattaggaggttattgcagtaaatcaagcaagaaatgatcagggccccaacaaaggctctaacactgagggaagaagaggatgtatataagagatatcaagaggatagaatcaataggatttggagatcaactggaaataggaaatggagaggacctccaattttctgactttgaggatgggtttgattttaatgctattaactaagatggtaaatacaggaagaagtgtagatttgaaagaagaagaattgaccttgaacttgatgagtatgaggtatctgtagagcatcctaacagagtgcccagtaggcatcagataaatatcaatctggagttcaggacaaaaaagcttgatatacttggtttttagacttactgtctcccaagacagattgtttgctattccattctatgtaacagatcgtcacccagcctctgaatagtttcaatgttaagtaataggtcaaagtcaatttacttacttgtgaattgccctaatgatcataaaggaatatctctttctggctggaacatgcctctagtcataatttataacttctggtcattgtttctagttcttcctgctgaagcaacagagaataagactgcatcttttgcaatatatgggcttaatgtcttaagacagctgtaaataccttgcctataatttctcttattccagttaaatatcttaatgccttcaatcaataaccgcatgacaattttcagagccagccttcactggaacatactctggcgcaccctaatagtgcaattataagaactaaacccagtactccaaatgagattacagtcgcacagatacaggtggattaatctctagtattgaatgggaacctatcatctagctgttaccaccttccttattggccaatacaccattttatttgatgggatgtcagtcctataaagtagttcatctactttatgaaacaaatttctatactgctggatgtagggtatcactgcaactagagcttcaaagtatagagatacaatggagccctgatggtcatctgggacctgggttttggtcatgacctacctactaactcagtgtgggactttggtgaagtgtcctaactctta

SEQ ID NO: 43323 - DNA, 661 bp, Homo sapiens
ggcccatcggaagaggcacaatcatcaataaagctacagtttatttcacagtttgatctgagtggtattgttttatgcaagtctttcttcaaatatcttccaagccactttacattttaaatgttacaaatcctaatacccatgttttgttttgctaatttttttgaatgggtatctttaagaaactatctgtctgtcatataaagaactggccatcaggttattcaaataagcacttaaaactacatggagaagaagagcctgaagttgtatttattctaataakttgatgcttaaggattcagtgtgattttcttttctgctttttagaagcagcagaaacaataaacaattatctcttggcatacccttgatcaagacagccaattacaaatactctgtatttatgttccctgtgtttggtaagacaattttaaatatagacatcattgacattgaaattataccttgtccaattgtcttgcatacacaaggaaccttacaggttgaagaattcactccaactcctcacttagttttttaaaaagaaaagtgaaattggttaaactggtaaaatcaaacagatatcttgacatcagaacacaaagtcaaaggcgaagtttccaggacatcgaagtcacttacatcctctgctcagctt

SEQ ID NO: 43324 - DNA, 595 bp, Homo sapiens
ttcctgtctgtgaagcccttcaccccccttcactggctgtccttaaaccaagttattcctgctcccgggggaaagcattctccatctcctcctctgctgtggttggcaaagaaaactatgaagccaaactgctcagatatactgtaatgatttacaacaaacgagagaaagtcagatggtaagaagggctgggaaggattttaaaactggctattgtaatggttgggaagccactttatagtagatagtcaaggatggcttcttggaagtcctgctatttgyactagtagtgtccattgctgtctccattaaaaaatgatgaatttaatcatgtgtgatgatggtagaacatgatcaaattcattgaagagctggtaatttggcttgaaaggggtgcaaaatagaacaacaactagcgtccaggcgcaggtatccatcagccatcacatctgggcctggcctcctaggagaaattagttccattatttgttttctccatctgtgttagaccccattcaaggctcaacattcatagatatagagtttgagagcccaaacttaagtcatcgccccccaccccaccccgacttggcta

SEQ ID NO: 43325 - DNA, 595 bp, Homo sapiens
ttcctgtctgtgaagcccttcaccccccttcactggctgtccttaaaccaagttattcctgctcccgggggaaagcattctccatctcctcctctgctgtggttggcaaagaaaactatgaagccaaactgctcagatatactgtaatgatttacaacaaacgagagaaagtcagatggtaagaagggctgggaaggattttaaaactggctattgtaatggttgggaagccactttatagtagatagtcaaggatggcttcttggaagtcctgctatttgtactagtagtgtccattgctgtctccattaaaaaatgatgaatttaatcatgtgtgatgatggtagaacatgatcaaattcattgaagagctggtaatttggcttgaaaggggtgcaaaatagaacaacaactagcgtccaggcgcaggtatccatcagccatcacatctgggcctggcctcctaggagaaattagttccattatttgttttctccatctgtgttagaccccattcaaggctcaacattcatagatatrgagtttgagagcccaaacttaagtcatcgccccccaccccaccccgacttggcta

SEQ ID NO: 43326 - DNA, 556 bp, Homo sapiens
gctgttcaaaatactgtgcctacaaataacataaatcagtaattttaaatcacgtgctagataaaattctgggcactgaataaaactgttttaaatgaatattctttagcagattttagttgagtactttaaattccttcaacatgtatgagtacattcagttcggaaatgaagcaaatgcttaagaaatggttacataagctggccccttctcctcctgtatgtgtggggaacaagctgtctcaagggcacgtaaggcatcttactccccataaagctcaagtgagggctctttcttccctgggtttcagaaacacacccccggaatgtmctgtctcaaactggggagggggagaataacttacttgagagttaaagtctcttaggagcttttttacacataactcctgtatgggtgattatagatttaatatctccttgatgccaacaccttccttttcccttttggtggttgttaatcccaaatatatggacacatagaaaagatttggttgttccttgaatcccttgaaatggaagtaatattactaatatg

SEQ ID NO: 43327 - DNA, 1310 bp, Homo sapiens
gaattatgggattgccagtatggttggtagaagcaggcattattttcagctttgttcttctactcctctcatttttttctgtcccagcctcacttaaattcctatgctccaatcaatactcaactcartatttgagggagacctctgttagaactccagagtttctctctgctcagctctttcttcttcagtactcttttctgtgaactctttggcgtctctggattcttggcttcatctccttaactcagggattctatcaggttctgcctggattctccttcactgttttgtgacctggaaactctcaaggcaatattctagggcaaacataggactatctcatttatttcttatctctcagggattactgtccttcattgtctggtgtccactattgtgaaaatctttgttttgtgtatttcagttagatttttttgtggtgttgtcaggcaaaggtttaaaaccccatcctattaattttctggggtgctataacaaattaccgtaaaccgggtggcttaaaacaacagaaatttattctgtcatagctctggatgggggaaggccaaagtcaaggtatcatcaggcccacgttctctctgaaggctctggaaaagaatcttctctcgtctctttctagcttttggtgggtcccagcaattcttggtgcttcttggcttttagctacatcactccagtctctgcctttgtcttcatatggccttcttcccactctgtcggtctctgttatgtcacctcctcctcttcttaagacaccactcattggattcacggtccaccttaatccattattacctcaccataaccaattacatctgcaaagaccctatttccaaataaggcacatcctgaggttctgggtgaacataaattttagaaggacagtattcaaccggctacctctatcttggctgtaaagagaagtctgtttgttttttcaatgtaattctaaaaccttttgacagtgccttgcatagaaagtcagcataatgtaatagtgtaaatatatgagctttggattctgatagacttgaattttaatttagcactaccactttctagctgtatggtagggaaagttgtttaatttctttgaatcaggggtttccaatctgtaaaatttttataatacttctttcctcataaaactgttttagaatttaaacagcctttatacatcaacaggcctggcatacaataggtacttaataagtgtgatttaactttccatctctaatatttgttaaataaataaattttatatttatctacttatgtatatacat

SEQ ID NO: 43328 - DNA, 583 bp, Homo sapiens
ggccatacctgatgtggacatctggattctttagttatacaagccaataatatttgttttgcttaacttagtttcagccttaaaggacatacccaacattgttaccatcaatgtcrtcaaacccttatgtccatctaccatgagtggacctctgtgctgcagagactgaaatgtgctacgtcccaggctcccactgccacctcttctctttaagaccctcacaatttaggaggctgctttttgaggccctggaggactcagcctgcatctagtctatgaactctccctgagccggattcccaagatgaattacaccttccctgacagcttcatggcaaatgaggaaactaaataaacaaaaggggcctggaacttctctgataggtcttgacctctgaataggggccctgtgaataaagttactttatttttaggataccaaacttgccaataaggaaatggaggttcagaggagtgcaccgacattttcagtctcccagctccttcaaagcaggtttctcctcctggctccaggccccgggctgtctctactcccagtttgctcacctgtcagcagtgcccc

SEQ ID NO: 43329 - DNA, 583 bp, Homo sapiens
ggccatacctgatgtggacatctggattctttagttatacaagccaataatatttgttttgcttaacttagtttcagccttaaaggacatacccaacattgttaccatcaatgtcgtcaaacccttatgtccatctaccatgagtggacctctgtgctgcagagactgaaatgtgctacgtcccaggctcccactgcyacctcttctctttaagaccctcacaatttaggaggctgctttttgaggccctggaggactcagcctgcatctagtctatgaactctccctgagccggattcccaagatgaattacaccttccctgacagcttcatggcaaatgaggaaactaaataaacaaaaggggcctggaacttctctgataggtcttgacctctgaataggggccctgtgaataaagttactttatttttaggataccaaacttgccaataaggaaatggaggttcagaggagtgcaccgacattttcagtctcccagctccttcaaagcaggtttctcctcctggctccaggccccgggctgtctctactcccagtttgctcacctgtcagcagtgcccc

SEQ ID NO: 43330 - DNA, 1039 bp, Homo sapiens
aattcataaacagaaagtagaatgatgttgtcaggggctgtggattgggggwaattattatttaatgggtacagagtttcaatttggagagatgaaaaaaattctggagatggtttcacaacaatgtgcatgtatttaatatcactcaatggtacatttaaaacagctaaaatggcaaattgtatgatatatatataaccagaatagatcaaaatacttgacattaaaatggagatttacaatttatctgaaaacaaagaaacctaagtaacttattaatattagccagcaaacttgaataacaaaaattgaagctgagtagcccttgcacccttaaatgtgcacttcagctcaccatgaccctgactccgccctctcgtcttccatccatccttcactcacttagcctgccaggtccctgcagccatcttctgctgcaagggaccctggagctagctctcacatgtacatacaactttcacagacttgctagaatcagattttaacctgtaatacccccaattaacccaggcccaggtgaagtgaggtgacaggcataaggtggcatccaagatagaaacatgattgaaaagcccctctcctgcaaaacgaacccttgacagtcccctccacataccctcctagggcactggatatcacactccagggacctatgaagccacgcttccctactcaacagatgcaaacacggccataggtggacgcatacaaaaaagctagaagcacttttcaggatcgggagagttttgtattattcatgtttctgattctgacttcatataaatttatgatagattttgtagctcaaagagcaatgaatttaagaatctttgctgaagcctggactattcccaaactgtgaacttttcttctaagccattgactgtctaagggttttttcctcttaaatgctactgccaaatgagcattttaaaacatttatcaaaaaccaatggctggctacaaacgtcaatctgtacattccatacagagtgaaccgcagtctagtactgatgca

SEQ ID NO: 43331 - DNA, 1039 bp, Homo sapiens
aattcataaacagaaagtagaatgatgttgtcaggggctgtggattgggggaarttattatttaatgggtacagagtttcaatttggagagatgaaaaaaattctggagatggtttcacaacaatgtgcatgtatttaatatcactcaatggtacatttaaaacagctaaaatggcaaattgtatgatatatatataaccagaatagatcaaaatacttgacattaaaatggagatttacaatttatctgaaaacaaagaaacctaagtaacttattaatattagccagcaaacttgaataacaaaaattgaagctgagtagcccttgcacccttaaatgtgcacttcagctcaccatgaccctgactccgccctctcgtcttccatccatccttcactcacttagcctgccaggtccctgcagccatcttctgctgcaagggaccctggagctagctctcacatgtacatacaactttcacagacttgctagaatcagattttaacctgtaatacccccaattaacccaggcccaggtgaagtgaggtgacaggcataaggtggcatccaagatagaaacatgattgaaaagcccctctcctgcaaaacgaacccttgacagtcccctccacataccctcctagggcactggatatcacactccagggacctatgaagccacgcttccctactcaacagatgcaaacacggccataggtggacgcatacaaaaaagctagaagcacttttcaggatcgggagagttttgtattattcatgtttctgattctgacttcatataaatttatgatagattttgtagctcaaagagcaatgaatttaagaatctttgctgaagcctggactattcccaaactgtgaacttttcttctaagccattgactgtctaagggttttttcctcttaaatgctactgccaaatgagcattttaaaacatttatcaaaaaccaatggctggctacaaacgtcaatctgtacattccatacagagtgaaccgcagtctagtactgatgca

SEQ ID NO: 43332 - DNA, 687 bp, Homo sapiens
ttattttcttcattataccttttggtgtatctaaatttttgtagcacatttgatttttgtaatttaaagaatgtatacagtaatcattttgaagaaaaaacataactcttactataataataactaacatcagtagttatggtgtagtcacccatattatggtatagtcaccatattgttattattttgtactgtaatttatagtttatcatgcagttcatcaaaaacaatttgacataaattattttgtttaatcttgacaaaatttcaacaaggaaggcaggtatggtattctaattcctactggattgcaaaataaaggcaatcctctcaatcagagtgagttagtatatccccacagcctagaaattcagagtctaacatgagtacttctccaacatgttcatttttaatgaggtctttccagactttaaagaaaatagtgayataggaagaaagtagagatgctgtcccactctatctacctagtgcttgctggctacactccctgttctcacttttctcaatctccccattcttattaataaaatagagtataatgcctctccctgtctttattttcatcatttgtttgcacaagcctaatctacaaggcctgctagatttgaaagccctgttttcccctcacatctcatgtcaccccttctttcctatgataacatttca

SEQ ID NO: 43333 - DNA, 687 bp, Homo sapiens
ttattttcttcattataccttttggtgtatctaaatttttgtagcacatttgatttttgtaatttaaagaatgtatacagtaatcattttgaagaaaaaacataactcttactataataataactaacatcagtagttatggtgtagtcacccatattatggtatagtcaccatattgttattattttgtactgtaatttatagtttatcatgcagttcatcaaaaacaatttgacataaattattttgtttaatcttgacaaaatttcaacaaggaaggcaggtatggtattctaattcctactggattgcaaaataaaggcaatcctctcaatcagagtgagttagtatatccccacagcctagaaattcagagtctaacatgagtacttctccaacatgttcatttttaatgaggtctttccagactttaaagaaaatagtgacataggaagaaagtakagatgctgtcccactctatctacctagtgcttgctggctacactccctgttctcacttttctcaatctccccattcttattaataaaatagagtataatgcctctccctgtctttattttcatcatttgtttgcacaagcctaatctacaaggcctgctagatttgaaagccctgttttcccctcacatctcatgtcaccccttctttcctatgataacatttca

SEQ ID NO: 43334 - DNA, 1316 bp, Homo sapiens
tgcatagggaacccttgagttcagaggcttcttaaagcatctagatcgtatatgtataamtgaattaattaaaaatgtgtcgcagccagacgcggtggctcacgcctgtaatcccagcactttggcaggctgaggcgagtggatcacttgaggccaggagttcgagaccagcctgaccaacatggcgaagccccgtctgtactaaaaatacaaaaattacccgcgcacggtggtgcaccctgtagtaccagctgctcaggaggcttaagcaggagaatggcttgaacctgggaggcagaggttgcagtgagccgagatcatacccctgcactccagcctaggtgatggagtgagactctgtctcaaaaaaataaaataaataaaaatgtgctgatttcatgggtggttaacagtccactttggaaacaaatgagattccagaattctacacatcagcccaccacctcctttgggattgatgtacatgtagaatcaataggaagagtttattgaatataatcaaaatcaatttggcttttacaattgctacattctttttggcaaatgtcagtagctgccaatagttaaaggcatgtgaggtctaggctccccacaatttgactaccaggttacaactaagtcttaggccgaattttgctatacacggacatttatcaacaagatggcacagttctgccatataacttattatataaactctatgaaatcctatttctttccttatttaggatctcccacaatatcttagataaaaagttcatctaaggcatatgtgacagcattctagcaatggtattcagctaacccatctagttagattaaagcaatcaagaatccttcatatcagcaggtaaacatgaggcctttcaggaatcaagtcttggccaccattcctaagggtacaaactgcagaggctttagatttttctactgtgttcaggcacacccttgactgctgctgtcatttctggagcaaattcacataaaaacatgtctttcaccagtgaaaagtcatttgtgaaattcatgttagtgcttactaacaatagcactaaactcctcaatgaaactccatttcttaaatccatcatgctctattgtgggctggagagaaagatagccaaatgcgtttgtagtagctaccttagaaatgtggctgtttcgttaaatgtaacatgtgtcctactaggacagttatccacttctagagtctagattacaactatcacatagaatacctatcctacagtctatgctgatgagttgtaaagcaatcattgcaatataaaattatg

SEQ ID NO: 43335 - DNA, 1273 bp, Homo sapiens
gcataggtatcaaagcaaaacggagaacaaggtagttagtaaatgggtaagctaggtgaaaaagtcactggttctgagttgcaatccactagtaagaacatgccacaaacctaaaaaccaaatacctgagcttgtgaatactrttctgattatactattacaattcatttccatcaaaccaagttcatatttaatgaagtaatattagggtaccttcagataatgacaggtcaggagatctgctctgttcatcttctcttggtacctgacactgtctgtgaatgggccttttgtttatatattcattaatttattgtttaatcaattaatattaactgagcactgttatgtgcaaggcactgtcctgtggctggagacagttagtacatagaaggtacacagttccttccttcatggagctgacattctagtggaagagttagacatgtgacaattgcacacattattaattgctgcagaaaaagtggagatggctgggccagagatgtgtttcaggaagagggaatatatggaaagcacctgaaacagagcatgatagactttctttgaggcacagaaagcaggcaggtgcagctggagttcatagagccggaatggaggggtgaggagtgaggatgcagggctggcaggagctttgtcaggctctgtggactgagtaggcactgttgtctgtatcctatggcaaccagaaagccattgcagggtgttaagcaggggtgtgaagtgtttgtgaaggaaagaattaattagtgagtaggggttgtttgagttacagatatggtaattgtattaaacaatacatggagactgcaacttttgatgattctatacaattgtcttaatttttgagaatttttttttcctggtagaatataatgtgtgttacatagcatagtggagatatatgttgtatctgtatctatataggtatttatttgttgtttttggcctacttcctgtaaacataaagtcttatatgagcaaaaacagaggtcaaatttatgatttatcaaaaatgaagaatagtaccgctaatcataaataaggaccaattattaaagaaacacaagtttaaatttttaggaaagtttgataacgaggaagagtttttttttttcccaaagcaatgatacagatttaattattggaagttaatattacaagcaaggattcttctttgcccagctttattgaggtataactgaccgataaaaatgatatatatttaagatatacaacgagatgtttgggt

SEQ ID NO: 43336 - DNA, 483 bp, Homo sapiens
tttttttgaaygacacaagctttgccacattaagattttatcttctctacaggttcaatcatacaatttggtactgcagagaatatttatataatcataacattataaaaattctttattgattttccattttcagaatcaacctataaaagagagaagacataaatagaattaccagacagaatataaatctgacataccttgacaatagaaaagtaataacatagctaatgatagttgggagttggttgtaggggaaggggaattggaaagaagaatagaagtgctaatttcctctgagtatagtggggagagaggcttttgcctaatgtttgacacagaaataggtaagacagacaaagaaatatgtaaataattaaaagctacaaaagtaatcaattgaaaagctaaaatataatagcccaaatgggtatggatatgtataagcaggtgacattcaccaatttttatggcctgaagtca

SEQ ID NO: 43337 - DNA, 1064 bp, Homo sapiens
agccactaatgaaagacatgtgttagagtagttacacattgcaactcatagaaaactaatgacatgaaacagccacggtgcctctatgctgacccctgtaacacctcaagaccaacttgtaacaagcagagctaagccaatttatcactgaattatgcgtcatttaataaagacgggtgtgactcaacctgccatgcgggaatgctaaaagcttaaggaaatggccaccaaaactcccccttttccttttccaaagctcatctttaacccttcagtaaatgatggactgattgaagcaaaagtctaaactttataaactatcactaaaaaaatcttagggtagtctgaccagggttcttggggttatttacttgaaaattactactcttgcaggattaactcctgtttctatagctcaatggagtgtgaatgaagtgaaaatggaggggttctcttttttgaaccaccatcagcatcctgaaattgtagttcaaagtatgctttcagaagccaaaagccaagtgatgattttaccagtgtcatttacagtcrtcatcaaaacatattttaatttaaataaaaattaatcctaggggcttttaggttctaccaatagttttacatttccgaggggaaaaaaatccttataatttcatcattgtcatagaaacagaaaaatcaacacattacagaaaaacgtttcatgagggctgagaataaggacatccatatcgagttacacacttagagataattgatttagcaaaaattcagctggaatcatataaattatagcaatttccaccattggtcctatagaaaagctttttagtaataaccagaggacatagttagatattctctagaaagtaaagaaacttctcaaaatctttccttattttatttcccttctcgggattatattctttttatgataacaaatttgtaccactgtagaagcattttagtcccttgaaattttataaaactttttttcttgatggtgcaccaagaatcatgtttctctttaaatgaacaaaaaaagtagatgaagtcaaaatgca

SEQ ID NO: 43338 - DNA, 829 bp, Homo sapiens
gatcccagaaaagtccaaaagagtgacttctgagggacaagtgagaggcagcaggtatggagatattcttaggcaggaatacccctcagcttstacctgcctccactctcctcaaagattagtgctggaacaaagcatcagtccacctgagatgatcaggaaggggaaggggccccaggtcacccaaccagccagtggcttctgctgcccagggagccatggcctcagccagctaagggaggtgtgaggggatgaagagaccaggacttacgggccaggtacttgaaggcaggatgggcaccagtaccggtgactgcaatcttgctaaacatggggaatgagacactgtaggtgcggcgggcaaagctctcaatctccttgttgctgtcaggctcctgttggccaaactggttgcaggggaaggcgagcacgttaaagtggtgggggcccaggtctcgctgcagctgctgcagggctcggtagtgctggtctgtgaagccgcactcgctggccacattcaccaccagggacacctgtatgacagaaacaaaacaaaacaaagcccagacaagccagtgaagaggcatgaacctgtacatgccctgacacatccacatatgtgactccctcaacagttaatactgcctcacacatacaagaacactgtgtacacatatgtaaatgtgtgtccagtgctctcacacatacacaaacacatgcacacagacaggcacatatgaaatcaaacattcaggagcttacagatgtgtgcacacatacatgaacatctgtgaacataagtatacaacatacataaataggtatgcac

SEQ ID NO: 43339 - DNA, 829 bp, Homo sapiens
gatcccagaaaagtccaaaagagtgacttctgagggacaagtgagaggcagcaggtatggagatattcttaggcaggaatacccctcagcttctacctgcctccactctcctcaaagattagtgctggaacaaagcatcagtccaccygagatgatcaggaaggggaaggggccccaggtcacccaaccagccagtggcttctgctgcccagggagccatggcctcagccagctaagggaggtgtgaggggatgaagagaccaggacttacgggccaggtacttgaaggcaggatgggcaccagtaccggtgactgcaatcttgctaaacatggggaatgagacactgtaggtgcggcgggcaaagctctcaatctccttgttgctgtcaggctcctgttggccaaactggttgcaggggaaggcgagcacgttaaagtggtgggggcccaggtctcgctgcagctgctgcagggctcggtagtgctggtctgtgaagccgcactcgctggccacattcaccaccagggacacctgtatgacagaaacaaaacaaaacaaagcccagacaagccagtgaagaggcatgaacctgtacatgccctgacacatccacatatgtgactccctcaacagttaatactgcctcacacatacaagaacactgtgtacacatatgtaaatgtgtgtccagtgctctcacacatacacaaacacatgcacacagacaggcacatatgaaatcaaacattcaggagcttacagatgtgtgcacacatacatgaacatctgtgaacataagtatacaacatacataaataggtatgcac

SEQ ID NO: 43340 - DNA, 829 bp, Homo sapiens
gatcccagaaaagtccaaaagagtgacttctgagggacaagtgagaggcagcaggtatggagatattcttaggcaggaatacccctcagcttctacctgcctccactctcctcaaagattagtgctggaacaaagcatcagtccacctgagatgatcaggaaggggaaggggccccaggtcacccaaccagccagtggcttctgctgcccagggagccatggcctcagccagctaagggaggtgtgaggggatgaagagaccaggacttacgggccaggtacttgaaggcaggatgggcaccagtaccggtgactgcaatcttgctaaacatggggaatgagacactgtaggtgcggcgggcaaagctctcaatctccttgttgctgtcaggctcctgttggccaaactggttgcaggggaaggcgagcacgttraagtggtgggggcccaggtctcgctgcagctgctgcagggctcggtagtgctggtctgtgaagccgcactcgctggccacattcaccaccagggacacctgtatgacagaaacaaaacaaaacaaagcccagacaagccagtgaagaggcatgaacctgtacatgccctgacacatccacatatgtgactccctcaacagttaatactgcctcacacatacaagaacactgtgtacacatatgtaaatgtgtgtccagtgctctcacacatacacaaacacatgcacacagacaggcacatatgaaatcaaacattcaggagcttacagatgtgtgcacacatacatgaacatctgtgaacataagtatacaacatacataaataggtatgcac

SEQ ID NO: 43341 - DNA, 1354 bp, Homo sapiens
gcataaagagtggatccagccataagcaaaaatcattccacatttattaaagaaatattttgtgaacgcttactatgtgtcagactgtgacagactctggggatgtaatagtaaacaagacagaagtggttcctgctctcatgaagggtttaggagagtagggcattaggagtgcctggctgactacccaagttcaaagcctgccttcaccacatattagcttgaacacaatttaacttctctaagtctatcaccttgtctgtaagatacaggtaatcaaagaacctacatcattgagatatagtgaaaattaaatgaaasaatgtgtgtaaagtgctaagcatactgcctggcgcatggcagggtctgaataaatgttggtggagggtgtaaacaaataaaaaagtaatcacaatacaggacactgtgataagtgctttaatacaaaaaaaaaaaaaaaaaaagggacatatgagaagaggcgctaacacagacccagggggcccacagaaggctcaggaagtaaattaagtaaattctgggttgagacagagttagttaaaacggatgaggataagaaaacagtatttaccagctaggatagagcatgccacatttgatgactaaaaggagttcagtgtgtggttagagtaaagggagtaaggtgaggttgagaggcaatgaggagccagatcatgagggacttgtaagatttttaagaatttgcattttattctgagggtactgagtagccattgaatgatttaaagtcaaacagtgatctgatctgatttataatttagaaaacatccctgtcttaggttgttttgtgctactgtgacagaataatctgggactgggtaatttataatgaatagaaatttatttcttacagttctggaggctggaaaatccaagactgaggggccagcatctggagagggccttcttgctgtgtcattccatgatgaaagggcaagaaagcacaagagaaagcaagaggggaccaaactcacgtttagaacaaacccactcttgcaataatgacattgatccattcatgaggacaaatccctcacaacctaataacctgttaaaggtcccacctctcaacactgttgcattggggattaagtttccaacacatgaactttgggggacacacttaaaccatagtaatccctttggctggagtatacagagtggctgagaggaggaaaagtttactgcaaaaagtccagcctgaattctttagtaatttaagaaggagaagctggggagtggcagaaagatcaagaaaagtggaataattctggagatgtttagtaagtaattggctggaaagtacagtatg

SEQ ID NO: 43342 - DNA, 1354 bp, Homo sapiens
gcataaagagtggatccagccataagcaaaaatcattccacatttattaaagaaatattttgtgaacgcttactatgtgtcagactgtgacagactctggggatgtaatagtaaacaagacagaagtggttcctgctctcatgaagggtttaggagagtagggcattaggagtgcctggctgactacccaagttcaaagcctgccttcaccacatattagcttgaacacaatttaacttctctaagtctatcaccttgtctgtaagatacaggtaatcaaagaacctacatcattgagatatagtgaaaattaaatgaaagaatgtgtgtaaagtgctaagcatactgcctggcrcatggcagggtctgaataaatgttggtggagggtgtaaacaaataaaaaagtaatcacaatacaggacactgtgataagtgctttaatacaaaaaaaaaaaaaaaaaaagggacatatgagaagaggcgctaacacagacccagggggcccacagaaggctcaggaagtaaattaagtaaattctgggttgagacagagttagttaaaacggatgaggataagaaaacagtatttaccagctaggatagagcatgccacatttgatgactaaaaggagttcagtgtgtggttagagtaaagggagtaaggtgaggttgagaggcaatgaggagccagatcatgagggacttgtaagatttttaagaatttgcattttattctgagggtactgagtagccattgaatgatttaaagtcaaacagtgatctgatctgatttataatttagaaaacatccctgtcttaggttgttttgtgctactgtgacagaataatctgggactgggtaatttataatgaatagaaatttatttcttacagttctggaggctggaaaatccaagactgaggggccagcatctggagagggccttcttgctgtgtcattccatgatgaaagggcaagaaagcacaagagaaagcaagaggggaccaaactcacgtttagaacaaacccactcttgcaataatgacattgatccattcatgaggacaaatccctcacaacctaataacctgttaaaggtcccacctctcaacactgttgcattggggattaagtttccaacacatgaactttgggggacacacttaaaccatagtaatccctttggctggagtatacagagtggctgagaggaggaaaagtttactgcaaaaagtccagcctgaattctttagtaatttaagaaggagaagctggggagtggcagaaagatcaagaaaagtggaataattctggagatgtttagtaagtaattggctggaaagtacagtatg

SEQ ID NO: 43343 - DNA, 745 bp, Homo sapiens
tggcaagcacagcctctctcaactggcttccagggaagacatcctcaaatagatacagctggttagtacccaggtggcaaagtggctgatagccatttggatcctggcactgtttccctgggttagcttttttttttttttttttgagatggattgttgctctgccacccaggctagagtgcagtggcacaatcttggctcactgcaatctacacctcctgggttcaagcaattctcctgcctcagcctccctaagtagctgggattacagacatgtgccaccacacctggctaatttttgtatttttagtggagacagggtttcaccatgttggccaggctggttttgaactcctgacctcgggtgatccgcctgcctcagcctcccaaagtgctgggattacaggcatgagccaccgtgcctggcctctgggttagcttcttccgatggacagcagactgggaagctttgcaaaaacttgcttgayttagatgtaagcatatctgcctgggtgctgagaggtacttgtcctcccaggcctaccaagctgggctgacgaaacataatccaaagatgacctgctggattgctggtttaattacagcatccccaggtgccctgatggcaggagagcaaaaggattgtgacctaaaagccccacctaacaacctggatttatacgaagggtgggggagtgattattagactaatatgctttacatgtgggaaggctgtagctcacaa

SEQ ID NO: 43344 - DNA, 523 bp, Homo sapiens
gtttgacttgcggtcataarctttggttttaggattctaaagctagtatacttcattaatagcccaccagttgcttttttccagtaatatcaaaggaaacttaattccagaggttcatgtgtgtatcctctggaaagttttacatgtaaaaacgtttgaaaatgaatgtgctattaaaaaatagggcaaatttttggctgggcgtagtggctcacgcctgtaatcccagctctttgggagaccaaggcgggcggatcacaaggtcaagagatcgagaccatcctggccaacatggtgaaacctcattgctactaaaaataccaaaattagccgggcgtggtggtgcacgcctgtaatcctggctactcggtagtctgaggcaggagaatcacttgaatccaggaggcagaggttgcagtgagctgagattgcaccactgcactccaacctggcaacagagtgagagtccacctcaaaaaataataataaggcaaatttttaaatagctaatttaaaacaatgt

SEQ ID NO: 43345 - DNA, 523 bp, Homo sapiens
gtttgacttgcggtcataagctttggttttaggattctaaagctagtatacttcattaatagcccaccagttgcttttttccagtaatatcaaaggaaacttaattccagaggttcatgtgtgtatcctctggaaagttttacatgtaaaaacgtttgaaaatgaatgtgctattaaaaaatagggcaaatttttggctgggcgtagtggctcacgcctgtaatcccagctctttgggagaccaaggcgggcggatcacaaggtcaagagatygagaccatcctggccaacatggtgaaacctcattgctactaaaaataccaaaattagccgggcgtggtggtgcacgcctgtaatcctggctactcggtagtctgaggcaggagaatcacttgaatccaggaggcagaggttgcagtgagctgagattgcaccactgcactccaacctggcaacagagtgagagtccacctcaaaaaataataataaggcaaatttttaaatagctaatttaaaacaatgt

SEQ ID NO: 43346 - DNA, 531 bp, Homo sapiens
gtggcacagacaaccatagactctgcctggaaaagctgcttcatggagaaggtgacacctgagccagggccaacaggtgcacaggtaggtagtgagatggtggcactaggagaggagtgaatctaaggtacctccaagtcttggggctgaggggtgggaactgcggtccagacagaaccaactgggctgggcccaaggcaggtgagagaacaaatggatggtttctctcattagaaaatgtacaaacatggaggcaaaggaaggagagaagcagcttacagatgtgaagtaaactcaaaaccttaacccrcctggtcaatatggcaaaaccccatctctactaaaaatacaaaaattagccaggcatggtggcatgtgcctgtaatcccagctactaaggatgctgagacaggagaatcacttggacccaggaggcggaggtggcaatgagctgagatcacaccactgcactccaacctgggcaatagagcaagactccatctcaaaaacaaaacaaaacaaaacaaaaca

SEQ ID NO: 43347 - DNA, 863 bp, Homo sapiens
agagtcactgaccttttagatcagcccccacctctgactcgggtcgggggagaaagggctggctgatggggtggggtgggctaatgacacctgtcagcctccggggcctgctaggtgagggcacagaggtaggggatgtaggtgtggtgccatggcaggcccttgctgggcacagctgaagctgctctcactgctgactaccccctggacaatggcactgtcacctgcacttccagtggggtaggctgagagtcttgtgcatgcacatgcctttttctgaatatgcttttctgggacaaggcagatgttcctctagagcaaatccccagaaacaggttggccacattgtcccagctggtgccatgaggataaaagaagaggagttccctgcagatactggccccagtctcccggctcaccctaaccctgcttgactttgtcttgttgctttcctttttkaaaataagatattttccttgagcctctataagccttgtcattttccttaaagaagatatctgttggcatttcaaggagacaggatttgtgttacacactgtattagtctgttctcacactgctataaggaaatacccaagactgggtaatttataaaggaaagaggtttaattggctcatggatctacaggctgtgcaggaatcataggggcttctgctcctggggaggcctcaggaaacttacaatcatggcggaaggtgaaagggaagcaggcacatcttacgtggtcggagcaggagcaagagagacacagatgtggggtattacacacttaaatgaccagatctcgtgagaactcactcactatacagtaacaagaggatggtgctaaaccattcatgaa

SEQ ID NO: 43348 - DNA, 537 bp, Homo sapiens
gaaaataaagggaaagattcctatggcatgccttgccaaagtgagcatgctctgggagtcaggaatgctccggcatttaggagcgagcaggggagagccagcagccgcaagaccrctctctattgctttttattaaatctctgtttaagtaaacaaggaactgacagtcttgggagataaacaaaggacatggagtctgctgggtgagacttttccataaatgaggccttcttctccatagtcaagtgtgccaagaagagcaaaatgtaggagtaggcctaagaggcccaggaaagaagccaagtattggggtttccatttgcccagacgaggcgtgtccccaggggcatgggtgaatggagggcacatttccgggccctttgagtttacaaagcactttgtttcccagagactctgcagcttcgcctcatctccaggtggggacactgaggtccagcagagtgaatcgagttgtcccccagcaaggagaggtggagccctgtctctctgcagccatgccttaattttgccttcaca

SEQ ID NO: 43349 - DNA, 537 bp, Homo sapiens
gaaaataaagggaaagattcctatggcatgccttgccaaagtgagcatgctctgggagtcaggaatgctccggcatttaggagcgagcaggggagagccagcagccgcaagaccactctctattgctttttattaaatctctgtttaagtaaacaaggaactgacagtcttgggagataaacaaaggacatggagtctgctgggtgagacttttccataaatgaggccttcttctccatagtcaagtgtgccaagaagagcaaaatgtaggagtaggcctaagaggcccaggaaagaagccaagtattggggtttccatttgcccagacgaggcgtgtccccaggggcatgggtgaatggagggcacatttccgggccctttgagtttacaaagcactttstttcccagagactctgcagcttcgcctcatctccaggtggggacactgaggtccagcagagtgaatcgagttgtcccccagcaaggagaggtggagccctgtctctctgcagccatgccttaattttgccttcaca

SEQ ID NO: 43350 - DNA, 633 bp, Homo sapiens
aggggttccgtggcccaaagtggccagccagagcctcccattgtgtcttggctatgtgactttgggtgaatctcttgggccttctaagcctctgcctttttctcgtctttaaaaaggaaatgataattctgtcctgactctgtcccatcaaaggtggttgattaaatagccctgagtgcgcagttgcccctgctggtgctttcctcttcctttggtgttatcaagtgaggccatgggatgagcatggaggcaagttgcaaagtcaggattggatcgaagagttcacagaatgagatgcgtgacctcaccatggccttcaacaccacattaaggtttcctgccttggaatgctggtcccgggggagttacagggaggcgggaccttctgcctcaatatgggtttggggctagtatttctacatctctgattctttacctccaccattagcacagaggaaatcctgacctgtggctgcaaagtgttaaggactttctctggtgcttttattatcattgctrttgcctttttcttagccatgatggcacccgaactgcctcttgcgtattgaagctaaacgcttttttctgtattaacaaacaggactcttctgactccccttgcttaattagggc

SEQ ID NO: 43351 - DNA, 800 bp, Homo sapiens
aaaaggaggaaagaacagtgcagtctttcacccctaaatgctccacttttcaccagggagagaatgaaaaacacttcgtttgtgggtgagtcacaaacactacgttttggggcctgtaaacttggaagcagggaggtgctatactctgaagccaatttcattaccagggctagcttacatagccagagattcagtcattgctggagtgagtgaaatatgggctatcctcacaggagattgagaactgggccttttcatcttcagagggaagccaagtgggtgccatcatcctgaggaaggcccctgctccagaggaagctgggctctttctttttcctttggaattgcctggctgtgctgttcatcgaggtgcaaagaccgactgccacatgcacttctsgccagaccacactcgacctcagaagctccttctgctcccaagcaatttacaaaaccctgaaggccgataacatgggccgcctacacatctgacttagagggaaccctcggcatgaacatgtttggccaactctcctaacatttgcttttatgtcaattaggatatttcattttcatattgagctcaaccatggctgggtaacctcatccccaggtggcactggcgggaggctgtatcacatcagtttagagttcccttccccacagagttctgggctagcctgggccacaagattgtttctgagacacggaaggtgccaatgagggaggggctggaggtccttgggggtgccggggtgcttgcagctcatgcggggtcatttcttagtggaggggtctag

SEQ ID NO: 43352 - DNA, 800 bp, Homo sapiens
aaaaggaggaaagaacagtgcagtctttcacccctaaatgctccacttttcaccagggagagaatgaaaaacacttcgtttgtgggtgagtcacaaacactacgttttggggcctgtaaacttggaagcagggaggtgctatactctgaagccaatttcattaccagggctagcttacatagccagagattcagtcattgctggagtgagtgaaatatgggctatcctcacaggagattgagaactgggccttttcatcttcagagggaagccaagtgggtgccatcatcctgaggaaggcccctgctccagaggaagctgggctctttctttttcctttggaattgcctggctgtgctgttcatcgaggtgcaaagaccgactgccacatgcacttctcgccagaccacactcgacctcagaagctccttctgctcccaagcaatttacaaaaccctgaaggccgataacatgggccgcctacacatctgacttagagggaaccctcggcatgaacatgtttggccaactctcctaacatttgcttttatgtcaattaggatatttcattttcatattgagctcaaccatggctgggtaacctcayccccaggtggcactggcgggaggctgtatcacatcagtttagagttcccttccccacagagttctgggctagcctgggccacaagattgtttctgagacacggaaggtgccaatgagggaggggctggaggtccttgggggtgccggggtgcttgcagctcatgcggggtcatttcttagtggaggggtctag

SEQ ID NO: 43353 - DNA, 1231 bp, Homo sapiens
tgcatcagcaaaattgtcagtactgctttgaaaggtctccagctccaactgtgcctcaccaccagactctaaggggcctggacgggggcaacaatcttctgcctggtctcgctgcagcctggcctccacgcagcggccagagggatcctttaaaatttaatcagactagccgggcatggtggctcatgcctgtaatcccagcactgtgggaggctgaggcaggtggattacctgaggtcaggaatttgagaccagcctgaccaatataacgaaaccccgtctcttccaaaaaaatacaaaaattagccaggcgtggtggcatgtgcctgtgatgccagctacttgggaggctgagacaggagagaatcacttgaaccctgtaggcagaggttgcagtgagtcaagttcgtgccattgcactccagcctgggcaacaagagcgaaactccgtctcacaaaaaaaaaaaaaaaaagaaaaaaaaattaatcagaccgcttttaatgtaaatcacttctctgctgaaaagcttctcaagaccccctcctgcattccagtccttctcccctgccctggttttgtcaattttcctccctgctccaggcctactcactcccttgttggtctttaagaaygagccccagggcctttgcactggctgttcccactacctcactttccccaccagctatttccatgccttatttctctcttcatttggttcttggttttgatgccagtgtagcctgtgaccccacagaagatggctccctgtcttcctctccccgtctctgatcctgcttcattttctccacagtgctccttacagtctgccatgttggtacattgcctgtcttcctccactagaacgttggggcacagaccagagactccccgctctgccctctgttgggtcctctgtgcctggggcagtgtttgcagggtgtgagctcaatacagatttctgccatgaatgaacaaaggcaagatgccaaaaccagaagaaaaaaaaggtgtgaaaatacgggactaaagtaatgaaaaatgggcaaggctgggtgtgcaagtatggcccccaccctccctaaaagaaccccaaaggccagtggtgctgagatcccatgagcactggaatgacagccattttacaaatgtgggtgtgatgcctgagaccatagcagtgagaagaatggagcgcgtaccttccaagtaattttaaatgttagctccagg

SEQ ID NO: 43354 - DNA, 1231 bp, Homo sapiens
tgcatcagcaaaattgtcagtactgctttgaaaggtctccagctccaactgtgcctcaccaccagactctaaggggcctggacgggggcaacaatcttctgcctggtctcgctgcagcctggcctccacgcagcggccagagggatcctttaaaatttaatcagactagccgggcatggtggctcatgcctgtaatcccagcactgtgggaggctgaggcaggtggattacctgaggtcaggaatttgagaccagcctgaccaatataacgaaaccccgtctcttccaaaaaaatacaaaaattagccaggcgtggtggcatgtgcctgtgatgccagctacttgggaggctgagacaggagagaatcacttgaaccctgtaggcagaggttgcagtgagtcaagttcgtgccattgcactccagcctgggcaacaagagcgaaactccgtctcacaaaaaaaaaaaaaaaaagaaaaaaaaattaatcagaccgcttttaatgtaaatcacttctctgctgaaaagcttctcaagaccccctcctgcattccagtccttctcccctgccctggttttgtcaattttcctccctgctccaggcctactcactcccttgttggtctttaagaacgagccccagggcctttgcactggctgttcccactacctcactttccccaccagctatttccatgccttatttctctcttcatttggttcttggttttgatgccagtgtagcctgtgaccccacagaagatggctccctgtcttcctctccccgtctctgatcctgcttcattttctccacagtgctccttacagtctgccatgttggtacattgcctgtcttcctccactagaacgttggggcacagaccagagactccccgctctgccctctgttgggtcctctgtgcctggggcagtgtttgcagggtgtgagctcaatacagatttctgccatgaatgaacaaaggcaagatgccaaaaccagaagaaaaaaaaggtgtgaaaatacgggactaaagtaatgaaaaatgggcaaggctgggtgtgcaagtatggcccccaccctccctaaaagaaccccaaaggccaktggtgctgagatcccatgagcactggaatgacagccattttacaaatgtgggtgtgatgcctgagaccatagcagtgagaagaatggagcgcgtaccttccaagtaattttaaatgttagctccagg

SEQ ID NO: 43355 - DNA, 1231 bp, Homo sapiens
tgcatcagcaaaattgtcagtactgctttgaaaggtctccagctccaactgtgcctcaccaccagactctaaggggcctggacgggggcaacaatcttctgcctggtctcgctgcagcctggcctccacgcagcggccagagggatcctttaaaatttaatcagactagccgggcatggtggctcatgcctgtaatcccagcactgtgggaggctgaggcaggtggattacctgaggtcaggaatttgagaccagcctgaccaatataacgaaaccccgtctcttccaaaaaaatacaaaaattagccaggcgtggtggcatgtgcctgtgatgccagctacttgggaggctgagacaggagagaatcacttgaaccctgtaggcagaggttgcagtgagtcaagttcgtgccattgcactccagcctgggcaacaagagcgaaactccgtctcacaaaaaaaaaaaaaaaaagaaaaaaaaattaatcagaccgcttttaatgtaaatcacttctctgctgaaaagcttctcaagaccccctcctgcattccagtccttctcccctgccctggttttgtcaattttcctccctgctccaggcctactcactcccttgttggtctttaagaacgagccccagggcctttgcactggctgttcccactacctcactttccccaccagctatttccatgccttatttctctcttcatttggttcttggttttgatgccagtgtagcctgtgaccccacagaagatggctccctgtcttcctctccccgtctctgatcctgcttcattttctccacagtgctccttacagtctgccatgttggtacattgcctgtcttcctccactagaacgttggggcacagaccagagactccccgctctgccctctgttgggtcctctgtgcctggggcagtgtttgcagggtgtgagctcaatacagatttctgccatgaatgaacaaaggcaagatgccaaaaccagaagaaaaaaaaggtgtgaaaatacgggactaaagtaatgaaaaatgggcaaggctgggtgtgcaagtatggcccccaccctccctaaaagaaccccaaaggccagtggtgctgagatcycatgagcactggaatgacagccattttacaaatgtgggtgtgatgcctgagaccatagcagtgagaagaatggagcgcgtaccttccaagtaattttaaatgttagctccagg

SEQ ID NO: 43356 - DNA, 1386 bp, Homo sapiens
cttcaccattgcaagcagcagggaccaccggcaccaagaggtgctgtgcagaccccagcccatttctcaggactccatgggcgcgcacaggacgtgctctcgtccctgccagggaagtggctcctggcggtctgggctcctgttgctaggaaaccgctcccttcgattgtgtatgtcgagcatgcctgtgtttgtctttggctctcagaaggacaaaattcaccatgtggcgacggagaaataatattgaaaagtacttaaaaaatgaaagaagtgccaaatggcgctctggattgcagatgctccccgtgctgctggcgtcgcgtggatgggggacccgggctgcattctgaggcgctgctctgtctcccatgtactctgccttgctcccagatagctctgcgcacagccctgtcctgtgtccctctggcatgcagaccgtggtgtgcaggtttgcagggcagcatggggcttgtggcttgccctctgtccctgctctctctctctctctctttgttgagacaggtgtccaggcagaagggaaggccgcttgtaagtttgagccatctcttagtgtctggagaagtggggagtcgtggggacatggcaaggcacacttcacccatctggaggcagaagatgctagggagagagcggtaactgcttttgaggtggcgctggtctgtcctgaccacctgtgactctgtgggcaaaggtcaaggttgcattacagcctgtgggtcaggatgcaggtgctctatcaatggctggctgcctgggagagaactggggattttcttgccatgcggcaggaaggagagttcgctctggtgcctggtggcctcttccccattgcctccttccctgctacacttctggctgctcacacctccagcccatccatttgtgtcagggcccctgggtccttggtgccccggcccacaccaggccttggctccggttgacatgtgactttgaactccccatcccagggctgcttgttccagcaggcaattccctggactgacctcttttcaagttccgcgagttgatcatggcccctggtgtgagcttgagcatttcctgccgcctccttgtctgcctgctgatgctctcggcatctccggcaagccccsctccgaccctctgtaacctacaagcaagcagagccgggagaggctgcacaggcaatcaggcgctctggctgacgaggatgcctgaagatgaaatatgaataagaatatgcactgggggcctgtgggccctgctggcaaacttgcaccttgtctggcctccatgtgggcccaaacctgcctcccgacctccctcggcaggtggaggtgtgaatgttgggggccgccgaacactaggaagtgtcctcatgca

SEQ ID NO: 43357 - DNA, 1040 bp, Homo sapiens
tcaagtgatccatccgccttggcctcccaaagtgctgggattacagatgtcagccaccacgcctggccacaaattctttctttttaatctagcttttaaaatgtaattttatttagattctggggacacatgtacatacttgttacatgggtatattgcatatggtgaaaactgggctgctagtgaactcgtctctcaaacagcgaatattgtacccaacaggtaatttttcaaccctttccccttcccaccctcttcacttttcgaatccccagtgtttattatttccatctttatcagacttccaaattctttttcttttctttctttctttcatttcttttttttttttttgagacaggatcctgctctgtctcccaagcaggagagcagtggtgcaatccyggctcactggagctttgacgtccaaagctcaagctatcctcccacctcagcctcccagagcacatacattcttctgacagactgggagaatatgcttcatttcatgagacaaaaatgaaacttggtgcacatttgcatttattttgcttaagagagctgaatggtgttttcagaggtagatttactaattaaattcctaacgagtgaaccgagggccaggctttatccagaaaaagcaagtatctttcagaaaacttgttcaaatgcatataaccctgcttattctttcccctagttagaagtgcattctttaagaaatgccctagcgatgacaagaggctatttttttgtgactggggaatatctttccacgagggcaaagtttcctgcagtgggaataccctgagttacaagcctggcttaggcgcttcagaatccctgactgaatcttgggaaagtcacaggttttctctggacctttggttccttatctgtaagataaggtggttgacatagaaaccttgcaagcttctttctcgcatcccatgatgacatactcttcaagtccttaagcaggataattatggcaaatgagggaaacttctgggggagtgagttgctttagatagtgaatt

SEQ ID NO: 43358 - DNA, 680 bp, Homo sapiens
accacttcctggtaccaatttctgttagtttgtctgggctgctataacagaacaccattacctggcagctgataaatgataaacatttatttcccacagttctggaggctaggaagtccaagaccaaggcaccagcagatacagtgtccagtgaggcctgcttctgactctctagagagagtgttttcttgctataaccttacatggtagaaggggtgggagatctctgaggtcttataagggcgccatttccattcatgagggttctgccttcatgacctaatcatctcccaaagacctcatcttcaaataccatcacattagcggttaggattttaacatatgaatttttgggaaatgcaaacatttatagtacctccatgtaaaaattttatgactatactatttgtattagattttttcccccatagtttttcaaatttagattttcaggttcattttaaatgataagttttacatttttttttttaaatttctctctgttcttacttcactttgtctatgggttttttagttttctctcctgagatttctgggccccagtccagaccaggttttatgatgttattttgggggttcctatcccaagtcatagtaaggggagtacagattttgtccctaggccagcagayagcttacttaagttttggacatgaaat

SEQ ID NO: 43359 - DNA, 801 bp, Homo sapiens
accagcccctgaggacagagcgatacctctgtgcatggctgggccagctgccccaccacygcctcatggtcgcgcaggctgcagatgaggcccccggggacggcggtgaccttgcggcacagcgggcaggtgatggaccaggtgttgtcctgcacgcacagcaggagcttcaggcagatggcgcagaaggcatgctggcaggccagcagcttgggcaaccggggacagctgtagggctcccggcacaccagacactccaggtcacattctgtggagccagaatgacccccagcaggggccacagcggtggtggttgtggtggctcctgcggagatgggctgggactgttgcagggtcttggtgcaggccattctgggcacagggaccggtgggacactgtcgctcagcacctgggcattggcagagagtgtcagctggcgccgctgggacttggatggaatctgcccctccttttcactctggccaggtgcctgttgacaacagctgtctgacactcctctcttccagagctgcccagcttgtttcttggcttacgtcgtcccttcagttatattatttattttctcaaaacctagggttaatcagtaacttgcgggtctggagactttgaattgcctgataggagggcaaagtgggcaagggtctagtgaatcaggactttcctgttggggccaggtacctggtgggtgcccacagaactgtggctcaagctttaggaggcagcagaatccaactctctcacccccacttcccaggtccctgaaccttttattaattttt

SEQ ID NO: 43360 - DNA, 801 bp, Homo sapiens
accagcccctgaggacagagcgatacctctgtgcatggctgggccagctgccccaccaccgcctcatggtcgcgcaggctgcagatgaggcccccggggacggcggtgaccttgcggcacagcgggcaggtgatggaccaggtgttgtcctgcacgcacagcaggagcttcaggcagatggcgcagaaggcatgctggcaggccagcagcttgggcaaccggggacagctgtagggctcccggcacaccagacactccaggtcacattctgtggagccagaatgacccccagcaggggccacagyggtggtggttgtggtggctcctgcggagatgggctgggactgttgcagggtcttggtgcaggccattctgggcacagggaccggtgggacactgtcgctcagcacctgggcattggcagagagtgtcagctggcgccgctgggacttggatggaatctgcccctccttttcactctggccaggtgcctgttgacaacagctgtctgacactcctctcttccagagctgcccagcttgtttcttggcttacgtcgtcccttcagttatattatttattttctcaaaacctagggttaatcagtaacttgcgggtctggagactttgaattgcctgataggagggcaaagtgggcaagggtctagtgaatcaggactttcctgttggggccaggtacctggtgggtgcccacagaactgtggctcaagctttaggaggcagcagaatccaactctctcacccccacttcccaggtccctgaaccttttattaattttt

SEQ ID NO: 43361 - DNA, 1456 bp, Homo sapiens
agaagggagattagggtacatacaaactttctggttacatatttatagaatatttctggaagaataaataagaaattggtcctttagtgaaagagagaccaagaaataggaatggaaagaaaatagtacactcttttgttcaatttcactttttgccatgtgcatgcattttaaaaaatgtttctaaaggtctgagttctaaaatggccctgctaacagacaatctgggacattatatttaatctccctgggccttggttccctaagctgaatattatttttacaaataaggtaacaaatgcaagtaytgtgaaagaactgaaagtaactaataaaatatcaagtatttatttcacaattttttctattttttatattgcaggggagaagaagtagactagtctaatttacaaagtttttttcccatatatatcatttaaagaaaaacctaccagttccatgaaatgttgtgccaacaacacgaacacaacttggtactcgaagatcccaaaatctaacagtcttatcttgggaaccagatgcaatcatccagccactccaggtataaagtgctaaaatatgccctataaaagatcatatactcaattattaaggtgggagagtatctttccataacatattcaaagctaagcactctagagttgggcaaggtggctcatgcctataatcccagctactcaggaggctgaggcaggaggactgctggagcccaggagttcgaggctgcagtgagctatgatcaagccactgcattccagcctgggcaacagtgcaagaccctgtatctgaaaaaaaagaaaaagctaagtactccttatttacagggcaagtggtggtctggttagtcaaatatactatgtgatagagatttttcacatttatcaaatagattgacaattttaaaaataaaataaaactcagtaaaatgcacaacatcaaaaccatactaggccaggcatggtggctcatgcctgtaatcccaacactttgggaggctgagacaggatgattgcttgagcccaggagttcaagaccagtctgggcaacatagtgagacaccatatctacaaaaaaattttaaactatccaagcatggtagcacgtgcctatagtcccagctactcaggaggctgggtgggaggatcacttgacctcaggaggttgaggccgcagtgagctgtgattgtgccactgcactctggacagtaagagcaagaccctgtctcttagaaaagaaaatgcagagaggaaaaaaaagcacagattgaacaaaaagaaaaacagcacttgaaactgatattacataccagtatgtccactcaaagcatggaggccctgtcctctttgacaatcggttgtataaatgttacaatcccctgctccagcacttattaaaatagctcctccgctttctgggccttccataaatgccaag

SEQ ID NO: 43362 - DNA, 422 bp, Homo sapiens
cccaaagtgatagtcaggaaggtgggtagactgcttgctgcctcctaactgctgctgtggttcgagttaatatttgccagacttagcattcctgtgagtgccgttgggataatgggccccactcagcatcacgtgagttctccatctcagccgagggacaggatttcaaccatatcacacacagctctcattacrtgcaaggaaatgatcttactgaggaaagcagcacaaaccataaacacatttacttaaaaaggcaaagctgttaggtgtgcccctattcatgactaatacagtgtgctagtctcagtttctgatgtctaagtccaggatagcatttcccagcatgggtctgagagccccttaggacatgggctataagaggggcaccctcaggtttaactttttgctagcaggggtag

SEQ ID NO: 43363 - DNA, 563 bp, Homo sapiens
tcactgcaagctccacccgccgggttcacaccattctcctgcctcagcctcccgactagctgggactacaggtgcccaccaccatgcccggctaattttttgtattttttagtagagatggggtttcaccgtgttagccaggatggtctcgatgatccgcccacctcggcctcccaaagtgctggggtaacaggcgtgagccaccacgccctgctgcattgttggcattcttgccatagctctggttctactttgtcacattcagcccccactygctgagcacctactgtgtgccaagcaccctccaaggcctcacaacctggtttatattccagacgtcctagctggcctttctaaagcaccataattgtgtacatgggcgtgcaatccccattcaaccttaattctcctgctcttctccaggagctgatttctgactcacaaactcatacccaagtcagccataacgccgatgtacttccctggtgtgtgcgctgaaggatgggttggaggaggcaacagtgacactggttcagatattgaaagcctccttagggtctggg

SEQ ID NO: 43364 - DNA, 944 bp, Homo sapiens
gaatttgaccttgccccagcatccaattttatgtctgttaaatctaataataaaaagttgagcttgcatttcataagtctatgggagttttttcatttcatttttctaataatttatttttattgtgttttacaaaagcatcagtcagtatgtgaaggactgaaaactgtcaaatatttaaaaactggtgcttcacaacagacagtttgaggagcactgatctagtcccctgtttacaaactgtgaatccttgacccattcgtgggtagtaacccattaaggagtcacgaaattaatttgtgtggataccagcattaacaaagaatagaataaaaagtatcagggtacattgcatgaatacaggattaagttcttttttgtgaaatttttattttaaaaagcatatgcaaatacatatgcacatacacacttgtatatttttgcatgtatataaaacagaaaaaggaacctgggatgcccatgttttattgtaaaagatacttctgcttttctaacagttgtaaggaaaatgtctgcacatatttggaaaactatgtgttgtccatcacacacccttctgctatcttttatctgatttggattctatgggagctatttcacaactttgtaaactgtagctagctgatagcattgcaaaataattattctctgtaaacattcaagttttgtcccttctggtagaggttcaattgattcccgctccctctgtggaagaagtcagttttgccctttttttgtgcattcaatattcttgatctatacatgttctttgtattctcttttgatccagttataatatctgcctagttctctcatagattgagttaaataaaatctctaacacatgttcatgttcaatctgtatgagtcatgattctatgtttygttttttttttaaattaccttttaacgtaggtcacagt

SEQ ID NO: 43365 - DNA, 561 bp, Homo sapiens
taagtgcaaaacataaaagctatgtttcatatttttatatttgaaaagaagtgatgaaattacagtggattttrtgaatttctggagagttccatagtcacatctgcaatactgcaatgtttaagttgtctattgcaacactatgctcaagtacctgcaccctctctctgtgacagatgccaaaaaatggggaactattgttgtaactataaaagattttcatatcatttattcgattcatcattgtatataattgacatgtcacaagcacatatgataaacagctatggttttaagaagttaatagatgccttttttttatttaattacattagctccaaacatagctaactctcagaaatccagttcagtgtcttccttgagtcttctcaccctaaaaatctgttttcaatatgcttttcttcttttttctctttctaatcctgggaagatggtggtactagtaatagtaataatactgatgatattaatattgatcaacagtaattgagcaggatgagatagcattattacacttgctgatatatctaataagataga

SEQ ID NO: 43366 - DNA, 655 bp, Homo sapiens
ttccctaaaaactaaaaaattaacagagatgaatgtgcataatcaacaagattttattgtacatgtgttttgataagaaagtaggaaggcaaaggataataactgcaatggtttgtgtctcctccaaaattcagttgtttccaacgtggtagtattaatagtggaagcctttaaaagatgatttgactgtgagtgctcttccttygtgaatgggatgaaagcccttagataagaagcttcatgtagcatttggtcctcttctctttccaacttctagcatgtgaatacacagcaagaaaaccctcaccagatgctgacactttatggacttctcagcaccagagcagcaataaagaaatttcttttccttataaattacctagtctcaggtattttattacagcagcacaagcagattaagataatgactaagtcatctgcatttaaatgatttctccattcactgagataaggaaaataagaggaatagtgttggagtaaatatgtggcaagttctatttgaacacctgagatgtgggtactcaagggacattgcaatgaagatttcctataggtaggtcacttaagtttaaagaatgagcagaagaagggaaaccattaaagcaaaagttcaaataaaatgtaaaagaggtcc

SEQ ID NO: 43367 - DNA, 655 bp, Homo sapiens
ttccctaaaaactaaaaaattaacagagatgaatgtgcataatcaacaagattttattgtacatgtgttttgataagaaagtaggaaggcaaaggataataactgcaatggtttgtgtctcctccaaaattcagttgtttccaacgtggtagtattaatagtggaagcctttaaaagatgatttgactgtgagtgctcttccttcgtgaatgggatgaaagcccttagataagaagcttcatgtagcatttggtcctcttctctttccaacttctagcatgtgaatacacagcaagaaaaccctcaccagatgctgacactttatggacttctcagcaccagagcagcaataaagaaatttcttttccttataaattacctagtctcaggtattttattacagcagcacaagcagattaagataatgactaagtcatctgcatttaaatgatttctccattcaytgagataaggaaaataagaggaatagtgttggagtaaatatgtggcaagttctatttgaacacctgagatgtgggtactcaagggacattgcaatgaagatttcctataggtaggtcacttaagtttaaagaatgagcagaagaagggaaaccattaaagcaaaagttcaaataaaatgtaaaagaggtcc

SEQ ID NO: 43368 - DNA, 1207 bp, Homo sapiens
aatgtttatagctgtgtttttcattataaccaaagaaacgagagcaatccaaaagttattcaagagtagaatggattattttttgtgccatatttatataatattatgctactcamcaatgaaaaataactactgctatcctctataatatagatgaatatcacaaactaaaatcaaaagaagtcagttacaatatagcatatactgtatattttcatttatctaatattaaaaaacagatgtaaccaatatatagtattagaatatgattagttacctttgggacagattgttgctgggaggggctggatagaggctatttggatattggtttgtttccaatttccttttctttttgtgctttcctttccagtgtgtctgctttatttaaaaagctacttaaaattttttattttatttttattttattattttgttttattttattaatttaatttcattttttaaattttattttattaagtttcgtaagtgggaaattgttcattcatggtataattgtttaaattttagaaactttaaagaggggtaagcaacccagctattgacaatcacatgatatcccaaattatatcttcagtgtaagagctttaacttcggtttctgttaaatattatatcctttaaaataaaagatgacagggtcatcatccatcggattatttcctgcaagctaatatcccatactatagcatttttttctttaataatgtttatttgttttagaaaatctgccagacattttatgtgctatttagctagaattgcgttggttatagatgaccacatggtctgtggcccgactcaggactcaatcattcttgatcctgaattttcagaaagccaattatttaaggtatagcacttttttagaattattaacaaaacgcttatgattctaacctggactctcatttttctgtgctacatagcctgggttttttttctttaactgttattactttcctactatagatattaactacaattttaagttttaaaaaaaaattcttaggaatgctctttaggcaaagcaaagcaatatgatgattaatcctaactaaagtagattatcttctaaacatgtgtgtgtgtgtctgtgtctgtgtgtgacagaaacacattgactccagtttccaagaaagtagactattactcaggctgctatttttaatttcacataagca

SEQ ID NO: 43369 - DNA, 611 bp, Homo sapiens
tagtacattattatagatcctacaggcattttcttttaaaagaagatataaggaatacctttacacaaataaattttaaaatttaagtgaaatgaactttaccaacataatgtatcaaaactgatgctggaaaaaatgtaaatacagtcatggatcacttaacagggatctgatctgagaaatgcattgttaggcaacttcattgttgtgtcaatatcactgagtgcacttacacaaacttagaaggaatagcctattacacacctagggtgtgtgctatagcctattgctcctacactacaaacctatacagcatgctactatactgagtactgtaggcaactataacacaatggtaactacttgtgcttctaaacatagaaaaagtacagtaaaaaaaaatggtataaaagatttaaaatggttatctatatagagsatttaccatgaatggagcttgcaggactagaagttgctctgggtgagtcagtgagtcagtggtgagtgaaggtgaagtcctaggacattactgtagactttataaatgctgtatacttaggctacactaaatttattaaaatcacttgtttcttcaatcataaattaacctc

SEQ ID NO: 43370 - DNA, 572 bp, Homo sapiens
ccaaacttaacaatgattttatttataatttttttacaatgaagtgaaagtgacaggcattcagtgcactcctcaacttgataggctaagtcagacctgaaattaaaaccatcacgtaacaaaaactccaggtctaaatggctacatcagtcagatatcaaaaaaataaaatatcacagccaatttattccagaaatgcaaggttagtttgatatcccaaaaatcaatgtaattcatactataaaaaaaaatcattttgacagatacagaaagggcattaatactcaatattttaaagattgatctatagatttaattcagtcccaatcataatcccagcaagtgttttggaggaaattgggaaattaggaagttgattctaaaatgtatatgaaataaaaaggaccagaataaagaaagaaatcttaaagaagaactgaatatgctgaaggatttataccacctggtatcaagacataaggatgataaagctaaaataattaaggcagtgcagyacaaagatagacaacagaccaagggaaaggtatagagagaacagaaactgattcaca

SEQ ID NO: 43371 - DNA, 642 bp, Homo sapiens
attgaaggattcatatgaaacacatctaattttttttaagtttggatagtgggagttcaaaaagaaaatacacacacatttttataagcaaagtatggggacacagagaaagtgaaccttaaagactagtagattctcatcaccaagcagatactcaaatctgaagcctatgctctttgagtgataagcggggatagattcctgtctctattttaatttttgtttcggtacatttaaaattttcactgggtatgtgcagttgactttaccttatttaaatgtacataaaggccgggtgcagtggctcacgcctataatcccagcaatttgagaggccgaggcaggcggattaccaaaagtcaggagtttgagaccagtctggccaagatggtgaaatcccgtctttactaaaaatacaaaaatttgccggttatggggcacatgcctgtagtcccgtttgctcaggaggctgaggcaggagaatggcctgaatcygggaggtggaggttacagtgagccgagattataccactgcactccagcctgggtgacagagagggactccatctaaaaaaaagtaataataataataataaataaataaatgtacataaagtagagcttcattgtatatgtctgtct

SEQ ID NO: 43372 - DNA, 642 bp, Homo sapiens
attgaaggattcatatgaaacacatctaattttttttaagtttggatagtgggagttcaaaaagaaaatacacacacatttttataagcaaagtatggggacacagagaaagtgaaccttaaagactagtagattctcatcaccaagcagatactcaaatctgaagcctatgctctttgagtgataagcggggatagattcctgtctctattttaatttttgtttcggtacatttaaaattttcactgggtatgtgcagttgactttaccttatttaaatgtacataaaggccgggtgcagtggctcacgcctataatcccagcaatttgagaggccgaggcaggcggattaccaaaagtcaggagtttgagaccagtctggccaagatggtgaaatcccgtctttactaaaaatacaaaaatttgccggttatggggcacatgcctgtagtcccgtttgctcaggaggctgaggcaggagaatggcctgaatctgggaggtrgaggttacagtgagccgagattataccactgcactccagcctgggtgacagagagggactccatctaaaaaaaagtaataataataataataaataaataaatgtacataaagtagagcttcattgtatatgtctgtct

SEQ ID NO: 43373 - DNA, 642 bp, Homo sapiens
attgaaggattcatatgaaacacatctaattttttttaagtttggatagtgggagttcaaaaagaaaatacacacacatttttataagcaaagtatggggacacagagaaagtgaaccttaaagactagtagattctcatcaccaagcagatactcaaatctgaagcctatgctctttgagtgataagcggggatagattcctgtctctattttaatttttgtttcggtacatttaaaattttcactgggtatgtgcagttgactttaccttatttaaatgtacataaaggccgggtgcagtggctcacgcctataatcccagcaatttgagaggccgaggcaggcggattaccaaaagtcaggagtttgagaccagtctggccaagatggtgaaatcccgtctttactaaaaatacaaaaatttgccggttatggggcacatgcctgtagtcccgtttgctcaggaggctgaggcaggagaatggcctgaatctgggaggtggaggttacagtgagccgagattataccactgcactccagcctgggtgacagagagggactccatctaaaaaaaagtaataataataataataaataaataaatgwacataaagtagagcttcattgtatatgtctgtct

SEQ ID NO: 43374 - DNA, 725 bp, Homo sapiens
gtatcatttgtgtcgatatcctgattactgttatgacagtatattttgtgattagagtttgaaactaatgaatcttgtctagaaagaaaggattactggtatggacaggcagttaccctaaacattggcttmtttgtttttctgggtgctgtgttatttgttaaccttgaaacatttgtgctttgttttatcttctaagtatgtattcatcattttacctaacttttaatagatgagtttatttattaaaaagagtcccacaaatataaaagcttcaggtcctttaacacacaaatacgcagccctttattttatttgcaattatggattatgtactaaaagaaagccctaagagagggcataatttatttcaattgattttattataattatcattatcatgaattatcatcattatcatgaataaatattattatcattatcatgaataaattaccaagaattattattcatgaaaaatatggtttgaaataatcacattatcattatctataccttgaaatgtcctaggaatatcttgaaaacatgagagaatataggccagctctataacaattgtttcaagaggattgttatataaaatatagaaggatattttatatgtttatattttgtgtaatatgacaaaattaacaagtagttaacaaagaagggattctttatactaaaataatattaagaataaaaatctgttgaagaaatat

SEQ ID NO: 43375 - DNA, 725 bp, Homo sapiens
gtatcatttgtgtcgatatcctgattactgttatgacagtatattttgtgattagagtttgaaactaatgaatcttgtctagaaagaaaggattactggtatggacaggcagttaccctaaacattggcttctttgtttttctgggtgctgtgttatttgttaaccttgaaacatttrtgctttgttttatcttctaagtatgtattcatcattttacctaacttttaatagatgagtttatttattaaaaagagtcccacaaatataaaagcttcaggtcctttaacacacaaatacgcagccctttattttatttgcaattatggattatgtactaaaagaaagccctaagagagggcataatttatttcaattgattttattataattatcattatcatgaattatcatcattatcatgaataaatattattatcattatcatgaataaattaccaagaattattattcatgaaaaatatggtttgaaataatcacattatcattatctataccttgaaatgtcctaggaatatcttgaaaacatgagagaatataggccagctctataacaattgtttcaagaggattgttatataaaatatagaaggatattttatatgtttatattttgtgtaatatgacaaaattaacaagtagttaacaaagaagggattctttatactaaaataatattaagaataaaaatctgttgaagaaatat

SEQ ID NO: 43376 - DNA, 713 bp, Homo sapiens
agagtgaagcctgatgatttttctgttgctgtatctggcaaagtaaaagcaaagcccacatttttgacctggagttctttatgcttataataaaatttgattttctgggttttactttttggggtgtgtgtgtgtgtgagagagagagagagagagagagagaaagattctcttttgttctgaaccaatttaaacttggtttctatatctaatatagtcacacttgtttaatgactttctgtctaaacaaagttcactgggtgcaggtttatcctgaaggtatatcaagctaatggaatattttagtactctcttgataataataatctaataatttgaatttgcagacactaagaagaaggaggaggaaaayaaggaggaggagagaatcacgaaaaggaggaggaacaaaaggagagaaaaaagaaagaaggggagatgaagaaggaaaatgaattatttacattttatagtctcatctcctatgactttacttacacaaattggcttatttctcacaaatataaaggtttgtaactgttctattttacaaatagaaaatcaaaaagcacaacttagccttagagaggttaagtcactttctctgctaataagtttaagacctagagcgctaaaataggaagagtgctcttagcagtgcccagcttttaatcagtaccgcaagcctgcttggtttgctgcataggcttcta

SEQ ID NO: 43377 - DNA, 713 bp, Homo sapiens
agagtgaagcctgatgatttttctgttgctgtatctggcaaagtaaaagcaaagcccacatttttgacctggagttctttatgcttataataaaatttgattttctgggttttactttttggggtgtgtgtgtgtgtgagagagagagagagagagagagagaaagattctcttttgttctgaaccaatttaaacttggtttctatatctaatatagtcacacttgtttaatgactttctgtctaaacaaagttcactgggtgcaggtttatcctgaaggtatatcaagctaatggaatattttagtactctcttgataataataatctaataatttgaatttgcagacactaagaagaaggaggaggaaaataaggaggaggagagaatcacgaaaaggaggaggaacaaaaggagagaaaaaagaaagaaggggagatgaagaakgaaaatgaattatttacattttatagtctcatctcctatgactttacttacacaaattggcttatttctcacaaatataaaggtttgtaactgttctattttacaaatagaaaatcaaaaagcacaacttagccttagagaggttaagtcactttctctgctaataagtttaagacctagagcgctaaaataggaagagtgctcttagcagtgcccagcttttaatcagtaccgcaagcctgcttggtttgctgcataggcttcta

SEQ ID NO: 43378 - DNA, 713 bp, Homo sapiens
agagtgaagcctgatgatttttctgttgctgtatctggcaaagtaaaagcaaagcccacatttttgacctggagttctttatgcttataataaaatttgattttctgggttttactttttggggtgtgtgtgtgtgtgagagagagagagagagagagagagaaagattctcttttgttctgaaccaatttaaacttggtttctatatctaatatagtcacacttgtttaatgactttctgtctaaacaaagttcactgggtgcaggtttatcctgaaggtatatcaagctaatggaatattttagtactctcttgataataataatctaataatttgaatttgcagacactaagaagaaggaggaggaaaataaggaggaggagagaatcacgaaaaggaggaggaacaaaaggagagaaaaaagaaagaaggggagatgaagaaggaaaatgaattatttacattttatagtctcatctcctatgactttacttacacaaattggcttatttctcacaaatataaaggtttgtaactgttctattttacaaatagaaaatcaaaaagcacaacttagccttagagaggttaagtcactttctctgctaataagtttaagacctagagcgctaamataggaagagtgctcttagcagtgcccagcttttaatcagtaccgcaagcctgcttggtttgctgcataggcttcta

SEQ ID NO: 43379 - DNA, 649 bp, Homo sapiens
tttttaatcctgcaatttacttatcctatttcatgttgtccaataaaaatgaagagggagcaagtccatggaaaatgctagtacttctttattgctcatgtattgaaagattaaaaatttgtgatgaatacaagaaggtctccatagcaacacatgtagttagacaacgttctagatgattatcagtgagagaagtaatatcaaccgattaaaaatgaatggcacttatttccattgagacgagcctracaaatggagtgacagggctcaaggacaaatgaatatcaaggaagattggcctgtctcactgagtcatgttcaagctgttctacagccttatataaaagtgagagaatctctgctcattcttaaagtgcaaaccttgcccagcctcagaaccccactgtggatgttggcacaaatattacgaatattatgaaccatgtgaaaattcaaaagcactctattaaccacaaatgatcttgaatatatttcagtttattaaagaaacagaaaggaaggctcaacacaggtataaatactaatcgttgttttaagttcttgaaaaactgtcaaaaatttggagttactgataaaaatggtaggaaatatgtactgtaaccatttgagacatctcgactacaacata

SEQ ID NO: 43380 - DNA, 603 bp, Homo sapiens
ccaaaacatttytggatattaatattatattcagtggcccacattattccttactgtacagaatagtccaaatgtcaaggttttttcccaagtcaagtgactgatctttttagaactttgattaaaatttggaccatccttaatgtttatccttccaaaaatagtgatatttctgttattttaataattattggtatgttgctatttcctcatatagttcactaataaaaggttattaattcacttatatgtaaactgtagtttaatttctatatttactgttgctaacttgctattttgtggtatcatttcaaatacctatactaattatttgcagaaaaaataactctctttaaaaaaattctgttcatctgtacatacaatgttatatttctggattcgagagcacatctggtggttttgttgttgttgttgttgttgtttttgagacagagtctccctctgttgccaggctggagtacagtggcatgatcttggctcacagcagcctccgcttcccaggttcaagtgatactcatgccccagcctcccaagtagctgggactacagtcatgtgccaccactcccagctaatttttgtat

SEQ ID NO: 43381 - DNA, 626 bp, Homo sapiens
actagctgcggagcacgctggctggattcaaccccggttctgctagctgataaaagaagccttgtttttgtcctctgtggaatggggacagcagtagcactcttgttgcagagattattgtgcaaattaagcagtcagcccataagcagtgctcagaactgtgccctgcacatagccgagraaacactactgctattaaaccaggaaaatcttgagaacaggaaccttttctctctccctcttcccagcaccgatctcgtgccttcgtgttcagtgtgtatttgctaaagatggtgacgtgtagctggccctctgaggggggttcatttcagcacagaaatggaaaggagagaacttgggggaagactgtgtcttacgtggtcttgtgggcaaagttccagggccagaaaaaagcaagattgtccaggttgtaagagccagggctggtggttggaggcctggcagtgtgggagggctggagcagcgaggcttcctggaggaggtgagatgggtcaactgacctaaggggaaagtaagaagaaagtatggcaagaggaaggaggcaccacaggaactgaggggcaaagggtgggctcggagcatgtgtaaatctcagttctctttgc

SEQ ID NO: 43382 - DNA, 626 bp, Homo sapiens
actagctgcggagcacgctggctggattcaaccccggttctgctagctgataaaagaagccttgtttttgtcctctgtggaatggggacagcagtagcactcttgttgcagagattattgtgcaaattaagcagtcagcccataagcagtgctcagaactgtgccctgcacatagccgaggaaacactactgctattaaaccaggaaaatcttgagaacaggaaccttttctctctccctcttcccagcaccgatctcgtgccttcgtgttcagtgtgtatttgctaaagatggtgacgtgtagctggccctctgaggggggttcatttcagcacagaaatggaaaggrgagaacttgggggaagactgtgtcttacgtggtcttgtgggcaaagttccagggccagaaaaaagcaagattgtccaggttgtaagagccagggctggtggttggaggcctggcagtgtgggagggctggagcagcgaggcttcctggaggaggtgagatgggtcaactgacctaaggggaaagtaagaagaaagtatggcaagaggaaggaggcaccacaggaactgaggggcaaagggtgggctcggagcatgtgtaaatctcagttctctttgc

SEQ ID NO: 43383 - DNA, 626 bp, Homo sapiens
actagctgcggagcacgctggctggattcaaccccggttctgctagctgataaaagaagccttgtttttgtcctctgtggaatggggacagcagtagcactcttgttgcagagattattgtgcaaattaagcagtcagcccataagcagtgctcagaactgtgccctgcacatagccgaggaaacactactgctattaaaccaggaaaatcttgagaacaggaaccttttctctctccctcttcccagcaccgatctcgtgccttcgtgttcagtgtgtatttgctaaagatggtgacgtgtagctggccctctgaggggggttcatttcagcacagaaatggaaaggagagaacttgggggaagactgtgtcttacgtggtcttgygggcaaagttccagggccagaaaaaagcaagattgtccaggttgtaagagccagggctggtggttggaggcctggcagtgtgggagggctggagcagcgaggcttcctggaggaggtgagatgggtcaactgacctaaggggaaagtaagaagaaagtatggcaagaggaaggaggcaccacaggaactgaggggcaaagggtgggctcggagcatgtgtaaatctcagttctctttgc

SEQ ID NO: 43384 - DNA, 598 bp, Homo sapiens
catagacttgtgtattacagcgttgtgcaacatggatattcatttgacgatactgtgaatgtttttccatatcattaaaaaaaaaacatcacatatttttctttagctttcacattgttggtgtattttaatttacaaaggtataacctgcaacaccttttatagcttgcgattctttattgaggtgtaatttacatattgtaaagttttccctttctagtgggtagtttgtagttagtaggtttatgagttttgacaaacccatagtcatgtaatcatcaccataatcaaaatagagaacagttccttcaccccaaaaaggtcccgtgcccctttatagtaaatctctgccaccatccccgcccctggcaaccactgatgttttgctctcctataagtgtgccttttccagaatgtccatataaatggaattataatgtatgtggccttttgggtctggmtcctttcacttagcacagtgttctgaagtttatccatggtgtcgcatccatcagtaatgtttctttttgttgccgagtaatattccatcgtgtggatgaaccacagcttatttatccatgcactggttgagggacat

SEQ ID NO: 43385 - DNA, 457 bp, Homo sapiens
tagcatagagtaagttatttcagtttacctagaagagattcagagacagtcactatattatttactgtataatttatttctttctcctgtttattatctttctccccaactcatgaaggtagggagtttttctatcttgttagttgctgaatccctagtgtctaggatagcactagcacatagcaagtgcccattaaaacatttgttgaaggaataaataaatcattaagagagaaatgaccccagttctcactaaacttccaaacmtaatgaggtgtcagtaacacgctgatgcagatagagcaggccattgctgaagtacatgggagaaggaattaacccagatctgggaaggctcctgggaggaaatgatatttaaagtatgacctgaaaatggagaagttagacaaacaaaaagcaaaaatcaagggttggtgtgaagtgaatgaagtaagaa

SEQ ID NO: 43386 - DNA, 1587 bp, Homo sapiens
attttttggtattttcctgagtaagcattaagctgatgaaacattaattttacaaaatgtatttgtaaactctggtgataaggagcatctcatcctcaggtttaattttaattttaatttcttcaaatgtaattcattcacaatcctctcaggaatctcatgagtaattatagatacagtattaatcacatattctgggtataaatggtgttatagaaaatgtaatctataaaataaccatagtaaattctgccatgagatgtagataaatgtaaccactgttaatttgaacacaagatggccagtagagtagggagagcagggtgccatttattattcttcagagggcttttggtttctcaaatgaaagttgtgagaaaaataaaaagtgttgcagtcagaaagcaagatgatgcaagatgggagaaagtaaaataataaaatttaatttctgaaactttgtaaacaatttaataactgatttcttgacttttccattttctggggaagaaaaggcagcaataatcatggaggaaaaactgagagcaaaagtttgtagcctacaatttgtaaattagaaatatataaaagtaaaacggtacatcagtgaaaatatatttttgtgttgacattttaattttagtaaaatatatgaagaatataagctttacatttaaacgtcaagacaattttagtcatattaatgattataaatgatgatttaaactttgagaaacatttatttactttcctataccactttcttttctgtccaatttcaactacttaaaaaaattgctatatattagaytataagtacagatggattaatctctggggactattttaataacctccttaatactagtgtccctaacactattgtcatttgcctccttgtaatcatcctctattatgctaacagaacgatttatgatttgcagatcagtcactattccttttattctacagaataaagtccaaacactttggcatcaagtacaatttgaccattccctaatttcccactttgatctccagttcctggaaacctcatgttcagtgaacaggaatttctaaactcagaacctttgcttatctttctacctggattgctattctgcaaacctatgctcctgaagaattgctgatgggatgtaatttttttttttaaaaaagtcatctaatagtgcattagaaatagacataagcaaagaaataccaaccttgccaaaaaagctgaccccaaagtacaaggacagtgaaaaaagagtcaagtcagcttaaccccaactggcatttacaagattaacaatatggtttgcaatgcacttggaaagaaaccaaccggctttaagataattaagtgctaccatcaaggaaggattatgcaggtgccaaataaggttgtctgggacaccaaatcccttcgtatcttttaatgctataaaaataatgaagaacttgaagaagtatggccttaatcatatttgtgatactctaactctgactgaagaaagacttaagacaggaagctagatggagtaaagacagcaaacaacaagagagtcacatatttgcttaata

SEQ ID NO: 43387 - DNA, 1210 bp, Homo sapiens
  misc_feature (1)...(1210): n = A,T,C or G
ccaaccaacatttaccaagagtcaactttacacaaagttctgatcttatacattcatgcaatttctaataaaaaagacatagtaataacagctaatctctattgagaatttactgtatcaagcactgtaataaatattttaagtatagaagcttatcttaccctcatgagtataattaaattttcagatacgaaaaaataggccctaaaatatttatgtaattttcagtagaccacatgatgagaactagatttgagtgtgtagatttgactggcaaaactttcatttcttagcacaatattattgtccttttgaggttccatacttgtttttaagaatgaattacatatctgtgtgtattatgtattagcccatttttgttctgtttttgctttttttttcactctgtattctttttttaagaacaatccatattgctggaatacattggttctaactgtgggctgaagtaaattcaacaatatttatttattacaatcttacaacatcagaaaggcctaattcttctctaatagccattccttcttcttcctttaatagtgatgggcagctgagcacatggccatttagttaggaatttcacttcccagcatctgttgaagctaggtgtggccatgtgacnttcgntctgaataatgagatacgagtgttagacaggtgtcagacttctaggaatactcttaaatataagtggtatgccctccactttttctttcscctcctcccaccagctgcagccagagcaatcattttagactaggaggcagagtaagtgctaagttggcagagaaccagaagagagggaatgttagccacagaaaccatgcagctgccatattagccttggacttccgacactcagatctctgttacatggagatctatacatctctgtcttgtttaagtcaccgtaattccggcttttcttagagcagtcgcactgtattcaaatcaagatatttatccattcctctggtgaaagacactgagtttcctctaactctctccaccacactaacagtgcttaaataatatctacacattccctttgtggagctgtatgagatgccatctaagctagggacttgagagtaggagttatgggtcatagcttataagaatatttaatttgaccaaaaactgctagactgctttgcagaaagagattttgttcttattcgttagtgta

SEQ ID NO: 43388 - DNA, 1206 bp, Homo sapiens
tctagctaggctaaacccagtggaatgttagattaaattggattttaatattttgagaggactattgaagagagtagaagaaaattagctaaaacaatgtaaagtagatcctatgaggaaatgtaaaacgacagatagttacaaggattaaagaaaaggctgaggggacttcttaaaaacaaaaatgtaaatgaggctgggcgaggtggcgcacacctgcagtcccagtactttggaaggctggggtgggaggatcgcttgagcccgggagttcaagaccggactggcaacatagtgagactccatctctacaagtatatatatacacactcgtagactagtatagtctatactagtatacactagtgatatactgtatcactagtctataacttagttattggattttaagtccaatatgaattttgcttctatgccttgtgcctagttagttatgcccccatcttatgtggaacaactttgtttgtcagctcccttcatagctgtgattacaatgccatctttaaaaaaatatttttgggtaaagtttacctagagtaaaatgcatggatcttaagtatacatcttggtgaattctgatagatgtatacatccatgtaaccaacatcatatatatatctgggcatggtggtaagcrcctgggttccagctactcgggaggctgaggtgggaggatcacttgagcccaggagttagagctgctgtgagctatgatatcaccctactgcactccagcctaagcaacagagcaagaccatgattctattttttttttaagtaaatgaaggggaagtgtgtgatatggaggacatagctcttttatatttcacagataacagaattatatgcaataattcaaaactatggtaaaagcaatttaggttagacttttagaaagaacttagtgattgggcatgctcccccctgccaaaagtcagtcgccatagtccaatgctgatggtgctaccggaagcaaaggaaaggacaactggccactgagagcctctctcagccctgagttggggaccacaggacatctgagagtattacttaatggaatccatgaaagaaaaactctaagtcagtacacatcctcattcatttaggctctcatcaactatggaaggaaggaagctgtttgttaatttttaagaaatgattaataagaatcctttggcttttgat

SEQ ID NO: 43389 - DNA, 1206 bp, Homo sapiens
tctagctaggctaaacccagtggaatgttagattaaattggattttaatattttgagaggactattgaagagagtagaagaaaattagctaaaacaatgtaaagtagatcctatgaggaaatgtaaaacgacagatagttacaaggattaaagaaaaggctgaggggacttcttaaaaacaaaaatgtaaatgaggctgggcgaggtggcgcacacctgcagtcccagtactttggaaggctggggtgggaggatcgcttgagcccgggagttcaagaccggactggcaacatagtgagactccatctctacaagtatatatatacacactcgtagactagtatagtctatactagtatacactagtgatatactgtatcactagtctataacttagttattggattttaagtccaatatgaattttgcttctatgccttgtgcctagttagttatgcccccatcttatgtggaacaactttgtttgtcagctcccttcatagctgtgattacaatgccatctttaaaaaaatatttttgggtaaagtttacctagagtaaaatgcatggatcttaagtatacatcttggtgaattctgatagatgtatacatccatgtaaccaacatcatatatatatctgggcatggtggtaagcgcctgggttccagctactcgggaggctgaggtgggaggatcacttgagcccaggagttagagctgctgtgagctatgatatcaccctactgcactccagcctaagcaacagagcaagaccatgattctattttttttttaagtaaatgaaggggaagtrtgtgatatggaggacatagctcttttatatttcacagataacagaattatatgcaataattcaaaactatggtaaaagcaatttaggttagacttttagaaagaacttagtgattgggcatgctcccccctgccaaaagtcagtcgccatagtccaatgctgatggtgctaccggaagcaaaggaaaggacaactggccactgagagcctctctcagccctgagttggggaccacaggacatctgagagtattacttaatggaatccatgaaagaaaaactctaagtcagtacacatcctcattcatttaggctctcatcaactatggaaggaaggaagctgtttgttaatttttaagaaatgattaataagaatcctttggcttttgat

SEQ ID NO: 43390 - DNA, 1206 bp, Homo sapiens
tctagctaggctaaacccagtggaatgttagattaaattggattttaatattttgagaggactattgaagagagtagaagaaaattagctaaaacaatgtaaagtagatcctatgaggaaatgtaaaacgacagatagttacaaggattaaagaaaaggctgaggggacttcttaaaaacaaaaatgtaaatgaggctgggcgaggtggcgcacacctgcagtcccagtactttggaaggctggggtgggaggatcgcttgagcccgggagttcaagaccggactggcaacatagtgagactccatctctacaagtatatatatacacactcgtagactagtatagtctatactagtatacactagtgatatactgtatcactagtctataacttagttattggattttaagtccaatatgaattttgcttctatgccttgtgcctagttagttatgcccccatcttatgtggaacaactttgtttgtcagctcccttcatagctgtgattacaatgccatctttaaaaaaatatttttgggtaaagtttacctagagtaaaatgcatggatcttaagtatacatcttggtgaattctgatagatgtatacatccatgtaaccaacatcatatatatatctgggcatggtggtaagcgcctgggttccagctactcgggaggctgaggtgggaggatcacttgagcccaggagttagagctgctgtgagctatgatatcaccctactgcactccagcctaagcaacagagcaagaccatgattctattttttttttaagtaaatgaaggggaagtgtrtgatatggaggacatagctcttttatatttcacagataacagaattatatgcaataattcaaaactatggtaaaagcaatttaggttagacttttagaaagaacttagtgattgggcatgctcccccctgccaaaagtcagtcgccatagtccaatgctgatggtgctaccggaagcaaaggaaaggacaactggccactgagagcctctctcagccctgagttggggaccacaggacatctgagagtattacttaatggaatccatgaaagaaaaactctaagtcagtacacatcctcattcatttaggctctcatcaactatggaaggaaggaagctgtttgttaatttttaagaaatgattaataagaatcctttggcttttgat

SEQ ID NO: 43391 - DNA, 553 bp, Homo sapiens
ttcctccttcattttgttactgtttgcctccagtgtgctccatgcccaccacaacctacaacattctgcttctaatctgcctcttagaattgtgagtaaattaagagcaattaaattttgaatgaagaactaaagaatgcttctgtgagtacaaaagttaaactgtcacacacacagactctttaaaataataataaaataaacatttcataatcctttctggtatattatgcatttttacattagtgattttttttctcctttaagctctgtgggacttgatagtgatcattttttattcttatatsccctgcatctacattgactgtttagatattatgtttgcataatgctatactcatgtctccatttctgttatgaaggttaccagataatggcaatcgtgatagcttgcataatttttctcaagtatttgttcttcccttccctgtaagaaaacattgattccctgcctttgccatgtgatttgcagggcctcctattggaatatacatctctaccccactgaaatcgggcttggtcctacgacaca

SEQ ID NO: 43392 - DNA, 725 bp, Homo sapiens
catattcctgcaaatgttgaatacctgtttgtgggggggtcacctcacttaacctctcccagcttcagtttcttgtctttactactacataaagttgttgaaaggattaaaggagactatataaacagctatttttatttatgattaaataatatctgtgtggttactatttagtctgsgtaactaaatagctgggtttttttgttctttgaacacatgcacatattccttttttaaaacaggcatatgggcaaatacattttttttctatatgcctccatgttgtttctctggatttctgccaggatgggatgtgccaattatgcacggaattgtttgcgtgtccatgggtgcttatataagtcattatctttggtgtatgacaaatacacaaactcctgtatctctagtagcctgtaattcctaattgagggacatgattgaatttatgtagtttagccccaagtaagtagataaaaattattaagtaaatgccctggttcatctaaacaaaatatgtgactaatagctttttatatgaactatatacatttagtttacctaagtttattaataaatagtatctctgagcatttttaattttatattttatacttaactatgaaagtatccagaaccagattccagtcactaactacctcttcattaatggatcaatggttttatcagatttattagaaatttgtctatactgagcatgtaat

SEQ ID NO: 43393 - DNA, 725 bp, Homo sapiens
catattcctgcaaatgttgaatacctgtttgtgggggggtcacctcacttaacctctcccagcttcagtttcttgtctttactactacataaagttgttgaaaggattaaaggagactatataaacagctatttttatttatgattaaataatatctgtgtggttactatttagtctgcgtaactaaatagctgggtttttttgttctttgwacacatgcacatattccttttttaaaacaggcatatgggcaaatacattttttttctatatgcctccatgttgtttctctggatttctgccaggatgggatgtgccaattatgcacggaattgtttgcgtgtccatgggtgcttatataagtcattatctttggtgtatgacaaatacacaaactcctgtatctctagtagcctgtaattcctaattgagggacatgattgaatttatgtagtttagccccaagtaagtagataaaaattattaagtaaatgccctggttcatctaaacaaaatatgtgactaatagctttttatatgaactatatacatttagtttacctaagtttattaataaatagtatctctgagcatttttaattttatattttatacttaactatgaaagtatccagaaccagattccagtcactaactacctcttcattaatggatcaatggttttatcagatttattagaaatttgtctatactgagcatgtaat

SEQ ID NO: 43394 - DNA, 725 bp, Homo sapiens
catattcctgcaaatgttgaatacctgtttgtgggggggtcacctcacttaacctctcccagcttcagtttcttgtctttactactacataaagttgttgaaaggattaaaggagactatataaacagctatttttatttatgattaaataatatctgtgtggttactatttagtctgcgtaactaaatagctgggtttttttgttctttgaacacatgcacatattccttttttaaaacaggcatatgggcaaatacattttttttctatatgcctccatgttgtttctctggatttcygccaggatgggatgtgccaattatgcacggaattgtttgcgtgtccatgggtgcttatataagtcattatctttggtgtatgacaaatacacaaactcctgtatctctagtagcctgtaattcctaattgagggacatgattgaatttatgtagtttagccccaagtaagtagataaaaattattaagtaaatgccctggttcatctaaacaaaatatgtgactaatagctttttatatgaactatatacatttagtttacctaagtttattaataaatagtatctctgagcatttttaattttatattttatacttaactatgaaagtatccagaaccagattccagtcactaactacctcttcattaatggatcaatggttttatcagatttattagaaatttgtctatactgagcatgtaat

SEQ ID NO: 43395 - DNA, 725 bp, Homo sapiens
catattcctgcaaatgttgaatacctgtttgtgggggggtcacctcacttaacctctcccagcttcagtttcttgtctttactactacataaagttgttgaaaggattaaaggagactatataaacagctatttttatttatgattaaataatatctgtgtggttactatttagtctgcgtaactaaatagctgggtttttttgttctttgaacacatgcacatattccttttttaaaacaggcatatgggcaaatacattttttttctatatgcctccatgttgtttctctggatttctgccaggatgggatgtgccaattatgcacggaattgtttgcgtgtccatgggtgcttatataagtcattatctttggtgtatgacaaatacacaaactcctgtatctctagtagcctgtaattcctaattgagggacatgattgaatttatgtagtttagccccaagtaagtagataaaaattattaagtaaatgccctggttcatctaaacaaaatatgtgactaatagctttttatatgaactatatacatttagtttacctaagtttattaataaatagtatctctgrgcatttttaattttatattttatacttaactatgaaagtatccagaaccagattccagtcactaactacctcttcattaatggatcaatggttttatcagatttattagaaatttgtctatactgagcatgtaat

SEQ ID NO: 43396 - DNA, 509 bp, Homo sapiens
aggttcttgagtttgtatctcttctttgggattttgctaagagccacaaaaaccagtcgtaccaacattctctatatattacatatttagattggtgcaaaggtaattgtggttttygccattacttttgcttgcaccaagcaccaagagaaatgttgatcaaaggatacttattcttatagcactatagcctctgaacctatgttctatcttccaaggtaaaacattatggttttgccaaatgttttgccactgcataacaaggattatcaactttccaacctgctgtatctgagtcaatactacttatcacacagtgagtattccaatgagacacccgtttgtctttcttacgttcagcactctactttaagacaccaaaattagctgtatatgtgttcaacagcaatagtgggtttcacaagataaatgtttgcttctcatgtgagatactggaggtagacagtccaggcctgctgggaggagtttgtgctctatgaaatcttgaa

SEQ ID NO: 43397 - DNA, 565 bp, Homo sapiens
cacatcaaatctgggactcatccctccacacctgtttagcctgcctgtgaggttcactacaattttcccagctctgtgatcatcaatgatttcaaattcgccaatggaaccatgcttcattgtcacagttaaaaaaaaaaaaaaagacaatgactttggagcacagcctagtaagaacctggcgtttgcctgtcttttcgacattgctgatgctcttgagggcatcagccaagtcgttcatgtgcaccattgtggtggcgtggaaagatgatggaaagaaaaaaaaatcacttcttacactcagattactctcacttaacagctgctggctagcattctgctttttgaagaaaccacatttgcagattagcagtctgtcagacgctgttctgtaaccacgaggagrtaatgttaaggactatatgtcactcattcactcggaaaagaatttctcatttgaagcctcagaactagatttctggatttagtattataaaactaagtaacaatactaatggaaatcactagtctgtttatgcctatttgccatttgaaaaaaaacaag

SEQ ID NO: 43398 - DNA, 971 bp, Homo sapiens
taggaaaaaatgtttgttgaatggctaataaaaatagctgatgccttattgagcccagataccacactaagttctttatgggccttctctcattttatccctagggtgaccctatgaggtagatattaccatcatatgcactttgcagattgggacactgaggcttgaagaaaaaaaaatgactcacacctgtgcccagctggtcagtgacaaagctcggagttgtcctgatccatttgactcctgaggccacgtatacttagcccaaagctagaccgtcttcagagagggaagcgagagagagagagagggagagatggaggaagggaggagaaagatctccctataagggcatcttaccctcctctgggtttctttctgtgtgtacsgaagtgtctggcacacagtggatgctctcaacaattaagggatgttaaatagatgtcggcgaattctctccctaaaggggaatatttgcctgtggtttaggttaaaaagaaatccaagcaaggcctcagattaacgtaaacacaagtcctaactcagcctgttcataactctccctggttttgcccgtaattttaggtatgaccttccggtaacctccatcttcccttgaggtgtggcctggcctccttaaaagcccgctctccaggcctgacaatgacaggtgaaggaccctagcagccttagagagactccttcaacagaggctgtgcctgcgcacctccccctgggcctcctcttgggctctccacacacccccttctccagtctctccctcccagctggcgtccctccacaacccccaatttatgcagcccccatcagtaactaacctctttggcctggcctcaaatcctgctctagaggtctgctcccatgagcaacttccttgggcagaccctggagacccgggtctcgcgggctccccgtctccagtcggaacattggtatccacagaccatgga

SEQ ID NO: 43399 - DNA, 933 bp, Homo sapiens
tttgcagaaggaagattttgaacttccaagtagctccagctaggactgcccacaggaagccatattaccaggacaagcagagcttttcatcatggacttgacttgaatttgcagtctcaaagttacctaaccacacaatcttctcccatctctcaaatgggtggatttacaagataacatctataaagcagttttttcaaggtttggtcccagggctactattatagatgaagagccaattatatacacaacctttttccaattgctttatatttggatctcaaagtataaaagataagaataagtttgatggggacatattaagaataagaaagaaaattaaattgaatattatatttaagtcagtggctctctcaactaacccaatccaagcttaattttcaatcgttgcttagctgttaagttttcttttagggttacagaaaaaaaatgttagtttaccctcaaggtgttgtctatccccagttttttattgacttctgttgttgcctgcactgttatggtttcatagtcttaatatcctacttgaatagagctgtacattttatatatatagatatagatatagatatatagatataactttcatacagatatattagtttttagctgctrcttgaaactcccatttctttctgaaatatatatgtttcagtgaaaggattatgaaatctaaaatccaaatggtcctgggcaggcagataacagctgtgtagaagggctaggtgtgcagggactaatgggtgctctggagaacagcaaagtttgtgcccacagaaagtcatttcaattaagaaaaggaaaagaattaaacagtgtgctgacaaaacaaaacacaatgcttataagaaaacgtaatgtttataagacccatctccacattgtctctcctgattgcgtgaaacaatattt

SEQ ID NO: 43400 - DNA, 620 bp, Homo sapiens
cttcctacatcacctcccctgcccatggtggtgcaatgtccatgggtgggggggcaagtcacatccctctcccagaaccagtttgagagtcacatgggatttgcttgggtttgaatctctggaccactatggactagtatgtggttatgggaagtttactgagcctcactgaaccacacttttctcatctgtaaaatagggattgtgaggcctgctacactcagaaggaagaaatgaaatagcttacacaagcctggacagcagaatgyggctacaataccacagtcccggagtccaggctgacttctttaatgctccctcgctccgggtttgacccagtgaaggttcttttctactttttaagcttcctctctttgtgtgaacgctctcagcctttattgggtcacacatgtctctgagattttaataacaaaactagaggttcaaagaatagatgtggattcacaaagatctgggctgaaatactggttctactttttatttttatttatttattttttattttgagaaggagtctcactctgtcgcccaggctggagtgcagtggcacgatctcagctcactgcaagctctgcctccggggttcactccattctcct

SEQ ID NO: 43401 - DNA, 620 bp, Homo sapiens
cttcctacatcacctcccctgcccatggtggtgcaatgtccatgggtgggggggcaagtcacatccctctcccagaaccagtttgagagtcacatgggatttgcttgggtttgaatctctggaccactatggactagtatgtggttatgggaagtttactgagcctcactgaaccacacttttctcatctgtaaaatagggattgtgaggcctgctacactcagaaggaagaaatgaaatagcttacacaagcctggacagcagaatgtggctacaataccacagtcccggagtccaggctgacttctttaatgctccctcgctccgsgtttgacccagtgaaggttcttttctactttttaagcttcctctctttgtgtgaacgctctcagcctttattgggtcacacatgtctctgagattttaataacaaaactagaggttcaaagaatagatgtggattcacaaagatctgggctgaaatactggttctactttttatttttatttatttattttttattttgagaaggagtctcactctgtcgcccaggctggagtgcagtggcacgatctcagctcactgcaagctctgcctccggggttcactccattctcct

SEQ ID NO: 43402 - DNA, 811 bp, Homo sapiens
gcatgctgcctgcctcctctctagagtaagaggtcctgagggcaaggattgtatctggctcactactgtattcttagattcttgagctgcacttagcgtttaattggtgtggttgcagcataatggcccacaaaatgtcctagtacccggaagctgtgaatatgttgagtgacatggcgaaggggaattaaatttgcaggtggaattaaagttgctaatcctcagaccttgagaaggggagagcatccggatttttttcaggggggcccaatgtaatcactagggtccttatacacagaagagggaggcggaagatcagagtcagagagaaatttgaagatgcagcgctgctggctttgaagatggaaacaagccaccagccaaggaatacagcctctagaagctgcaagagacaagaaaatggattctcctttataccctccagaaagaaatgcagccctgctagccccttaattttagctcatttagaacttccgacctaaataagtgagactcatttagaacttccgacctccagaactgtaagaaaatacrctaaatgtgtgtctatttgttaaagaagctgcagaaaactaatacaattaatgctcaataaatgttggttgcatcatgaaactacattgaatcagaaggttgcttaatgcatatggaatttgagcaaagcaaggacaaaaatctgcagggttgtgtcctccaggctctgctgagtcagctgaaccatccatggatgccccttctgctcacttcggtagccacgtcagccatgctcggaggtgtagcccatggacgg

SEQ ID NO: 43403 - DNA, 673 bp, Homo sapiens
atttacaagtgctccctgtgtgataggaaggaagctcaattctgaggacamggtgagtaatgaaacagacaccgtccctccatatgtggctcatgcagtccagtgggggcagaaagggaaggtcaccacatccactcccctgcgtttggatgacaagagcagttttcaaattttagtgtacacagaaatcgcctggggctcttattaaaatgcagattttgattaagcagacctgggacagatctgaggttctgcatattggagaaacttccagaggaaactcatgtccttcatccttggaccacactttgagtagcaggagactagagcaccttgcggggtggagggtgctaattctctgtcctaagaaggcaaagccccagccatcttggcaacagtctggtatcagatatctgctcatgagtgccaccctccaatatgtctagaatatctatccatcatcaacctcagcagggaaattacttcactctggccaggttagtactggttctctggaggctcttttgcacatgtgtagaatctctgagctccaagaataatgtggggaagatggtacagagcttggcaattcaaccaatttacatctttctttgccgtctgtgtctgctcatcctcctcctcatcaatcatcctcattgtagctaacacttaa

SEQ ID NO: 43404 - DNA, 675 bp, Homo sapiens
tctctgctacagctgctaaagtatatcctaactaacactctcttagactgtgcctgcttctgtacccgtggctttatgagttggtctgtgtgtagttgtatcttctacttcatattaaaggaacatgtttccttttcctgtggctattggcatctttccatcaatcatatcactgtcaccttgmgacagtcacaccccagggaataagggaagggtgtccaagccatggaaatggcatgtgcaccagtgtggagacagagagcagcatgatgccttctggaaagtgtgaggagctctctggaataggaggggctggtgaatgaggggaacagtagtaagagctggcaagaccaagctggcaagacctaacagtagtaagagctggcaagatctggaattggaggggctggtgggtaaggagaacagtagtaagagctggcaagccctaggtcatgaagagctttgtgccttaagacatggaaactttcactaaatacttgtggagagacactgaaggattgcaagcatacgactgacatgatcagacaggatggtctcaggaaccactctgaagacaactctggctgtgttttggttgttctcagaagacaactctggctgcattttggagggtggtttgaaaagaatctactgctgctgagagaacgtgagagc

SEQ ID NO: 43405 - DNA, 675 bp, Homo sapiens
tctctgctacagctgctaaagtatatcctaactaacactctcttagactgtgcctgcttctgtacccgtggctttatgagttggtctgtgtgtagttgtatcttctacttcatattaaaggaacatgtttccttttcctgtggctattggcatctttccatcaatcatatcactgtcaccttgagacagtcacaccccagggaataagggaagggtgtccaagccatggaaatggcmtgtgcaccagtgtggagacagagagcagcatgatgccttctggaaagtgtgaggagctctctggaataggaggggctggtgaatgaggggaacagtagtaagagctggcaagaccaagctggcaagacctaacagtagtaagagctggcaagatctggaattggaggggctggtgggtaaggagaacagtagtaagagctggcaagccctaggtcatgaagagctttgtgccttaagacatggaaactttcactaaatacttgtggagagacactgaaggattgcaagcatacgactgacatgatcagacaggatggtctcaggaaccactctgaagacaactctggctgtgttttggttgttctcagaagacaactctggctgcattttggagggtggtttgaaaagaatctactgctgctgagagaacgtgagagc

SEQ ID NO: 43406 - DNA, 526 bp, Homo sapiens
agccctgcttgatatgtcttaaaatgtctaggtttttaaaaaaatccaacttgtttatttcagggcagcttgtctttaccctgagtcctagtccttggaaatatcaattccatttgattattttcatagtttcaggtgtattctctaatggtacccaaaactaggctggcaaatccttctggaccctatgtccagaagatctgaartgctataatgccagagccttccagtctagaaggagctctccaagaagcctgtttccttcatctctagctatgatttatcttatttttactaacattcattgtctagacttctgccagcttgcaacaactttttctctttcagaaaatcttagcctttcatgctggaagtcttctaattcttgttccatatttctatccctagctgcctacagtgaacatctgtggttttttttcaagcattcattgacccatttctttatttaaagaaagaatcttgagtttcctttggggagctattcttcctccactttaagttcctg

SEQ ID NO: 43407 - DNA, 526 bp, Homo sapiens
agccctgcttgatatgtcttaaaatgtctaggtttttaaaaaaatccaacttgtttatttcagggcagcttgtctttaccctgagtcctagtccttggaaatatcaattccatttgattattttcatagtttcaggtgtattctctaatggtacccaaaactaggctggcaaatccttctggaccctatgtccagaagatctgaaatgctataatgccagagccttccagtctagaaggagctctccaagaagcctgtttccttcatctctagctatgatttatcttatttttactaacattcattgtctagacttctgccagcttgcaacaactttttctctttcagaaaatcttagcctttcatgctggaagtcttctaattcttgttccatatttctatccctagctgcctacagtgaacatctgtggttttttttcaagcattcattgacccatttctttatttaaagaaagaatcttgagtttcctttggggagctattcttyctccactttaagttcctg

SEQ ID NO: 43408 - DNA, 1615 bp, Homo sapiens
agccagctcattgctccatttgctgggctcattgggtcataaaggctgtggccttcaaagacctgggcgtggccctgccggctgacgaggactctggctgaagggtggggccttcccgactcccgttcaggcctccttttaagacagcagcccactgtcattctttaaacagggctgatgagggaccccctgtccatttttcttcagtgggaagtcaagaccgcagtcccaccctggccattgtggaggcctggaagctgcggggcccccgcccaggacagaccagtgccccccaccctcacaagccgtccctctgggctctccaaacactgccgacggtcccaggctctggtcatcagaagggtggccccagaccggtgcccagcccaggcccccaaccgaggccccaggagccgtttcatccccccgtgtttatgcatttttaactaagttcccccaagtccacacgtgactaatgtgacgtccaaccaccgtgaacgagaggagaccagcacgacagagctgctttgtcaaaatttgtatttattgtcaaaactttaccacatctcacacatttaaatgaaattagctctactgaaatttctgaccagaaaatcaactcatacccatgattacaaaagtaataaaggtgttaagaagcaacagccagccgggcgctgtggctcacgcctgtaatcccagcactttgggaggccgagtgaggtggatcatgaggtcaggagttcaagaccagcctaacaaggtgaaaccctatctctactaaaaatacaaaaattagccgggtatggtggcaggcgcctgtcgtttcagctacttgggaggctgagacaggaaagtcgcttaaacccgggagacagaggttgtagtgagccgagatcgcgccactgcactccagcctgggtgacagaacgagactccatctcaaaaaaaaaaaaaaaaaaaaaaagcagcagcagcaaaagtgcacagacccagcgtgcacgcgtctccgccacgcctcactcccgtctgtgcgcctggatccaccgccacccgcttgtataaaaagtgggccccacacagtgcagcttcgtagtctgcaaagaaaatgtccaaagaatgagttgtggatcctcccagccagagcccagatcccaggcaccccgccccacttcccccgaccaccaggcggccccagagcccaggttgtccctcccgccacctcctgtaatgggtccacccccaactccggtcagactggtcacagagcaccgcccagctccagccctcctctctgcatcctgggtcccagctcaggggctgcagagatcaacccagggcagaggcctggaccacgtcctccccagacacttccagaacccacacaaaagcacacatccacgtttyccttgttctagaatatttggcccctttctgccccaaggatgtgggggtcaaagccccggggttccccgtccgagcagaaagcaagcaggtgtagtcccaagtcagtaggcaggtgctgctggagcaggtgcaggtgcactggtgcaggtgccgctggggaggacccgaccgccccgttttcccatgccctatacctctttaggccaga

SEQ ID NO: 43409 - DNA, 1312 bp, Homo sapiens
agggtttcccagcttccatggctccttttactttccccttttgccctccctctaggatgcttccctcctcttccccactcactgtttaaactcttcactccattccttctcaaaataaaggccatttagtgataacttcctcagtttttctttcttttcatctcaatgctgtggccctcagcgacacttatgtaggtagagcagtcttctcagggcaagtatttttttttaacttctgtggtttcatctgaattgtttttgtttgaggcttaaatggatccattgatttttctgacctattcaggaactttgctatttttaaataaaagagagatgtgccaaggaatagcaagccaaaaccacttccattggtgaaaatcaccttcaagaaggacagactgactttcagaggcccggcaaagtggtggagtgggggctccagtctgagtgcaggaggtctgggggctcggctgtttggagcccagcccctgatgggtgaccctgcacatcattgcccttctctgtaccatgagggggttggtcaggggatttcaagccaatttctaactttgacaactcacctgggtctcctgagcttagggtcattggatgtcaccctatccctgcaagagcaaagcccagggaagccccagagcatgagtcacatggggtggcctcagtgggcctgcctgtgtccctacacaagacaatcatcctgsctgtctgggtagggcatgcattgtgaggtccaatttacaggaatgggaggaaattagagaagtggctcttcctcagttttgtaaagactctaaatgagccaacctctcacttccacctaccagacctgtgactcaggagtggcctcatggttgggttggaagaagggttcactgcatacacagggtctcctcatagccccttcagggtcccctacattttcttccctctgccacctctggtcaccactgactggaatatgcttgggtggtcaggtggaaatggagagaagacttcctccttctctgtgccccatccctaatagaatagtatattaatcaccaaaggggactgtgttagtccactctcgtgttgctgtaaagaaatacctgacactgggtaatttataaagaaaagaggtttaattggctcacggttctgcaggctacacaagtatggtgcccgcatctgctcagcttcttggtaggtctcagatagcttttacttatggaggaaggcaaagggggagtcggcacatcacatggcaaaagcaggagcaaaagagagaagggcagggaggtgccgcatactttta

SEQ ID NO: 43410 - DNA, 550 bp, Homo sapiens
tacaacatatgatctttaagttctgttttccctkcaaagaatggagggaaacttctttgctcattctatcttttgcccatctttaagatgagcccaaactcacccagcactgaccattgtcaaagtccagagtacaaatagaactgaaatgcaaaaggactattttgagggtgtcattcaccctccccactcactggagcaccctggatgcacctgttctttttctcttaggtaatcctttcctaatcctttttcaaatttcacctgccattgagagtccactgttgtcatttttgaaggacaaacctgtttttcaagtgataattgcattgaccatctgtctccattaaccatcccctaccccatcctctttctccaaatccccaaataactaaaataatagtgaaataaaagacaatatattatctggttgcaacacacagcattttgtccatgtttgttcaatatcaggacgaacctaacagcaaacatggtaccaacagaaaagttatctgggtttccagaagttttcctgccacagggttcagag

SEQ ID NO: 43411 - DNA, 476 bp, Homo sapiens
ctcaaaatggattaggtgtaaatgtacaacacataaagcttttttttcttaatagcagaaattttcgggatctagaactagccacgttgttagaattgacgtaaaaaacaattggactttcttaaaattagaagcttttgttctgtgaaagagcctgttaagggaatgaaaagacaagctacagactgggagaaaacatttgcaaactatgtatccgatgaaggcttttaacatctagaataaacaactctcaaaatgcagtagtaaacaaacaagcgaattaggaaactggcaaaagatatgaagagwtattccatataagagcatacccagatggcaaataaacccatgaaaacacgtttgtcatcattactcattagggaaatacaagttaaaattgcatggagataccattatatacacatcaacatagctaaaataaaaaacagtgagaaccccacatgctggtaaggatg

SEQ ID NO: 43412 - DNA, 1160 bp, Homo sapiens
ccaggctatcccattctcctcgaggtggggctccatgggggctgtgtcaggactgctctgaggtgcccaggcagcagccatgctagcatcatcctcagagcacagaccatctctgagtaagtctagtatgggagaatgctgtattgtcaagacgatttttgattacacaatcacaaagtgaatactccatgaacagaaaggcatgctggaaggaggcttacggggcctcaggacagaagccctgtgctgtggagctgagcctgtgcgctgtgggccttgtccctactatgtgtggggctggctgagccccaaggacagctgagtgtgctttggagacagttagcaactgctattagtcctgagaaaattctagcagttgcttctcggagtgtcttctttgggagaggccggtgggcaggtggtcaagggtggctgttttcctggcagtgaggcatggcaggaacaggatgaggcactgcagaagccccactggctggtcctgggctgcagtccctgacctggtcccgtctgctcctctggcacctgtgagcactcatggtgcccaagcacatgtggctgctttcactcccagttccctgtctctatttctggagtcccagagatagaaggcccccaagtgatctcatcaaggctgagagggcctcgcagggcagaaaggaggcccccacttgaacagctgtggcctgcagtcccctccgcgcctgctggacttgatgccaggcatgactgcctgcactggcaagagaggccctggcctgagaagctcctatcctggcaaaaagtgtgcctaagctgggaaggacccaggtgctgacctgaccatctcgccactgccaaggacaatgctctggatggcttgcaggtccagatgtccgccagagacttcactacttggccacagtctctgctgaggctcagaggagcctgggaggaggtaggggccagggctgggccacttctgactctgcatcagtarcccttagtcatgcccttggtatgtgacacaggcacagcaggttcgctgcagaacacccacagctgagcaggctggcctgtgctagcccctgctgcctcctgtcctgccagcagcaaacacagggaagtgctatagagaggcgtggggtggggggtcttagaat

SEQ ID NO: 43413 - DNA, 499 bp, Homo sapiens
cgccgcacagctgccctgttcagaggcggggccccagtacactccagggtgaatggctgctgagtctcrccctctgctctgtactggaccattgagcccagatggcactggccatgacaaccttggcccaggcacttagagacacgactcttccagccacagggatggcaacaaagaggcaagacctccctggagctcacggagaggcctggtctttccacctcacagctctgtcctcctgcagaggcccctcttcccactcctgtcccctcctcatgctgcttctcacactggaacaatcttgtccattagttgtcatagcaactgaggcagggcgaagtcatcctctagaaggggccctgtgcaaattatggcattacaccaacttattgccaatctttttaattaaaacattttgctttcaactcggctaatggcagagatcagtaaacagggggagattgaattaccgatattgaagctcccccagctcttaaaa

SEQ ID NO: 43414 - DNA, 552 bp, Homo sapiens
accaatttgttttactctgyattttaagttatcaggtgaaatggttttggaataaattaatgagttgtttgttctgaataaatgtgcatgttacaaatgcaaacacgtgtatgtattatacaactatgcagcttcaagagctgacttatttctatcagctttttattcacttaaaaaaatcaggctactgaagcatattagaatttaattacaccaattagtactgccacatcagacatatgatgtgccttcaattaagaagtacctaatgggtattagtacaatttagcttcataattaaagttctaagaacagcacaaattaaacattatgattacaaaacattaaaaatctactggtgaaattaaagctgaatatttaacttctccttttgagctgattttaaaaaagaaaatcaggattatataaaatgcaatgttattattgaagcattctgaatttaaaaacagaaattaagctcacatgcccataaatatgtgcatatataatgattaaatatttagtaaaatacccaacctaacacttgtgtca

SEQ ID NO: 43415 - DNA, 1407 bp, Homo sapiens
tgcatttgattaacatatagaaaaattgtaaattgtwttctaacatcacattaacttcaaatgtgaaagatatcttgtatcacttttaaagaaaatataaaatatattttatttagtaaaattgaatttgtagaatgatgacttttttttttactttactgcttaatacttgagaaattttcctctttgatgaggctgttagaaaacaggaactctaacaattatatagtgggaagataaattcatacaacgactttggaaatctacttgacaatgtaaggatgaaagtgcccaaagttgtaaaatttccctgctctatgtctatcctatgaaaattctaatatatataaacaacaaaaccataaatatttattgtagctttgtttttaacatttacaatggtaaatataaaaatgccaacatctgctgatatgaaaattgatagctttatattatatatataatgaaatcccatatagaaattaaacaaaaacggatacccaagtatcagctgcaatggttctcaaaaatatcatagtgagattataaagcatgtgttgaaataatacagataaaacaataacatcttatttaaatttgaagatacaaacactaccgtatgtgttataaaatattctatacacagacctgtacttaaaaatagagaaatatacaaggggatgctaaacaattttagcctgtagttatcccttgtagaatttcttataatcttgtttctggttatgttgctgtatcaattatttttcatgtttgggtatgtgtgaaatatttcataaaaggaagttggacgttttaataatacattgactttaacaggaggaagaacaggtgattggggtattttgttgtataccaacacatgactgaaataatcatctattttaattctgttcagttcagtggaaagtctttgaaggttttttaacagagttgcagtttgtcatatctttgagaacattgtgttagattaagtggaacagaaatgcttagagggaaggagattaaaataatgtgttgtatggatatttgaggtgacatacaatagaactggaaaatagagaaacttcatgaaaaatagtataaaaagagacataaatgacttaccaattgactctgctgtgtttgatagatgggaattgtagtcgtaacattggatgaaataggaaagacagactagtagagctctttggaggcaagttctataagttctttttacattttgagtggaagttttcacttttaaatgaaatgcatatggataaaaaataaaggtaaatatagttattatgaaattgtcaacataaaatgagagttgatgcataaaaatgaacagactggaaaaagggaactttttaaatataaaaaaaaattgcctcttttctgata

SEQ ID NO: 43416 - DNA, 1407 bp, Homo sapiens
tgcatttgattaacatatagaaaaattgtaaattgtattctaacatcacattaacttcaaatgtgaaagatatcttgtatcacttttaaagaaaatataaaatatattttatttagtaaaattgaatttgtagaatgatgacttttttttttactttactgcttaatacttgagaaattttcctctttgatgaggctgttagaaaacaggaactctaacaattatatagtgggaagataaattcatacaacgactttggaaakctacttgacaatgtaaggatgaaagtgcccaaagttgtaaaatttccctgctctatgtctatcctatgaaaattctaatatatataaacaacaaaaccataaatatttattgtagctttgtttttaacatttacaatggtaaatataaaaatgccaacatctgctgatatgaaaattgatagctttatattatatatataatgaaatcccatatagaaattaaacaaaaacggatacccaagtatcagctgcaatggttctcaaaaatatcatagtgagattataaagcatgtgttgaaataatacagataaaacaataacatcttatttaaatttgaagatacaaacactaccgtatgtgttataaaatattctatacacagacctgtacttaaaaatagagaaatatacaaggggatgctaaacaattttagcctgtagttatcccttgtagaatttcttataatcttgtttctggttatgttgctgtatcaattatttttcatgtttgggtatgtgtgaaatatttcataaaaggaagttggacgttttaataatacattgactttaacaggaggaagaacaggtgattggggtattttgttgtataccaacacatgactgaaataatcatctattttaattctgttcagttcagtggaaagtctttgaaggttttttaacagagttgcagtttgtcatatctttgagaacattgtgttagattaagtggaacagaaatgcttagagggaaggagattaaaataatgtgttgtatggatatttgaggtgacatacaatagaactggaaaatagagaaacttcatgaaaaatagtataaaaagagacataaatgacttaccaattgactctgctgtgtttgatagatgggaattgtagtcgtaacattggatgaaataggaaagacagactagtagagctctttggaggcaagttctataagttctttttacattttgagtggaagttttcacttttaaatgaaatgcatatggataaaaaataaaggtaaatatagttattatgaaattgtcaacataaaatgagagttgatgcataaaaatgaacagactggaaaaagggaactttttaaatataaaaaaaaattgcctcttttctgata

SEQ ID NO: 43417 - DNA, 1407 bp, Homo sapiens
tgcatttgattaacatatagaaaaattgtaaattgtattctaacatcacattaacttcaaatgtgaaagatatcttgtatcacttttaaagaaaatataaaatatattttatttagtaaaattgaatttgtagaatgatgacttttttttttactttactgcttaatacttgagaaattttcctctttgatgaggctgttagaaaacaggaactctaacaattatatagtgggaagataaattcatacaacgactttggaaatctacttgacaatgtaaggatgaaagtgcccaaagttgtaaaatttccctgctctatgtctatcctatgaaaattctaatatatataaacaacaaaaccataaatatttattgtagctttgtttttaacatttacaatggtaaatataaaaatgccaacatctgctgatatgaaaattgatagctttatattatatatataatgaaatcccatatagaaattaaacaaaaacggatacccaagtatcagctgcaatggttctcaaaaatatcatagtgagattataaagcatgtgttgaaataatacagataaaacaataacatcttatttaaatttgaagatacaaacactaccgtatgygttataaaatattctatacacagacctgtacttaaaaatagagaaatatacaaggggatgctaaacaattttagcctgtagttatcccttgtagaatttcttataatcttgtttctggttatgttgctgtatcaattatttttcatgtttgggtatgtgtgaaatatttcataaaaggaagttggacgttttaataatacattgactttaacaggaggaagaacaggtgattggggtattttgttgtataccaacacatgactgaaataatcatctattttaattctgttcagttcagtggaaagtctttgaaggttttttaacagagttgcagtttgtcatatctttgagaacattgtgttagattaagtggaacagaaatgcttagagggaaggagattaaaataatgtgttgtatggatatttgaggtgacatacaatagaactggaaaatagagaaacttcatgaaaaatagtataaaaagagacataaatgacttaccaattgactctgctgtgtttgatagatgggaattgtagtcgtaacattggatgaaataggaaagacagactagtagagctctttggaggcaagttctataagttctttttacattttgagtggaagttttcacttttaaatgaaatgcatatggataaaaaataaaggtaaatatagttattatgaaattgtcaacataaaatgagagttgatgcataaaaatgaacagactggaaaaagggaactttttaaatataaaaaaaaattgcctcttttctgata

SEQ ID NO: 43418 - DNA, 422 bp, Homo sapiens
  misc_feature (1)...(422): n = A,T,C or G
tcaaggattaatttccaccaattatgrcatgaataaaaccaatcaactaaaatatattttaaaaatcaagaagatagtaggaaaacagcctctgaggacccctggaacagtaattaggcgggcactctgtgcctgttggacattaccattttctttaatgtttgtatgaaacgacgccaatttatctttaagcaatttatctttaagttgtaaagtgatgcaaacagctgtcatgtaacaatcaccaagagaggacccattctagttcacaaactgccctgatgctttttataaaaaacaatccattcaggataatgtgttnnnnnnnnnnnnnnnnnnnnnnnnnnnnnnnnnnnnnnnnnnnnnnnnnnnnnnnnnnnnnnnnnnnnnnnnnnnnnnnnnnnnnnnnnnnnnnnnnnnnt

SEQ ID NO: 43419 - DNA, 422 bp, Homo sapiens
  misc_feature (1)...(422): n = A,T,C or G
tcaaggattaatttccaccaattatggcatgaataaaaccaatcaactaaaatatattttaaaaatcaagaagatagtaggaaaacagcctctgaggacccctggaacagtaattaggsgggcactctgtgcctgttggacattaccattttctttaatgtttgtatgaaacgacgccaatttatctttaagcaatttatctttaagttgtaaagtgatgcaaacagctgtcatgtaacaatcaccaagagaggacccattctagttcacaaactgccctgatgctttttataaaaaacaatccattcaggataatgtgttnnnnnnnnnnnnnnnnnnnnnnnnnnnnnnnnnnnnnnnnnnnnnnnnnnnnnnnnnnnnnnnnnnnnnnnnnnnnnnnnnnnnnnnnnnnnnnnnnnnnt

SEQ ID NO: 43420 - DNA, 1243 bp, Homo sapiens
tgctttgaatctcaaaatcagcaaaagaatcaggccccagaggaggcgtgtgtcgtctgtccctgctttttaaccccaggctggcatcaaagaggaaaagatgagctgggctcactagggtgtgaaatttcctttttktctcctggggtggggagggagagatgagaaattgcgctgcatctcatgtgtaattataggctctagaatttcttgaggattatgttgctcaaagagactcagtgggctctgtgtggtattgctgggccccggtggacatgcctctcagtaaactaagggagactaggagcggtgtgtgtgtgtgtgtgtgtgtgtgtgtgtgtgtgtgcgcgcgcatgtgtgtggacgaatgcaaggagaaagcacaactgacaaaatgtaaattaactcttgcagcttcatatttttcagaaaaatcagagcaggggctggctgtcttcacccagagataaacttctagaatctttgcccttgagttaccgagaggtgtccttgccagactcttggcatgttgctgcggacatgtctggcgagacaaaggtgaccgacttgttcccgttttctaggtactgcccagttttagcaatgaaagtcccacgtcacgggaaacctctgagtcctggacaaatcaagatggtaagtcaccctaggtatgacccttcagaccctaccctggccaagcctggaccaagagaagccagctgtgtcagaagactgggctggcagtggctggataaggtcacaggcaagtgcaggccatccagccaggttccaaatccatctctaattctcatcttgggatcccctgcctttatctgactgctccctcaagtagggtcacaccccagtcaggggccgttcctgctctgggaagggggtggtccattattccctcatgggtctggttggtctggctggcagagctgtgtgcctggggtgaggagagggcaggaccagtgctgaggccaagctataagtgctgtgcaacttgggaaagtccttttccttctctgggcctcagtttcataagcggttgcgctgagaaattgctgttttttttttttttttttgggagggggaagatttatgtttaaattatgaaagtaatacaattgttaaaaaaatttaacagtacataatgtaagatgagaggttaaagtccctttctgcttctccttatcctgtgggacaaccattgctaacagtctctttttatctttccaga

SEQ ID NO: 43421 - DNA, 1243 bp, Homo sapiens
tgctttgaatctcaaaatcagcaaaagaatcaggccccagaggaggcgtgtgtcgtctgtccctgctttttaaccccaggctggcatcaaagaggaaaagatgagctgggctcactagggtgtgaaatttcctttttttctcctggggtggggagggagagatgagaaattgcgctgcatctcatgtgtaattataggctctagaatttcttgaggattatgttgctcaaagagactcagtgggctctgtgtggtattgctgggccccggtggacatgcctctcagtaaactaagggagactaggagcggtgtgtgtgtgtgtgtgtgtgtgtgtgtgtgtgtgtgcgcgcgcatgtgtgtggacgaatgcaaggagaaagcacaactgacaaaatgtraattaactcttgcagcttcatatttttcagaaaaatcagagcaggggctggctgtcttcacccagagataaacttctagaatctttgcccttgagttaccgagaggtgtccttgccagactcttggcatgttgctgcggacatgtctggcgagacaaaggtgaccgacttgttcccgttttctaggtactgcccagttttagcaatgaaagtcccacgtcacgggaaacctctgagtcctggacaaatcaagatggtaagtcaccctaggtatgacccttcagaccctaccctggccaagcctggaccaagagaagccagctgtgtcagaagactgggctggcagtggctggataaggtcacaggcaagtgcaggccatccagccaggttccaaatccatctctaattctcatcttgggatcccctgcctttatctgactgctccctcaagtagggtcacaccccagtcaggggccgttcctgctctgggaagggggtggtccattattccctcatgggtctggttggtctggctggcagagctgtgtgcctggggtgaggagagggcaggaccagtgctgaggccaagctataagtgctgtgcaacttgggaaagtccttttccttctctgggcctcagtttcataagcggttgcgctgagaaattgctgttttttttttttttttttgggagggggaagatttatgtttaaattatgaaagtaatacaattgttaaaaaaatttaacagtacataatgtaagatgagaggttaaagtccctttctgcttctccttatcctgtgggacaaccattgctaacagtctctttttatctttccaga

SEQ ID NO: 43422 - DNA, 1243 bp, Homo sapiens
tgctttgaatctcaaaatcagcaaaagaatcaggccccagaggaggcgtgtgtcgtctgtccctgctttttaaccccaggctggcatcaaagaggaaaagatgagctgggctcactagggtgtgaaatttcctttttttctcctggggtggggagggagagatgagaaattgcgctgcatctcatgtgtaattataggctctagaatttcttgaggattatgttgctcaaagagactcagtgggctctgtgtggtattgctgggccccggtggacatgcctctcagtaaactaagggagactaggagcggtgtgtgtgtgtgtgtgtgtgtgtgtgtgtgtgtgtgcgcgcgcatgtgtgtggacgaatgcaaggagaaagcacaactgacaaaatgtaaattaactcttgcagcttcatatttttcagaaaaatcagagcaggggctggctgtcttcacccagagataaacttctagaatctttgcccttgagttaccgagaggtgtccttgccagactcttggcatgttgctgcggacatgtctggcgagacaaaggtgaccgacttgttcccgttttctaggtactgcccagttttagcaatgaaagtcccacgtcacgggaaacctctgagtcctggacaaatcaagatggtaagtcaccctaggtatgacccttcagaccctaccctggccaagcctggaccaagagaagccagctgtgtcagaagactgggctggcagtggctggataaggtcacaggcaagtgcaggccatccagccaggttccaaatccatctctaattctcatcttgggatcccctgcctttatctgactgctccctcaagtagggtcacaccccagtcaggggccgttcctgctctgggaagggggtggtccattattccctcatgggtctggttggtctggctggcagagctgtgtgcctggggtgaggagagggcaggaccagtgctgaggccaagctataagtgctgtgcaacttgggaaagtccttttccttctctgggcctcagtttcataagcggttgcgctgagaaattgctgttttttttttttttttttgggagggggaagatttatgtttaaattatgmaagtaatacaattgttaaaaaaatttaacagtacataatgtaagatgagaggttaaagtccctttctgcttctccttatcctgtgggacaaccattgctaacagtctctttttatctttccaga

SEQ ID NO: 43423 - DNA, 1094 bp, Homo sapiens
acaactaaactggacaggaaaaaaaaagctgtcttttggacaagaattagactacaaccaaccacatagaaaattctcccttgaaaaggttcacttttaaatttttttaggtctccataaatagagctttatgaggagaatttccagaaggctttagtgaaattacaagtacgaattagaaccatataacctaacactggataatcatataccaggaaaaggatgactgttctttagggaattgtcttttatcattttctagtttggattatatattaccattacctatctacctatactaaaagctacaattatttttattttatatataatttaccaaatgtatagtacactaaattttatgtgtagcatagaattacagcagtgattctctttctgaataataccagggctagtgctttctgctgcctttactgttttagcccagggtagaaacattccattcatacacagataacctcatctccaaataatcaaaatggtttactctatgtaagatatatatttatggagagagacagtgagaatgaacgcaagagcatgagcaagagagagagggaaaacaactggaaatggggttcccttgaaagaagattccaaagtctcagtaagtatttttgccacctttctaggcgcaccgatgcagaactacagtaaacttaaggaaaaagcaaaagcactgaagttgtgaaaaggatgatgcaattggcaccatggaaagaccccttgaagctagaatccaattaagtcagtttcaagtccaagatctccatttattggacctacaactttagagtttcattaaaaatctccaagcaccattttttgtcttgagcaaaaagtgttaagatcttaatattagtattaaaatcttaatattaatattaagacattaatataaaacagtcgagatataaccccctcctatttcacaaagttattgtgacacttgaatgaatgaatgctataaagttgttttgtctaccatgacaagaaggcrttatttaacttaaaaagcaagcaagcaaacaactgcagtttcttgagcatctacaagcgccaggcattgtatc

SEQ ID NO: 43424 - DNA, 670 bp, Homo sapiens
agaaacaggtttataaaggccatagagacgacttaaaggaaaacaattaggaatgaacaaaaatctcaccgccctgcaattctcagtctcaagctcaggataacagggtacttgtggagatttcacttacacactgggcatcatttctaactcacgtgcatttttagacaaaagttcgtctcttctatagtccagtggttcagagaggagctttggtatcataggtcctagattctaatctcaactctacatttattaattgtgttaccttgggcaagttatagttaacctctctgaaccttcaaattgatataacaatcaaaaatcttcctgatttggtcttggaaatgatgaaatgaaatgatgcaagaacacattaatgaacatgtacaccaggttccaagcactttatggaacatacagagacacacaggcacacatgtgcacacacactcatttccacacttcctgattatgtagaaagtgactaataaaaacttgtgttggaacgtaatggaaagagcactggactrgtataaagaccttgattctgaccacgttcatactgaccagctgtgtagttttgactaagttactgatctctttgggtacagtctcttcctctgcaaattgaagaggttgctggggctgggagctttaaggagactag

SEQ ID NO: 43425 - DNA, 558 bp, Homo sapiens
aagctttaaatattacaagaattaccaaaatgtaacatcgagacatgaagtgaacacatgctgttggaaaaatggcgcccatagacttgctcaacacagggttgccataacacttcagtttgtacagaatgcaatgyctgcaaagcataataaagcaagaacaataaaattagatatgcctgtacatcctacaggttctgtctctctggagaccccgactaatccactttctaagactcactggatggttggatggaatacataaccagctgagcactactttaaacttgtgaaactttatataagcacctaaataaatcagcaggtattactgatgtttccagtgggaactcgagaaaatcaggacaacagcagagttggcctggtgagttttctctctctcaacctcccaagtcctctcaatgagcaagttgttctttgtcccatagacacaccccagctatgtctactcattctcctccttgagatatttctctgtgttctaaggtttttgttcctcatatttctaatattcttcctttcccttcaaaacctcct

SEQ ID NO: 43426 - DNA, 1188 bp, Homo sapiens
ttgctttcattggagtctgtgccccagtaaatgctaagaaccacagagctatgcagaacttccaaccttcatgtcaagatacacaaagaaaaatgtatttatgggacaagtatttgtgatgacctggggtaatcaaaggatgttgctctggccccctgagkctggctgccccgatgccctaaggaccaagggggtccaggcttgggcccactgtgccccatgcctcgcaggcagttttggaagaggtgctccacatccttgccgctcagagtggggtccctggaccagcatgattgacagtacctgggagtgtattgtccacacatggcatggcctcattttcccagggcttggcaggtcagcaatgcagaacctccatcccaccagaccctctgaatcagaatctgcatttagaagatccctggtaatccctgagttcattaaagggggagaccactggggcatgggattgtcctatacagacggttcccaaaaaatgtggtgcaaagtcttattatgatagctaagtggggcctatttgcatttggagttatggggcactacaaatatttaattataatctataggattttagacactttatggttgtgtttttcaaactcacgtcatggtgagaattactcaaggacattcattaaaaatccaagatgtctgagccccactgagaatctgtgtgcagaatttcaagagaaggttaattaaatcccagaatggtcgagtgacctgcatagggttatagagctggttggcagatgggtgagttttgggggtatgcattttctcttctctattcttcttcttgctcactcttgcctttgtttgtctctctctttagaggatgtccttcatggcacacagaggggcctcatgttggcactggacccagaaagagctagttttcatctaaacagccttaccatttaccatgtgaccttgggcaagttaggctgagcctgtgtttcaacacttttcaatgggatttagtgcctcacacctcacgggtagttataaagctcagagttgccctgatggccagtacctggagactgtgccatcctcttccatgtccctcatgaggtgtgagggcatctccatgccttacagcttctgggccagatttcttggatgagggcagatgtgctccagccaccagatctgtctgtgtct

SEQ ID NO: 43427 - DNA, 1233 bp, Homo sapiens
gcatgagtccatagattaaagtgattagatagttgttagtaacaaagaacctttaaccagtcacatcaatttgcatctgtctctgaaaygggacttttcttaaatgcgtatgacatgatagccttgggagattgttatgtctaaccacaatagaaagagttttcttccagcaaggcacagtggctcctactatggaatcagctactcaggagctgaggtaggaggctcagttgagcccaggagttcaaggctgcagtgagctgtgatcacaccactgcactctagtgtgggtgacagaatgaggccctgtatctaaaaataaataaatattaaaaaattaaaaagaattttattttagaaagggtataattaagtggatattagttagaactctttaagatacaaatgacaaatgctcagtaaaaatttaaggaaaaagggagagaatgtattggctctttcaatgacaagtccatggggcagacctggggatcatcggatgccctctgtcttttccaattgatccttcaaaaggactctggctgggcctgcctgagtcactggtccactgcagcactgatacgagtgccacagtgggatctgttaccggactggcagcgttggtcatgcaccttctgtgcaaggagccggcagggctcctgggtggcagcaccgcctggagttggggagggagacagaacacaggtgcccagccctataatagcccgcaccagggagcagcgttgagccaggccccatgtttatctaatgacaaaatcaggggctcattcagcagggtcattgctttcaaagtgtgatgtatttccaaaggaacaaagatttagaggattttaaagaacaaatgttcaaaaagatgtcagcagaatgtcaatacgatgggcatggagtttacctagatggagggagactgacaaggcccatcttttcagaaatagccccaccagctgctaaaatgcagagggtggctgtcactgccagggttagtatcaccaccagcgttagtgaggtgaaggaagccagggacagtctcagtgccattggaagaaattgcccgcagtgaaccctctcccacctccgcgcacagcctcctcatctcaaggaaaaccacgactcccagacctctctttacagccaccatcgcctggaaaaccagcggtggccaccactgaatatctgaccacggagaagcaaggctggcgccatgcatcagaa

SEQ ID NO: 43428 - DNA, 1233 bp, Homo sapiens
gcatgagtccatagattaaagtgattagatagttgttagtaacaaagaacctttaaccagtcacatcaatttgcatctgtctctgaaatgggacttttcttaaatgcgtatgacatgatagccttgggagattgttatgtctaaccacaatagaaagagttttcttccagcaaggcacagtggctcctactatggaatcagctactcaggagctgaggtaggaggctcagttgagcccaggagttcaaggctgcagtgagctgtgatcacaccactgcactctagygtgggtgacagaatgaggccctgtatctaaaaataaataaatattaaaaaattaaaaagaattttattttagaaagggtataattaagtggatattagttagaactctttaagatacaaatgacaaatgctcagtaaaaatttaaggaaaaagggagagaatgtattggctctttcaatgacaagtccatggggcagacctggggatcatcggatgccctctgtcttttccaattgatccttcaaaaggactctggctgggcctgcctgagtcactggtccactgcagcactgatacgagtgccacagtgggatctgttaccggactggcagcgttggtcatgcaccttctgtgcaaggagccggcagggctcctgggtggcagcaccgcctggagttggggagggagacagaacacaggtgcccagccctataatagcccgcaccagggagcagcgttgagccaggccccatgtttatctaatgacaaaatcaggggctcattcagcagggtcattgctttcaaagtgtgatgtatttccaaaggaacaaagatttagaggattttaaagaacaaatgttcaaaaagatgtcagcagaatgtcaatacgatgggcatggagtttacctagatggagggagactgacaaggcccatcttttcagaaatagccccaccagctgctaaaatgcagagggtggctgtcactgccagggttagtatcaccaccagcgttagtgaggtgaaggaagccagggacagtctcagtgccattggaagaaattgcccgcagtgaaccctctcccacctccgcgcacagcctcctcatctcaaggaaaaccacgactcccagacctctctttacagccaccatcgcctggaaaaccagcggtggccaccactgaatatctgaccacggagaagcaaggctggcgccatgcatcagaa

SEQ ID NO: 43429 - DNA, 1233 bp, Homo sapiens
gcatgagtccatagattaaagtgattagatagttgttagtaacaaagaacctttaaccagtcacatcaatttgcatctgtctctgaaatgggacttttcttaaatgcgtatgacatgatagccttgggagattgttatgtctaaccacaatagaaagagttttcttccagcaaggcacagtggctcctactatggaatcagctactcaggagctgaggtaggaggctcagttgagcccaggagttcaaggctgcagtgagctgtgatcacaccactgcactctagtgtgggtgacagaatgaggccctgtatctaaaaataaataaatattaaaaaattaaaaagaattttattttagaaagggtataattaagtggatattagttagaactctttaagatacaaatgacaaatgctcagtaaaaatttaaggaaaaagggagagaatgtattggctctttcaatgacaagtccatggggcagacctggggatcatcggatgccctctgtcttttccaattgatccttcaaaaggactctggctgggcctgcctgagtcactggtccactgcagcactgatacgagtgccacagtgggatctgttaccggactggcagcgttggtcatgcaccttctgtgcaaggagccggcagggctcctgggtggcagcaccgcctggagttggggagggagacagaacacaggtgcccagccctataatagcccgcaccagggagcagcgttgagccaggccccatgtttatctaatgacaaaatcaggggctcattcagcagggtcattgctttcaaagtgtgatgtatttccaaaggaacaaagatttagaggattttaaagaacaaatgttcaaaaagatgtcagcagaatgtcaatacgatgggcatggagtttacctagatggagggagactgacaaggcccatcttttcagaartagccccaccagctgctaaaatgcagagggtggctgtcactgccagggttagtatcaccaccagcgttagtgaggtgaaggaagccagggacagtctcagtgccattggaagaaattgcccgcagtgaaccctctcccacctccgcgcacagcctcctcatctcaaggaaaaccacgactcccagacctctctttacagccaccatcgcctggaaaaccagcggtggccaccactgaatatctgaccacggagaagcaaggctggcgccatgcatcagaa

SEQ ID NO: 43430 - DNA, 1233 bp, Homo sapiens
gcatgagtccatagattaaagtgattagatagttgttagtaacaaagaacctttaaccagtcacatcaatttgcatctgtctctgaaatgggacttttcttaaatgcgtatgacatgatagccttgggagattgttatgtctaaccacaatagaaagagttttcttccagcaaggcacagtggctcctactatggaatcagctactcaggagctgaggtaggaggctcagttgagcccaggagttcaaggctgcagtgagctgtgatcacaccactgcactctagtgtgggtgacagaatgaggccctgtatctaaaaataaataaatattaaaaaattaaaaagaattttattttagaaagggtataattaagtggatattagttagaactctttaagatacaaatgacaaatgctcagtaaaaatttaaggaaaaagggagagaatgtattggctctttcaatgacaagtccatggggcagacctggggatcatcggatgccctctgtcttttccaattgatccttcaaaaggactctggctgggcctgcctgagtcactggtccactgcagcactgatacgagtgccacagtgggatctgttaccggactggcagcgttggtcatgcaccttctgtgcaaggagccggcagggctcctgggtggcagcaccgcctggagttggggagggagacagaacacaggtgcccagccctataatagcccgcaccagggagcagcgttgagccaggccccatgtttatctaatgacaaaatcaggggctcattcagcagggtcattgctttcaaagtgtgatgtatttccaaaggaacaaagatttagaggattttaaagaacaaatgttcaaaaagatgtcagcagaatgtcaatacgatgggcatggagtttacctagatggagggagactgacaaggcccatcttttcagaaatagccccaccagctgctaaaatgcagagggtggctgtcactgccagggttagtatcaccrccagcgttagtgaggtgaaggaagccagggacagtctcagtgccattggaagaaattgcccgcagtgaaccctctcccacctccgcgcacagcctcctcatctcaaggaaaaccacgactcccagacctctctttacagccaccatcgcctggaaaaccagcggtggccaccactgaatatctgaccacggagaagcaaggctggcgccatgcatcagaa

SEQ ID NO: 43431 - DNA, 1233 bp, Homo sapiens
gcatgagtccatagattaaagtgattagatagttgttagtaacaaagaacctttaaccagtcacatcaatttgcatctgtctctgaaatgggacttttcttaaatgcgtatgacatgatagccttgggagattgttatgtctaaccacaatagaaagagttttcttccagcaaggcacagtggctcctactatggaatcagctactcaggagctgaggtaggaggctcagttgagcccaggagttcaaggctgcagtgagctgtgatcacaccactgcactctagtgtgggtgacagaatgaggccctgtatctaaaaataaataaatattaaaaaattaaaaagaattttattttagaaagggtataattaagtggatattagttagaactctttaagatacaaatgacaaatgctcagtaaaaatttaaggaaaaagggagagaatgtattggctctttcaatgacaagtccatggggcagacctggggatcatcggatgccctctgtcttttccaattgatccttcaaaaggactctggctgggcctgcctgagtcactggtccactgcagcactgatacgagtgccacagtgggatctgttaccggactggcagcgttggtcatgcaccttctgtgcaaggagccggcagggctcctgggtggcagcaccgcctggagttggggagggagacagaacacaggtgcccagccctataatagcccgcaccagggagcagcgttgagccaggccccatgtttatctaatgacaaaatcaggggctcattcagcagggtcattgctttcaaagtgtgatgtatttccaaaggaacaaagatttagaggattttaaagaacaaatgttcaaaaagatgtcagcagaatgtcaatacgatgggcatggagtttacctagatggagggagactgacaaggcccatcttttcagaaatagccccaccagctgctaaaatgcagagggtggctgtcactgccagggttagtatcaccaccagcgttagtgaggtgaaggaagccagggacagtctcagtgccattggaagaaattgcccgcagtgaaccctctcccacctccgcgcacagcctcctcatctcaaggaaaaccacsactcccagacctctctttacagccaccatcgcctggaaaaccagcggtggccaccactgaatatctgaccacggagaagcaaggctggcgccatgcatcagaa

SEQ ID NO: 43432 - DNA, 735 bp, Homo sapiens
agacctgtaggcttgaactaagccacgttactggcatcccatggtctccagctggcgaatggcctgtcatgggactgcttgacttccataattgggcgagccaattcccccaaataaatcccctcttatatataaatatatatatgcacatataaagtcatacctcagggatgttgtgggtttggttccataccaccccaataaagtgactattgcaataaaaygagtcacacaaacttttttgtttcccagtgcatataacagttatgtttacactacactgtagtctattaagtgtgcactagcattatatctaaaaaatgtacataacttaattaaaaaatactttattgctaaaaattgctaatgatcatttgagccttcagtgactcatcatctttttgctggtagacgatctgcctcagtgttggtggctgctgactggtcagggtggtggttgctgaaggttggggtggctgttgcaatttcttaaaataagacagcaataaagtttgctgcagcaattggctctccctttcacaaaatatttttctgtagcatgtgatgttgtttgatagcattttacccacaatagaacttctctcaaaattggagtcgtcactgctacgcaacatatgtttgtaagaaacctgcggtaaatatacacattaaaacatccagagaaataactagaagactaaacgggaatactaacagtctctgagtggactgtta

SEQ ID NO: 43433 - DNA, 735 bp, Homo sapiens
agacctgtaggcttgaactaagccacgttactggcatcccatggtctccagctggcgaatggcctgtcatgggactgcttgacttccataattgggcgagccaattcccccaaataaatcccctcttatatataaatatatatatgcacatataaagtcatacctcagggatgttgtgggtttggttccataccaccccaataaagtgactattgcaataaaacgagtcacacaaacttttttgtttcccagtgcatataacagttatgtttacactacactgtagtctattaagtgtgcactagcattatatctaaaaaatgtacataacttaattaaaaaatactttattgctaaaaattgctaatgatcatttgagccttcagtgactcatcatctttttgctggtagacgatctgcctcagtgttggtggctgctgactggtcagggtggtggttgctgaaggttggggtggctgttgcaatttcttaaaataagacagcaataaagtttgctgcagcaattggctctccctttcrcaaaatatttttctgtagcatgtgatgttgtttgatagcattttacccacaatagaacttctctcaaaattggagtcgtcactgctacgcaacatatgtttgtaagaaacctgcggtaaatatacacattaaaacatccagagaaataactagaagactaaacgggaatactaacagtctctgagtggactgtta

SEQ ID NO: 43434 - DNA, 735 bp, Homo sapiens
agacctgtaggcttgaactaagccacgttactggcatcccatggtctccagctggcgaatggcctgtcatgggactgcttgacttccataattgggcgagccaattcccccaaataaatcccctcttatatataaatatatatatgcacatataaagtcatacctcagggatgttgtgggtttggttccataccaccccaataaagtgactattgcaataaaacgagtcacacaaacttttttgtttcccagtgcatataacagttatgtttacactacactgtagtctattaagtgtgcactagcattatatctaaaaaatgtacataacttaattaaaaaatactttattgctaaaaattgctaatgatcatttgagccttcagtgactcatcatctttttgctggtagacgatctgcctcagtgttggtggctgctgactggtcagggtggtggttgctgaaggttggggtggctgttgcaatttcttaaaataagacagcaataaagtttgctgcagcaattggctctccctttcacaaaatatttttctgtagcatgtgatgttgtttgatagcattttacccacaatagaacttctctcaaaattggagtcgtcactgctacgcaacatatgtttgtaagaaacctgcrgtaaatatacacattaaaacatccagagaaataactagaagactaaacgggaatactaacagtctctgagtggactgtta

SEQ ID NO: 43435 - DNA, 913 bp, Homo sapiens
ctgggacaggatggggactttttaatctataccttttgttatttgctgattttaaaaaattctgtgaaagtattacataattaaaaattaaatatgtaatgaaccaaatggtagcaaatcccaaacattacaaaatgcacataaaatagggaaacatatcatctgtaatgccatcattcagagatgttcagtcaacaatttttgtgtgtttatatctctctaaacttctaastatgcatttgcatgtgtacacacacatctctgtttcaaaagctgcttttctcatttgaccttagaagatgaatataattttaatgtcaatatatgattgcatcaccatttctaatatctccatgatactcaatttcatggatatagaataattcttttaaccattgcccactttgataaatacttaggtttttttctggttgtctatggttacagtgctaattcaaaagagcaaggtacagagtagtttgtacagtgtgctaccatttaggtaaaaatggattgggaacctattgatcaatatacatattcacttggaaagttactgaattctttaccaagtgaatgttagaaactatttttagaatttcacaaaaattcaaatgaacatttattcccacaagagtgtgctatactagaaataacctataaaacccttttcacagagaagacaatcctcttcaacccctccactcttctccacctccagtccttgaccaccaaccagataactttttaaaaaaaacagattctccaacctgtccctttgccatcctctgccctgtaaccttctgtactttttttttttcatgaatcacctatcattaccaatcatcactctaagggggacagccctcatccgtgcacacactattcagtgcccagggcctgagtattttga

SEQ ID NO: 43436 - DNA, 644 bp, Homo sapiens
catatgtaacaaacctgcatgttgtgcacatgtaccctagaacttaaagtataactaaaaaaaacctcactattattaataaaacactctagaatacttattttaaaaaaaactttctagggaagaggtgataacttcttgattgttgtcatggcaagcgtaaactgtgatggcactggtgggagggtcttatgctaatgagtagtgacggcggctagggattgcgctcatcaccatctactggttcctgctagtttctttgcttcatcccgtctggagcagatcctgttttggtcmgcagggttgtgaccagaaaacaagtcctgttggtctcccacctcaatctgacggatattattttgacacagtgtaagtatcttgttcctttacagcttttttccttgtggttttagaatctgtcagtaatctttgactgaaccaattatttcactgttgttacgttacaaaatgatacttttctaattctaaattcccttctatttttattagctggtattcacccataaagacgagctttttctcatcaactgtggatggactattttttctcccttaaaggcaggatacatgctttattcttttactttaattatcattttgcggaataaagagttggagtaata

SEQ ID NO: 43437 - DNA, 551 bp, Homo sapiens
ctattttagtaagagagagagggaggcagaattccattctgccctgactctagtagctttgggtgtattggcctctctagatactgagccttcccagtaagattaacttgtctgatttccatgtttaccagagttcaaatgggagtcccatatgtgccaaactatgtatgcaagactggttcaagggtttggtaattaattcaacaactatttattgattgctcaatataggccttacaggttctggagatacagcagtgagtacaacagatggataacctcctcttatcaacattccattctggtgcacagagacagaaaataaggggatacagaaaacttaagatggtaaagaaagtaaagcttgattaacaaatagaaaattacccagcwtgtgtgtgtttgaaggagggagtggctatggaggtgagaggaggcttgttaagttcagaggacctggaggaattttctgtgtctggaattagaaagggatgcaggctgggagttgaggtgagaaattagaaagtcgaaacctcaagaaaataagccac

SEQ ID NO: 43438 - DNA, 551 bp, Homo sapiens
ctattttagtaagagagagagggaggcagaattccattctgccctgactctagtagctttgggtgtattggcctctctagatactgagccttcccagtaagattaacttgtctgatttccatgtttaccagagttcaaatgggagtcccatatgtgccaaactatgtatgcaagactggttcaagggtttggtaattaattcaacaactatttattgattgctcaatataggccttacaggttctggagatacagcagtgagtacaacagatggataacctcctcttatcaacattccattctggtgcacagagacagaaaataaggggatacagaaaacttaagatggtaaagaaagtaaagcttgattaacaaatagaaaattacccagcatgtgtgtgtttgaaggagggagtggctatggaggtgagaggaggcttgttaagttcagaggacctggaggarttttctgtgtctggaattagaaagggatgcaggctgggagttgaggtgagaaattagaaagtcgaaacctcaagaaaataagccac

SEQ ID NO: 43439 - DNA, 1834 bp, Homo sapiens
taaacttacttatataactaatacttattgagcacccaccatgtaacaggcgctctgttacagacattgtttaatttcaattaatttctgtttcattcacttagtatatgatatggtttggctgcatccccacccaaatctcatcttgacttgtagctcccagaattcccacacattgtgggatggaccaagtgggaggtaagtgaatcatggggacaggattttcctgtgctgttcttgtgatagtgaataaatctcacgagatccgatggttttataaaggggagtttccctacacatgctctcctgcctgctgccatgtaagacattcctttgtttctcctttgccttctgccataattgtgaggcctccccagccaaatggagctgcaagtccattaaacctctttcctttataaattacccagtctcaggtacatctttattagcagtgtgagagcagactaatatagtatactacaatgttcactttttaaaacctcaatggctgttctagtattaattactgtgtaaagtgaacatctctatttaggtatctgcctttgagcattttatcttaatgtattagtttgttcaaatatataatcccacaggtatgtattatawtccaataacctaaccagtctctctcctagaaatccattggttttgattccacaaaaatgtcaatcctttagctgtaacttttcatccacccctaacttttccaggatgaacaggaaagaggtgttgaataattgtatatgttagcacccccacttcctgtcaccactaaccatttgttcccagcaaaaacacgattcctttaagatctctggacctcacacttctgtgcagtggggatttggggcctcagggttgggaagggcagacaaggaccctgatttcaggggtttcatcatcttctgggggaggcatacaacaagtaaagaatcttcaaccctgatgaatgtgcagtgtgatagaattcagtgggctctaatggcatgtggcaggaaactataaccttgtttaggggggacattctccccaagtgagtggccagtaatttcaggtgtgaaggctgagtggcagttagctgagtagaaggtggttggcagctgactggaagctgagtggaaggtgggtgatgaattgtccaggcagaggaacagcatgtatgcatgaggtcctgtgggcctgagagagcatggagcattcaaggaacatacttcttccctggccccagtagcagatcacagaggatattggcttacctggctcacccccttcaaaactatgagggcaccatctgcttagtgtgactaagttaaagagcatgggcacaggatcagactacctggattcaaatcccaccgcaccccttgctggcaatatgactttcagtgcatgacctgagatgcctcagcaagtgtttctgcttcttctgttgtggaattaggaaaatgatgtcaactctctcttgtcagaggatacctcataattgtcctgtgaggattaagttaggtgtcaggcaaaaacagagaccttcaagcagtttttctctacaagttgtctcctgatcaattatatactctccttagccgatttaagctttaaatatatgggcaagcaaagcccaggaaatgtagccagtaccgctgtattaaagagaatgacattattattaaaagagagtatttgtgtaaagaaaggataaagatgtagttttgaaaattggcttgaatagaaaacagtaacaaataatggctgggcatggtggctcacacctgtaattccagcactttgggaggctgaggcaggcagatcactt

SEQ ID NO: 43440 - DNA, 1834 bp, Homo sapiens
taaacttacttatataactaatacttattgagcacccaccatgtaacaggcgctctgttacagacattgtttaatttcaattaatttctgtttcattcacttagtatatgatatggtttggctgcatccccacccaaatctcatcttgacttgtagctcccagaattcccacacattgtgggatggaccaagtgggaggtaagtgaatcatggggacaggattttcctgtgctgttcttgtgatagtgaataaatctcacgagatccgatggttttataaaggggagtttccctacacatgctctcctgcctgctgccatgtaagacattcctttgtttctcctttgccttctgccataattgtgaggcctccccagccaaatggagctgcaagtccattaaacctctttcctttataaattacccagtctcaggtacatctttattagcagtgtgagagcagactaatatagtatactacaatgttcactttttaaaacctcaatggctgttctagtattaattactgtgtaaagtgaacatctctatttaggtatctgcctttgagcattttatcttaatgtattagtttgttcaaatatataatcccacaggtatgtattataatccaataacctaaccagtctctctcctagaaatccattggttttgattccacaaaaatgtcaatcctttagctgtaacttttcatccacccctaacttttccaggatgaacaggaaagaggtgttgaataattgtatatgttagcacccccacttcctgtcaccactaaccatttgttcccagcaaaaacacgattcctttaagatctctggacctcacacttctgtgcagtggggatttggggcctcagggttgggaagggcagacaaggaccctgatttcaggggtttcatcatcttctgggggaggcatacaacaagtmaagaatcttcaaccctgatgaatgtgcagtgtgatagaattcagtgggctctaatggcatgtggcaggaaactataaccttgtttaggggggacattctccccaagtgagtggccagtaatttcaggtgtgaaggctgagtggcagttagctgagtagaaggtggttggcagctgactggaagctgagtggaaggtgggtgatgaattgtccaggcagaggaacagcatgtatgcatgaggtcctgtgggcctgagagagcatggagcattcaaggaacatacttcttccctggccccagtagcagatcacagaggatattggcttacctggctcacccccttcaaaactatgagggcaccatctgcttagtgtgactaagttaaagagcatgggcacaggatcagactacctggattcaaatcccaccgcaccccttgctggcaatatgactttcagtgcatgacctgagatgcctcagcaagtgtttctgcttcttctgttgtggaattaggaaaatgatgtcaactctctcttgtcagaggatacctcataattgtcctgtgaggattaagttaggtgtcaggcaaaaacagagaccttcaagcagtttttctctacaagttgtctcctgatcaattatatactctccttagccgatttaagctttaaatatatgggcaagcaaagcccaggaaatgtagccagtaccgctgtattaaagagaatgacattattattaaaagagagtatttgtgtaaagaaaggataaagatgtagttttgaaaattggcttgaatagaaaacagtaacaaataatggctgggcatggtggctcacacctgtaattccagcactttgggaggctgaggcaggcagatcactt

SEQ ID NO: 43441 - DNA, 502 bp, Homo sapiens
ataaaactatagatgagtaataatgcctaatctataccaatagctctgtgctaatctttgatgttcacataatgtaccagactaataatactctgattctactgtgtacaggagtcatttctcatcttcctggtaaccctgaaaggtggattttattatctctaayttacacaaaggcaaataagctcagaggagtgcaagatcatgtccagagtcacaaaaccagtaagtgatgatcaagggtatttatgaatctagattccattccctgcactgtagctcaaactgtcttgagttctaccagtgtaaaaggtcaaatcgcattgtcttcccaacaaggctatatgatcattgaaggcagagaatgatttagcattcccttgtacctctggtacccaatttaatgttaaccccataataagtatgcataaaatacctggtgactagttcatgaggactcagtttgtatttaaaattcaacataatttgacaaggctgaatc

SEQ ID NO: 43442 - DNA, 597 bp, Homo sapiens
gatatcacaaaaccccttttatagatgatttaactaatgttcagagaagtgaagtcatttgcccaaatttacgcatgtaagaaatagcagaaccggccgggcgcggtggctcacgcctgtaatcccagcactttgggaggccgaggcgggcggatcacgaggtcaggagatcgagaccacggtgaaaccccgtctctactaaaaatacaaaaaattagccgggcgcagtggcgggcgcctgtagtcccagctactcgggaggctgaggcaggagaatggcgtgaacccggaaggcggagcttccagtgagcggagatmgcgccacagcactcccgcctgggcgacagaacgagactccgtctcaaaaaaaaaaaaaaaaaaaaaaaaagaaatagcagaaccagtggctcccttcaatgagtccattgtgcccagtgactgatatttctcaaaaagatcttcttatattgataaactaaaaatgtacaatattttgaggtagttaaaaatattccaagcctaacatgtcttaacataagccaaataatccaaatgtgtaacatctgctcagttttttgtttgtttgtttgttttttg

SEQ ID NO: 43443 - DNA, 618 bp, Homo sapiens
tgggcttgagtcaccatacaagaaggaagcctgttggggcaaaatacttcrggagtaacagctgtggggtgaacaacacagacagccaggggtagccaagagaggattacttggcaccagtgacatgcaaatcttcccttcttcatctttaaaccccttcccccgacttggaccccaggatatccagaagacaaagtggagaggtggccaagaatgagaagccacatttgccccctccctcactgtagatgcttgagccacaagagaggcatggggtaaagagggaaaagaagttgcagattgcatctgagatctaagtttttgttgccgtggtggtggtggtggttgttcttggagacaggcttttgctctgttacccaggctggagtgcagaggctcgatcataggtcgctgcaaccttgaagtcctgggctcaagtgatcctcttgcctcagccacccaagtggctggaactacaggaatggaccaccacatctagctaattcttttttttcttttttgtagagacaaggtctcgctttgttgcccaggctggtctcaaactcctggcctcaagcaacctggtctcggtctcccaaagtgctgagattacaggcg

SEQ ID NO: 43444 - DNA, 1634 bp, Homo sapiens
  misc_feature (1)...(1634): n = A,T,C or G
gnnnnnnnnnnnnnnnnnnnnnnnnnnnnnnnnnnnnnnnnnnnnnnnnnnnnnnnnnnnnnnnnnnnnnnnnnnnnnnnnnnnnnnnnnnnnnnnnnnnnctgactttcaaagctaagtggccaggctgtacttgggaatggaatttaggctcgagcaactatcagtggctagaatgtgtttccttctcagagcattgcagagctccactctggctctgrgagcagactaaggctaagtccatttggcttgacttaagagccattctgatggatgatttatttagtttgattcatgtgtgcgcgtgcgtgagtgcgtgtgtgaatatatgtgtacacgtgcaggtagctatctataaaggtacacatatgtgttaatatgcatcagccgtatgtattcctgtgctcaccacctgtgcacatgcctgtgtaagtaccttgacacttagaggggtgagttaaatgaacagacgcttgtgagcctaccagttgtctttttgtactgatgggtcagggccattgtttggtacaattaacctgggactcagacttgcaaatgaattcaacggggtactgtagcttggatgccttccagcgtgtggtgtgtaatgggggttgtgtttcaaagccttcgtcacactagactgccaactttcctgataccttgtgctttggaggacacaggcagagtggaagtatcagactggaaaattgcccagtgatctgttacaaacatattgtcaactgctggagcctccagtgcctgtccctgcagtgatgggtgaatgccattccctttggctctttggaagccatgtctgttctgattcatactgctgtggaaaaagcagcatgcctagagatggaggcattcaaaggcatgagcacgttgtctgcgaatgaaggatggtctggggaagtgtgagggggaaaatgcaagcacactcgaatatgggagggaaaactttcctcccttctgcctctgctgctgcctctaccctgtacttgtcccaaagccccatgtcaactgaataacatctcccgtctgccttttattatatggatggtgggttggggccctagagaacccagttacaacattcaccaccatcagatctacaaaacaaaagttatttcaaacctggtattcaaaggcctgggcaaaatagacaactgacttcctaatatgatttaagggtccagaaaagtgtccctatttcaaattatctacccttctatttggatatatttttcgttactttctccattaactcagttttcgtcttaaggagatacatactttttttttttttttggactgagtttcactcttttgcccaggctggagtgaagtggcatgatctcggctcactgcaaacttcgcctccccaggttcaagcaattctcctgcctcagtctccaggttgaagcaatactcctgcctcagcctcccgagtagctgggattacaggcgcccaccacgcctggctaatttttgtatttttaatacagacaaggttttgccatgttggccaggctggtctcgaactcttgacctcaggtgatccacccgcctcggccgatatgtgcatttttatttaatttacagttattgttatctggccagggtcatgc

SEQ ID NO: 43445 - DNA, 1619 bp, Homo sapiens
gcatgttacaccattgaagaaactgactcaggagatcttgggtgggatttgggagtctgtatttttttaaaagaacctccctgataattttgataatatatctttaactggggagaatgttcatgacttttatcagagcctcaaaaaactctgtgacctcaagaaatttaagaaccccttgtatgaagtttggcatgctaggtgctttttaatctgacctcatctttctttttcaacactgttgtcctattgggggattgagggacctaataaatagcacccttctttcttagctgagttctaagacaattaagaaataaatgagtaaggtagaaaggagatgaacatattacctttattttctaagtggctaattgcaatggactgaacattttcaacraattcatatgttgaaatcctaactcccaatgtgatagtattaggagataaggcctttgggaggtaatcaggtcataagggtggagactttacaaatgagattaatgcctttataaaagggaccctagagagctcattcaccctctttctgccatgtaagtattcaagaagtcagcagtatgcaacctggtagagagctctcagtagaactaaccatgctgaaaccccgatctcagatttccagcctgcagaactgtgagaaataagatctgttgtttacaagccattcagtctatgttactttgttatagcagcctgaactaagacattaatattgaagaatgtggcatataacttcaggctagtagagtaattaatactgaaaccccaaggttctacccacctagcctcaggtagtgtgggatgcaggagtagaacctgctcctgaaagctatgacgtgggggagcagggcagctcctgtcttgtccccaagcagctgactcccaaagaggaggaagggcaggtgctggaaagcacaggctaaacttcttccctaaactgcactggtagaatgaatgaagggataaagagaggccaggactgttactctaacagaattctgtctacatggaggcaagcatcaggaacagtgattactccctgactaacattttccattatttcttaataggtcacatgtttccctgcctctgtatcctgtttaacatctatcctgtctgaaatgccctttcagtgctcacttcagcagcacatatactaaaattggaaggatacagagaagattaacatggcctctgtgcaaggatgaaatgtcctctcaatcatcatcatttatctgaatttcatgtgtccttaaaaaccaggtggagtttgacttcctcagttgagtcttctctgactgctgctgtgggtaaactttccctgtaccaagagcaatctgcttggagtccccacagcagttccccaaagcctgattgacaccgacattacccacaggagagtttacccacaccaaaaccttggcctcactcttggagaatctgatcagatcttaagcggagtttaagaatctgtatttttaaaaagtctcttgggatagttctaataatctgccttgtccagaaaccaccgtccagtcattatttgcatgaaccttttgacactcacagccctggttgtaagaggggagaaatgcatc

SEQ ID NO: 43446 - DNA, 504 bp, Homo sapiens
taattataggtggcagtttaattatcaaacttgctagcatgttaataattcactgtaaatctgtatattttttattaataacaattctgaaatcaatccatttgggttggtggtatacagaatacaggtaagcgtgtaaactattgtgacttctttcaagtctaaatgatgtaataaaacttttaaattaaaaaaaaaagagcaagagttttaaaaaaagagtcacgaaaccatgccaaacagacaagyagacaactggcccacgcagtcactgtgattgaaaggagatgttttgtaaaccagaaggaagaaccacaaaacttggagagacaagaaggggtgtcagatcagaacctacagggaagggtaaaatgtgggcaaggatgaggaggtcagatgtcaagagtttgcagtcccatccacactgctctgtgtgtacctgctgtggggccagctgcctctttacacctcaggctgatgccacaaagacattttgtatgattt

SEQ ID NO: 43447 - DNA, 504 bp, Homo sapiens
taattataggtggcagtttaattatcaaacttgctagcatgttaataattcactgtaaatctgtatattttttattaataacaattctgaaatcaatccatttgggttggtggtatacagaatacaggtaagcgtgtaaactattgtgacttctttcaagtctaaatgatgtaataaaacttttaaattaaaaaaaaaagagcaagagttttaaaaaaagagtcacgaaaccatgccaaacagacaagtagacaactggcccacgcagtcactgtgattgaaaggagatgttttgtaaaccagaaggaagaaccacaaaacttggagagacaagaaggggtgtcagatcagaacctacakggaagggtaaaatgtgggcaaggatgaggaggtcagatgtcaagagtttgcagtcccatccacactgctctgtgtgtacctgctgtggggccagctgcctctttacacctcaggctgatgccacaaagacattttgtatgattt

SEQ ID NO: 43448 - DNA, 540 bp, Homo sapiens
gagaggtcaacctggaacattcatttccaaagttacctaaagattatacagaagtagacacaactttggttttcagatagcttaccatcaagtactcrgataaagcactaatattacttttctattgttgttacaaattaccacaactttagtggtttaaaacaacacaaatgtattagcttatagttctgtaattcagaggtttgggcatggttcaaccttgttctctgctcagggtctcacattcaagtattagttgagctgagttcttttttctttattatttttatttttaattttaggtggtgcacaggagggtgtatgtatttatgggttacatgagatattttgatacaggcatgcaatgagtaatacccaaataagggtgaatggtatatccattccctcaagcatttactcttcgtgttacaaacaatccaattacactctttcagttattaaaaaatgtacaattaaatatttttgactatagtcaccctgttgtgcaaggaaatactacgtcttattcattctatataa

SEQ ID NO: 43449 - DNA, 540 bp, Homo sapiens
gagaggtcaacctggaacattcatttccaaagttacctaaagattatacagaagtagacacaactttggttttcagatagcttaccatcaagtactcggataaagcactaatattacttttctattgttgttacaaattaccacaactttagtggtttaaaacaacacaaatgtattagcttatagttctgtaattcagaggtttgggcatggttcaaccttgttctctgctcagggtctcacattcaagtattagttgagctgagttcttttttctttattatttttatttttaattttaggtggtgcacaggagggtgtatgtatttatgggttacatgagatattttgatacaggcatgcaatgagtaatacccaaataagggtgaatggtatatccattccctcaagcatttactcttcgtgttacaaacaatccaattacactctttcagttattaaaaaatgtacaattaaatatttttgactatagtcaccctgttgtgcwaggaaatactacgtcttattcattctatataa

SEQ ID NO: 43450 - DNA, 596 bp, Homo sapiens
tcgccatgttggccaggctggtctcaaactcctggactcaagcgatctgcgcacctcggcctcccaaagtgctgggactacaggcgtgagccactgtgcccrgccctatgcccagcaattctcgacagccccctggcccttttctaaagcataggcctctggatctaattagacccatccccttccctggtccctcttatcttgggcactggaattcttttccctaagaatatggaggttctgaagacatttttgcatacatttttaaaaccaaacaaccctaatgctaccccagtcctgcaacggaactttagtggtggccatgcagcctgcccttggcacaactcagacaccagggaaggggaccttggggggctcttggagcagccattccctgtctgggtgttgaatgtatttagggagcaggagacaggcaggagaagagagctgagaggctgtggggcccctgtgttcacagtctcctggatgagtcagtggaggaaggggtgctgggctgggagtgaagaggcccgagttctagtcttgctcaggctctgaccagctgtgggtgggaggaagacagccacgcttcggtg

SEQ ID NO: 43451 - DNA, 596 bp, Homo sapiens
tcgccatgttggccaggctggtctcaaactcctggactcaagcgatctgcgcacctcggcctcccaaagtgctgggactacaggcgtgagccactgtgcccggccctatgcccagcaattctcgacagccccctggcccttttctaaagcataggcctctggatctaattagacccatccccttccctggtccctcttatcttgggcactggaattcttttccctragaatatggaggttctgaagacatttttgcatacatttttaaaaccaaacaaccctaatgctaccccagtcctgcaacggaactttagtggtggccatgcagcctgcccttggcacaactcagacaccagggaaggggaccttggggggctcttggagcagccattccctgtctgggtgttgaatgtatttagggagcaggagacaggcaggagaagagagctgagaggctgtggggcccctgtgttcacagtctcctggatgagtcagtggaggaaggggtgctgggctgggagtgaagaggcccgagttctagtcttgctcaggctctgaccagctgtgggtgggaggaagacagccacgcttcggtg

SEQ ID NO: 43452 - DNA, 605 bp, Homo sapiens
  misc_feature (1)...(605): n = A,T,C or G
aatgatcctttttatttgaaattacagctaaaattatgaaatagttctgttgagcctagaactatttttttaaaacctaatattcaagtctgagggataaacagagtatgtaattgccagattcaarcacaatatcttactgcacattaattgtgctctagaaattttaaattcagttttttagaaagagaattatgtagttagacatttcttgcattgatttttccttttgttatctcttggtattattagtatgtttaccttgaacagacaccttgccaaaagtaacaaggaggttggaaacaccttccagactaaagaaattctattactatgagcataacgtaatgagaggcagaattttcaaacttcaatctttgaagactttgattgaactatntgaaatgagcacaatctgcagaactaaaggctaagaatgaatttaataattttgacgactactttaaaatgataaaatcatttttaggtcattgggacattgtccctgtaaagctttgccaagtgattattgcattttcatggataatgtgaaacacacatgaattgaccaatacgttctgttttttattattatattgagcaca

SEQ ID NO: 43453 - DNA, 549 bp, Homo sapiens
agatgctctaagctgatcttctttcatgtgaggaccctcagggatgaacatattcattctgtcattcgctcacacatttactgagctcccactaccactgcccatggggatgggggcagaggataccgacaaggggtcacagatgagtatgtccccctctaagacccaaaggaactcacggtctggtgaggaagacaaatctgaaaaccactttgctaaaataagaaggccttggtggaggtaaatatcaggtactatgaaaacatagaggggtcactgaagcgtgcttaggtaggaggaaggtttttgattttttttgtttttttgtgtttgtttgttagcttgcttgttttttggttttttagaaggaatttttcctcttctctctctctctctctctttttttttttttttttgagacagaatttcgctcttgttgcccaggctggagtgcgatggcgckatctccgctcaccgcaacctctgcctcctaggttcaagcaattctcctgcctcagcctcccaagtagctgggattacaggcatgtg

SEQ ID NO: 43454 - DNA, 549 bp, Homo sapiens
agatgctctaagctgatcttctttcatgtgaggaccctcagggatgaacatattcattctgtcattcgctcacacatttactgagctcccactaccactgcccatggggatgggggcagaggataccgacaaggggtcacagatgagtatgtccccctctaagacccaaaggaactcacggtctggtgaggaagacaaatctgaaaaccactttgctaaaataagaaggccttggtggaggtaaatatcaggtactatgaaaacatagaggggtcactgaagcgtgcttaggtaggaggaaggtttttgattttttttgtttttttgtgtttgtttgttagcttgcttgttttttggttttttagaaggaatttttcctcttctctctctctctctctctttttttttttttttttgagacagaatttcgctcttgttgcccaggctggagtgcgatggcgcgatctccgctcaccgcaacctctgcctcctaggttcaagcaattctcctgcctcrgcctcccaagtagctgggattacaggcatgtg

SEQ ID NO: 43455 - DNA, 523 bp, Homo sapiens
tttacaggagttcattcgaggagtgaataggaattgatgaggcagacagggacagtggagttgacacttgtcatgtttttgattgtccagtactgagcaactttcctattttggagggaattcctcattataggagtcttagttggggaagcattctacctttgaccacatgctgatgagggcagggtttgtgtctccctgctccccccgaaccccgccacaaatgtggcatgggcagagtgagggtggggtgaggatgggccctggaagctgagctcagccaatctggtgctcccattgggatctttgggacctgggcaggagcagtcattcgtagcagtggtggtcattttggactccttcaggaacagtatctagtgttgggggtggtgtggatggtgagggggcagaaccagcagcagtgccctaacaaggtgctccctgtctygtgatcttggagtgttctctgccaccagcatcccttggttcccgacaaaaggcccggtgctgcccatcaactctt

SEQ ID NO: 43456 - DNA, 595 bp, Homo sapiens
atctttgaacctttattccagagatccagttgtcatcggtatccaggaagctctcctcttcctcctcctgacgtctacyactacagttgctggttgttgctaaggttgctgccatggtaacatgcacatcctgtttacaccttcatctgggcaagttggtctaagctaggaacctacctaccctggacaactactatcatcaccacctggggacaccaatcatcgtgacacggagtccaccttccactcagttcccccatcctcttcctcctctcgctgccagacttcatacggaagaaaggatctagacttcggacggctactcgggagcttattgcacaagatatattcaatctattccctcactgggcccccagagaagcaagaagtaggaagaagttttgacagggaggcaggagacactggtcagttgaagggaaacgctacatcttctctggttgaggggcttggtaacagcaggcaaaatgacgaacccatcagaccgtgtcttgcctgccaactcgatggccgagagccgtgaaggggactttggctgcacagtaatggaactgaggaagctcatggagctgcgttc

SEQ ID NO: 43457 - DNA, 595 bp, Homo sapiens
atctttgaacctttattccagagatccagttgtcatcggtatccaggaagctctcctcttcctcctcctgacgtctactactacagttgctggttgttgctaaggttgctgccatggtaacatgcacatcctgtttacaccttcatctgggcaagttggtctaagctaggaacctacctaccctggacaacyactatcatcaccacctggggacaccaatcatcgtgacacggagtccaccttccactcagttcccccatcctcttcctcctctcgctgccagacttcatacggaagaaaggatctagacttcggacggctactcgggagcttattgcacaagatatattcaatctattccctcactgggcccccagagaagcaagaagtaggaagaagttttgacagggaggcaggagacactggtcagttgaagggaaacgctacatcttctctggttgaggggcttggtaacagcaggcaaaatgacgaacccatcagaccgtgtcttgcctgccaactcgatggccgagagccgtgaaggggactttggctgcacagtaatggaactgaggaagctcatggagctgcgttc

SEQ ID NO: 43458 - DNA, 595 bp, Homo sapiens
atctttgaacctttattccagagatccagttgtcatcggtatccaggaagctctcctcttcctcctcctgacgtctactactacagttgctggttgttgctaaggttgctgccatggtaacatgcacatcctgtttacaccttcatctgggcaagttggtctaagctaggaacctacctaccctggacaactactatcatcaccacctggggacaccaatcatcgtgacacggagtccaccttccactcagttcccccatcctcttcctcctctcgctgccagacttcatasggaagaaaggatctagacttcggacggctactcgggagcttattgcacaagatatattcaatctattccctcactgggcccccagagaagcaagaagtaggaagaagttttgacagggaggcaggagacactggtcagttgaagggaaacgctacatcttctctggttgaggggcttggtaacagcaggcaaaatgacgaacccatcagaccgtgtcttgcctgccaactcgatggccgagagccgtgaaggggactttggctgcacagtaatggaactgaggaagctcatggagctgcgttc

SEQ ID NO: 43459 - DNA, 595 bp, Homo sapiens
atctttgaacctttattccagagatccagttgtcatcggtatccaggaagctctcctcttcctcctcctgacgtctactactacagttgctggttgttgctaaggttgctgccatggtaacatgcacatcctgtttacaccttcatctgggcaagttggtctaagctaggaacctacctaccctggacaactactatcatcaccacctggggacaccaatcatcgtgacacggagtccaccttccactcagttcccccatcctcttcctcctctcgctgccagacttcatacrgaagaaaggatctagacttcggacggctactcgggagcttattgcacaagatatattcaatctattccctcactgggcccccagagaagcaagaagtaggaagaagttttgacagggaggcaggagacactggtcagttgaagggaaacgctacatcttctctggttgaggggcttggtaacagcaggcaaaatgacgaacccatcagaccgtgtcttgcctgccaactcgatggccgagagccgtgaaggggactttggctgcacagtaatggaactgaggaagctcatggagctgcgttc

SEQ ID NO: 43460 - DNA, 618 bp, Homo sapiens
tgcctttgtaggtcaaaagtggttgtatattggctttttttttttttttttttgagacagagtcttgctctgtcacccaggctggagtgcagtggtgcgatctcggctcactgcaggctccgccccsccccgggggttcacgccattctcctgcctcagcctccccagtagctgggactacaggcgcctgccacctcgcccggctaattttttctatttttagtagagacggggcttcaccgtgttagccaggatggtttcaatctcctgacctcgtgatccgcctgcctcggccttccaaagtgctgggattacaggcgtgagccaccgcacccagccgtatattggcattttcatatggttcaatataataacttttggggggattatgtgccctaggaaactttgtgaaagtttgaatttctctacctctagctaatattccttagtttctggcctaggacatagcagaattacggccttggaaggtacttcctaattgaagttcccggcaggtggaggtgggaaatcttagaacctgttctactcccaaacatcaatggtggcagttcaaagccatatgctttttggcctcttttcccctggtcatcctgggca

SEQ ID NO: 43461 - DNA, 508 bp, Homo sapiens
cctgtaatcccagcactttggaaggccgaggcgggtggatcgcctgaggtcaggagwttgagaccatcctgaccaatatggtgaaaccccatctctactaaaaatacaaaaattagctgggcatgatagcgcacacctgtaatctcagctactcaggaggctgaggcaggagaattgcttaaacctgggaggcagaggttgcagtgagacaagatcgcgccattgcactccaacctgggcgaaaagagcgaaactccatctcaaaacaaaacaaaaattcacccagtccagctctctgccccaagtagcctggtctccacctctactctgcacacttcccaggttaaatacagagagtagttatccttttcccgccttcctcccccatggaccaagagcctctgtggtgagcacaaaacattttcgccattctcagctcttgttacagtgagatggacacacagcctagacagacatttaaaatttctgtcttccctgctgccccaga

SEQ ID NO: 43462 - DNA, 670 bp, Homo sapiens
aattgtggtgggcaatgagggtgacgcctttgggccattgtaaggctttgggtaacagccaagggtgacaaaagccactggagggtttggaacaacatgatgtgactttggttcagaagctgcctctggctgcctggtggagaacagactccagaggacaaggattgaagcaggcatccgcattaaatcagcaacttccagactcccaggggaaagaatctgtggggtttaaagaatggtccaggattggcctggtgcggtggctcacgcctgtagtcctaacactttgggaggccgaggcgggtggatcacttgaggtcaggagttcaagaccagcctggccaacatggtgaaaccccgtctttactaaaaatacaaaaattagccaggtgtggtagcaggcgcctgtaatcccagctacccaggaggctggggcaggagaatcactggaacccaggaggcggaagctgcagtgagcagagatygccccactgtactccagcctgggcgacagagcaagactctgtctcaaaaaaaaaaaaaaagaataaaaaaaaatggtccgggacacagaaggtgccacatgcagctgtatcttaggatattctgcacgcatgtcccaagttgaggacaaaagccttctaatcagttccatctgctgttgagtcct

SEQ ID NO: 43463 - DNA, 670 bp, Homo sapiens
aattgtggtgggcaatgagggtgacgcctttgggccattgtaaggctttgggtaacagccaagggtgacaaaagccactggagggtttggaacaacatgatgtgactttggttcagaagctgcctctggctgcctggtggagaacagactccagaggacaaggattgaagcaggcatccgcattaaatcagcaacttccagactcccaggggaaagaatctgtggggtttaaagaatggtccaggattggcctggtgcggtggctcacgcctgtagtcctaacactttgggaggccgaggcgggtggatcacttgaggtcaggagttcaagaccagcctggccaacatggtgaaaccccgtctttactaaaaatacaaaaattagccaggtgtggtagcaggcgcctgtaatcccagctacccaggaggctggggcaggagaatcactggaacccaggaggcggaagctgcagtgagcagagatcgcsccactgtactccagcctgggcgacagagcaagactctgtctcaaaaaaaaaaaaaaagaataaaaaaaaatggtccgggacacagaaggtgccacatgcagctgtatcttaggatattctgcacgcatgtcccaagttgaggacaaaagccttctaatcagttccatctgctgttgagtcct

SEQ ID NO: 43464 - DNA, 670 bp, Homo sapiens
aattgtggtgggcaatgagggtgacgcctttgggccattgtaaggctttgggtaacagccaagggtgacaaaagccactggagggtttggaacaacatgatgtgactttggttcagaagctgcctctggctgcctggtggagaacagactccagaggacaaggattgaagcaggcatccgcattaaatcagcaacttccagactcccaggggaaagaatctgtggggtttaaagaatggtccaggattggcctggtgcggtggctcacgcctgtagtcctaacactttgggaggccgaggcgggtggatcacttgaggtcaggagttcaagaccagcctggccaacatggtgaaaccccgtctttactaaaaatacaaaaattagccaggtgtggtagcaggcgcctgtaatcccagctacccaggaggctggggcaggagaatcactggaacccaggaggcggaagctgcagtgagcagagatcgccccactgtastccagcctgggcgacagagcaagactctgtctcaaaaaaaaaaaaaaagaataaaaaaaaatggtccgggacacagaaggtgccacatgcagctgtatcttaggatattctgcacgcatgtcccaagttgaggacaaaagccttctaatcagttccatctgctgttgagtcct

SEQ ID NO: 43465 - DNA, 670 bp, Homo sapiens
aattgtggtgggcaatgagggtgacgcctttgggccattgtaaggctttgggtaacagccaagggtgacaaaagccactggagggtttggaacaacatgatgtgactttggttcagaagctgcctctggctgcctggtggagaacagactccagaggacaaggattgaagcaggcatccgcattaaatcagcaacttccagactcccaggggaaagaatctgtggggtttaaagaatggtccaggattggcctggtgcggtggctcacgcctgtagtcctaacactttgggaggccgaggcgggtggatcacttgaggtcaggagttcaagaccagcctggccaacatggtgaaaccccgtctttactaaaaatacaaaaattagccaggtgtggtagcaggcgcctgtaatcccagctacccaggaggctggggcaggagaatcactggaacccaggaggcggaagctgcagtgagcagagatcgccccactgtactccagcctgggcgacagagcragactctgtctcaaaaaaaaaaaaaaagaataaaaaaaaatggtccgggacacagaaggtgccacatgcagctgtatcttaggatattctgcacgcatgtcccaagttgaggacaaaagccttctaatcagttccatctgctgttgagtcct

SEQ ID NO: 43466 - DNA, 1624 bp, Homo sapiens
tgtacatggagagagagccagagagagaaaacagctgtctggtgtctcctctaacaaggacaccaatcccattgggttagggccccaccctgtgacctcacttaaacttaattacttccttagaggccctacctctaaatacagccacatagggaggttagattttcaacatatgaattttgggaggagacacaaacgttcagttcataacatccattttacaaatgaggaaactgaggcagagagtggctaagtgaacagcccaagtcacatagttggcagtggcaatattcagacccaggtggcctggctccagagaccctgcccttacccatggtgctgtgttgcccctgccagggacagtgatgtccgtctggtttgagaaaaaggattcccagtaagaatttaggagctcgtgcagtgccgcagacagtggactcaaaggaagaaaagaaagtgcaagggaggctggagtcactgagaagtgtggtggcggaaagccaagatctgacaccaggaggaggaggaagtcccaatgttcatggagaaaacaaatatttttcatctctttgggtttttctgattttgtttttgtttattttgttttgtgtgtgtgtgtgtgtgtgtgtgtgtgtgtgtgtgtgtgttttgagatggagcctcgctctgtctctcaggctggagtgcagtgctgcgatctcagctcactgcaaccttcacctccctggttcaagcaattctcatgcctcagcctcccgagtagttgggaccaccagctgatagctcctaaagccaccacacctggctaattcttgtatttttagtagagacagggtttcaccatgttggtcaggctggtctcaaactcccgacctcaagtgatccacccacttcagcctcccaaagtgctgggattacaggcgtgagccgccgcacctggccaagatttttcatgtctttgtaagatgaaaaatcgaattattagattcctctgctgtgagtttgcatagcaccttatgcaaagtaaaactcacacaaatagcaacaagcaaccacatgaacacgacagcatccttcactccccgctgaggggatgaatcgcctggaggtgatcaaagcaatgtgcaagggatctgaatgcaccttctagaaaagacatgttactcccacatgctgagtgcacatgtgggagtaacaagcacaatcccgatgggagctagtgtgtcctgcatgcgactgtgtgcctggcagtgactgaagggcttgtctgtacccattcattaacccttacaacaaccacagagggcaggtactgttatgtatccccatgttagagatggggaaactgaggcacagagckgttcacttgtgcgacagctgacgcatatcaagctcttcttttgcaccaggcattgcgcatgaaccatctcaccgcatcctcacagcagccctgcaaaggagatggttttttcaatctccattttacagatgaggaaactgaggcccagaaagatccctttcccagggtcacacagctagtaagaagaatgtggagatttgatcccaggccaaatgacttctctgctaatgtctatctttcatggagaatagagtttgagatgaa

SEQ ID NO: 43467 - DNA, 564 bp, Homo sapiens
tcccaaagtaaagtttttacgtattatagtgaatarcaggtgaattctaatatgttccttctctatagtttattttcacatagtggcacataatgtgaaaagcataaaagcaaaaatgaaattgacactatttttttcctgtttttccccctctagcataatggcatttagaattggcatttatcacatttctgtggcttacttttgaattaattcactttcttatacaactaaaagattatagctagtctttatcttctaaggtttaacatctttttgagttcttgtgcttctcccctctctcaatttctcctttccttcttccattcctctcttctttcaacgaatatgaataagtacctattatgtgccaggcactgtctgagtactgggaagacaagggtgagaagaggtaattcttgctgtcatggggcttacagcctagtacgagaaattataccattacattacatcatgtgatggtcactataacagcgacagcctaagaggagaagtacaagttgagtggaggcacttgggaagatgcctaacctagtcttgttg

SEQ ID NO: 43468 - DNA, 564 bp, Homo sapiens
tcccaaagtaaagtttttacgtattatagtgaataacaggtgaattctaatatgttccttctctatagtttattttcacatagtggcacataatgtgaaaagcataaaagcaaaaatgaaattgacactatttttttcctgtttttccccctctagcataatggcatttasaattggcatttatcacatttctgtggcttacttttgaattaattcactttcttatacaactaaaagattatagctagtctttatcttctaaggtttaacatctttttgagttcttgtgcttctcccctctctcaatttctcctttccttcttccattcctctcttctttcaacgaatatgaataagtacctattatgtgccaggcactgtctgagtactgggaagacaagggtgagaagaggtaattcttgctgtcatggggcttacagcctagtacgagaaattataccattacattacatcatgtgatggtcactataacagcgacagcctaagaggagaagtacaagttgagtggaggcacttgggaagatgcctaacctagtcttgttg

SEQ ID NO: 43469 - DNA, 564 bp, Homo sapiens
ggcttattccctgagcctgtaggtctcaattaaaaaacaaaacaaaacaaaaatccactttttctgcaaggccttccctaactaatacactaggtttgcccctacttaattggtgtttttacagaatgctgtacccccctaccatcgtaacactcatcacatttcattttattaactgttatctgtcttgaataatcatctgtctgtggctataatctcagyctaggaaagtgcagtatctgactgtgtgctgctatgtccccaatgcataaggcattcacatatttgttaaatgaatgcatgcatacttgctttcaagagacagtgaacagactactgtgactagagctgaaagtccatattgggtaaaatagaaggtgcattttgaaaagacagattgggcctacaccgctgaattttaatgaatcacagcaagtttctgagcagtaggggattagaaaattgacattaggaagtttcatatggcaatggcattaaggatgaatcagtgataggtaagattaaataaggaaaaaactgtttaggaggttactcttattttgg

SEQ ID NO: 43470 - DNA, 564 bp, Homo sapiens
ggcttattccctgagcctgtaggtctcaattaaaaaacaaaacaaaacaaaaatccactttttctgcaaggccttccctaactaatacactaggtttgcccctacttaattggtgtttttacagaatgctgtacccccctaccatcgtaacactcatcacatttcattttattaactgttatctgtcttgaataatcatctgtctgtggctataatctcagtctaggaaagtgcagtatctgactgtgtgctgctatgtccccaatgcataaggcattcacatatttgttaaatgaatgcatgcatacttgctttcaagagacagtgaacagactactgtgactagagctgaaagtccatattgggtaaaatagaaggtgcattttgaaaagacagattgggcctacaccgytgaattttaatgaatcacagcaagtttctgagcagtaggggattagaaaattgacattaggaagtttcatatggcaatggcattaaggatgaatcagtgataggtaagattaaataaggaaaaaactgtttaggaggttactcttattttgg

SEQ ID NO: 43471 - DNA, 584 bp, Homo sapiens
ttcaccaaaacttatttaagccattatatagcagaaatcataagtactaaaagaagactgagcccctaaatcgcctaagattcctaactttagacatgctctaagcaataattaagtaggaagtctacggtaagactgggctggtgacaaagcagcatttcagaaaattttaagaaagctaartaacgactccatggttccaggagtgtggcaagagaggacttatcaaaaagatttatcagcagcaagctaggatttggatgaaaggggacactattaactggctattcaaagccagtttacacttgtttttagattcagtaccatctatgtagaaacagatttagtaaaatctctaacaaacattaaaacaaaaaggactttatacctaatcctgaattaaccagaaaatccaattagcctaaaaaaaagaaaatcccattcctcaagcactcttcttaactgaaattccatttgtataatactttgtaaaatattccctatagtgaaactgcacatacagcatgattcctactttgtaaatatatgtatatatatttaacacttgtagtttttaaacacaa

SEQ ID NO: 43472 - DNA, 584 bp, Homo sapiens
ttcaccaaaacttatttaagccattatatagcagaaatcataagtactaaaagaagactgagcccctaaatcgcctaagattcctaactttagacatgctctaagcaataattaagtaggaagtctacggtaagactgggctggtgacaaagcagcatttcagaaaattttaagaaagctaagtaacgactccatggttccaggagtgtggcaagagaggacttatcaaaaagatttatcagcagcaagctaggatttggatgaaaggggacactattaactggctattcaaagccagtttacacttgtttttagattcagtaccatctatgtagaaacagatttagtaaaatctctaacaaacattaaaacaaaaaggactttatacctaatcctgaattaaccagaaaatccaattagcctaaaaaaargaaaatcccattcctcaagcactcttcttaactgaaattccatttgtataatactttgtaaaatattccctatagtgaaactgcacatacagcatgattcctactttgtaaatatatgtatatatatttaacacttgtagtttttaaacacaa

SEQ ID NO: 43473 - DNA, 627 bp, Homo sapiens
cttgagcctgggaggcggaggttgcagtgagtcaagatcatgccactgcactccagcctgggtgacagagcgagaccttatctcaaaaaatattggtaatgaaaagaacctgaatytgtctcctggaaggtgcctgtcccctatccctgcaaaggagacgttcttcaaggatggttgttactatgatctgactgtttctgtctcccccaaatttgtaagttgtacctgccactgaccttcatgtctatggccacaatctcgggcttctcagacttgcattttgcaccttgttatgtggttgattaactagtgtaggtcttccttactagactggactattccctgaggataggggtctacatcttatttttgtacccctagcgccagcccaatgtgtgacacctagtagacatgcagggaacagttgaatgaacatggagttgttgaagagggggtgcatgacctttgtgaaaggcaaattcagccttttgtcaaagttggtcttggaatgggggggtggaggggagagaggcattcaacttcatttaatctcaatgctagatggttgtgtggcctcaggcaagttactgggtctcttagagccttagtttcctatctatgaagtga

SEQ ID NO: 43474 - DNA, 627 bp, Homo sapiens
cttgagcctgggaggcggaggttgcagtgagtcaagatcatgccactgcactccagcctgggtgacagagcgagaccttatctcaaaaaatattggtaatgaaaagaacctgaatctgtctcctggaaggtgcctgtcccctatccctgcaaaggagaygttcttcaaggatggttgttactatgatctgactgtttctgtctcccccaaatttgtaagttgtacctgccactgaccttcatgtctatggccacaatctcgggcttctcagacttgcattttgcaccttgttatgtggttgattaactagtgtaggtcttccttactagactggactattccctgaggataggggtctacatcttatttttgtacccctagcgccagcccaatgtgtgacacctagtagacatgcagggaacagttgaatgaacatggagttgttgaagagggggtgcatgacctttgtgaaaggcaaattcagccttttgtcaaagttggtcttggaatgggggggtggaggggagagaggcattcaacttcatttaatctcaatgctagatggttgtgtggcctcaggcaagttactgggtctcttagagccttagtttcctatctatgaagtga

SEQ ID NO: 43475 - DNA, 1028 bp, Homo sapiens
ctgtgctaagccggtgacccgcattatctcataaaatcatcatttcagcaagcccatgagtcttttacaaatattctccccattatacagatgcaggctcagctcaaggaaatcagcccacttggagagtgtggatgaggtttgggggcctgtgatggtaggtgggctgatgaaggggatcaggtcgggggtggggtgggtgggaatggtagggagaggactcccctgaagcaggcctggcagggtccctgaaagcctgtcccagtgtgagctccctggagggaagctgatgtggggaggggatgtggacagtgttctctatgggaattgtgcatatgaggacaggcaggagatccggggacatgtatgggagaatagacactgaggacactaatatgggaaagggtatattgtgggtaggatctgaataagtcaaaagggatgmgtgtggggcagggcatgaggacaggtatagggagcaggcaagtagagatggggtatgagggctggtatgtggagttgtgggtgtggatatgggcatgtagggacaggtatgagtgtcaggagcatgaaaagggtgtaacaagacagttgatggtgacactaaattccaaggagttggccatatctgtgttggctgctgtattccccagatccaagctcagtgcctagcacatggtaggggcttaggatgtcgttgtgtaatgactgaatggggaaagagcttggttgggtacaggtgttcttggttaggaggtgggcagatttaccatgagatattctaggagagtttgggttctctattcagcctctatgcactgggccaggctggggaatggtcagacctgcttccctggaacaggagaccagcccgggatgggagcccagtaaactgggggctgcaaagcattggatgatgttgggcgggggtggggtgggggtgggggaggactgccgtcagattattaatggccatgcgttgactcaattaaatccagcctgcttttgttggcaggcctccgcaatta

SEQ ID NO: 43476 - DNA, 1028 bp, Homo sapiens
ctgtgctaagccggtgacccgcattatctcataaaatcatcatttcagcaagcccatgagtcttttacaaatattctccccattatacagatgcaggctcagctcaaggaaatcagcccacttggagagtgtggatgaggtttgggggcctgtgatggtaggtgggctgatgaaggggatcaggtcgggggtggggtgggtgggaatggtagggagaggactcccctgaagcaggcctggcagggtccctgaaagcctgtcccagtgtgagctccctggagggaagctgatgtggggaggggatgtggacagtgttctctatgggaattgtgcatatgaggacaggcaggagatccggggacatgtatgggagaatagacactgaggacactaatatgggaaagggtatattgtgggtaggatctgaataagtcaaaagggatgagtgtggggcagggcatgaggacaggtatagggagcaggcaagtagagatggggtatgagggctggtatgtggagttgtgggtgtggatatgggcatgtagggacaggtatgagtgtcaggagcatgaaaagggtgtaacaagacagttgatggtgacactaaattccaaggagttggccatatctgtgttggctgctgtattccccagatccaagctcagtgcctagcacatggtaggggcttaggatgtcgttgtgtaatgactgaatggggaaagagcttggttgggtacaggtgttcttggttaggaggtgggcagatttaccatgagatattctaggagagtttgggttctctattcagcctctatgcactgggccaggctggggaatggtcagacctgcttccctggaacaggagaccagcccgggatgggagcccagtaaactgggggctgcaaagcattggatgatgtygggcgggggtggggtgggggtgggggaggactgccgtcagattattaatggccatgcgttgactcaattaaatccagcctgcttttgttggcaggcctccgcaatta

SEQ ID NO: 43477 - DNA, 526 bp, Homo sapiens
aaatagctttgataattcactcattacattctttcctaactaaactatttacattataaactttgttgatatgctgtgcttttgcattaataattctcatgtgtctcatttgtgaatacatgaaaactagttgtaaaataaggaaaatgtaattttgaaacatcttcaaaaacagttgcataatttaacaaatgtttataaattttcgtccttactctaaaaccatagatatcctaaaattgaytgaaggtaaaatgatttttaaagaactggatttctcaccatgagttattttatctccatacaaactgtggtagtgttatacaatggttaagaagaaattacttaaaaataagaataaagatacagcttattaacacttcattttgtggatgagacctgaaaaattaaacttttcttctagagacaagttgtagttgtgtatatagagtgtgaatagatagtgtccatattttactgtcattatttaaacagaaacatgcaatttgcacttcaaaaacctact

SEQ ID NO: 43478 - DNA, 526 bp, Homo sapiens
aaatagctttgataattcactcattacattctttcctaactaaactatttacattataaactttgttgatatgctgtgcttttgcattaataattctcatgtgtctcatttgtgaatacatgaaaactagttgtaaaataaggaaaatgtaattttgaaacatcttcaaaaacagttgcataatttaacaaatgtttataaattttcgtccttactctaaaaccatagatatcctaaaattgactgaaggtaaaatgatttttaaagaactggatttctcaccatgagttattttatctccatacaaactgtggtagtgttatacaatggttaagaagaaattacttaaaaatragaataaagatacagcttattaacacttcattttgtggatgagacctgaaaaattaaacttttcttctagagacaagttgtagttgtgtatatagagtgtgaatagatagtgtccatattttactgtcattatttaaacagaaacatgcaatttgcacttcaaaaacctact

SEQ ID NO: 43479 - DNA, 845 bp, Homo sapiens
cccctccccccaccccgcaacaggccctggtgtgtgatgttcccctccctgtgtgcatgggttctcattgttcaattcccacctatgagtgagaacatgcagtgtttcatttccacttaagtatctatctctatttgtcctttattttcacttccatcctagctctatcccttgtctccttcgtgtgtctcaggataagtgccctataacattttatacttctggaaacccttcaatataatgttattasatgtaaaaataaaaagtctgttttagcgaactctttcttcacaaattatcttttcctagttccctattagacaatttttgtaggctccatatgctattaatttatattcacttttagaagaattttcatcaaaagcaaaagtcttatgtaaattgtttatatgctatttgtacttctgtgtatatatacacgcatagccacatacatatatgtaactccagaggcctgcctggactgttaaataactgtattgaacaagagcaagaaaaagcttttcaaatttcaaacaacaagttgaactgaagagctcacatctttgaatgaaatagacactagtagcctttaaaaattaaacatttctactgttttaaaaaattataggcatcatagtatgaggaaaaaatgtaataatcctttttaattcttgccattttattaaccacggactccttatgccctgacttcattggtacccctttgagattaaacagaacaattaatttaaaattctgataaataaataaattacaccatttacttgaggtactctttcacctttcaagaaatattttgagaattcattagctaaatattg

SEQ ID NO: 43480 - DNA, 789 bp, Homo sapiens
ggatcctcaaagcaaagggtgtgagggccttatccctggccaaatgagcactgaatttgagagagaccaggaaaccttctaattattgggacactttactcctgaatcctgaatcctggaagttggtttctggccagggargcaggtgtctttatatcttgtctgtctctgtgaggcctcttgtccctctgcccttcccatctttctacccccgttaatcccagaacagatagaaacattctgccttctttgatgcctcttgctataaacttcaatggcttttgattgaattaataagtgaaatcaactttaataaaacatgaggtttaaagaatggcatttgacatgggtttagaatgaataaatggatcaagtaatgaattttgagaaaatgcatgtaaaatttatctttaattcccaatggcattttattaacttgactgtggaattaataaatgattctaaatcaataccaaaacgtgcaatcacaaatgtgtgaatgcacagaagtgtgaatgaagggcagtgcacacaagaaaaaaagatgtgcacatgaagaacttcttcattccaggtttttactgatccctctggtcaagatgggataagagtccaaaaatatgctttcctcacatggtcaaatgattcagcataaaatacaactgattgaacacaattatctatgctttaaatatattagaaaaaatccataaggaaaaatgatcctacaatcactaagattttaatttataataaaataaagcctagaaatgtatcttttgttcccaa

SEQ ID NO: 43481 - DNA, 789 bp, Homo sapiens
ggatcctcaaagcaaagggtgtgagggccttatccctggccaaatgagcactgaatttgagagagaccaggaaaccttctaattattgggacactttactcctgaatcctgaatcctggaagttggtttctggccagggaagcaggtgtctttatatcttgtctgtctctgtgaggcctcttgtccctctgcccttcccatctttctasccccgttaatcccagaacagatagaaacattctgccttctttgatgcctcttgctataaacttcaatggcttttgattgaattaataagtgaaatcaactttaataaaacatgaggtttaaagaatggcatttgacatgggtttagaatgaataaatggatcaagtaatgaattttgagaaaatgcatgtaaaatttatctttaattcccaatggcattttattaacttgactgtggaattaataaatgattctaaatcaataccaaaacgtgcaatcacaaatgtgtgaatgcacagaagtgtgaatgaagggcagtgcacacaagaaaaaaagatgtgcacatgaagaacttcttcattccaggtttttactgatccctctggtcaagatgggataagagtccaaaaatatgctttcctcacatggtcaaatgattcagcataaaatacaactgattgaacacaattatctatgctttaaatatattagaaaaaatccataaggaaaaatgatcctacaatcactaagattttaatttataataaaataaagcctagaaatgtatcttttgttcccaa

SEQ ID NO: 43482 - DNA, 789 bp, Homo sapiens
ggatcctcaaagcaaagggtgtgagggccttatccctggccaaatgagcactgaatttgagagagaccaggaaaccttctaattattgggacactttactcctgaatcctgaatcctggaagttggtttctggccagggaagcaggtgtctttatatcttgtctgtctctgtgaggcctcttgtccctctgcccttcccatctttctaccsccgttaatcccagaacagatagaaacattctgccttctttgatgcctcttgctataaacttcaatggcttttgattgaattaataagtgaaatcaactttaataaaacatgaggtttaaagaatggcatttgacatgggtttagaatgaataaatggatcaagtaatgaattttgagaaaatgcatgtaaaatttatctttaattcccaatggcattttattaacttgactgtggaattaataaatgattctaaatcaataccaaaacgtgcaatcacaaatgtgtgaatgcacagaagtgtgaatgaagggcagtgcacacaagaaaaaaagatgtgcacatgaagaacttcttcattccaggtttttactgatccctctggtcaagatgggataagagtccaaaaatatgctttcctcacatggtcaaatgattcagcataaaatacaactgattgaacacaattatctatgctttaaatatattagaaaaaatccataaggaaaaatgatcctacaatcactaagattttaatttataataaaataaagcctagaaatgtatcttttgttcccaa

SEQ ID NO: 43483 - DNA, 789 bp, Homo sapiens
ggatcctcaaagcaaagggtgtgagggccttatccctggccaaatgagcactgaatttgagagagaccaggaaaccttctaattattgggacactttactcctgaatcctgaatcctggaagttggtttctggccagggaagcaggtgtctttatatcttgtctgtctctgtgaggcctcttgtccctctgcccttcccatctttctacccccgttaatcccagaacagatagaaacattctgccttctttgatgcctcttgctataaacttcaatggcttttgattgaattaataagtgaaatcaactttaataaaacatgaggtttaaagaatggcatttgacatgggtttagaatgaataaatggatcaagtaatgaattttgagaaaatgcatgtaaaatttatctttaattcccaatgscattttattaacttgactgtggaattaataaatgattctaaatcaataccaaaacgtgcaatcacaaatgtgtgaatgcacagaagtgtgaatgaagggcagtgcacacaagaaaaaaagatgtgcacatgaagaacttcttcattccaggtttttactgatccctctggtcaagatgggataagagtccaaaaatatgctttcctcacatggtcaaatgattcagcataaaatacaactgattgaacacaattatctatgctttaaatatattagaaaaaatccataaggaaaaatgatcctacaatcactaagattttaatttataataaaataaagcctagaaatgtatcttttgttcccaa

SEQ ID NO: 43484 - DNA, 1143 bp, Homo sapiens
aggtgtcacagaataatggcacccactcaagatgctggaacatcaaatgcccacyccattgtctaagttccctccagtcaggctagtcttggcattgagtttgagggagcccctaaggggtgccactaataagggctgtcacttgaaacttctaagggtccaagacgcttgttgaaaacctcatttcagagcctcctccctcaatcccactttgccactgtttgctgtgggttgtgtgatcttgtgagatatatatataattagttttggcacagagctcctaaaacccttgaacagatgatccttaacttatgatggggttacgtcccagtgaattcactgaagtcagaaatattgtaaggtgaaagtgtactcaataccccagtaaacccatcataaagtcaaaaattttaagttgaatcatcttaattcctgatgcacctcaacttaccacatggttatgttctgatgagtgtatcttttattattcataataagcccttttcaaccataccagggtttatgctaatgaggtgactcttggaggaagaatgggggctggttggcagaagaaccatgtgattagagggtgggatctttctttctttctttcttttttttttttttttttttgagacagagtttcactcttgttgcccaagctggagtgcaacggcactatctcagctcactgcaacctctgcctcccaggttccagcgaatctcctgcctcagcctcccgagtagctgggattacaggtgcacaccaccatgcccagctaatattttgtatttttagtagagacggggtttcaccatgttggccaggctggtctcgaactcctgacctcaggttacctgcctgccttggcctcccaaaatgctgggattacaggcgtgaaccaccacgcctggctggttggaactttcagtctcacctctgacctctggggaggggagaggagcccagggactgagttaatcaccaacagccagtgatttgatcaatcatacctaaataatggaacctctgtaagatcctgaacaaagaggtttggagagattccaggttggtgagtgcatccacatgctgggagggtggcacatcccacactccaccggggacagaagctcctgtgctca

SEQ ID NO: 43485 - DNA, 1143 bp, Homo sapiens
aggtgtcacagaataatggcacccactcaagatgctggaacatcaaatgcccactccattgtctaagttccctccagtcaggctagtcttggcattgagtttgagggagcccctaaggggtgccactaataagggctgtcacttgaaacttctaagggtccaagacgcttgttgaaaacctcatttcagagcctcctccctcaatcccactttgccactgtttgctgtgggytgtgtgatcttgtgagatatatatataattagttttggcacagagctcctaaaacccttgaacagatgatccttaacttatgatggggttacgtcccagtgaattcactgaagtcagaaatattgtaaggtgaaagtgtactcaataccccagtaaacccatcataaagtcaaaaattttaagttgaatcatcttaattcctgatgcacctcaacttaccacatggttatgttctgatgagtgtatcttttattattcataataagcccttttcaaccataccagggtttatgctaatgaggtgactcttggaggaagaatgggggctggttggcagaagaaccatgtgattagagggtgggatctttctttctttctttcttttttttttttttttttttgagacagagtttcactcttgttgcccaagctggagtgcaacggcactatctcagctcactgcaacctctgcctcccaggttccagcgaatctcctgcctcagcctcccgagtagctgggattacaggtgcacaccaccatgcccagctaatattttgtatttttagtagagacggggtttcaccatgttggccaggctggtctcgaactcctgacctcaggttacctgcctgccttggcctcccaaaatgctgggattacaggcgtgaaccaccacgcctggctggttggaactttcagtctcacctctgacctctggggaggggagaggagcccagggactgagttaatcaccaacagccagtgatttgatcaatcatacctaaataatggaacctctgtaagatcctgaacaaagaggtttggagagattccaggttggtgagtgcatccacatgctgggagggtggcacatcccacactccaccggggacagaagctcctgtgctca

SEQ ID NO: 43486 - DNA, 1143 bp, Homo sapiens
aggtgtcacagaataatggcacccactcaagatgctggaacatcaaatgcccactccattgtctaagttccctccagtcaggctagtcttggcattgagtttgagggagcccctaaggggtgccactaataagggctgtcacttgaaacttctaagggtccaagacgcttgttgaaaacctcatttcagagcctcctccctcaatcccactttgccactgtttgctgtgggttgtgtgatcttgtgagatatatatataattagtyttggcacagagctcctaaaacccttgaacagatgatccttaacttatgatggggttacgtcccagtgaattcactgaagtcagaaatattgtaaggtgaaagtgtactcaataccccagtaaacccatcataaagtcaaaaattttaagttgaatcatcttaattcctgatgcacctcaacttaccacatggttatgttctgatgagtgtatcttttattattcataataagcccttttcaaccataccagggtttatgctaatgaggtgactcttggaggaagaatgggggctggttggcagaagaaccatgtgattagagggtgggatctttctttctttctttcttttttttttttttttttttgagacagagtttcactcttgttgcccaagctggagtgcaacggcactatctcagctcactgcaacctctgcctcccaggttccagcgaatctcctgcctcagcctcccgagtagctgggattacaggtgcacaccaccatgcccagctaatattttgtatttttagtagagacggggtttcaccatgttggccaggctggtctcgaactcctgacctcaggttacctgcctgccttggcctcccaaaatgctgggattacaggcgtgaaccaccacgcctggctggttggaactttcagtctcacctctgacctctggggaggggagaggagcccagggactgagttaatcaccaacagccagtgatttgatcaatcatacctaaataatggaacctctgtaagatcctgaacaaagaggtttggagagattccaggttggtgagtgcatccacatgctgggagggtggcacatcccacactccaccggggacagaagctcctgtgctca

SEQ ID NO: 43487 - DNA, 1143 bp, Homo sapiens
aggtgtcacagaataatggcacccactcaagatgctggaacatcaaatgcccactccattgtctaagttccctccagtcaggctagtcttggcattgagtttgagggagcccctaaggggtgccactaataagggctgtcacttgaaacttctaagggtccaagacgcttgttgaaaacctcatttcagagcctcctccctcaatcccactttgccactgtttgctgtgggttgtgtgatcttgtgagatatatatataattagttttggcacagagctcctaaaacccttgaamagatgatccttaacttatgatggggttacgtcccagtgaattcactgaagtcagaaatattgtaaggtgaaagtgtactcaataccccagtaaacccatcataaagtcaaaaattttaagttgaatcatcttaattcctgatgcacctcaacttaccacatggttatgttctgatgagtgtatcttttattattcataataagcccttttcaaccataccagggtttatgctaatgaggtgactcttggaggaagaatgggggctggttggcagaagaaccatgtgattagagggtgggatctttctttctttctttcttttttttttttttttttttgagacagagtttcactcttgttgcccaagctggagtgcaacggcactatctcagctcactgcaacctctgcctcccaggttccagcgaatctcctgcctcagcctcccgagtagctgggattacaggtgcacaccaccatgcccagctaatattttgtatttttagtagagacggggtttcaccatgttggccaggctggtctcgaactcctgacctcaggttacctgcctgccttggcctcccaaaatgctgggattacaggcgtgaaccaccacgcctggctggttggaactttcagtctcacctctgacctctggggaggggagaggagcccagggactgagttaatcaccaacagccagtgatttgatcaatcatacctaaataatggaacctctgtaagatcctgaacaaagaggtttggagagattccaggttggtgagtgcatccacatgctgggagggtggcacatcccacactccaccggggacagaagctcctgtgctca

SEQ ID NO: 43488 - DNA, 746 bp, Homo sapiens
catttacatattaattgtttttttcaaattggccaaatttttcaaaacaattacatattaaaaactgagatatacggaaattctaactaataggtttatagtcattcctagggtaggcattaacacttcttggtaagttctgtaagttaattatagtttaacttcctaattaattaattctgtaagtcaatttatagtttaacttcccagaggctttggtgtctttttttaccctcactttaaaatacacacaatagtatataatatatcacatttggtcaacagttcaaatttttttattctttaaagcatgtacaaaaaatatactagttagaattcctgtgaaaaattctaatacagaggaattatatggctatgtttggaaagataatatttctttaaaaatgtgttttctttatgttttatgtttgcaataaggattatttaagtttgattgaagaacttcatgattcttrtgtattattttcttgtattgagaaatagtggcccattgttgggctgtatttaaaattaatgtgtatgaaacaagaaatatttaattagagttattaattttccacaagtaatatgtgtacttgacctaaatcagtatcttttatcatatcagcctcacatacaacaagaataatagcaaggacaacaacaacaaatttgaatgtttcctttgtgcctatgctcctaactatcatgttatactcattcatataaacctaacaattaatttg

SEQ ID NO: 43489 - DNA, 746 bp, Homo sapiens
catttacatattaattgtttttttcaaattggccaaatttttcaaaacaattacatattaaaaactgagatatacggaaattctaactaataggtttatagtcattcctagggtaggcattaacacttcttggtaagttctgtaagttaattatagtttaacttcctaattaattaattctgtaagtcaatttatagtttaacttcccagaggctttggtgtctttttttaccctcactttaaaatacacacaatagtatataatatatcacatttggtcaacagttcaaatttttttattctttaaagcatgtacaaaaaatatactagttagaattcctgtgaaaaattctaatacagaggaattatatggctatgtttggaaagataatatttctttaaaaatgtgttttctttatgttttatgtttgcaataaggattatttaagtttgattgaagaacttcatgattcttatgtattattttcttgtattgagaaatagtggcccaytgttgggctgtatttaaaattaatgtgtatgaaacaagaaatatttaattagagttattaattttccacaagtaatatgtgtacttgacctaaatcagtatcttttatcatatcagcctcacatacaacaagaataatagcaaggacaacaacaacaaatttgaatgtttcctttgtgcctatgctcctaactatcatgttatactcattcatataaacctaacaattaatttg

SEQ ID NO: 43490 - DNA, 553 bp, Homo sapiens
gttccagaaatctgaaaacatataccactaatcaaaagtttctccattcatgttgactagcatttgccttaggtgtcagaattaatggatttgtgttaaaaataaacacctgaaatctaattccctaactacattataacacacttgatttcaagttcttagcttttatttaatgcttctaatgactttaaattgtagcaaaatgggcttcycccaagagcactgctttgttgatcctgagttggggtcctaagccagaagttaactatgctttcatatattcttgcaagtagaagtacagtgttggtgtaaattccccttagatggatagctaagcccagaggaaataatggtaattggaaccatatgaccgtatgcaattcatgtgcatatttatatcaagaaaagaacattataggtcgggtgagaccctattttgttctgacaatgtcatctgtatttacatgtctgtttcgggagtttggatgtcaagggattctgtgctggattgtaaagcatgtgcttctgcttgatgtagctactcaattttgta

SEQ ID NO: 43491 - DNA, 1479 bp, Homo sapiens
taattgaaaggtgctataggtggtacaacaccatctggcttctctattttgaaactccacaccaggttaatcttgtccatggctgtggcttaaatctaaagtcaggttctggtgttttctggaatccatgcctagctctttgattctgaaaccaaatctggattctggactcttctgcattgattgctaaagcaagtttttgtttggtagcawaacctgggtaaggtttttgagtgaaggtattgatgaggattttcaattgatcttctgtgaatttggtgcaattgcacctatgatttgttgctaccatcttgtgtgaagaggggtcttcaactatgcagaaagagagttctggaggctgagctactgtctgggagactgcttacagctcattttttaaaaagaaaggtcacatataatacaatataaaattcacaaatctaaagcttatggttttctgggttttgacaaatgaaaactcctgtgcaacttcaagccttaccaggatatggatgagggtttctatccaaaagcaccagtattctaacaaacaactttacgttttttgaattgtccagtgcctgtgaggattccttactccaagtttatgacaaacatattcagaaggcatagtctacaattagtgtttgggtaagtattttcatcaattgtctgattatttgctgtgaatttgaagtatgctgattcttatgtaattgtcttctgagaaacattgtgccatttttcttgtggaaaccacctgtagaataaacagaaattatgaacgcacagagttggttgtgatgggcacgtctacctgtggctgccatttaagtggaaggtggaatccgactctggagcatcggcagcctgagctgctgctgggctcacactgaccctgggagtgctctatgcatgcttcaccttatgaggggtgcagaaggaacaaaagtagaaaagtgtgctctactttcatgtgttaccaaaggacagaggacactaccaaggatttagaaaactgttaagtgaggatttattcttcttaatagcctttcaagcaaggaatttgaaaacaagattctactcatcccacaccaaaatgtaaacagatatattattttctatactcccaggataattttggttttacttaagcatcactatcgccctcaaatgtcaagtggaaaaataaatgtgaataatcccaccactagcctccagacttgatgttcatgctatttcgtttttaaaatgaccttttaaaagttataaattagaaacgtggaagtagaatggcttcatgcaagaaatactggaataagatccctgttctggtcccagagtcttagacaagtcattcagcctttctaagcatcagttctcccttcaggaaaacatgggcattcatctctacgggagctgctagctctaactgtcagtgagtttctgaaacttgcccaggaaggagcagccccagtg

SEQ ID NO: 43492 - DNA, 1479 bp, Homo sapiens
taattgaaaggtgctataggtggtacaacaccatctggcttctctattttgaaactccacaccaggttaatcttgtccatggctgtggcttaaatctaaagtcaggttctggtgttttctggaatccatgcctagctctttgattctgaaaccaaatctggattctggactcttctgcattgattgctaaagcaagtttttgtttggtagcataacctgggtaaggtttttgagtgaaggtattgatgaggattttcaattgatcttctgtgaatttggtgcaattgcacctatgatttgttgctaccatcttgtgtgaagaggggtcttcaactatgcagaaagagagttctggaggctgagctactgtctgggagactgcttacagctcattttttaaaaagaaaggtcacatataatacaatataaaattcacaaatctaaagcttatggttttctgggttttgacaaatgaaaactcctgtgcaacttcaagccttaccaggatatggatgagggtttctatccaaaagcaccagtattctaacaaacaactttacgttttttgaattgtccagtgcctgtgaggattccttactccaagtttatgacaaacatattcagaaggcatagtctacaattagtgtttgggtaagtattttcatcaattgtctgattatttgctgtgaatttgaagtatgctgattcttatgtaattgtcttctgagaaacattgtgccatttttcttgtggaaaccacctgtagaataaacagaaattatgaacgcacagagttggttgtgatgggcacgtctacctgtggctgccatttaagtggaaggtggaatccgactctggagcatcggcagcctgagctgctgctgggctcacactgaccctgggagtgctctatgcatgcttcaccttatgaggggtgcagaaggaacaaaagtagaaaagtgtgctctactttcatgtgttaccaaaggacagaggacactaccaaggatttagaaaactgttaagtgaggatttattcttcttaatagcctttcaagcaaggaatttgaaaacaagattctactcatcccacaccaaaatgtaaacagatatattattttctatactcccaggataattttggttttacttaagcatcactatcrccctcaaatgtcaagtggaaaaataaatgtgaataatcccaccactagcctccagacttgatgttcatgctatttcgtttttaaaatgaccttttaaaagttataaattagaaacgtggaagtagaatggcttcatgcaagaaatactggaataagatccctgttctggtcccagagtcttagacaagtcattcagcctttctaagcatcagttctcccttcaggaaaacatgggcattcatctctacgggagctgctagctctaactgtcagtgagtttctgaaacttgcccaggaaggagcagccccagtg

SEQ ID NO: 43493 - DNA, 1479 bp, Homo sapiens
taattgaaaggtgctataggtggtacaacaccatctggcttctctattttgaaactccacaccaggttaatcttgtccatggctgtggcttaaatctaaagtcaggttctggtgttttctggaatccatgcctagctctttgattctgaaaccaaatctggattctggactcttctgcattgattgctaaagcaagtttttgtttggtagcataacctgggtaaggtttttgagtgaaggtattgatgaggattttcaattgatcttctgtgaatttggtgcaattgcacctatgatttgttgctaccatcttgtgtgaagaggggtcttcaactatgcagaaagagagttctggaggctgagctactgtctgggagactgcttacagctcattttttaaaaagaaaggtcacatataatacaatataaaattcacaaatctaaagcttatggttttctgggttttgacaaatgaaaactcctgtgcaacttcaagccttaccaggatatggatgagggtttctatccaaaagcaccagtattctaacaaacaactttacgttttttgaattgtccagtgcctgtgaggattccttactccaagtttatgacaaacatattcagaaggcatagtctacaattagtgtttgggtaagtattttcatcaattgtctgattatttgctgtgaatttgaagtatgctgattcttatgtaattgtcttctgagaaacattgtgccatttttcttgtggaaaccacctgtagaataaacagaaattatgaacgcacagagttggttgtgatgggcacgtctacctgtggctgccatttaagtggaaggtggaatccgactctggagcatcggcagcctgagctgctgctgggctcacactgaccctgggagtgctctatgcatgcttcaccttatgaggggtgcagaaggaacaaaagtagaaaagtgtgctctactttcatgtgttaccaaaggacagaggacactaccaaggatttagaaaactgttaagtgaggatttattcttcttaatagcctttcaagcaaggaatttgaaaacaagattctactcatcccacaccaaaatgtaaacagatatattattttctatactcccaggataattttggttttacttaagcatcactatcgccctcaaatgtcaagtggaaaaataaatgtgaataatcccaccactagcctccagacktgatgttcatgctatttcgtttttaaaatgaccttttaaaagttataaattagaaacgtggaagtagaatggcttcatgcaagaaatactggaataagatccctgttctggtcccagagtcttagacaagtcattcagcctttctaagcatcagttctcccttcaggaaaacatgggcattcatctctacgggagctgctagctctaactgtcagtgagtttctgaaacttgcccaggaaggagcagccccagtg

SEQ ID NO: 43494 - DNA, 1479 bp, Homo sapiens
taattgaaaggtgctataggtggtacaacaccatctggcttctctattttgaaactccacaccaggttaatcttgtccatggctgtggcttaaatctaaagtcaggttctggtgttttctggaatccatgcctagctctttgattctgaaaccaaatctggattctggactcttctgcattgattgctaaagcaagtttttgtttggtagcataacctgggtaaggtttttgagtgaaggtattgatgaggattttcaattgatcttctgtgaatttggtgcaattgcacctatgatttgttgctaccatcttgtgtgaagaggggtcttcaactatgcagaaagagagttctggaggctgagctactgtctgggagactgcttacagctcattttttaaaaagaaaggtcacatataatacaatataaaattcacaaatctaaagcttatggttttctgggttttgacaaatgaaaactcctgtgcaacttcaagccttaccaggatatggatgagggtttctatccaaaagcaccagtattctaacaaacaactttacgttttttgaattgtccagtgcctgtgaggattccttactccaagtttatgacaaacatattcagaaggcatagtctacaattagtgtttgggtaagtattttcatcaattgtctgattatttgctgtgaatttgaagtatgctgattcttatgtaattgtcttctgagaaacattgtgccatttttcttgtggaaaccacctgtagaataaacagaaattatgaacgcacagagttggttgtgatgggcacgtctacctgtggctgccatttaagtggaaggtggaatccgactctggagcatcggcagcctgagctgctgctgggctcacactgaccctgggagtgctctatgcatgcttcaccttatgaggggtgcagaaggaacaaaagtagaaaagtgtgctctactttcatgtgttaccaaaggacagaggacactaccaaggatttagaaaactgttaagtgaggatttattcttcttaatagcctttcaagcaaggaatttgaaaacaagattctactcatcccacaccaaaatgtaaacagatatattattttctatactcccaggataattttggttttacttaagcatcactatcgccctcaaatgtcaagtggaaaaataaatgtgaataatcccaccactagcctccagacttgatgttcatgctatttcgtttttaaaatgaccttttaaaagttataaattagaaaygtggaagtagaatggcttcatgcaagaaatactggaataagatccctgttctggtcccagagtcttagacaagtcattcagcctttctaagcatcagttctcccttcaggaaaacatgggcattcatctctacgggagctgctagctctaactgtcagtgagtttctgaaacttgcccaggaaggagcagccccagtg

SEQ ID NO: 43495 - DNA, 1088 bp, Homo sapiens
gtggtgattacaaccctgagcgctgtccctttggaacctgactcccgactccgctcagcaaccgggaggttgcgacctcaaagccctctgtgcttctccatcgataccgggccgcctctctcgcctgcagcgcacgcctccgcccccaggggcagcgcagcgaggcggagaccctcctgcattccgagcgtgcggggcagccctcagactgaggacctgcgacttcgtgggacsccggtgtccgccactgcgcccctccagggagcagaggcggctctggaagtcggtttagggcggagaccgcgactggaggggcgcagaacgctcttcccagcgtcccgggctccaccggcacaattttaaaaccaggggcgaaatccgagtcctgccgccacgcgggggtggagcgtgaccgcctcgccgcgcgctgtctcaggctccgccggctttagcgccgcgaggctgccaggtgagttccagggctctgtggttcctagagcgctcccgggagtctcctggctgcagcgggaaccgagctggatgcccggacagcgccggggtcgtttttctgcccctgccccgtggccggagccgcaggcctgccgctacccccacccgggccacgccttccttcctcgcggccggaccgcgccagagtcccgggccctggctggaaactcgcaggccccgggcagcctgggccgcaagtgcgatgaagaagcggggcccggcgcgcacatgtggttccgggcaggagccccggccgcctcgtgcccttcttctcgcccacgacggtggccggcggcggcctctgcttcccggacccatgaacaaagctggagatgcggctttggagtcggccctgggacctgcttcttctcttggcttcggggaccgcagcccagggcgttccctccggatcggtggccagggcttgcggggcgtgtgcgactcgggacccccagccgggcagcagcggccgccaagcatggcaaggagcagcgccagcttctccccaccgcgtcccgggatggcgggcttcgggtgggagccggcccgggacatccaggtgggatcagccaccgctc

SEQ ID NO: 43496 - DNA, 1088 bp, Homo sapiens
gtggtgattacaaccctgagcgctgtccctttggaacctgactcccgactccgctcagcaaccgggaggttgcgacctcaaagccctctgtgcttctccatcgataccgggccgcctctctcgcctgcagcgcacgcctccgcccccaggggcagcgcagcgaggcggagaccctcctgcattccgagcgtgcggggcagccctcagactgaggacctgcgacttcgtgggacgycggtgtccgccactgcgcccctccagggagcagaggcggctctggaagtcggtttagggcggagaccgcgactggaggggcgcagaacgctcttcccagcgtcccgggctccaccggcacaattttaaaaccaggggcgaaatccgagtcctgccgccacgcgggggtggagcgtgaccgcctcgccgcgcgctgtctcaggctccgccggctttagcgccgcgaggctgccaggtgagttccagggctctgtggttcctagagcgctcccgggagtctcctggctgcagcgggaaccgagctggatgcccggacagcgccggggtcgtttttctgcccctgccccgtggccggagccgcaggcctgccgctacccccacccgggccacgccttccttcctcgcggccggaccgcgccagagtcccgggccctggctggaaactcgcaggccccgggcagcctgggccgcaagtgcgatgaagaagcggggcccggcgcgcacatgtggttccgggcaggagccccggccgcctcgtgcccttcttctcgcccacgacggtggccggcggcggcctctgcttcccggacccatgaacaaagctggagatgcggctttggagtcggccctgggacctgcttcttctcttggcttcggggaccgcagcccagggcgttccctccggatcggtggccagggcttgcggggcgtgtgcgactcgggacccccagccgggcagcagcggccgccaagcatggcaaggagcagcgccagcttctccccaccgcgtcccgggatggcgggcttcgggtgggagccggcccgggacatccaggtgggatcagccaccgctc

SEQ ID NO: 43497 - DNA, 1088 bp, Homo sapiens
gtggtgattacaaccctgagcgctgtccctttggaacctgactcccgactccgctcagcaaccgggaggttgcgacctcaaagccctctgtgcttctccatcgataccgggccgcctctctcgcctgcagcgcacgcctccgcccccaggggcagcgcagcgaggcggagaccctcctgcattccgagcgtgcggggcagccctcagactgaggacctgcgacttcgtgggacgccggtgtccgccactgcgcccctccagggagcagaggcggctctggaagtcggtttagggcggagaccgcgactggaggggcgcagaacgctcttcccagcgtcccgggctccaccggcacaattttaaaaccaggggcgaaatccgagtcctgcygccacgcgggggtggagcgtgaccgcctcgccgcgcgctgtctcaggctccgccggctttagcgccgcgaggctgccaggtgagttccagggctctgtggttcctagagcgctcccgggagtctcctggctgcagcgggaaccgagctggatgcccggacagcgccggggtcgtttttctgcccctgccccgtggccggagccgcaggcctgccgctacccccacccgggccacgccttccttcctcgcggccggaccgcgccagagtcccgggccctggctggaaactcgcaggccccgggcagcctgggccgcaagtgcgatgaagaagcggggcccggcgcgcacatgtggttccgggcaggagccccggccgcctcgtgcccttcttctcgcccacgacggtggccggcggcggcctctgcttcccggacccatgaacaaagctggagatgcggctttggagtcggccctgggacctgcttcttctcttggcttcggggaccgcagcccagggcgttccctccggatcggtggccagggcttgcggggcgtgtgcgactcgggacccccagccgggcagcagcggccgccaagcatggcaaggagcagcgccagcttctccccaccgcgtcccgggatggcgggcttcgggtgggagccggcccgggacatccaggtgggatcagccaccgctc

SEQ ID NO: 43498 - DNA, 1088 bp, Homo sapiens
gtggtgattacaaccctgagcgctgtccctttggaacctgactcccgactccgctcagcaaccgggaggttgcgacctcaaagccctctgtgcttctccatcgataccgggccgcctctctcgcctgcagcgcacgcctccgcccccaggggcagcgcagcgaggcggagaccctcctgcattccgagcgtgcggggcagccctcagactgaggacctgcgacttcgtgggacgccggtgtccgccactgcgcccctccagggagcagaggcggctctggaagtcggtttagggcggagaccgcgactggaggggcgcagaacgctcttcccagcgtcccgggctccaccggcacaattttaaaaccaggggcgaaatccgagtcctgccgccacgcgggggtggagcgtgaccgcctcgccgcgcgctgtctcaggctccgccggctttagcgccgcgaggctgccaggtgasttccagggctctgtggttcctagagcgctcccgggagtctcctggctgcagcgggaaccgagctggatgcccggacagcgccggggtcgtttttctgcccctgccccgtggccggagccgcaggcctgccgctacccccacccgggccacgccttccttcctcgcggccggaccgcgccagagtcccgggccctggctggaaactcgcaggccccgggcagcctgggccgcaagtgcgatgaagaagcggggcccggcgcgcacatgtggttccgggcaggagccccggccgcctcgtgcccttcttctcgcccacgacggtggccggcggcggcctctgcttcccggacccatgaacaaagctggagatgcggctttggagtcggccctgggacctgcttcttctcttggcttcggggaccgcagcccagggcgttccctccggatcggtggccagggcttgcggggcgtgtgcgactcgggacccccagccgggcagcagcggccgccaagcatggcaaggagcagcgccagcttctccccaccgcgtcccgggatggcgggcttcgggtgggagccggcccgggacatccaggtgggatcagccaccgctc

SEQ ID NO: 43499 - DNA, 1939 bp, Homo sapiens
agtcctgttcgggagcagggctgtgaggcggggcaggccagggctcgtccgggtcacaggtacagccttgtgtgttgcaaacgacaaggacctcccaagtgtgccaccatgtgcccacccactaccctgcccagagtccactgtggatggactggcagtggctatacagtgggcagacccagaggagctgtctgggggcccagggcaggcaggggtcattctggaaaaccaagcttctagtgctgcagggacagcctctgtgcccctccccggctcaggccccttcctcccctcttctggctcctcctgtgtggaatctctcaggttccagtggtaacctgagagataggagtctctgctcttctgtgtccctttgccccttcatcttgtgtccggtcagctttccagggtggctgtgttcagtggctgaggggtgagaaaccctacgcctcaaggacagaccccgcttttcccagaggccactagggagctcagtggagctgacaggtcctaccagtagcttgggcacacaagaccccatctgggtgatgtgtctccaaagagagtcatgttgacaggagtcagtctccctgagcccagagctggcacatagcagagccagggctgggtccccaaggttgtcagaggcaaagccttgagctccaaatcccgttcagattcagttcttcactgatgatgaggctccgggaggagagcctgatggccaggcaggcagcgtgcagggatcctcctggtgcttcagccagtcctggggctgccacttcccagagcactgccgggtgtgcagggcgtgggtgcagcrccagctgcctcaggctcatgcccactgttcggttgcaggcaccaaccccttcctcaggtcgatgcaccaccgcgtgacctccaggcagctgcagctcccggacaagcactaggttaccaccttgctcagcacctgtgcccagagcatccacaaggcctgcctctcggctgcctagccaggactgcagggatggcccgcagcctcatcggggccaaggatgcatgcctcctgtcagacacttctagatgttggcgtccatggagagcctggagttaggttagctttcctccttttctctcctgccttggggatctgccaaatgaaatcccacacttgtacagactgataggtgcgcagtggagtgtgctgcctgcagggagttggctgtcttcttggagaaggcactccatgtgacttcctccatgaagccagacacagtccccagccacgatcctcgggctgctctcaccacggcctgtccagggtccgggtgcatctcagcagcatgaggttgtgctcaggttgttgttagcgcgtcttgtgtgtgctcgacacacccctgctgctttctataggagaacacagaggacataggaaacccttcaaacacacatgggactctctgctcacagttttgggttcaggctgcactgctttgggcaagtggggcaccccctagggaagcctctgagtccagggcacaggatgcctctttcaatacttgttttttttctcatactcaggatctatactgtagactttataacactgtacccttaagctacaccaaatttattaaaaaatattttttctttgataattaacttttctgtagcttttaaaatttataaacttttaaattttttaactttttgacttgcaataacagcttaaaatacattgtacagctagctgtataaaaatatttttctttatagcctgtaagtttttttatttgaaaaacgttctattttaattttcttgaaaactctgttaaaagctgtgacacaaacatatacattagcctaggcctacactgggtcaagatcatcagtgttactgtcttccacctccacatctgctcccattggaaggtttttagaggaaataacgtgt

SEQ ID NO: 43500 - DNA, 1939 bp, Homo sapiens
agtcctgttcgggagcagggctgtgaggcggggcaggccagggctcgtccgggtcacaggtacagccttgtgtgttgcaaacgacaaggacctcccaagtgtgccaccatgtgcccacccactaccctgcccagagtccactgtggatggactggcagtggctatacagtgggcagacccagaggagctgtctgggggcccagggcaggcaggggtcattctggaaaaccaagcttctagtgctgcagggacagcctctgtgcccctccccggctcaggccccttcctcccctcttctggctcctcctgtgtggaatctctcaggttccagtggtaacctgagagataggagtctctgctcttctgtgtccctttgccccttcatcttgtgtccggtcagctttccagggtggctgtgttcagtggctgaggggtgagaaaccctacgcctcaaggacagaccccgcttttcccagaggccactagggagctcagtggagctgacaggtcctaccagtagcttgggcacacaagaccccatctgggtgatgtgtctccaaagagagtcatgttgacaggagtcagtctccctgagcccagagctggcacatagcagagccagggctgggtccccaaggttgtcagaggcaaagccttgagctccaaatcccgttcagattcagttcttcactgatgatgaggctccgggaggagagcctgatggccaggcaggcagcgtgcagggatcctcctggtgcttcagccagtcctggggctgccacttcccagagcactgccgggtgtgcagggcgtgggtgcagcgccagctgcctcaggctcatgcccactgttcggttgcaggcaccaaccccttcctcaggtcgatgcaccaccgcgtgacctccaggcrgctgcagctcccggacaagcactaggttaccaccttgctcagcacctgtgcccagagcatccacaaggcctgcctctcggctgcctagccaggactgcagggatggcccgcagcctcatcggggccaaggatgcatgcctcctgtcagacacttctagatgttggcgtccatggagagcctggagttaggttagctttcctccttttctctcctgccttggggatctgccaaatgaaatcccacacttgtacagactgataggtgcgcagtggagtgtgctgcctgcagggagttggctgtcttcttggagaaggcactccatgtgacttcctccatgaagccagacacagtccccagccacgatcctcgggctgctctcaccacggcctgtccagggtccgggtgcatctcagcagcatgaggttgtgctcaggttgttgttagcgcgtcttgtgtgtgctcgacacacccctgctgctttctataggagaacacagaggacataggaaacccttcaaacacacatgggactctctgctcacagttttgggttcaggctgcactgctttgggcaagtggggcaccccctagggaagcctctgagtccagggcacaggatgcctctttcaatacttgttttttttctcatactcaggatctatactgtagactttataacactgtacccttaagctacaccaaatttattaaaaaatattttttctttgataattaacttttctgtagcttttaaaatttataaacttttaaattttttaactttttgacttgcaataacagcttaaaatacattgtacagctagctgtataaaaatatttttctttatagcctgtaagtttttttatttgaaaaacgttctattttaattttcttgaaaactctgttaaaagctgtgacacaaacatatacattagcctaggcctacactgggtcaagatcatcagtgttactgtcttccacctccacatctgctcccattggaaggtttttagaggaaataacgtgt

SEQ ID NO: 43501 - DNA, 1939 bp, Homo sapiens
agtcctgttcgggagcagggctgtgaggcggggcaggccagggctcgtccgggtcacaggtacagccttgtgtgttgcaaacgacaaggacctcccaagtgtgccaccatgtgcccacccactaccctgcccagagtccactgtggatggactggcagtggctatacagtgggcagacccagaggagctgtctgggggcccagggcaggcaggggtcattctggaaaaccaagcttctagtgctgcagggacagcctctgtgcccctccccggctcaggccccttcctcccctcttctggctcctcctgtgtggaatctctcaggttccagtggtaacctgagagataggagtctctgctcttctgtgtccctttgccccttcatcttgtgtccggtcagctttccagggtggctgtgttcagtggctgaggggtgagaaaccctacgcctcaaggacagaccccgcttttcccagaggccactagggagctcagtggagctgacaggtcctaccagtagcttgggcacacaagaccccatctgggtgatgtgtctccaaagagagtcatgttgacaggagtcagtctccctgagcccagagctggcacatagcagagccagggctgggtccccaaggttgtcagaggcaaagccttgagctccaaatcccgttcagattcagttcttcactgatgatgaggctccgggaggagagcctgatggccaggcaggcagcgtgcagggatcctcctggtgcttcagccagtcctggggctgccacttcccagagcactgccgggtgtgcagggcgtgggtgcagcgccagctgcctcaggctcatgcccactgttcggttgcaggcaccaaccccttcctcaggtcgatgcaccaccgcgtgacctccaggcagctgcagctcccggacaagcactaggttaccaccttgctcagcacctgtgcccagagcatccacaaggcctgcctctcggctgcctagccaggactgcagggatggcccgcagcctcatcggggccaaggatgcatgcctcctgtcagacacttctagatgttggcgtccatggagagcctggagttaggttagctttcctccttttctctcctgccttggggatctgccaaatgaaatcccacacttgtacagactgataggtgcgcagtggagtgtgctgcctgcagggagttggctgtcttcttggagaaggcactccatgtgacttcctccatgaagccagacacagtccccagccacgatcctcgggctgctctcaccacggcctgtccagggtccgggtgcatctcagcagcatgaggttgtgctcaggttgttgttagcgygtcttgtgtgtgctcgacacacccctgctgctttctataggagaacacagaggacataggaaacccttcaaacacacatgggactctctgctcacagttttgggttcaggctgcactgctttgggcaagtggggcaccccctagggaagcctctgagtccagggcacaggatgcctctttcaatacttgttttttttctcatactcaggatctatactgtagactttataacactgtacccttaagctacaccaaatttattaaaaaatattttttctttgataattaacttttctgtagcttttaaaatttataaacttttaaattttttaactttttgacttgcaataacagcttaaaatacattgtacagctagctgtataaaaatatttttctttatagcctgtaagtttttttatttgaaaaacgttctattttaattttcttgaaaactctgttaaaagctgtgacacaaacatatacattagcctaggcctacactgggtcaagatcatcagtgttactgtcttccacctccacatctgctcccattggaaggtttttagaggaaataacgtgt

SEQ ID NO: 43502 - DNA, 1939 bp, Homo sapiens
agtcctgttcgggagcagggctgtgaggcggggcaggccagggctcgtccgggtcacaggtacagccttgtgtgttgcaaacgacaaggacctcccaagtgtgccaccatgtgcccacccactaccctgcccagagtccactgtggatggactggcagtggctatacagtgggcagacccagaggagctgtctgggggcccagggcaggcaggggtcattctggaaaaccaagcttctagtgctgcagggacagcctctgtgcccctccccggctcaggccccttcctcccctcttctggctcctcctgtgtggaatctctcaggttccagtggtaacctgagagataggagtctctgctcttctgtgtccctttgccccttcatcttgtgtccggtcagctttccagggtggctgtgttcagtggctgaggggtgagaaaccctacgcctcaaggacagaccccgcttttcccagaggccactagggagctcagtggagctgacaggtcctaccagtagcttgggcacacaagaccccatctgggtgatgtgtctccaaagagagtcatgttgacaggagtcagtctccctgagcccagagctggcacatagcagagccagggctgggtccccaaggttgtcagaggcaaagccttgagctccaaatcccgttcagattcagttcttcactgatgatgaggctccgggaggagagcctgatggccaggcaggcagcgtgcagggatcctcctggtgcttcagccagtcctggggctgccacttcccagagcactgccgggtgtgcagggcgtgggtgcagcgccagctgcctcaggctcatgcccactgttcggttgcaggcaccaaccccttcctcaggtcgatgcaccaccgcgtgacctccaggcagctgcagctcccggacaagcactaggttaccaccttgctcagcacctgtgcccagagcatccacaaggcctgcctctcggctgcctagccaggactgcagggatggcccgcagcctcatcggggccaaggatgcatgcctcctgtcagacacttctagatgttggcgtccatggagagcctggagttaggttagctttcctccttttctctcctgccttggggatctgccaaatgaaatcccacacttgtacagactgataggtgcgcagtggagtgtgctgcctgcagggagttggctgtcttcttggagaaggcactccatgtgacttcctccatgaagccagacacagtccccagccacgatcctcgggctgctctcaccacggcctgtccagggtccgggtgcatctcagcagcatgaggttgtgctcaggttgttgttagcgcgtcttgtgtgtgctcgacacacccctgctgctttctataggagaacacagaggacataggaaacccttcaaacacacatgggactctctgctcacagttttgggttcaggctgcactgctttgggcaagtggggcaccccctagggaagccyctgagtccagggcacaggatgcctctttcaatacttgttttttttctcatactcaggatctatactgtagactttataacactgtacccttaagctacaccaaatttattaaaaaatattttttctttgataattaacttttctgtagcttttaaaatttataaacttttaaattttttaactttttgacttgcaataacagcttaaaatacattgtacagctagctgtataaaaatatttttctttatagcctgtaagtttttttatttgaaaaacgttctattttaattttcttgaaaactctgttaaaagctgtgacacaaacatatacattagcctaggcctacactgggtcaagatcatcagtgttactgtcttccacctccacatctgctcccattggaaggtttttagaggaaataacgtgt

SEQ ID NO: 43503 - DNA, 1939 bp, Homo sapiens
agtcctgttcgggagcagggctgtgaggcggggcaggccagggctcgtccgggtcacaggtacagccttgtgtgttgcaaacgacaaggacctcccaagtgtgccaccatgtgcccacccactaccctgcccagagtccactgtggatggactggcagtggctatacagtgggcagacccagaggagctgtctgggggcccagggcaggcaggggtcattctggaaaaccaagcttctagtgctgcagggacagcctctgtgcccctccccggctcaggccccttcctcccctcttctggctcctcctgtgtggaatctctcaggttccagtggtaacctgagagataggagtctctgctcttctgtgtccctttgccccttcatcttgtgtccggtcagctttccagggtggctgtgttcagtggctgaggggtgagaaaccctacgcctcaaggacagaccccgcttttcccagaggccactagggagctcagtggagctgacaggtcctaccagtagcttgggcacacaagaccccatctgggtgatgtgtctccaaagagagtcatgttgacaggagtcagtctccctgagcccagagctggcacatagcagagccagggctgggtccccaaggttgtcagaggcaaagccttgagctccaaatcccgttcagattcagttcttcactgatgatgaggctccgggaggagagcctgatggccaggcaggcagcgtgcagggatcctcctggtgcttcagccagtcctggggctgccacttcccagagcactgccgggtgtgcagggcgtgggtgcagcgccagctgcctcaggctcatgcccactgttcggttgcaggcaccaaccccttcctcaggtcgatgcaccaccgcgtgacctccaggcagctgcagctcccggacaagcactaggttaccaccttgctcagcacctgtgcccagagcatccacaaggcctgcctctcggctgcctagccaggactgcagggatggcccgcagcctcatcggggccaaggatgcatgcctcctgtcagacacttctagatgttggcgtccatggagagcctggagttaggttagctttcctccttttctctcctgccttggggatctgccaaatgaaatcccacacttgtacagactgataggtgcgcagtggagtgtgctgcctgcagggagttggctgtcttcttggagaaggcactccatgtgacttcctccatgaagccagacacagtccccagccacgatcctcgggctgctctcaccacggcctgtccagggtccgggtgcatctcagcagcatgaggttgtgctcaggttgttgttagcgcgtcttgtgtgtgctcgacacacccctgctgctttctataggagaacacagaggacataggaaacccttcaaacacacatgggactctctgctcacagttttgggttcaggctgcactgctttgggcaagtggggcaccccctagggaagcctctgagtccagggcacaggatgcctctttcaatacttgttttttttctcatactcaggatctatmctgtagactttataacactgtacccttaagctacaccaaatttattaaaaaatattttttctttgataattaacttttctgtagcttttaaaatttataaacttttaaattttttaactttttgacttgcaataacagcttaaaatacattgtacagctagctgtataaaaatatttttctttatagcctgtaagtttttttatttgaaaaacgttctattttaattttcttgaaaactctgttaaaagctgtgacacaaacatatacattagcctaggcctacactgggtcaagatcatcagtgttactgtcttccacctccacatctgctcccattggaaggtttttagaggaaataacgtgt

SEQ ID NO: 43504 - DNA, 1939 bp, Homo sapiens
agtcctgttcgggagcagggctgtgaggcggggcaggccagggctcgtccgggtcacaggtacagccttgtgtgttgcaaacgacaaggacctcccaagtgtgccaccatgtgcccacccactaccctgcccagagtccactgtggatggactggcagtggctatacagtgggcagacccagaggagctgtctgggggcccagggcaggcaggggtcattctggaaaaccaagcttctagtgctgcagggacagcctctgtgcccctccccggctcaggccccttcctcccctcttctggctcctcctgtgtggaatctctcaggttccagtggtaacctgagagataggagtctctgctcttctgtgtccctttgccccttcatcttgtgtccggtcagctttccagggtggctgtgttcagtggctgaggggtgagaaaccctacgcctcaaggacagaccccgcttttcccagaggccactagggagctcagtggagctgacaggtcctaccagtagcttgggcacacaagaccccatctgggtgatgtgtctccaaagagagtcatgttgacaggagtcagtctccctgagcccagagctggcacatagcagagccagggctgggtccccaaggttgtcagaggcaaagccttgagctccaaatcccgttcagattcagttcttcactgatgatgaggctccgggaggagagcctgatggccaggcaggcagcgtgcagggatcctcctggtgcttcagccagtcctggggctgccacttcccagagcactgccgggtgtgcagggcgtgggtgcagcgccagctgcctcaggctcatgcccactgttcggttgcaggcaccaaccccttcctcaggtcgatgcaccaccgcgtgacctccaggcagctgcagctcccggacaagcactaggttaccaccttgctcagcacctgtgcccagagcatccacaaggcctgcctctcggctgcctagccaggactgcagggatggcccgcagcctcatcggggccaaggatgcatgcctcctgtcagacacttctagatgttggcgtccatggagagcctggagttaggttagctttcctccttttctctcctgccttggggatctgccaaatgaaatcccacacttgtacagactgataggtgcgcagtggagtgtgctgcctgcagggagttggctgtcttcttggagaaggcactccatgtgacttcctccatgaagccagacacagtccccagccacgatcctcgggctgctctcaccacggcctgtccagggtccgggtgcatctcagcagcatgaggttgtgctcaggttgttgttagcgcgtcttgtgtgtgctcgacacacccctgctgctttctataggagaacacagaggacataggaaacccttcaaacacacatgggactctctgctcacagttttgggttcaggctgcactgctttgggcaagtggggcaccccctagggaagcctctgagtccagggcacaggatgcctctttcaatacttgttttttttctcatactcaggatctatactgtagactttataacactgtacccttaagctacaccaaatttattaaaaaatattttttctttgataattaacttttctgtagcttttaaaatttataaacttttaaattttttaactttttgacttgcaataacagcttaaaatacattgtacagctagctgtataaaaatatttttctttatagcctgtaagtttttttatttgaaaaacgttctattttaattttcttgaaaactctgttaaaagctgtgacrcaaacatatacattagcctaggcctacactgggtcaagatcatcagtgttactgtcttccacctccacatctgctcccattggaaggtttttagaggaaataacgtgt

SEQ ID NO: 43505 - DNA, 1015 bp, Homo sapiens
tgtatgtatgtatgtttacaagtgtgcacgtgtatgtgtgtatatgtgtgtgtatgagtgtgtgtgtgtaagtgaagaatggggacagttatctgaaggcagcttagacaaactgaaatatgaagaagagctgtttaatcgaatgcctgggcctcttttctaggtaacatgtgcccccygacagagccagccaaaggaaggtgtgagcccctcatgatggcagtgactgcatgctttctgggtgcaaacactttgcaggagtatgtgataatcagtatgcttttagttattgtttatcctgcaccccgtgttgctgcctaggaaggtggaggctgactgagctagtggttgagaaaggcacagaaagtgtgcgtgcatctcccagaactgtaacgtcacacgtgtggatggtggagttgcttagacaccaatgcctgaggttcaggaagctgccgcatgcccacgtctttgtggcgctaaaacccccgcactcttacacctagacaagctgatcaggtgaaggggctaactccagaagtgataatagaagcatgatttgtttcacccctaattctattaggaaaaaactggctgtagtccttgaatagagctcaatgacaatttgaagagtactagagaagccaataaattcattaatagggaagattgttttagctagacaaaaaggtaatagccttcattgtagtagtttaattagaaaaataataaactcccttaggaaggatgaaagcccataattaaaaagatgagctatttggaggaattctgaatagtacctcttctcagatttgttcctagctgctctattcatggtccaaaagcacttagcaagctgaggaattagtggaaaatgtacttaccttcagctctgaagcaggaactttctgggcaaaatgaatgagaaggaatgagctcggagagaaaagcaagcaagtggaccttgggccgggaagggccggaacacatgcatcaccggagatacagctagattgtt

SEQ ID NO: 43506 - DNA, 668 bp, Homo sapiens
tcagggaacacgggacgggaacctacctcccgtggggagtcacaaccgaaagaatatctgccaatttgcaaaactcatctttcactaaggaagcaagctgtgtactttagaacccatgtgcaatccaaccaagaaaaaagggccacggtgacagagggaaggcgcgcagcacggatctgcaccccggatgcatctggtgcagcttgtgccgggcctgctgcatgtgggctcggtgatgcccagaccgaagctgcccccctgcaccgccactgcacagcgcagcatggcctgtggagcggggatttcctgctcagcccgcctcaggtcccattccckccccgctcatcatttcagtaaagggttagtctctggcagacaactggggagaacacagatgtaagaatgagacactgagtttcctctgaattttaagacgaaattttaagaacaaacacaatcaaatgaagaaagtaagttttgattagaaagtaaaaccgttttaataacattaacaggtgcttttattacaaaaatgaacactaatttattgtggtaaatttagaaagaaacattaaaatacaaaataaaataaaagctttcataatcccacaatgcagatatatgctactagcattttgttgtgttcctattctaggcctattagttaa

SEQ ID NO: 43507 - DNA, 375 bp, Homo sapiens
ctatgaccaagatgttctccaagaggctgatgacacccagagtgagaaacacctccacagcaatgcccatgtcttcacatggtgaagacttgtttttgacattgggtcctgaaaggttgccctctgtggcattcaggttgagatccaagaaatgcaggtgaaatgaggaattcattgctggagaaatacacctcttgtcttggcagcaaattkactgtaaaacatgttttaaattcacaatccaaagaggttagcagcctaccaaagaaagacagcagctagcctagaaccaacacagcctaagaaaggggatgaatgacacagtgcatcagaggactgggctcggctcactcagtccttttttttttttttttt

SEQ ID NO: 43508 - DNA, 1262 bp, Homo sapiens
aatctccagttagttttgtaaaccttgtatgcaagctacattgaatctgccttctacaggcttggttcagcattcagccagagacttgggcagagtttgcttagaaaatctgggtctcctcttttctgtttcattccctctgtgacacttacctcattttttgacagatgtggtcaccctggttgctcaagcaagaaagacggtggcctttagatgagaattttaatctccctgcattgcactgtctcagagatggctkctcgctctcataccaaagccacagaaacagagactcactgtgccagccccttcctccaagacacaattcctctccaaactctgcctgcttttgttcccttctcagagatctgggtattttaaaaattgtgtccagagtttataattatctggcggagggctggtcttttagaagcagactagaaatataactcgagggtttgtttcaaatatttttatgaccctttcagaagatcttttgtaataaatttggtcacaacttgagattaggaattgttggcttaacctctcagatccctgtttaattgtctgaaatgttataaataataacaatatgtaactatcctgtcatctgttgattatttactagtcaacagatgtgttggattttatgccaagtgctttaaatgcattaccttatcaaatcctcactatgtcacttactgaggcatagctaacctgtacattggtggaatcactaacccactgtggtccagtggctctgctcacttgtcatctgccactggaataagctgtggtcctcccagattcatatactgaaatcataagtcctaagctgatggtattaagaggtggggcctttgacagctgattaggtcatgagggtggagccctcatgaatgggattagtgctcttaataaaagaggctcaagagggacacctctccctttccacactgtgaggacacagcaagaagtcaccgtctatgaaccaggaagcagtccccaccagacaccaaacctggaagcacctgatcctggacttccccgcccccagaactgtgagaaataaatttctgttgtttgtaagccacccaatcaatggcattttgttacagcaacccaaacaaagactaataataataataataattgatactgacatttattaagcattctccatgttcccagcttggtgctgagagttatctcatttatctctcacaacagcactatgagggaggtaatataagtaaccctgg

SEQ ID NO: 43509 - DNA, 1262 bp, Homo sapiens
aatctccagttagttttgtaaaccttgtatgcaagctacattgaatctgccttctacaggcttggttcagcattcagccagagacttgggcagagtttgcttagaaaatctgggtctcctcttttctgtttcattccctctgtgacacttacctcattttttgacagatgtggtcaccctggttgctcaagcaagaaagacggtggcctttagatgagaattttaatctccctgcattgcactgtctcagagatggcttctcgctctcataccaaagccacagaaacagagactcactgtgccagccccttcctccaagacacaattcctctccaaactctgcctgcttttgttcccttctcagagatctgggtattttaaaaattgtgtccagagtttataattatctggyggagggctggtcttttagaagcagactagaaatataactcgagggtttgtttcaaatatttttatgaccctttcagaagatcttttgtaataaatttggtcacaacttgagattaggaattgttggcttaacctctcagatccctgtttaattgtctgaaatgttataaataataacaatatgtaactatcctgtcatctgttgattatttactagtcaacagatgtgttggattttatgccaagtgctttaaatgcattaccttatcaaatcctcactatgtcacttactgaggcatagctaacctgtacattggtggaatcactaacccactgtggtccagtggctctgctcacttgtcatctgccactggaataagctgtggtcctcccagattcatatactgaaatcataagtcctaagctgatggtattaagaggtggggcctttgacagctgattaggtcatgagggtggagccctcatgaatgggattagtgctcttaataaaagaggctcaagagggacacctctccctttccacactgtgaggacacagcaagaagtcaccgtctatgaaccaggaagcagtccccaccagacaccaaacctggaagcacctgatcctggacttccccgcccccagaactgtgagaaataaatttctgttgtttgtaagccacccaatcaatggcattttgttacagcaacccaaacaaagactaataataataataataattgatactgacatttattaagcattctccatgttcccagcttggtgctgagagttatctcatttatctctcacaacagcactatgagggaggtaatataagtaaccctgg

SEQ ID NO: 43510 - DNA, 1262 bp, Homo sapiens
aatctccagttagttttgtaaaccttgtatgcaagctacattgaatctgccttctacaggcttggttcagcattcagccagagacttgggcagagtttgcttagaaaatctgggtctcctcttttctgtttcattccctctgtgacacttacctcattttttgacagatgtggtcaccctggttgctcaagcaagaaagacggtggcctttagatgagaattttaatctccctgcattgcactgtctcagagatggcttctcgctctcataccaaagccacagaaacagagactcactgtgccagccccttcctccaagacacaattcctctccaaactctgcctgcttttgttcccttctcagagatctgggtattttaaaaattgtgtccagagtttataattatctggcggagggctggtcttttagaagcagactagaaatataactcragggtttgtttcaaatatttttatgaccctttcagaagatcttttgtaataaatttggtcacaacttgagattaggaattgttggcttaacctctcagatccctgtttaattgtctgaaatgttataaataataacaatatgtaactatcctgtcatctgttgattatttactagtcaacagatgtgttggattttatgccaagtgctttaaatgcattaccttatcaaatcctcactatgtcacttactgaggcatagctaacctgtacattggtggaatcactaacccactgtggtccagtggctctgctcacttgtcatctgccactggaataagctgtggtcctcccagattcatatactgaaatcataagtcctaagctgatggtattaagaggtggggcctttgacagctgattaggtcatgagggtggagccctcatgaatgggattagtgctcttaataaaagaggctcaagagggacacctctccctttccacactgtgaggacacagcaagaagtcaccgtctatgaaccaggaagcagtccccaccagacaccaaacctggaagcacctgatcctggacttccccgcccccagaactgtgagaaataaatttctgttgtttgtaagccacccaatcaatggcattttgttacagcaacccaaacaaagactaataataataataataattgatactgacatttattaagcattctccatgttcccagcttggtgctgagagttatctcatttatctctcacaacagcactatgagggaggtaatataagtaaccctgg

SEQ ID NO: 43511 - DNA, 1262 bp, Homo sapiens
aatctccagttagttttgtaaaccttgtatgcaagctacattgaatctgccttctacaggcttggttcagcattcagccagagacttgggcagagtttgcttagaaaatctgggtctcctcttttctgtttcattccctctgtgacacttacctcattttttgacagatgtggtcaccctggttgctcaagcaagaaagacggtggcctttagatgagaattttaatctccctgcattgcactgtctcagagatggcttctcgctctcataccaaagccacagaaacagagactcactgtgccagccccttcctccaagacacaattcctctccaaactctgcctgcttttgttcccttctcagagatctgggtattttaaaaattgtgtccagagtttataattatctggcggagggctggtcttttagaagcagactagaaatataactcgagggtttgtttcaaatatttttatgaccctttcagaagatcttttgyaataaatttggtcacaacttgagattaggaattgttggcttaacctctcagatccctgtttaattgtctgaaatgttataaataataacaatatgtaactatcctgtcatctgttgattatttactagtcaacagatgtgttggattttatgccaagtgctttaaatgcattaccttatcaaatcctcactatgtcacttactgaggcatagctaacctgtacattggtggaatcactaacccactgtggtccagtggctctgctcacttgtcatctgccactggaataagctgtggtcctcccagattcatatactgaaatcataagtcctaagctgatggtattaagaggtggggcctttgacagctgattaggtcatgagggtggagccctcatgaatgggattagtgctcttaataaaagaggctcaagagggacacctctccctttccacactgtgaggacacagcaagaagtcaccgtctatgaaccaggaagcagtccccaccagacaccaaacctggaagcacctgatcctggacttccccgcccccagaactgtgagaaataaatttctgttgtttgtaagccacccaatcaatggcattttgttacagcaacccaaacaaagactaataataataataataattgatactgacatttattaagcattctccatgttcccagcttggtgctgagagttatctcatttatctctcacaacagcactatgagggaggtaatataagtaaccctgg

SEQ ID NO: 43512 - DNA, 1329 bp, Homo sapiens
aacccatgtacacagagggccaactgtaatggtctgggaaaagcatgcttcacttcagggatgggtggtaatgttgctgttgtcttatcagttgaaagcaaatcttccctcgtagttgttgggtagaggccagcttgccaactgaaacraacagcagagaaggccgggagtgcttcatggctctgcataaggaatcacaaatttgtgggatgaacatattgacaatgagggttttctaaatatggattttaattggtgtcatgtcttgaatttatagaagcacatattccagtgagctctaagcacaactccagtactcttttccttccttctcaaggcacctctgtgaagcaggccaaggccaagcatggtcgtgctttgactgatggatagaggcagtgagcgtgagcaaccaggcagtggggagcagacgaaaccagcatggacggcccttccctgctctgtgtaactggtgctcttctgtctcaccacaaggtttggcaggaggtggttttctcaggcaatgacccaatgccccaggaaatacacgaggacccagctcagtagtaccttgaggaagcacatttaagtgtctggtatacccaaaagaagatatacacactctttattaagggcatactctgtgccaaacattgtgttaagcagcagtttatagacacgagtcgacttaatcttttggaaaacctgaagatggggatactctaattatcttcatgttacgcatgaggaaactaccacttggatggaacaaacaaatattcaagatcacatggctggtaagtggtaaactgggataacatagacaggcaggccatttgatcctgtcgttcaagtgagctgggcagcctcttaccaggtgtctatgaagtctcagcagcagcagggctgacatttgagcctttatgagcaggtgaaaacactggtactcacagggaagagcttagattgccacacacttgatggaataaccatgtttaacttaatgcagcccacgaaactgtatataagaattgcatgtgcctttgagtccatcaccaaggatagaacttatatagaatatacttagacctcaaaaagcatgtattcagccattggtagttttatgtagctctatcaaatgtatgattaatagacagattaggtgtttcctctaaaagtaaaattagtaatttttataataaaatacatttataaataagtgtaatcattaatggttgttttatttattttttattgacaaaaattatatatatttatggtaaaacatgatgttttgaaatatttatacattgtggaatggttaaagag

SEQ ID NO: 43513 - DNA, 1329 bp, Homo sapiens
aacccatgtacacagagggccaactgtaatggtctgggaaaagcatgcttcacttcagggatgggtggtaatgttgctgttgtcttatcagttgaaagcaaatcttccctcgtagttgttgggtagaggccagcttgccaactgaaacaaacagcagagaaggccgggagtgcttcatggctctgcataaggaatcacaaatttgtgggatgaacatattgacaatgagggttttctaaatatggattttaattggtgtcatgtcttgaatttatagaagcacatattccagtgagctctaagcacaactccagtactcttttccttccttctcaaggcacctctgtgaagcaggccaaggccaagcatggtcgtgctttgactgatggatagaggcagtgagcgtgagcaaccaggcagtggggagcagacgaaaccagcatggacggcccttccctgctctgtgtaactggtgctcttctgtctcaccacaaggtttggcaggaggtggttttctcaggcaaygacccaatgccccaggaaatacacgaggacccagctcagtagtaccttgaggaagcacatttaagtgtctggtatacccaaaagaagatatacacactctttattaagggcatactctgtgccaaacattgtgttaagcagcagtttatagacacgagtcgacttaatcttttggaaaacctgaagatggggatactctaattatcttcatgttacgcatgaggaaactaccacttggatggaacaaacaaatattcaagatcacatggctggtaagtggtaaactgggataacatagacaggcaggccatttgatcctgtcgttcaagtgagctgggcagcctcttaccaggtgtctatgaagtctcagcagcagcagggctgacatttgagcctttatgagcaggtgaaaacactggtactcacagggaagagcttagattgccacacacttgatggaataaccatgtttaacttaatgcagcccacgaaactgtatataagaattgcatgtgcctttgagtccatcaccaaggatagaacttatatagaatatacttagacctcaaaaagcatgtattcagccattggtagttttatgtagctctatcaaatgtatgattaatagacagattaggtgtttcctctaaaagtaaaattagtaatttttataataaaatacatttataaataagtgtaatcattaatggttgttttatttattttttattgacaaaaattatatatatttatggtaaaacatgatgttttgaaatatttatacattgtggaatggttaaagag

SEQ ID NO: 43514 - DNA, 1329 bp, Homo sapiens
aacccatgtacacagagggccaactgtaatggtctgggaaaagcatgcttcacttcagggatgggtggtaatgttgctgttgtcttatcagttgaaagcaaatcttccctcgtagttgttgggtagaggccagcttgccaactgaaacaaacagcagagaaggccgggagtgcttcatggctctgcataaggaatcacaaatttgtgggatgaacatattgacaatgagggttttctaaatatggattttaattggtgtcatgtcttgaatttatagaagcacatattccagtgagctctaagcacaactccagtactcttttccttccttctcaaggcacctctgtgaagcaggccaaggccaagcatggtcgtgctttgactgatggatagaggcagtgagcgtgagcaaccaggcagtggggagcagacgaaaccagcatggacggcccttccctgctctgtgtaactggtgctcttctgtctcaccacaaggtttggcaggaggtggttttctcaggcaatgacccaatgccccaggaaatacacgaggacccagctcagtagtaccttgaggaagcacatttaagtgtctggtatacccaaaagaagatatacacactctttattaagggcatactctgtgccaaacattgtgttaagcagcagtttatagacacgagtcgacttaatcttttggaaaacctgaagatggggatactctaattatcttcatgttacgcatgaggaaactaccacttggatggaacaaacaaatattcaagatcacatggctggtaagtggtaaactgggataacatagacaggcaggccatttgatcctgtcgttcaagtgagctgggcagcctcttaccaggtgtctatgaagtctcagcagcagcagggctgacatttgagcctttatgagcaggtgaaaacactggtactcacagggaagagcttagattgccacacacttgatggaataaccatgtttaacttaatgcagcccacgaaactgtatataagaattgcatgtgcctttgagtccatcaccaaggatagaacttatatagaatatacttagacctcaaaaagcatgtattcagccattggtagttttatgtagctctatcaaatgtatgattaatagacagattaggtgtttcctctaaaagtaaaattagtaatttttataataaaatacatttataaataagtstaatcattaatggttgttttatttattttttattgacaaaaattatatatatttatggtaaaacatgatgttttgaaatatttatacattgtggaatggttaaagag

SEQ ID NO: 43515 - DNA, 623 bp, Homo sapiens
ttttgagytgagaacttactttaaaaccatcttccaaattttgtaccctggcggctcatagtcagagaacagagaagttaagactttaggactccaccacactttaaggcccactgggtgggtctgcaccagcgcttgcctgtctgttcacacgttctctctccctgggcctggacacgtccttcctcacttctcacactcagcactgtgtccttgcccaagtacagactctcttccactgcccccgcatcccaagggagcccaggattgctgcccgtctatgcacctgtagctgtttgttcttatttctacaacggcattattcacatgaaaaccctgcagatggatctgagttccttaggataagacctgccctgaccatgtctgaggctgagccctgcagacaacctggcccacagcaattatatttgcctaatgaaggcaaggaatgtggcttacacagacaagaaagctctcattaaaatgtattagacactaaggattccataggaaacatacctgggatcattaacaaggtaaagaataggatttttttttttttttaagatgtcttaagttgctctgaggcagtgagagggcaatttgctgctgagcaaaaacct

SEQ ID NO: 43516 - DNA, 623 bp, Homo sapiens
ttttgagttgagaacttactttaaaaccatcttccaaattttgtaccctggcrgctcatagtcagagaacagagaagttaagactttaggactccaccacactttaaggcccactgggtgggtctgcaccagcgcttgcctgtctgttcacacgttctctctccctgggcctggacacgtccttcctcacttctcacactcagcactgtgtccttgcccaagtacagactctcttccactgcccccgcatcccaagggagcccaggattgctgcccgtctatgcacctgtagctgtttgttcttatttctacaacggcattattcacatgaaaaccctgcagatggatctgagttccttaggataagacctgccctgaccatgtctgaggctgagccctgcagacaacctggcccacagcaattatatttgcctaatgaaggcaaggaatgtggcttacacagacaagaaagctctcattaaaatgtattagacactaaggattccataggaaacatacctgggatcattaacaaggtaaagaataggatttttttttttttttaagatgtcttaagttgctctgaggcagtgagagggcaatttgctgctgagcaaaaacct

SEQ ID NO: 43517 - DNA, 623 bp, Homo sapiens
ttttgagttgagaacttactttaaaaccatcttccaaattttgtaccctggcggctcatagtcagagaacagagaagttaagactttaggactccaccacactttaaggcccactggrtgggtctgcaccagcgcttgcctgtctgttcacacgttctctctccctgggcctggacacgtccttcctcacttctcacactcagcactgtgtccttgcccaagtacagactctcttccactgcccccgcatcccaagggagcccaggattgctgcccgtctatgcacctgtagctgtttgttcttatttctacaacggcattattcacatgaaaaccctgcagatggatctgagttccttaggataagacctgccctgaccatgtctgaggctgagccctgcagacaacctggcccacagcaattatatttgcctaatgaaggcaaggaatgtggcttacacagacaagaaagctctcattaaaatgtattagacactaaggattccataggaaacatacctgggatcattaacaaggtaaagaataggatttttttttttttttaagatgtcttaagttgctctgaggcagtgagagggcaatttgctgctgagcaaaaacct

SEQ ID NO: 43518 - DNA, 623 bp, Homo sapiens
ttttgagttgagaacttactttaaaaccatcttccaaattttgtaccctggcggctcatagtcagagaacagagaagttaagactttaggactccaccacactttaaggcccactgggtgggtctgcaccagcgcttgcctgtctgttcacacgttctctctccctgggcctggacacgtccttcctcacttctcacactcagcactgtgtccttgcccaagtacagactctcytccactgcccccgcatcccaagggagcccaggattgctgcccgtctatgcacctgtagctgtttgttcttatttctacaacggcattattcacatgaaaaccctgcagatggatctgagttccttaggataagacctgccctgaccatgtctgaggctgagccctgcagacaacctggcccacagcaattatatttgcctaatgaaggcaaggaatgtggcttacacagacaagaaagctctcattaaaatgtattagacactaaggattccataggaaacatacctgggatcattaacaaggtaaagaataggatttttttttttttttaagatgtcttaagttgctctgaggcagtgagagggcaatttgctgctgagcaaaaacct

SEQ ID NO: 43519 - DNA, 840 bp, Homo sapiens
tgtcattcacacaactggctgcttaaaattgacgataatttaatatccttttacagggtcaagattcgaacatcagttatgatttggatcatcacatagtgcagcactcagaagtcgaagggcggaagaaacctctctaaagagcctgagagctgtgactcttggtgaattctcagtctgcctttgtatttttttctgtctctttgtcagactgtcagctatcactgctctctgcttggtgtgcctgttgagtccctagtttgctgctcgtagtccgctgcggatttgacaaccacatgatgaagtttattacaattgtgtataaagtgagggcacacaggcacaggtaaaatatattcactttgcttgtagactgtgcactatctttttttttgagatagagtctctctctgttgcctaggctggagtgcagtggtgctatcgtggctcactgcaacctccacctcccaggttcaagtgattctcttgcctcagcctccwgagtagctgggattacaggcatgcgccaccatgccaggctactttttgtattttctttagtagagacagggtttcaccatgttggccaggctggtttcgaactcatggcctcaagtgatccacccatctcagcctcccaaagtgctgggattacaggcgtgagccaccgtgcctagcctgcactatctatttaacgccttaggatcacttctgccttgcctgtggttcaggtggatgcccctgcaaaacggaggagctgctgtccttactcatgagttcaaaacccagactctactgggaagccagtcaccattcctaactcggtgttctcctgcctgg

SEQ ID NO: 43520 - DNA, 840 bp, Homo sapiens
tgtcattcacacaactggctgcttaaaattgacgataatttaatatccttttacagggtcaagattcgaacatcagttatgatttggatcatcacatagtgcagcactcagaagtcgaagggcggaagaaacctctctaaagagcctgagagctgtgactcttggtgaattctcagtctgcctttgtatttttttctgtctctttgtcagactgtcagctatcactgctctctgcttggtgtgcctgttgagtccctagtttgctgctcgtagtccgctgcggatttgacaaccacatgatgaagtttattacaattgtgtataaagtgagggcacacaggcacaggtaaaatatattcactttgcttgtagactgtgcactatctttttttttgagatagagtctctctctgttgcctaggctggagtgcagtggtgctatcgtggctcactgcaacctccacctcccaggttcaagtgattctcttgcctcagcctcctgrgtagctgggattacaggcatgcgccaccatgccaggctactttttgtattttctttagtagagacagggtttcaccatgttggccaggctggtttcgaactcatggcctcaagtgatccacccatctcagcctcccaaagtgctgggattacaggcgtgagccaccgtgcctagcctgcactatctatttaacgccttaggatcacttctgccttgcctgtggttcaggtggatgcccctgcaaaacggaggagctgctgtccttactcatgagttcaaaacccagactctactgggaagccagtcaccattcctaactcggtgttctcctgcctgg

SEQ ID NO: 43521 - DNA, 840 bp, Homo sapiens
tgtcattcacacaactggctgcttaaaattgacgataatttaatatccttttacagggtcaagattcgaacatcagttatgatttggatcatcacatagtgcagcactcagaagtcgaagggcggaagaaacctctctaaagagcctgagagctgtgactcttggtgaattctcagtctgcctttgtatttttttctgtctctttgtcagactgtcagctatcactgctctctgcttggtgtgcctgttgagtccctagtttgctgctcgtagtccgctgcggatttgacaaccacatgatgaagtttattacaattgtgtataaagtgagggcacacaggcacaggtaaaatatattcactttgcttgtagactgtgcactatctttttttttgagatagagtctctctctgttgcctaggctggagtgcagtggtgctatcgtggctcactgcaacctccacctcccaggttcaagtgattctcttgcctcagcctcctgagtagctgggattacaggcatgcgccaccatgccaggctactttttgtattttytttagtagagacagggtttcaccatgttggccaggctggtttcgaactcatggcctcaagtgatccacccatctcagcctcccaaagtgctgggattacaggcgtgagccaccgtgcctagcctgcactatctatttaacgccttaggatcacttctgccttgcctgtggttcaggtggatgcccctgcaaaacggaggagctgctgtccttactcatgagttcaaaacccagactctactgggaagccagtcaccattcctaactcggtgttctcctgcctgg

SEQ ID NO: 43522 - DNA, 608 bp, Homo sapiens
cagaaatgatgtttggtttggtcctggaaacatatcacatgtggcttatgggtgaagggatggaatccagactctgacagaagctggttagtagcatttttcattgagactggaagtgggagagtagtgttaytgtgtttaaaacaaattatagattttttagaagatattttcccataaagttttatctcttccagattaagataattatttgtttcattaaaggtaggaaaattagtacctagtttcatttgttgattaatgttttaagacaaattgaatttttgctatggaaattatacatatgtaacagaatcagtaatacattgtgctaaagcattttttaaaatatcaataacaaaacactaagagttgagatgttttacaatgtctgattgtgtgtgatggcgaacatgtgatgaatggaagcagccattgtggttgtcaagttcactttattcatgtcgcatcatgtctgagtgccaagcaggacattgaattgcacaattataaatctgctttgggcactagactgactacaattactggcctatacaatggaattctttagtttgcctaatggcctaattgaattgatcaattggtaa

SEQ ID NO: 43523 - DNA, 519 bp, Homo sapiens
tctctcatggactttatatcatttataactactctagaaggcataatttacttcaggatttggttgataygctgttttaattattctaaaaggctccaaaaatgaatatttgtataatgtttgaaataatctttgactactctgatataaagttaggattatcctgcaggactgagtttatatgaaaaattgaatttattgccttcttaaaatggatgataagaaaagaactttattatcaatgttatttaaatttacttttcataatttttaagaatttaatcatatttgtattcttcataagataaaatcccacaagaaatccaagcttctgcttataaaactttaatcacgcattttattagactcttgttttgcctttcaacttgcagtcctttcttgtacttaactgtctgtgaatgtgaaccttcatgaactaacagacttttcaagtagaatatcattttatagactagaagaaaagacattttgttgccctcctcagtaattttacagagt

SEQ ID NO: 43524 - DNA, 1232 bp, Homo sapiens
agtaaagatgaaataaagacaatttgagataaaagttgaatttgtcacaaaaagaccttcactaaaggtcttatttggcacttggaaaagacccacaatggcagcttgaggtagacaaaagagcgaaaagcaatggaaagttaaactatctggataaactttaataaatatttacagcataaataatactgatgacttttggggtataacgtagatagcatattaaagtacaataagaacacataattagggaggaaaaaatagaagtaaaattctgaagtcttttcatttttctagaaatattttagatttatgtcagwccttataagaaaagtatttgttttgcaatctctatgtaaaacaaaaaagtaaacaaaaaagctcaagtagacctagaaaaatgaaatagcaagagaatgcaaaaaaattcaaaaggatgcaaaaaaggaaaataaattaaattttaaaataaatagtatatttgaaaaattaaaccaaattaattattattttactcttaaaggaaataaaggctccaattaaaaaattgtcaaggagggaaaacaccaagatgcatgtaacttacgagaaatataacttaaatattagcaagcaaaagagatgcaaaaaaaaaaaaagaatagaaaatatgatcattcagacagtaccaaaataaagctggtttaagtaatactagcgaagaagagtttcatgccagaagcataactgataatgagaacatttcataataatcaaaaacaaaatctaccaagaatatatagcagttctaactttgtaatgagtaaaattcaaaatatatgaagtaaaagtaaaacaaaaaggaggaaaaagaaccgaatatgtaatcataatgagggatttcaaaattcttctcaccccataaatatatacacctactaagcccccacaatcagttaaaaaaccatccttttctcgtgaactgataaataggcatttaacctcatatgctagtccatgaaactaatcaacaaatttgaaagaatggcagtcttacagaatatgtaagcaattagtggaaatcagccagaaataagagcaaaagataactagaatgttcccacatgtttagaaattgtccaatacatttctaaatggtccttgcatcaagaaagaaagcaaaattgaaattagaacatattttgaattgaagacaataaaaatatcaaaacatgtaggatgtattgaagact

SEQ ID NO: 43525 - DNA, 593 bp, Homo sapiens
ttatttggagaagtggtgactgagaaagaaatatttcattgttgtggcaattccttgaacactagcttcttatattacttgtaatatgtcagtcctagagccattcttcctcgtgggagttggcatcacacacatttataatggcagcaagaaacctcaatgtggatgctgaactacacgcmacttcccagcaaagaggggaatacaaccacaagaggaaccttcttgacaaaacaaatgcttcacattgaagttctttaagatgtagatttaatttccatggggaaaggctgtatcgacatcaacagcagaatttcaaactgaaatgatgcagaaattcactgcaagccaaaatttcaaaaagaaaacatgtaggtccttagtgagttatattttgcttttagttaaagataaaaagaacccacggactttttaatgactgcaaaaagttgaattcacattaatgtcatactttggaacaccttgggtatactttcaagttgaataaattatggtttttattcatttaaggaataacctctggacatttccaaacctgtgtcctttctaacgtcattccaatcatgtgtagt

SEQ ID NO: 43526 - DNA, 579 bp, Homo sapiens
catgccagctcaaaggtggtgggattccttggcgatgtccctgaagctcttatttcccacttcgaaagaacgaaaagggtctgaattttatttacacatggatttagtttgctaattcttagagattccttttttactgctagatcttttttagtaaacacaattgagatagatattaaagtgtaattttaagtgtgcttgttctatacaaatatggcattgccttccagattaagtttttaaccagagtcaaacttagcctttataaaaagtcctcatttaatttcaaaatagatcttcttgtaagacattgcacatagggaagacctacctaggaatagcctggtgaaatgcagaattggaaaaaggcaaaagtccttgctcatgactcagaactacatcgagtgargtcagtgttgaaaacgcccattccctccaggtgagccttccccattgtggattagtgttgtggcttcatggccctaataggggtgtgtctgccaggaactgcactgcatggggcccacagccctgcctcagaagcagctttggtctcgtttgctgagaccgcttgctgtg

SEQ ID NO: 43527 - DNA, 769 bp, Homo sapiens
ttcatccacagaaattcccccttgtgatctgaggctctgccgagcagtggcccctccccaaagcagccccagttctccacttccctcctggcccccacccttgatcatggctcctgagcattttgggttttgtccaggggctcactaagagctctgagtaggaagttctcgctacaaagattcagctgtgggcgaaaaccgtatcatttccccaggtgacgtggggtgtgagggcagggctggagtgccccgggttcactggggagctgcagagactatcacttgccttccaggaacccttaccgtgtgccagcttccacaggactgtggtggaaatgtggtcaaggtcttaggagcaggccacacagggatggttcatgcactgagggaggggtgtggagcctctgattctgatgggactcccaggggtgctcacaatggcaaatgggctgctgttacctcctagcactggactctgggtcacccgcaagtgtaggtcacttccttgctggtcagtaatggggcacaagtcaccacagcaggcgccgctcctgaaactctcttcagggatagcacgggcggaagtgcaggcagcaggcagagcrtggaggtccgtgtggtgctcagtcactatggcaactagagatcacagagccacagtcaccatccccctagggcacctgcccagggaaaaggagaaatgtaaaaccacaagcatacaattaagaacaggtgcagagacccagcggcttccagggcagctttgaag

SEQ ID NO: 43528 - DNA, 555 bp, Homo sapiens
ctttaatgtggaatgagaacgtaaagaagcttccaaagctatctccataccatagaagtcttagagttttagaatttttcttcctggtcttttacagctgccttgcacatgcctaatgagtcattttaacaatccctttatcaaagcttttaacagcatccaacatagtttttatggggacatctctccttttgaacttgtatttttcctcaggttacatcatattcaattagtgtaattgtaaatacatttaaagctaatataatgccgggcatggtggctcacacctgtaatcccagcactttgggaggctgaggtgggcggatcacctgaggtcaggagttcgagatcagcctggccaacgtggcaaaaccccatctctactaaaaatacaaaaattagctggccatggtggcgggtgcctataatcccagctacgtgggaggctaaggcaggagaattgcttgaactcaggaggtagaggtkgcagtgagccaagatcgtgccactgcactccagcctgggtgacagagtgagactccatctctaaaaaaa

SEQ ID NO: 43529 - DNA, 578 bp, Homo sapiens
aatgcataagtcaatagataaaacaatataattcatagttgctaaagaaaacagtatcatatgctgggcacagtggctcacgcctgtaatcccaacrgtttgggaggccaaggtaggtagattgtttgagcccacaagttcaagaccagcctgggcaacatggtaagaccccatctctacaaaattattagccaggcaccacacctgtagccccgtctacttgggaggctgaagtggagagccagttgagcacaggaggttgaggctgcagtgagccatgattgtgccactgcattccagcctgggtgacagagcaagaccctatttcaaaaaaaaaaaaaaaaaaaaaaccagtaacatagatcattgggttgtataattattgattaattaggttgtataagaccttaatcagatattattgtaatcagaatttcacctgggaaatcacttcttattcaaaatgtacattctagactgtatgagaaaaattcatcttaattggaaaaagctatatttttattctctctactttaaagaaaatcatgactgtgaaggagtttaattctgtaggcatt

SEQ ID NO: 43530 - DNA, 1327 bp, Homo sapiens
tgcattttatttacaagctaatgaattattacctcagttgaaataatccattcttattaaggcacatctggtgataattatgaaatgtgtaaacaatgaaaacatgtattttccaaccagtaaacagaaattcatcaatattggtaacagctaagttgaaactgcatcccctttctttatccataactggaatacctaaaacacatcttattatcttgacacatgattaatatacagaataaagggtctcttaatagtcatatttaactcaccattcttattaaaatctaattaaagctcccccagtggagaacagtctggatttagtgagtacgtttatataaccattgaaatctcattattactaatgggctaaacaaaatattttggagatatcaaatgatttaaatttatatctagacaccaattatatattacatacaaaatttctttaaaaggaaaaagtgacagttttacagagaaaattataattatttcttacacaaagcttttattattttggtaatatatttattttttccattggtcttgagtataatttttaagctatgagagactagcactgagacattgaaggaatagcaggaataaaacagctattttcccctaaagagtaaaataaaaaatttaagtggatcttatattttttcttatagcctgatgttgatttttaccagaaataaatttattttaagttttttaatcaaccaccacagcataattcagttgtcctttatatgttcccatgggacctacactttttaatgccggcagcaaatgttaacactgagtgcttaccawgtgccttgccctgtgccagaagcttaagacccaaaacagcaaaaccagatgagggtgctgtcctgctgcaactgaggatctagaggcattgctgttactaatccctagtaggtattccgagggtttcggctacctgcttacaacagtatggggattacctcacatcagaagactttgctgggtagttggtatgattgtgtcccctccttggcacaccttgctttattcatccttgtttctgaagctcaaacaaaatgcagagcttgtcgtggaggaatgaacctagttgggttcaaacgtggtcttcactttgtccgtttcctcagtacaggagccagtgcttaccacctcttactccttggtgtgctcaagccctctgctcagagttctgttagagcactggtccaactgcgctgcaatcatcagttaatatcaatgtttgattcttaaggagggccacggtcacgtgcccctagagtgataaaccagaaacccttgggtcatg

SEQ ID NO: 43531 - DNA, 629 bp, Homo sapiens
tttcccaggttcacactgaaaattatgagaaagaaattatgcacatgatttttctaataagtcatggtggtcccatggtaaattgtgttggcctccataatatattttaccacatatgstattttgcagagtgcccttactagtgccctatcccctaggatctgggattgtatactgaatacagtagaaatgattcttgttgacttctgaagtgtagccttaagatttctgcagtttctgccattgccgcttgaactgcttacccttgagttcaagtaaagaagcccaagctaaccatgagaagatagtcatgtggacaaaatgagattcaggctcacagctgtccctgccaagatactacacatgtgggcaaagccactttgcatgtttcagcaccagccaccatgtaactgtaacctcataacatagccagccaatccacatagaacacgaaaatctcccaggtaagccttgtctggatttctgacctagagaatcagtggcaaataaaatgaaattgtttacgctaccatgttttgggggtaatttttcatgcagcaatagatgatcaaaacagaatctttccctccttccagaattagaacaagccactacttctcaggttgcat

SEQ ID NO: 43532 - DNA, 1346 bp, Homo sapiens
gcttgagcagcttgttggaaccggagggaggtttcagggactgcttatgaaccagataccaggttgggtcttgacagtctgcatcccaaacaagctcccctgaaacaagcccgttgtacactaaaattggagaacaacccgattagaagaatagactccacagaagaccaagggcatcatcaatcggtaaaattttccaaaagaggaaaaccaatgtaagtctttttccctgaaaaacttagttgtgtttgtaaagagctaagttgacattccaaagtccttggactggaatctccagtgtgtgccatgttcccagtgggcgtgatgaggtgtcctgaggagtatcaggctatggctttgctaccttgtcagtgacagaatttgcatcggctgcattctttgtattctataatttgtgtatggtttaccagtttgctagaatgttagaatcttttgtttttcaccactcagagtggacctaattttgtggtcggctgaaaaaaatttgcatctaggtatctatgtaaagtgtagaagaattgattcttagctgtggattatcttacccttactttagttgaagtgattgatacctgtggctttgaagaacatttgtgagatgatctttttctcgtactgtgctagatagagctttcatcattataccatacaattgtacttttctgagattctttgttggagggggtttagttcctaagagtcaaggattgtaatggagatctatatctcatatctaaaatgatgaatttatgaaaaagtaattcttgtgtgaagttttttttttttttacactttttgttttaatctgaagagttatctttgaaaaacaggatgcaattcagtgcttccttttatagcctcttgggagaatgactaatgtcattattttataggacctaacaggagcaaaaagcctagaaattactgcaagtggattagatgtcaagaagcacaccacatgtttttattacattttacaaagtgtgctcatactargaggccaaatagagaaaaggccaagaaaagtagatgattgatgtgaacatctgatcttatttgaccaaagttgacaaaatattgatgccactgtttggtgtttaaaagtaagattaactaaaatgccccaatttaaatttctaaaatttaaatcctcttcttgaattgtttgtttgttgagatctcacattatcagatctttagtaattctggaagaatttgctaaagggtgaaaagaatatttttgttaaatatttggttaagtaggtggtttgatttttaatcactataactaaaggggttgggacttccagattcccaaaggatcc

SEQ ID NO: 43533 - DNA, 598 bp, Homo sapiens
gaattttgatcatttggacaggattccttcttgaaaggaatcagcactgaggcccttatatggaatatttccatcactccctagggttggcctgtgccctttcacagttccttccatcctccatgcctggctgtgggcaacccctgatctgccttctgtcactatagattagtggcatttcaagaggagcatttatatatttttaaaaagattcctcagagttttaactccaaaagctgccaagaaaattagattctgctaattgcatcatcagcaaacactgaaatctgttcattcaatattggcttccttctgtattcaatgaactgtcttttctttaaaaaatatctttaagaaatagtttggtacctgcaaaactttgatcactttttttcttttttaacaggtggtrctttgcatatcagttgatgtatctcaagactataaccaagtagagaatgtcataaaacaagtaagaggttgggctaattggaattcaccaatgtgcttgacttttgatttgttcttgccattttgctatgtggcttggaatggacacaacttctctataggtttaatagttttgtaaattttattt

SEQ ID NO: 43534 - DNA, 1225 bp, Homo sapiens
agctttagaagactctagaggaaggctgaacaaggtgaagctgaacaaggttttcatcccagtgtcaggaccattgaagcttaagagtttagacattttacagctgagaaaaccagctaaaatgggaatggaccttctaatctgacacagattactgtagcagttcactgaggtcatattttcaagagaacactttgtaacctaagagatgcyggatgttcctatcaaacatcagtattattaacaaggagaaaccaaaaaagttgaaggacagactcactagagttctcaaatcaagataaaaagatactgcatcttattgatgtttctatttttaatcaggtttaccaaggaacttctcttggtaatttatttcagcaccaaagaaatgaacactagatttgaaatttttattttttctttttttgagatggaatttcactctgtcactcaggctggagtgcagtggcgtgatctcagctcactgcaacctccacctctcaagttcaagtgattctcctgcttcagcctccctagtagctgggattacaggcacatgtcaccacacccagctaattttttttattttagtagagatgggtttacgccacgttggcccggctggtctcaaactcctgacctcaggtgactggcccacctctacctcccaaagtgctgggagtacaggcatgagccaccaggcccggcctgaaatgtttttaaaatggaaaacgttttttagttgccatcgcatcaacaatctttttcttccttttttttgagacagagtcttgctctgtcgctgaggctggagtacagtggcacgatctcggctcactgcaacctctgcctcccgggctcaagcggagtgtcctccagcctcctgtgaggatgaagctggggagtgtgttggtgtcttcgtgtgcgccgtctagacagactttcccttaaacctctctctttatctagacttactatccctagaaacagaacctccagtctcctgccaggctggaagaggggtacagatctaccctgtggagaggggaaaaacatctaagatctaactgcctttttttttcattgtcctacattatttttttaatttgaagtgaaattcatataacataaaattaactgtttttaaagtgagccatgcagagggattcagcatattcacaatgaggtgcacccaccccctccgcctagttctaaagcatatgca

SEQ ID NO: 43535 - DNA, 1225 bp, Homo sapiens
agctttagaagactctagaggaaggctgaacaaggtgaagctgaacaaggttttcatcccagtgtcaggaccattgaagcttaagagtttagacattttacagctgagaaaaccagctaaaatgggaatggaccttctaatctgacacagattactgtagcagttcactgaggtcatattttcaagagaacactttgtaacctaagagatgccggatgttcctatcaaacatcagtattattaacaaggagaaaccaaaaaagttgaaggacagactcactagagttctcaaatcaagataaaaagatactgcatcttattgatgtttctatttttaatcaggtttaccaaggaacttctcttggtaatttatttcagcaccaaagaaatgaacactagatttgaaatttttattttttctttttttgagatggaatttcactctgtcactcaggctggagtgcagtggcgtgatctcagctcactgcaacctccacctctcaagttcaagtgattctcctgcttcagcctccctagtagctgggattacaggcacatgtcaccacacccagctaattttttttattttagtagagatgggtttacgccacgttggcccggctggtctcaaactcctgacctcaggtgactggcccacctctacctcccaaagtgctgggagtacaggcatgagccaccaggcccggcctgaaatgtttttaaaatggaaaacgttttttagttgccatcgcatcaacaatctttttcttccttttttttgagacagagtcttgctctgtcgctgaggctggagtacagtggcacgatctcggctcactgcaacctctgcctcccgggctcaagcggagtgtcctccagcctcctgtgaggatgaagctggggagtrtgttggtgtcttcgtgtgcgccgtctagacagactttcccttaaacctctctctttatctagacttactatccctagaaacagaacctccagtctcctgccaggctggaagaggggtacagatctaccctgtggagaggggaaaaacatctaagatctaactgcctttttttttcattgtcctacattatttttttaatttgaagtgaaattcatataacataaaattaactgtttttaaagtgagccatgcagagggattcagcatattcacaatgaggtgcacccaccccctccgcctagttctaaagcatatgca

SEQ ID NO: 43536 - DNA, 718 bp, Homo sapiens
aatttcattcctttttaaggctgaataatattccataccatttgcttttttaaaagtccattttctcaaaaaattggttgtcatttccactccccacccagccaatagaaacagcaaatatattaaattagaattgacctgacagaggaggtaatggaggcctgtaaattattcaaagaattattttagagtctgacagcaaggaagaagacaaaaatgctcttaaaaccagctcaggagtctctgaggctcttctgcgtggggcaggcagtcacaaagatctctacggctcctggagttctcgctggatcgtagcacaggacaatcttagtgattcctaatgatgccactgagtcatcaagacagagttattttctgtaggaagagtcaaagagttcagggaaagtgagtagtaagttacagaaatatctccattccaaatggttaaaattttttaaaagtttaggcttcagtcatctgaaaaatttacttgtgtgaaatgattcagtccagactgtagtgaaagagaggaatcccagcaatatcaaagtaaaatacacacacacacacacacacacacacagagagagagagagaaggagcacaagatctctttcttttttgtttttttctytttttttttgaacaaactcttacatatccttcaagcccaggccaaatggcaccttctctgtgaatgtgtgtgtgttaaataggc

SEQ ID NO: 43537 - DNA, 172 bp, Homo sapiens
acaaagtgtatacagtgacaggagcctccctcctcactttacctcccacttctccccaaaagcagctcctgtcacccatgccctgtgtatctttycagggatatttacaaatatatatgtagacactatgtgattttcttttatatttatgatagcctattctgcttgagat

SEQ ID NO: 43538 - DNA, 559 bp, Homo sapiens
tgctctagttgtatttgtgttgagtgtgtgtgtgtgtctcagtgggggggggtattgggtaacaacataaaaaatattttgtggcaaaaacaagctagtgattttccaatgaactcacaaataagcaacatcccactgcctcttttattcttaggaatggttgtatgctcgagttttaattaacagcatcccagtgacagtgatgaatgtcccttctagatctggttcataaaaatctgccacacagttctctactctccttctctcctctgatataccacctggagtctaaatactgagcccagaacaactctggaaactatatgttgaagatggccgtcttcatcaatatgaatctctgaatggttgtgtggaacaaacccctttaccacctcccctcctcacccccagcascaatggaaccctatgagaacaggaaaagacttctaatatggtaagctactcagatttgggggtagagagggttacctactacagcagatagtgttaccttaacaaataaataattcttagtattcttgtaaaagccactgtgcac

SEQ ID NO: 43539 - DNA, 2509 bp, Homo sapiens
aggagggaacacggcatggggcaggagtaataaacactttctagaagaaggccctcttcttcaaatgaaacctcaggcaaaagcccaatgtttaacacaaacagaagcagagatgccctggttggagtagagatagggagcctggggccccatgctgctagacagccactcatactaaccctcctcatgttacccaaggcctttgtggcacacaatttaaaaaccaccagtacagaggatagaacatgaacacttgggttagacaagcctacctgcttgcttgcttgcttcatcttatttactcattcatgtattcactgctcaataaatatttattgaagaccatgtgctgggtgcactggtttgaatcctggacccacagctaattagctgtatgactttagcatctttcttagtcacattgggttttatttgctttctttgaaaatataccatacatagtgataactgcctcacagaccttcaggatcacaagagagagcggtggcatatgtggtattcagggagctcctggcccttagtgaatgctctcagtgaatatttgttccttcttcacttcctatgctgatcttcaaagtatgatgtaattccgagaaaagtcattttaaaaatatatctagtacacacactcacacaaacacagaaacatttttaaaacagctctacatgttcccattccttgtggtatactttgtttcaaacctgtatgcaactttcaaagtcttctttgttcccctctcaccttcagcttaataccatttctcaattcctgttcttggacacagcaagaaaccgcccttcctaccaatcttctcattttctcagtgtgagcttccccaactcattctctcagaatcttctccagattagctgatcccagcttctctgttagcatctactgagccacccttacttaaaacaaaaaaagcaatttccagagattgaaaaaaaaattacttttctttccagaacatccagcatcttccagttatcagaggatttcaccctcatttcttctgggtaaaaatgtgtttcttcagtgctggtagaagactaaacttggcctggctttgcaaatggccattaatgaggggggttagtactaaacagactttcaacagtttcccaaggaataggaattttcaactagcaaccactatcggatttttaaacttatatcattcaagtcagcaaagaaaactatgcatttcaagttttctctaaggtcaaacatttcattcattagacagaccatataatggccatgaatggaggctccaaatccmagctctctctcatattagctgtgtgaaaaactagcattttaatagtgcctgtttcatcatactcttataaagtatagttacaatcattttaaatggttattacattgcttcacatacaaaaaacactgaatatatgttatctattattgtcattgtcattattttaaaatagtgttctgaagagtgttttcagagctctggtagtggatgagtaaacctcaggcaaattataagaaataaaacattttccagggtctatgtaggagagagaaaaatgaaaaagacaaagtctttacagattcctttagctctcatcatgaagcagaagattgtattcacatccttggatcttttcctgccctctctctagcgatatggtaggcatacaatcatgattgtagaataagtgaaagagaatggatggaggaatgaatgaataaatgaatggatgggtaagcaaatgaacaaacaagcagatcactggtaatggaataaactaagcagtcatgttcctttccataatctttgatgttcataatctttgaagtatgatgatgtttatcatacttcacctaaatacacaggtctgatgtactccattctctttcaaatgaagaatcctgttggtcactatatgttgtccctcaccttccacccacacaaaccaaaaatagggttcttggcttccagctgtgctttctgggcttctttgtgatttttcctggcatcctcttggtctgctccatccttggcctctgctttccaggaagacacagcaggagcccacgtgtctgatatagaaaaaagcagtcctagcactgtcctgggaagaaacaaagacagtgctgtgagaaacacatattcacccatccaaacccaaagaatggactccgagacatgaagagtagccgaagtgagacttttgatgggggtcttgcaagatcgggtgtctggtagacaggtacaccctgggcagttacagcaggtaatttacctcctagcatgcaaatccctcccccagttcctcattggtcaagtactatggggttacaatcttcctggacgtcgcctaagtttaatcatcccccttataaggttataccctggtccccttcctgcttaagctttgatttcccaataacgaaactttcttcccttttatgggctgacccctcctctacattctgtttacatatcgtgac

SEQ ID NO: 43540 - DNA, 629 bp, Homo sapiens
catcccccatttcccataccaaataaattagtttctccagctaggtaaycccatagcatcccagtacatcatcaacataacactgaccagactttttaatacttgctggctaattgttgggcttccttgatggactgtgagttccatgagtgcagggtccatatttgtcttgttccctactgcattcccaggggctaggataggtttagcccatggtaagtgctcaatatttgtcaaatgacagatggtaggagggagtgggcacccccagttgctttgccttcatcttctgcacccttggcctggcttccagcataagatttgggaagagcatccaagggagccaaaatcaagttatggaagacctagacccagctttgcctccaagtcacccaataagacctatggtctgacttctatatgatctggtcatttacggtctgactggggcagagggtaaggaagagatgactggaacacagcttctcatgagcaagttataaatgtgtggtatattgattacctaagcccatcaggcagagcctaggatagctggagctcacaggtttgtcacctccagccagaagtggcttcaagtatttatcccaggaggccaggtaaatattctc

SEQ ID NO: 43541 - DNA, 1179 bp, Homo sapiens
cataatttaacagtgtcaaattaaaatctattgaaaagacttagaatggagcaaacccagtggctttaaatgctatgcactcaatggttttcagatcatgagaattaaccccactggatctctgccctttcacactacaaatggggactgtgctcaattcataacaggacgttttgagagggcagtcacatgtttttgtgaactgagagaaaagataatggctctaggaaaatggctctatgtgagaagttgcctgtgtcatcttgtgtggatgcttgattctgattgcccttggagagcttgggtcctcctcattatcttatacatgtctcatgcagattctcagctttccttcaactttcaaatgatagtcacttctgggttgaggttggcactagagtacacagagttcccctctaccatcagtctccacctgccccgctcctgccatgatgaggcctgggacctgccctagggcaacacagtgattttgagaaccaggagatttcaaatgtctttgcttgttcaaacaatgcccagttattttcctttgccaataattcacaacttctggcaagattgtttctggatgttatgttcattttatggctacatatgtcttcaaagctgagacacagcttccgacacagtctcctctggctctggttcagaactgcctgaattttctcttcatcacatccttttgatggatcacatttgggtcacaaaaagtgattcctatggtcagtttgggctttagagtcctataaaattctggatgaagcacagaggacctttgcactagattttaatgtttcactgtttgagtgggctctgttaactgtgcacatggggtgcctgactgcaatacatgtctctttctgaagccaagcagttcatccaaattaaactgctagaatctgcaatgagcttcgaggcaaatactctgtmttcctagtggtttcaactgtgtagacagaaaaaattgtacatagagctaactacacacacaaaaatctggttttggccactggtttgggcacactcaaatccaaagttggtttcttgctttcctcagctttactgaggtgtagctaacaaaaaagtatacatttattatgtaacaacatattttgaaatatgtacattgtgaaatggctacattgagctaattaacat

SEQ ID NO: 43542 - DNA, 570 bp, Homo sapiens
tgtttgaaaaaccctttgttgaatgaatgaataccaacttcactctgcaactgagtctgaagtcatgaaggctatttcctcatgagtttcctatctagggaaaagcccaccaacccttggttccctgccccaacctgatcaatgctcagggatgactcactggcttgaatacgagcccagcttctcagttgatgtgctgcacaaagrccatccttgggccaagtgggagatgaatcacctggcacagattgcaggcttggaggaaggcacaggatagtgaagggagcactaggctgggagaaaatagggtatgaatttttctccacttaggcagtgggagtctatgacttagaaagctcatctgatgggaaaacttttggagggactctaccatgtgctcttattacattgctttctccacttcacaggttaaagaatgagcacctgtagtttgctctcagaggggtgaaacactacatcacccacacactgactttcagcttccatccatctcccctcagcttgctgtgtgctcagcatgttgctagactgaggttggggtggggaggt

SEQ ID NO: 43543 - DNA, 1623 bp, Homo sapiens
tgcatttttattttaatcccatttttaaacaagttttaaaataatcatgtattgaagatgatataaaaacactttttaataataacctctatttcagataaatatagcccacagagtctaaagcattgttgataacaaaagcgcataatagagctgaacttagttggatgtgttctttatgatttccaggctgtatgccacactttcagtttttctctatacaawtctcacagatatttcaagatatctactttctttattaaaaaaaagtacactgtgcctaggacagtgggaaattcaaagtacaagaaatcttcttgcctctagtagagttcagagtcttaatgggataaaatgtcctgtttagatgaaaagttaattttcagttcaaagccatatgccattcagccaaaagactatcttagaggaaaagccagattgttctgggaatcaaggaagctttccttggaagatggacttgtgaggaatagacactgatgagaaatgtgagctttcatttgaaaaaattgtctggaaggatgaagcctaaattgttaacagcaatttcctctgatgagatttgtacaattttggtgtttaagtgagaataggcttaaagtttgttctgtatatgtctgcagttattgaggtttttcacaataaaatatatatttagatattactgttgccattataagaaaaataatgtttgggtttacagactggatggatgagttgaacaaagcaagagaagctagatcttctagcttcacacacaagctagaagctagatacacacaagcatcagaatggtgaagaaagtatagtgcttagagtccacggtgacaggagcagagtgtggtgataggatggagtttaagaaatgttatactataaaattgggtctggaactcattgcctaaggtaaggcacatgatggccgatgtttattcatttaaaaagtcatcatgattttcaataaatatgtattcaacatctactctatcattgttcttgggggaaaatagctcagctttcttggaacgtgcatttcatggagaaagaggggacagtaagtaaatcaatggttaaacattttaaaatcagaccaagttatgttcagtaaagaaaattaagtcaggggatgtgaaagagatgaaatgtgtagctaccattgctgatggctcaaagaaagtctgtctcagaggatgatatgagctatgatattaatgatgataaattataatgaaggaaaatggtgtgagtctggcctaaataaggtttaggtattgaccaaaatacaatcaatcacccatgcatagagatataacacaccaattgaaatcacaaggcttctcaaaaaccttaaaaattggttttgctttctttgacaactatgtggacctaattaagggcaaactgccctctcaatggccttcattcaatcagcttacccaagggaaaacaacaacaacaacaacaaccaaacaggccaataaatagcaaacaaatacaggactgtgtttcacagatagtctgcagttttcacttttataaactcgtcctttatctttgtttggagagatgatctatacagcattgagctccctcacatatgtgcat

SEQ ID NO: 43544 - DNA, 1623 bp, Homo sapiens
tgcatttttattttaatcccatttttaaacaagttttaaaataatcatgtattgaagatgatataaaaacactttttaataataacctctatttcagataaatatagcccacagagtctaaagcattgttgataacaaaagcgcataatagagctgaacttagttggatgtgttctttatgatttccaggctgtatgccacactttcagtttttctctatacaaatctcacagatatttcaagatatctactttcttyattaaaaaaaagtacactgtgcctaggacagtgggaaattcaaagtacaagaaatcttcttgcctctagtagagttcagagtcttaatgggataaaatgtcctgtttagatgaaaagttaattttcagttcaaagccatatgccattcagccaaaagactatcttagaggaaaagccagattgttctgggaatcaaggaagctttccttggaagatggacttgtgaggaatagacactgatgagaaatgtgagctttcatttgaaaaaattgtctggaaggatgaagcctaaattgttaacagcaatttcctctgatgagatttgtacaattttggtgtttaagtgagaataggcttaaagtttgttctgtatatgtctgcagttattgaggtttttcacaataaaatatatatttagatattactgttgccattataagaaaaataatgtttgggtttacagactggatggatgagttgaacaaagcaagagaagctagatcttctagcttcacacacaagctagaagctagatacacacaagcatcagaatggtgaagaaagtatagtgcttagagtccacggtgacaggagcagagtgtggtgataggatggagtttaagaaatgttatactataaaattgggtctggaactcattgcctaaggtaaggcacatgatggccgatgtttattcatttaaaaagtcatcatgattttcaataaatatgtattcaacatctactctatcattgttcttgggggaaaatagctcagctttcttggaacgtgcatttcatggagaaagaggggacagtaagtaaatcaatggttaaacattttaaaatcagaccaagttatgttcagtaaagaaaattaagtcaggggatgtgaaagagatgaaatgtgtagctaccattgctgatggctcaaagaaagtctgtctcagaggatgatatgagctatgatattaatgatgataaattataatgaaggaaaatggtgtgagtctggcctaaataaggtttaggtattgaccaaaatacaatcaatcacccatgcatagagatataacacaccaattgaaatcacaaggcttctcaaaaaccttaaaaattggttttgctttctttgacaactatgtggacctaattaagggcaaactgccctctcaatggccttcattcaatcagcttacccaagggaaaacaacaacaacaacaacaaccaaacaggccaataaatagcaaacaaatacaggactgtgtttcacagatagtctgcagttttcacttttataaactcgtcctttatctttgtttggagagatgatctatacagcattgagctccctcacatatgtgcat

SEQ ID NO: 43545 - DNA, 809 bp, Homo sapiens
agacaggggcgtgggagcaggaagagatcttcccagccagtgggtgcaggctagtatcgcaagttctcatctggccatgtgactgtgtctctttcaggcaaagcactaaagggccagtaccagtgagtggccccacctgtgtccccgatgctgacctcacctggtcctccgcctactgtccctctcagtgccttctctcagctcccaggccaacagtagccaaacccctagagacagtgatgcctgcccgcaccctggcctggtccctggtccttcactggcgccttctcggagctggcccagggggcctggagcatggacagtgtgggcgctctccctaccttgcctccttttttcttaaagcaaagtcacttctccatcacaaccagatttgaggctggttttgatggctgggtccttgggcctggccagtcttcctcttagcctctggatctagaagggaccataagaggagtaggccctggttcctgctgtcctggtggctgggcccagcaggggccctcactcttgaagtccaggactgggtctgacctggtgggagcacctgccagaggatgctctttcccaggacggatgggccctrtgtctcaggagtggggttgggggacagccttcagcagcagctcacaccctaccttccccagacttgcactggggtgggatttggagtgatgggaaggtttttaagggccggggatggatcttttctaaatgttattacttgtaaataaagtctatttttctcccgtgagtactgagttgactgatcgggtgtgggaaaaagagga

SEQ ID NO: 43546 - DNA, 1393 bp, Homo sapiens
tgcatggactaatgatgagaatgttcattaaccaaagaatttgaataatttatttttttctctacctaaagttcaaaaataaagcaagaaagaaagcaactaccaagacagggacttaccttgccttaagacacactataagaatagacaaacagatcagtgggacaaaatgcagatctcagagatggatgggaatttaatatataataaaggtgtaaccaccaatcaataagaaggtattcattgttaagtagattagttgagaaaactgactcaccacaaggagaaaaattaaaactagatttgtacataatactgaatacaaaggggactcaagataaagacctaattatgaaaggtaaagttatgaaactaatttttaaaatataagcaggctgggtgtggtgactcatgcctgtaatcccggcactttgggaggctgaggggggcagatcacttgagcctagaggttcaagaccagcttgggcaacatggtcaaaccctatctctacaaaaaataaaaaaattagccaggtgtgatggtgcatgcctgtagtcccagctactcaggaggctgaggtggaaggatcacttgagcccaagagtttgaggttgcagtgagctgagatcatggcacttgactacattgtgggtaacagatgaaaccctgtctcaaaataaataagtaaatgaacttttttaaaaataaaaatataagcaagtaagaaagattcgataaatttgattttataaattaaggatttctgttctgttaaagatatgataggcagagttaactgaaactgaatggagaatagatgagtaatgattaaaactgacagtagattaatatttatcyagagaaactcctacaaatcaacaaaagacagcaactccaatagaaaaacaggccagagatatgaacacatttacaggaaaggaaacccaaaaggccattaagcatgaaaagagatgctcagagtcattagtaattagagaaatgcacataaaaatatgagatatcactttacatctattaggttggcaaaagctagaaagctgaatagtgccaagtgttggcaaggatcaaaggctgtaggagctttcttgtacttttttgtgggtatggtacaggcattgtggatagcagcatggcattgctgagtcagcgaatatacacataccctgtgacacatcctaaggggatatgtaagagggtgttcactgaagtgttaattatggctgaacattgaggagttggaggcaatctggatatctatctctgagggagtaaataggtaaaatgtgacggatgcatatcatgaaattgttttacagttaaaagcaatacattaagtacctgtaggaacttgggaggaccttaaaagcatag

SEQ ID NO: 43547 - DNA, 669 bp, Homo sapiens
actgaagaatgagcttgcacaaggggccgtcagtcatggctgccaacaattgccccatggcccaactatatgacctctattcttggctgaccacagccctgcccacgggcgagtatccatggtgctgattcttccagttgtcccaaaacaaatyttcaatgaattctgaggccccaaggcttcccttgttggccaagtcactgataaggttccacttgcctcaaccagcctatagctcttggacagggggagacagagtcagacgcaacacctgtcctgtgtcccagacagtgggggagggaggacacctggggcctcagtgctcacccgtggcacaagcctgagtacgttagctcttctatactaagtgcaccaggcttgagccccacacagggaagaagggagtgggtgggctgaggccttcagctacctgggagcccagcagtgttctcggccagagatgagaaggctcctttaaaccaaaaatgtcatggctctgcccccaccctgcttaggcagggagggtgaagcctggaggggggcaattcctatgctccacaataaaaaaaggttttttaaatatattcatcaaaatagttttcttttaaaaagccccccactgctgacagccccactggctggctctccatcatatccctccccagtccg

SEQ ID NO: 43548 - DNA, 620 bp, Homo sapiens
gcaataatcaaaatatatttagaaaattttaataatttattggaaaaatatatgttcactttttgtttgtagratggctctcgagatgataaatttatgttattaatactataaatttatttaagtttatgaaagtttttctcatgtttttcttttaaataaagttaatccctttttggaattaatagtgctcattacagatttcagaagaatgaattaagaaataagacataaaaatttcatttactcctccccacacaaatacagaccacattaatatttgaagtatatattttattttgtatttgtaagatactatttatatataattttgttcatattgctagcatattaaggttgaagaggaatagtgcttccttcagtattatacataaggagacagtatactaaaagaatctgaatgaaaaagggagacatgcagaaaaataactaaatcttacttttttctccaattgagaaatcatattaagtcctcaggtgaagcagcttgatttggtgctatatttatgtaaaaatgatccattgatcttcccagatgtttagaatatctgataatatctctgctattttcaatacccccttctcatggccttctaaaa

SEQ ID NO: 43549 - DNA, 1001 bp, Homo sapiens
agtaatagagacagtttaagatacattaatgaattttgaggaaaataacttgatataggatgaagattagagagaaaacagtcggggatgaaactatgtttctgcttcagaaggaggatactgagaagatggaacagagaaaagataagcctgctttgccagctgaagaggcctccccacctctagtagaacctttccttcactcttagtggaagaaacctcttcacccctactgaaagtttaaccttgcgttgcctgaggaaattatatgtccttccctgaagcagtttcccagcaaaacaatgttgatttccctcaagacccatcttcatcatccctctttgcttctagacctataactagactcaagtttaaactcaactgtgaaaggttaagctgtggtgttgcagatggcatctgaactcactcccagaagacgataaacgttaacttcagaacaaatcaagaaaacttgatttgaatgcaaataaagcaatgttattccctaaaagtcttgagtttatcacacagtttcagtcaggttagctgaagttgtattagtaagggagtggggaaagagaaaacaaatgtaagattattctatttatctctaagtgstcatggaacgcatgccacaatagaaaatacactgggccacagtacaagatgcagtacatttcaaaggactaaaccatacagaatacatatctaataatagtaggcttcaactaaaaatttataacaaaaatataactaaacattccccaattatttacaaatcaagaaacacaattctaaattattcatatattaaagaagtgccaatgaaaaatttttaatgaattttaactgaaaggcagtaaaaacaaaaaaatactagatggcagctaaagaattgctcagagagaaatatatagctttaaatgcaattattataaaataaaaaagattaaaggaaatgaactaagctttcatctccagaagctagaaatagtagagca

SEQ ID NO: 43550 - DNA, 1149 bp, Homo sapiens
cagtccaatctctgtttctatcatcccwtggctatttcttcctgcatgtccctgtcttctcctcttcttataaggataccagtgcttttagattagggcccacactaacttcatcttgaccacatctgcaaagaccctattccaaatagggtcacaggcacccgacattagaatttgtggagagctgaagatcacctccaccaccccattatagcttttagtgggctcttcagctggttctagaagtcaaattgacaccaggcacataaacaagagaaaaatacacaaattgtgttagttttacatatacatggagatcttaagagagtgaagtctgtagaagtggccaaagcaagatgcttttgtgcattttggatgaagaatgataaattcgagaagaaatgacaggacaaagaaaatctggctgggcgtagtaaatttcctaggggagtcactggaagatatatggggaatgtaaaacaggtggccgatgataagcgttacttgttaagtatgtttattcaagtcgatcgcagcctccatttccaagtctctcatgataagggcattttctcacctggtatggagaggttacccctcccagaggaatctttatcataggctacatgcaggaaaagacaggtcagctctccctttctgaaactacaatttctccaagtgttttcaactctaaataatcaattaacgagatggcatatttgaggatgggacagccttcacaacttcaaatttcaacatattttcctgagggatataactcaaatggctggaaatttttctcactcagaaaaggtttgggtgtttttccactctctaccataagtaaccaatatcagctaccgcttttggagaatttaccacatgccaagccctaggtcatgttcctgatatatattcttttatttaatcttcatagaaatactttgaagtaaacattattatatgcctagtttacaactgtcaaaataaaggcccagctctgcctccttccagcacccatattctgaacaacttaccatacctaacacatacatcacttatagagtacctgccatgtgcctggtgctacgctaggccctgggaacaaatgtcatcctgccctcagggaacatgagtctagtggaagga

SEQ ID NO: 43551 - DNA, 546 bp, Homo sapiens
tgccaaagcagtgcttaggaacataaatggaagcagctctagcccactcactaggtttgaaacatccaggcttgcatgtcttctgccttycccccatcgcccaacacacaagaaggaatagtatcttgctttctctccctctgaaatgtaccttgaatctatgttttcacctctactccatttgcactggtagagcatcttcttccttcacgtgaactatggcagcagccttattactgcctcatagtgctagtgggctcatcaaagggaaaattggaacaatccttgcctgcttgatgtcctttgccattgccttcagtaaaattagctgtttcttagcatggcacaggaggccatgctttaaaaccttcagtggctccccactgcctccagagtaacgtaattaacaaagctttcaggacccatgtcattctggtctgacctacccctccagcttccctgcctgatgcacagctgtcctatcagcctcacctcccaggtggcacagcacccaaatctcctctgccttgaggtgctctgtggctg

SEQ ID NO: 43552 - DNA, 546 bp, Homo sapiens
tgccaaagcagtgcttaggaacataaatggaagcagctctagcccactcactaggtttgaaacatccaggcttgcatgtcttctgccttccccccatcgcccaacacacaagaaggaatagtatcttgctttctctccctctgaaatgtaccttgaatctatgttttcacctctactccatttgcactggtagagcatyttcttccttcacgtgaactatggcagcagccttattactgcctcatagtgctagtgggctcatcaaagggaaaattggaacaatccttgcctgcttgatgtcctttgccattgccttcagtaaaattagctgtttcttagcatggcacaggaggccatgctttaaaaccttcagtggctccccactgcctccagagtaacgtaattaacaaagctttcaggacccatgtcattctggtctgacctacccctccagcttccctgcctgatgcacagctgtcctatcagcctcacctcccaggtggcacagcacccaaatctcctctgccttgaggtgctctgtggctg

SEQ ID NO: 43553 - DNA, 546 bp, Homo sapiens
tgccaaagcagtgcttaggaacataaatggaagcagctctagcccactcactaggtttgaaacatccaggcttgcatgtcttctgccttccccccatcgcccaacacacaagaaggaatagtatcttgctttctctccctctgaaatgtaccttgaatctatgttttcacctctactccatttgcactggtagagcatcttcttccttcacgtgaactatggcagcagccttatyactgcctcatagtgctagtgggctcatcaaagggaaaattggaacaatccttgcctgcttgatgtcctttgccattgccttcagtaaaattagctgtttcttagcatggcacaggaggccatgctttaaaaccttcagtggctccccactgcctccagagtaacgtaattaacaaagctttcaggacccatgtcattctggtctgacctacccctccagcttccctgcctgatgcacagctgtcctatcagcctcacctcccaggtggcacagcacccaaatctcctctgccttgaggtgctctgtggctg

SEQ ID NO: 43554 - DNA, 602 bp, Homo sapiens
tgaaaaatgggtaaatgtctttgtttaagccacccagtctatggtatttagttatggcagtctggggagaacaatgcaattaccctatttgattgccacaattaatcacctttctaagatggttagagtaagtacgactctttcattgttacagatgagaaaattgaagctcagaggtttacttgctccggacgcatgccwgcaagtgtcttcgcatgtggctcctagccttgatattctcccatcactgtctgagtttacagcctgtgtgtacaatgtattctatacaggagctattctaatgggactttaaccacaagtatgcacccggtctcagaactctccttatgtatgcaaatatcatgatgccgatttcagatggagcttaccagggccctcaattcatagatgggttgtaacaaaaaattacacaggactttgtactttttttttttcttttgcacagggaagttttctgtgtaatgaataatgatatagggctttgtgcttttattttcctttttttttttattttttgagacacagcctcactctgttgcgaaggctggagtgcagtggtgcgatctcagctcactgcaacc

SEQ ID NO: 43555 - DNA, 585 bp, Homo sapiens
acatatgtatattctatatataatctatatattatatacatatatataatcttattctgtttccacacaaatagcattctacacactgttctgtgctttgagctttgattttttttaacttttcgagttatacttttaccaacaatgtataagccatagttgcctgtctcctcacaccttattaaattttgctagtctaatagatgaaagattgaatttcagttcaatctaggtttgaatttttacttaatttattccctaagtttgaatttttacttaatttattcaaastaacacttcgtatttttggttagttgaatatccatttatttttttttctactgtgacttgtctatttaaattacctcccattttcccattatgttgcttcttgattaagagatgctattcttctctcagttcagagatcaaaatgtgtttctctcattttttcacttgattggtaagtttatttacttatttgttttggtgatttttgtcatgcagtgatttttaaaatgtatttaaatgtattagtctttttagttttaattccctaaaaaggcctttggaaccacaatatta

SEQ ID NO: 43556 - DNA, 633 bp, Homo sapiens
tctcatgcagtggggggtgtgactgctcagactggccaaggcactgattccctggaaagcagggcaccaagtcagctcaggctccaaggggcagggcgcaatggcagctgggaggggaggggcacagcagcrtggccctgcaggtggggtgtatgctgtgatgtggacatcatttgttcccaccagccatttgaaatttcatccatttgaaatttgattccaaatgtggtggtgtgggaggtggggcctagtgggaggtatttgggtcacagggcagatcctttatgaatagattaatgccttttcatgggactggattagttaccaggagtggattgttatcagagtgagttcagcttcctagactctcgtgtttcctctcttgccatgtgagccccttgcatacacctgtttccccttccactttccctatgagatgaagcagcacaagaccctcgccagttgtgctgcccaatctcggacttttcagacacaagcagggtgagccaaataaaccttttttataaaataagttaccccgagtctcaagtattctgttacagccacactaaatggcctaagacagtgtaacagcggctcgggggtggtgggccactaggtgggtgtgatata

SEQ ID NO: 43557 - DNA, 633 bp, Homo sapiens
tctcatgcagtggggggtgtgactgctcagactggccaaggcactgattccctggaaagcagggcaccaagtcagctcaggctccaaggggcagggcgcaatggcagctgggaggggaggggcacagcagcatggcccygcaggtggggtgtatgctgtgatgtggacatcatttgttcccaccagccatttgaaatttcatccatttgaaatttgattccaaatgtggtggtgtgggaggtggggcctagtgggaggtatttgggtcacagggcagatcctttatgaatagattaatgccttttcatgggactggattagttaccaggagtggattgttatcagagtgagttcagcttcctagactctcgtgtttcctctcttgccatgtgagccccttgcatacacctgtttccccttccactttccctatgagatgaagcagcacaagaccctcgccagttgtgctgcccaatctcggacttttcagacacaagcagggtgagccaaataaaccttttttataaaataagttaccccgagtctcaagtattctgttacagccacactaaatggcctaagacagtgtaacagcggctcgggggtggtgggccactaggtgggtgtgatata

SEQ ID NO: 43558 - DNA, 593 bp, Homo sapiens
acctcacctagatctgcactccatctagcagtgagaaattccaccataatctacacaccataatatcatcaatgtgtctagaagtcagatcctctatgtgtgaaccaagacaatgcctggcraacaagacagctgggctctcaggtctctgcaccatggggaggtgtgtaaggccattcttgaattactataaagaaatctctgagactggatgatttacaaagaaatttacaaagaaatgttgaattgactcacagttctgtgggctgtacaggaagcttggtgctggcatctgctccttttctgggatgcctcaaggagtttttactcacggcagaagatgaagtaggagcaggcatctcacatggcagaacaggagcaggatagagagtgggtaggaaaggtgtcacaaatttgaacaaccaaatcccatgaaaactcactatcataaggtgaaaaccaacccaagaaggatactctctcatgacccaagtacctcccacaaggtcccacttccaaccttgtgaattacatttcaacatgagatttagtttagcatccaaactataccattattcccctggtctctaaag

SEQ ID NO: 43559 - DNA, 593 bp, Homo sapiens
acctcacctagatctgcactccatctagcagtgagaaattccaccataatctacacaccataatatcatcaatgtgtctagaagtcagatcctctatgtgtgaaccaagacaatgcctggcaaacaagacagctgggctctcaggtctctgcaccatggggaggtgtgtaaggccattcttgaattactataaagaaatctctgagactggatgatttacaaagaaatttacaaagaaatgttgaattgactcacagttctgtgggctgtacaggaagcttggtgctggcatctgctccttttctgggatgcctcaaggagtttttactcacggcagaagatgaagtaggagcaggcatctcacatggcagaacaggagcaggatagagagtgggtaggaaaggtgtcacaaatttgaacaaccaaatcccatgaaaactcactatcataaggtraaaaccaacccaagaaggatactctctcatgacccaagtacctcccacaaggtcccacttccaaccttgtgaattacatttcaacatgagatttagtttagcatccaaactataccattattcccctggtctctaaag

SEQ ID NO: 43560 - DNA, 818 bp, Homo sapiens
caaaagttggttacaaaaggatatgtcttatgtaatatactctttatttgaatacactgtaaaatatgtaagtatatacatcagcatctctagagaaccactttggataatggcattttaggtaaccttaatattaaaaaggttgaccatctatattttgttattttctatattgttatttttcttttatgagaaggaaatgaaaggaaagcaataggagagaaagaagagcaaggaaaggaaaggaaaaagaaaagaatactgtgagatttatggagggagtgaaattttctctctctccctcwtacacacacacacacacacacacacaccagttagagacagatgttttgtggcattggtttcataactttattatcctttgttaaatcaccattctcaattagtgaatgacagttattgggtgcattatgaaaaaatacccgggtgttctatgccaaattttaaccagaattctacatgctaatttgtttagaaaaaaatgaatacatgtgaatgaattttgagttagggaatataaatgataactggatggcattttacagaatccttgggtgtcccagttatttagaacagtgagtcctacactgaaaacaataggaaaacactcttataagccataccttcattttgccaattaaattttattattaaataattttttcctatgttttctaaaagagataagactgaatgaaacaatcatcctaaagagaaaagctagaattgtgtagtggcatcaggcttactagtaactctaaatactactatgtcgtggcgattaacctgtttataga

SEQ ID NO: 43561 - DNA, 818 bp, Homo sapiens
caaaagttggttacaaaaggatatgtcttatgtaatatactctttatttgaatacactgtaaaatatgtaagtatatacatcagcatctctagagaaccactttggataatggcattttaggtaaccttaatattaaaaaggttgaccatctatattttgttattttctatattgttatttttcttttatgagaaggaaatgaaaggaaagcaataggagagaaagaagagcaaggaaaggaaaggaaaaagaaaagaatactgtgagatttatggagggagtgaaattttctctctctccctctyacacacacacacacacacacacacaccagttagagacagatgttttgtggcattggtttcataactttattatcctttgttaaatcaccattctcaattagtgaatgacagttattgggtgcattatgaaaaaatacccgggtgttctatgccaaattttaaccagaattctacatgctaatttgtttagaaaaaaatgaatacatgtgaatgaattttgagttagggaatataaatgataactggatggcattttacagaatccttgggtgtcccagttatttagaacagtgagtcctacactgaaaacaataggaaaacactcttataagccataccttcattttgccaattaaattttattattaaataattttttcctatgttttctaaaagagataagactgaatgaaacaatcatcctaaagagaaaagctagaattgtgtagtggcatcaggcttactagtaactctaaatactactatgtcgtggcgattaacctgtttataga

SEQ ID NO: 43562 - DNA, 1090 bp, Homo sapiens
ttggatggaagtgacagagccatccccctcctcagcagcatccttagaagggctccctttcatcccctacaggaagtaccattcccagcaggccttccatgcaggagccatgcttaatatactggttcttcaggaacacccagagaaggaacctgcccccatcaaaagctcagagagtccttgtctagacacaatgacagtaacttagctgaaataagccacagagagggaaacaggacataggagaaagggcacagatactggagtcagacagttctggatattcatcctggctctgccatgtaccggttacatgatttgtagttagttaactcccctatgcctcagttcctttgtatgtacaatgggaataataacaggacctagtccatagaggtgttgttgagaaacagaccatgagagaaccatgtaaaacatgagaaatgaagtaaatgattctttattattatactttaagttatgggatacatgtgtagaccatacagttttgttatatgggtatacatgtgctatggtggtttactgcacccatcaacccatcatctacattaggtatttttcctaatgctatccctcccccaggcccccaccccctgacaggccccagtgtgtgatgttcccytccctgtgtccatgtgttctcattgttcaactcccacttatgagtgagaacatacagagcttggttttctgttcttgtgttagtttgctgagaatgatggtttccagcttcatccatgttcctacaaaggacatgaacttatcctttttaaaggctgcatagtattccatggtgtctatgtgccacattttcttgatccagtctatcattgatgggcatttgggttggttccaagtctttgctattgtgaatagagccacaataaacatacatgtgcatgtgtctttatagtagaatgatttataatcctttgggtatatactcagtaatgggattgctgagtcaaatggtagttctggttctagattcttgaggaattgccacactgtcttccacaatggttgagtaagtgattcttaaacaacagatgttagaccacagcctgtg

SEQ ID NO: 43563 - DNA, 632 bp, Homo sapiens
aacacgctcagcccttccagggacgacggggagcttgggcacatggcgcccctcacagccacccacgctggccccaacaacaatggcaacctccagagctcgcccgacaggcacagccagcaccgcttccaaagagccgctgaccacgagcctggcgccaacactcacgagcgagctgtccacctctcaggccgagaccagcacgcccaggacagagacgacaatgagccccttgactaacaccaccaccagccagggcacgacccgctgtcaaccgaagtgtgagtggacagagtggtttgacgtggacttcccaacctcaggggttgcargcggggacatggaaacttttgaaaacatcagggctgctgggggcaagatgtgctgggcaccaaagagcatagagtgccgggcggagaactaccccgaggtaagcatcgaccaggtcgggcaggtgctgacctgcagcctggagacggggctgacctgcaagaacgaagaccagacaggcaggttcaacatgtgcttcaactacaacgtgcgtgtgctttgctgtgacgactacagccactgccccagtaccctagccaccagctccacggccacgccctcctcaactccggggacgacct

SEQ ID NO: 43564 - DNA, 581 bp, Homo sapiens
gggtgatttgctgtaatcccactggatcaacgctgcaaggagggaaacagtgaggctagcaaaacactctggcagattatggagactcctgccaaaaggcacccttaggcccatgggaagcccagggtcataataaggcagcagcagcagaagtgatttgctctgaggctccaagaggtaccgaggagagctggactttgagattctttcccctctacttgcctctccgtctctttgttgggcttagccactgtctatattttgttccttctgagtcagcagctaaattgatcctatagacacataagattggaattcctggctcaacagttcccttcctaattccgtttctcccagcctgccaggcctgtgctcagtgctcacagttcccagacagaaggggcaagataatgaatctmgattacacctggatttgagacaaattgcaggtaaatactcattaaaataagtttaatcagtttatatttttcacattttgccaagaccaaaccatcaggcactgtttgttttctgaaaacaactgatgtagtatactttgacccttagcagatgactaaaga

SEQ ID NO: 43565 - DNA, 2371 bp, Homo sapiens
agaatttccaatcttgtcagaagtggggttggaaacgtgcctcaaagctgcatttgcataattttgaaaaacaaaatgtttcttatggaagaatagtgatttggcagacttaaaaccctactcccacttaagctacttcttggcacctttctccccataaaaaactggcaagccaatctgtccgtcccttcgttcctttcttcgttcgttcgttccttccttccttccttccttccttccttccttgcttccttccgtgttagttgagcacatactaggccctgcagaggatgcgaagatacaacacaaaatgaaactctgatcttgctgcaaggagcttacagtccactcaaacttaaaggcacctaccaaacagttataatacaagaaagttcctattgaatgttagagaattataaggcataggagtgcagagggatggagaaaacacttccaaacatggaaggcctcatagaagcggcatttgagcttgtccatgcttgaaatgtgagaagttggacaggtagagacaggttgggcaggaaccaaggcttccagcaaggacatagcatgacaacacgacaaagccacacagtggggaaacatgatgcctccagagcatggtaaacagtgcaagtcaactgacgtcaggagttgaaaggckttgcctttcctgtggtccaagagccccctgccatatctgcactccagctagtcggaaagggaaaagggaagggcacagtcctttagagcaggacttggaggtaacacatgtcctgtcagctacatcccatggattggaatttagtcacatggtcacacctgactgcaagagaacccaggaaatgtagactttatttttgggaggccatgtggccagctaaaaattggaggttcgattacaaaggaagaaggggagaatgggtattggggacaaccagtagtctctgttgcaacaaccataatcaatggcatgaggatcctggagaaactctgcccctgcctgagaccaaaaccatgacttcctaatcacaaagttggccagatgcagtggctcgtgcctgtgagcccagaattatgggacgctgaggcgggagaattgcttaaggccaagagtttgaggccagactgggcaacaaagtgagaccctgtttctacaaaaaataaaataattagccaggtgtggtgacctgtccctatagtcccagctactcaggaggctggggtgggaggatcacttgagcccaggagtttgaggctgcagtgaactatgattctgccattgcactccagcctgggtgacagacagagaccatgtctctaaaaacaaacaaacaatcacaaagccaagtccagtttgttgtctgggaaagggctcagctctggcccaccagcagctgcccctgtggcagtgggagcatgagtgcctcagtcttgcagcagggggcctgggcaatgcaccatggcacctactgtgtctcctgcctagaatgaccctctgcccccctttcagagagaaaacctcctctccagacaccatcccattttaccccactccatctctcttttccatgatgtctagtttgcccataaaatctgcccacatattctagcatttgatgttgtacggtcttaactgtttcagatacagtgtctcatttcatcaactagattggttgagcaatctgagatcttgtgggtcctatggctcccacaaactgctcataaaacaagaactccttgataaactcctggtgtttgctggctattggccagtgtgatactgaatgtgtctttgctatctgtattttatagtttccctggctcttggataattttctgtagttatggatatgagatataacgctagaatgttacagtgtcaaggtcagtaagtccagctccctcattttgcagataattgtatttagaccctgggagagaaagtgactagttggaggcagacctcacttaagccaatagtttccaaactgtgttccagggatccttagggttctgcagatggggaggaaaagcaggggacagacacgtctgaagccccggctgcactagtacagccccgctgttgtccatcttatacatgggggatcttgctaaaattatatgtaaagaaaatctttcagtaatttcttttaaagtttgagaatcactgtttgagcccagttccctcaagatgcagacaaggagtttgaggatcagattttggctgaattacggtgatgaaatagaacattcattcgctcattcattctaggtcctggggatctggcagtgagcaaagcagtggatgtccacactcatgaagctgatattctcttggtgaaattaaaccatagaaaattaagcatat

SEQ ID NO: 43566 - DNA, 569 bp, Homo sapiens
gtcttcccagcccactgccgttggctgcgacctcttccaagactggccctggctggcagtgtgacaggcccatatgaaggctgcccttggtactgagctcttcctggaggcccacaagctcatactccagcctctgaaccacagtgaggctcggcaggacccccagctggcccagaagcaggtgcagttgctgcaggagtggctccactgagtgggtacagcccactgcactgcaccctgctgtctgcaataaacayactgcatgctcttcgcttgtctccaggcttactctgtcactggaagtgggatcagtcccatttctgagcctagacctattaaatcacaaagcatagagtgagtggcactcagtcctctacgtggggctctagttaccttcctgggccaccaggtgcacagtctggccactgcagccccaacccaggccaggaagtttctgggctcctctgcatggcatacactggaggattaattagtataggaagggtataaccaacattttcagggtatgggcccaatagcttacttagctgtccttactgtggggtgtg

SEQ ID NO: 43567 - DNA, 593 bp, Homo sapiens
gtctggccctgggtctcttccacttttatgtatttcttggcattcttctgccttttctttttcctgcatctgacttgctctatcccatggggcttctcacccagctgaaggggctactcctagaggctagaggctggagggccctgtggcagggcagtgggggaggccagcaccctcaccctgagctccagcgtttgctggtctggctggcatacagagatgcagctggagcacaattcagtggaggaggcagggctataactaagcagtagggcagagagcagagccagagccccctgggcaggccagagggaggaccctgctcagctgastcttcccaactgctgcccttggtacaaccagcttgagtcacctgctacagaacaggggctggacacagaagcagtctgtggagggagaatgggcaggggtgtgtatgtccattcagtagaagggcaaagaggcccacatgtaggcctatgatcagactggagcctggcttgactgaggtcctctgatccaaacaccaggcacctaatgcggcctctagcactggcctagagtgctaaagtgagtcagacctgggaaccccc

SEQ ID NO: 43568 - DNA, 593 bp, Homo sapiens
gtctggccctgggtctcttccacttttatgtatttcttggcattcttctgccttttctttttcctgcatctgacttgctctatcccatggggcttctcacccagctgaaggggctactcctagaggctagaggctggagggccctgtggcagggcagtgggggaggccagcaccctcaccctgagctccagcgtttgctggtctggctggcatacagagatgcagctggagcacaattcagtggaggaggcagggctataactaagcagtagggcagagagcagagccagagccccctgggcaggccagagggaggaccctgctcagctgactcttcccaactgctgcccttggtacaaccagcttgagtcacctgctacagaacaggggctggacacagaagcagtctgtggagggagaatgggcaggggtgtgtatgtccattcagtagaagggyaaagaggcccacatgtaggcctatgatcagactggagcctggcttgactgaggtcctctgatccaaacaccaggcacctaatgcggcctctagcactggcctagagtgctaaagtgagtcagacctgggaaccccc

SEQ ID NO: 43569 - DNA, 890 bp, Homo sapiens
gcagaatggaaaggagtgagacgctgcagcaggagaaggagcccaccatcaaactccaaagagctggagaccatttgtgcggtggagtccgagaaaggtcggcaaggaaggggaaacatcatttgggttccttgccatagttgtcctcagctggcatggtttgctccagcagcaggctgggatgccagctgtgcccagggctggatgagccaccctcaagtaaatgctggccacttcgttgtgacgccaaaaattcagaaatgacttggtatgacaaagaagaaggaggactcaacgtgcataggagattggaaggttagattggatttctcaggtccttcctgcccacactgcatcctgtgagggcccaggagatttctctttcctttggtgagaagaatcaatggataaccaggaactctctggaatgggggasgggctgggaccttggtatctttagggtgggagaaattccaagaggccaactcctggggaggcaggtcatggccagaagaaaagagagtgtgggcaccaggtcaggcagcagggagtgcacatgatcacggctcagggaaattccacaggcacacggtcccaaaatagagccggcggagagtccactgactttgcacaaccaccaacttggtgggcagacacctgtcacaggtcatcatgctggatggcccctgcttgtcacccaattctcaggcctgactcataggacagacccagagcccttgaaggaaagggaggtcaggagtctgcgaaaggccctgtcattccccttaagtgcagcctgtaagcgttcctcctacctgttctccctggacctggagcgtcctctcagatcacaggggacggcttaaaggaaactcatccccaggacttct

SEQ ID NO: 43570 - DNA, 2015 bp, Homo sapiens
caacaagccgcagaagcggaactcataacatgtggcattggcattccctaccattactgattcaatgccattccacggtggccctgggtcatggaccagctcatgttgggctaatgtcccaacacacacaaagatggtaggtttgactaagcmagaggcagtccttaggtgaggttgcagggagagggaagagggcttggtgaagaatagaagacccatgaagaaggggtgtggtcttggtgaccacgtgatcccatagtattcccatagacactcaagacagctggtaaattgagctgctccccagaggaggccaacagacaggctggacaatgactggggtctgagcagagaccccgtctcccttctgctgcacctgctgcagcttaacattgactagactaccaggctcagcctcagcaaggcccccacctggctctgggcctggtgaccagggaaggtgggaagagagggggctcatcacttcctacagaaggaagctcagacttccaatttcgtgtggcataagagcatgggctctgggcaacactgcctggattagtattcagctcgggccctactcgtggtataactgggagtcactaattttatctctgggcttcactataaatgggatcctaatggcagtctacccaagcagggtattgtgaggcctagagatgatgaggcaaacagttggttctcaatacaagaaagaaatttatcatttgcatgtagctgcatagctgataagcccatgacagttttcccataacctgttttcatggccttattttccgcaactctgtctatttcagctacgtggaaccactcctgtgtactgtgacagtctaatgttgggatctggttaaatatattatggcccatccaggcgcggtggctcacgcctgtaaccccagcactttgagaggccaagacaggcgaatcaccctgaggtcaggagttcgagaccagcttggccaagatggtgaaaccccgtctctactaaaaatacaaaaattagctgagtgtggtggtgcatgcctgtaatcccagctactcgggaggctgaggcaggagaattgctttgaaaccgggaggtggaggttgcattgagccaagattgcaccactgcactccaacttgggcgacagacagagagagactcggtctcaaaaaaaaaaaaaaaaaaagttatggcccatccacaggatgcaatatcatatagccatttaaaagaatgggctacatctgaaccagatggaagaaaagatgcccggatatgttattaatgggatgaggcaacgtgtagaacctgtgtaaaataggattttttttctgagatggagtcttgctctgtcacccaggctggagtgcattggtgccatctctcctcactgcaacctctgcctcctgggttcaagcgattctcctgcctcagcctcccaagtagctgggattataggagcccgccaccacatctggctagtttttgtatttttagtagagacgaggtttcaccatgttggccaggctggtcttgaactcctgatctcaggtgatccacccacctcggcctcccaaagtgctgggattacaggtgtgagccaccacgcctggccaagtaggatgcttttatgccatatttaaaagaatccacagggagctgttaatgctgatacttttggggaaagggctcagtggagcagctaagcttttgcttttctttttgttcctttctgtggaattggcattgcctaccaacactgattcagtgtcattccacggtggccctggggcatggtgttttttttcatggatcagctctgcctgacaccaccatgcagcaggctgtactgtgagcctcattttgcaggtgagagaagcaaggcacagagaggttacgtaacttgcttaaagacatgtgacaagtaagaggtggagctgggattcaaactcaggcagtggaggtctggagtccctatttttagctactacatgacactgtctcccaa

SEQ ID NO: 43571 - DNA, 1963 bp, Homo sapiens
ctggtcttccctaagcctgtttttaaaaaatgtgcacgcacgcccacccacccaaggatttctttaattctgtgagctttctctctggatcattcaaatatatgcctcyactcttgaggtagcgggaagattttttaagatttttcatttgtttttgtttttgcatttgcttttgtcttggttttgctttgctatgttctacttgcatccaaagggtcctacctaatagaaaaattggcaccaaagggttggttgcagaccacaaagcctcaggataattggtacaggtagaatcatgttttgtgttgagaggtggacagagcaatagtgaacccttctcacccccctcattctggggagcacctgctctcagcttgtggaaaggggacaaggaatgctgggacatgaagcaggaccactcactttggacaaaggcctttgacatttctcctgaaggcgtccaataaattgtggctgttgatatttttggctgactctcctatgaaaaacaaattcagaaaccgtttctataggtttctggttacatgatgaatttcatcctcactagatcttctaagcgcacatgagggccctgatggggacagagtggtgtgctagtacctctcctgctgtaacaaagccctacagacacagtgacttgaaccaacacaaagttgttctcttccagtagagttctaaaatcaaggcatgggtagagctgcattccttggggaggctctgggagaagcaattcccttaccttttccagcttttagaggcacctgctgtcctcagctcctggcttctcccttcgtcttcaagccagccttgtagcatcctctgatctctctcagtttctctccccttctatcatctcatctccttttctccctctcaccctactgtctccgccttataaggacccttgtggataccttgggcccacccagataatcgcagataacctctcatctccagatccttgactggatcacacctgtgaggtcccttttatgatggaaggtgacataatcacaagtcctatgattaggacacccacatctgtcaggggctgttatttagcctaacacaagatgtattcagaaaattgcaatagggatacctgaggggaattgaaggatcccaactccaagccgcatctaaggatgcttccgaggtgcagctcccgctggaggactctgctccatctctcttcctgtctgccgctgcctgcctctctgtttctagacagccagtgttcaagtcagtatggccttgagagtgaactgcagaatggaaaggagtgagatgctgcagcaggagaaagagctcgctgtcaaagctccgaagagctgaagaccatttatttgcatggtggggtctgacggaggtcggcaaggaagaggaatcatcatttggtttccttgccatggtcatcctcagctggcacggtttgctccagcagcaggctgggattccagctgtgcccagtgttagccatgccaccctcaactaaatgctgatcacttctttgtgacataaaaagccagaaattagttggcatgatgaagaagaaggaggactcaaagtgtgtaggaggctgaaatgctagatttgatttctcaagcacttcctgcccacgctgtttcctgccagggcccaaaagatttcccgctcctttaacgagaagagtcaatggataaccaggaactctctataataggggaggggctgggactctggtctctttagggtgggagaaattccaagaggccgactgtaggggaggcaggtaactgccagaagaaaagagagtgcgggcgccaggtcacgcaccaggagggcgcatgatcatggctcaagggacatttgataggaacaaggttccaaaatagagctggaagacagtccactgactttacaaaacccccaatctggtgagtggatacctgtcacaggtcat

SEQ ID NO: 43572 - DNA, 576 bp, Homo sapiens
aaattggacaaaaccaaccattcaagaacactagatactgaccaaaggcggacaattattcttaaagaaaacaacaaaaaaaaagctagagctttcagtaagaatggcaaaggtctatggccttcttgcctgggactgctcccaatgcccaccccaatcaactggagagaacttacattttaccagtatagctctgacagcaaaaattagatgatttgctacttgctgccaaaagatacggactcaatctggaactggagggtgtaggcaagaaggaaaaggaacaatgaaaatccatggtttgacagttaaaggtgggaaattcaaaagagaacaaataggaaaacccacagctttacttgcctgaggttgtagccccagttaatacaatggcaagamatttaacagtgagatccaggaaataagggctcagataaactctcacatatccatggccgactgggaaataacatacatactaggaggggaagcagggtaggggacagggcaggaagaaagtccagtgaaaatcaaaagccaaggaaacttgagaactggtggcaactttaaattcag

SEQ ID NO: 43573 - DNA, 691 bp, Homo sapiens
cctccaaattgcaaagacagtggtgctgctatggtttgatcttgtttgaatttcggtgtatttgactcactttgtcttacttcctccttggaacacatctcctcttgactcctgtgacccttcactcttccagatttttcctgtctcgcaggaagctgtggctcaaactcttctgtcagctcctcactctttgattgacctataagttttggagggtcccagaaattagtaacacattctccctatttgatgccaccttttgtgaaaatagatttctcttctttcattggtggttttcttcccttggcttccaacacagcacatgctcttggtctctctgctgcatcagcgcctgctccttctcacctcctttgaggtttctcttcatctacacagcttctttttttttaacattttattttatagtataatgttaagtaactaagcaagatacaggatactagatgttatatacttttatatgcagcttcttaaagccagagagccagagaactcagaccttggtacttttctcaagagtatccactctctatgcagtcagttggatggtttaaaataacatctacatgccaatgagtccayatttacatcttcaggcaagaccctctcagaaagtccagattccagccccaatgcaggctcaatgtgtgcacatttgcaaattccgcca

SEQ ID NO: 43574 - DNA, 591 bp, Homo sapiens
gaaaaagatttataaccaattaagcaaatgctctatcctatgtcgttgttgtttttcaaatgtgccagagaacagaggcgttcatcaggactccaaccttagcagaattctgcatatgattttgatactgatatgaggcctcctcaacctgatcaaggccgggtaaacactggaactcatttgccagataaactaagtttacagaaggcaccataaacagaaatgcctcggagaaacaaaaagaaccttgggagatcaaagaagtagtcagagacaacaaaatgagatgtaatcagatcaaattgcacaaatatgggatggttgatgacaggtagagtacaggttgatgatcagtagagtacaggccaggcctggggcatttacattgggagtgctgtctactattcctccccaccatttgtttccaggtagcatcaagttaaaacacatayctaaggcagccttggggaaagttaaaacatatcaaagaggcaaagaggtccgcaaaagagggccagaaagatatggataacagtacaaggatttgaaccatgtggagattatatatatatatatatatatatatatata

SEQ ID NO: 43575 - DNA, 614 bp, Homo sapiens
tgcatatcgcttcctcatccatcagtgaagtcagtaagtcctaagtggaaccatcagagggcagggaccatctatctgtatttgacttgcttatttgttcaaggttctgagtcaataggacaagcaactactaagccactagagggcgcaacttgcctactctttctagagtaaggcagcaggtgtttcgggaccggtggggccacctggacctcagtggagggtggtgtgggtgcagcccttcccagggctgatgacgcatctggctgacgaggctgactgtcagcctctggcctctctcccagaggtgtgccctcagatcaaagaggacacctcctccccttaagaggatttatttcctcgaaggcacagcttctatgatctgtgtttttctttcttcctttcccattcacatttaattccttgtagccgccaagtttctgagaacaaagctgtttagaaagcaatgaagaacacaacatcactgatgtagtattcctggccaaaatattgatgtgactctcmtcatgagaacagaccaattcactttgagagaaatactacaaaataatggtctacagtcttcaaaaaagtcattgccaactaccttacat

SEQ ID NO: 43576 - DNA, 595 bp, Homo sapiens
aacattcatatgccttactttaattttatccttataacagctctgtaaggtgggcagtgaaggtctgttgccatcatcatgtttcttttttcttttttttttttttgagacagagtcttgctctgttgcccaggctggagtgcagtggcgctatctcggctcatgcaagctccacctcctgggttcatgccattttcctgcctcagcctcccaagtagctgggactacaggcacccaccaccacgcccggctaatttttttgtgtttttagtagagacagggtttcaccatattagccaggatggtctcgatctcctgacctcgtgatgtgcctgcctcggcctcycaaagtgctgggattacaggcttgagccaccgcgcccagccatcatgtttatttttcacttgaggaaactgagtctcagacctgtacagacccttcactgccctacaattagtgtaagagatggagctcaaggttgggaactgtggcgcttaacccaagactactttcccacgacaatgtctctgaccacagagagtcgatctctgtgctagttaggaattggtggaaagtttcccctaggagaaagga

SEQ ID NO: 43577 - DNA, 572 bp, Homo sapiens
taataaaacatctggggtcagattcaagaaaataatctgtggatgctgcagccaggagggggagtggaggacggaggaaaatcagctgtaccactgaatactccttgtaaatggtacagcctagagaaagaatagcaagaaatcattggaattcaatttccagaacatatactgctcccctacccaccacatcacctcaccaccaatatgattatctggattaaagagaaaagtgtggaaaggcacagactccatctaaggactagaatttagggaaaccaaaggcagtgggagagaaaaagtcaaggacagtaaagtgacttaaaacctcttagaccaacagcttcaggaacaaggtcacatcctctccctcactgaaattagatttacctctcatggggcatctgcagggtgcgcaggtgagaactggcaaagagaacatgaaggcactttccaaatctccattagtacctagctcrctttagctgtttggaaaaagcaaaaccacaacaaacataaccaggactaggatcagtgttggaagcacttttcactggcaagacactaagaag

SEQ ID NO: 43578 - DNA, 597 bp, Homo sapiens
tatcatgtttagcaaagcaagtttcatagcatcttgatggttaaagccctacccttcagaatattttggacctgagtttgaattctgagctcatacttgggacaaatctagctgccttacctgtaaggtgtagaaaatatgatattctcaaggttgttttgtttccatgaaaattaaataagagaagtacaacgcttggctcagagtaagtctgtgataaaaagagaaccgttttacagaactcttattgccttgctttaggacactaktatgtgaggtctggtgctggagcagctattctataaccatgaagtgaaaagcacacagataaaaatctaggtccttgatggcatcattgagccacagaaccagccctggaattgtcaattatcagcattctaaataaaacagctagtacatttctgtattgtattaattactaatagtcagaaccttgttgtttctagttggcatgctagatagtacagaatatatgcctaactacacagagctgatggtaaaggctcaggtataaactgttaaaattgaaagtaaagttggctctccacatccatgggttccatatctatagattca

SEQ ID NO: 43579 - DNA, 648 bp, Homo sapiens
tatttttgaaagaaaaaatcctctgcagtgctatattatggcttttggctgaagtcacatgcctaaaatgtgcaactgaaatatggctttatggaggagctccaagttttttcagaattatgtactatttgagaggggtcaaccgcagaactgcacatctctgcagtgtcttcaaacattctgaattgctgaggtctgcaaaaccaatttggaaacctccagaatgggaggtctttttggcttcctgtcttcaagctgctatccagcagaacaggaaccagaaacaatatgcactcgctcaaagccaccaggttggacacttgctagcattagaagaaggcaggcccaggagaactgtcaagtaggtaaaacccatcyttggtgccctgaagcctccataaaaccacaagatattggagataaagagtttcagcaatttttttttcagctagtgacactaaactgaggctcagaatatagaaggaaattatttaagaagggccagtgaatttgtttccaagattagtactacgttttaagttccttgactcattttgtgcttgaggaattagagaatttcagaatgatagagaaattgagattatggcctcactagacttcccctaatttcatattaataagtgtcca

SEQ ID NO: 43580 - DNA, 677 bp, Homo sapiens
cccacccacccccatggactgcctcaaaaaacaccaaagattcattcttttctatggaagaaactttagatcttttrgcatgtcattcacaaccctttgtgatctagcctcagacagccattgtacttcatttccctcagttactctgtgcaccctcaatcccatcaaaagcaaatatctttctcatctcgagagtgacctttaggtggacttcatagctcttgccattgctgatgattcaccttgtgctagaaagtctttgaccagcttctccttccccaaatcctgtacctcatgcaaggctcggctcttttgagactcatccaggaaaacttccctgcaccttcttgtcagaatcaagtagtctttctgctgagctctatttgcttgtacctctactatagaactcgctttattactctttatttatcattaaaagcagccccttgtcctggtgtagtcagctttcccctgactaagcagaaatatttagaagttaaaatgtgaattctggagtctgattgcttggggttgaaccccatctttgtcacttggccaacaggttactcaggcttaggtgagttatttggactctctgagtctcagttttctcatctgtaaaatggtgataataataatatttccctgcttgcattattgtgagagttacctgagtt

SEQ ID NO: 43581 - DNA, 575 bp, Homo sapiens
ggttttcagcctccacgaccatctgcccacatcaggctgttccagggacagacagatgtccagaatagttaagtaagggctcctgagaacactccagggagtccttcccaggaacccgaaaaacccacctgcagagcctgcagtttcttctcctgctgagccttgagccgctgaagttctgcaatgtcctttctgagcttcctgctccggcgattgagtcgttcctaaagagacagacacacctgcttgtcagactgggagtgaggggggcacccactgggaggagtcaatggaacacggtagggggcctgatcccagaatgcaactaatgtaaaattctgcctaaaaagaaatgcttttagagcatcatggttggagtaagggacttgagagtttatttattggataatgatggggggaaatagtaatgggtaatttttttacagtcttagaagtacagaaaaaataatagatagcaacagaaccatttctacttgacttcagggtgctttctctcaacatayaaaagttatatgacagtcttctagcacttcttactattttacagtaacaca

SEQ ID NO: 43582 - DNA, 575 bp, Homo sapiens
ggttttcagcctccacgaccatctgcccacatcaggctgttccagggacagacagatgtccagaatagttaagtaagggctcctgagaacactccagggagtccttcccaggaacccgaaaaacccacctgcagagcctgcagtttcttctcctgctgagccttgagccgctgaagttctgcaatgtcctttctgagcttcctgctccggcgattgagtcgttcctaaagagacagacacacctgcttgtcagactgggagtgaggggggcacccactgggaggagtcaatggaacacggtagggggcctgatcccagaatgcaactaatgtaaaattctgcctaaaaagaaatgcttttagagcatcatggttggagtaagggacttgagagtttatttattggataatgatggggggaaatagtaatgggtaatttttttacagtcttagaagtacagaaaaaataatagatagcaacagaaccatttctacttgacttcagggtgctttctctcaacatacaaaagttatatgacagtcttctagcacttcttactattttacaktaacaca

SEQ ID NO: 43583 - DNA, 1710 bp, Homo sapiens
aaaggtgccgtgatggttctgtcctggggattgagatggctggggaggggcctcctcctgttccgaagcatgttcctcccacccccaccaggccccataatctacctgccttttgggcagttaaaggccgagaagtgaacacagctgcaaccccactgccttgtagaccttccggcagacctgtggcaggtattgaaatgcacgcatacaattaggctcaaaaagtctacacagacaggagatgggcacacgaacagaggcaacataagagtgggggaaaagtctcaaaagactcacggatgccaccaagatgaagacagctggccacgggacacccatccccttagaaggcagayagagccactgaccccagcagacaagcccaggcagggctgagcctggagcctgcaatgagaagccttacttaagtcgacagaggtcagcgtgcccagtccagacctggccttctggccttcgaagctgtggggagccctggcccagagccccctctggagcccccagacttaccccaggccctccactgagatcaagttttgggagcagacagacaaacatcatccctcacagacaggcattccgttggctattctcttgcaaacagaatcaagcactagaccagcagcatgagcctcaggatactcaggccaggcccagaaaaacagaccctgaaggggagcttagggcagccttcctgcacccctccacaaatcactcgccacctcctctgcgtctttctgccagccagccccactaaacaaagcacatccctcaatcttccgggctcggggagggatgcacgatgaagctggacgcctgagtcccccagaggaaggaggaactagatacctaggtccctgtagggggcccttggtgcccgtctgaggctcagtctttgaggggattgcagaggggggttgctggagctccttttagcgtctctgaaggggattctgtgtgaggggattgggactggggggttggggagcaggaagcagtccccaggggagccatccaggcccattcaagggttgagcacttgtttagggttagagctgccccctctggggaccgggattgtccagccaaggccattgtcctgcccccttcccccagtccctcccaggcttctttgaacctgaagtcagatattttttctccacaccccccaccccctggttttccccacccagggcctagggctggaggcctgggccagggaggtgggggagggagaacggggcctaccgtggtattagatgtctgagttttggttgagaggggagcaaggaacctgatgtgcaggttccatagtggagggggcccaaagcgggtgtcttatcactctgtttcagcaaaggttgggaaactgaggcccaatcagtccaaagtctggtcccttgaaggggaagtaggggccaaccccttagtctgttagatgaggagagtctggagtctgattctggaagacggaggggtggggggatggggggtggggggatatagcacggaggccttgtctggcagtctactcttgaagatggggtgaaatttggcaggctgggcagatggtgccaggcacccaggctgcggggtggctggatttggccagtatcgggatgggaatgcctaggattctggatggatcgggggaaggcataagggagcagctggccattgtgcttatggctg

SEQ ID NO: 43584 - DNA, 1710 bp, Homo sapiens
aaaggtgccgtgatggttctgtcctggggattgagatggctggggaggggcctcctcctgttccgaagcatgttcctcccacccccaccaggccccataatctacctgccttttgggcagttaaaggccgagaagtgaacacagctgcaaccccactgccttgtagaccttccggcagacctgtggcaggtattgaaatgcacgcatacaattaggctcaaaaagtctacacagacaggagatgggcacacgaacagaggcaacataagagtgggggaaaagtctcaaaagactcacggatgccaccaagatgaagacagctggccacgggacacccatccccttagaaggcagacagagccactgaccccagcagacaagcccaggcagggctgagcctggagcctgcaatgagaagccttacttaagtcgacagaggtcagcgtgcccagtccagacctggccttctggccttcgaagctgtggggagccctggcccagagccccctctggagcccccagacttaccccaggccctccactgagatcaagttttgggagcagacagacaaacatcatccctcacagacaggcattccgttggctattctcttgcaaacagaatcaagcactagaccagcagcatgagcctcaggatactcaggccaggcccagaaaaacagaccctgaaggggagcttagggcagccttcctgcacccctccacaaatcactcgccacctcctctgcgtctttctgccagccagccccactaaacaaagcacatccctcaatcttccgggctcggggagggatgcacgatgaagctggacgcctgagtcccccagaggaaggaggaactagatacctaggtccctgtagggggcccttggtgcccgtctgaggctcagtctttgaggggattgcagaggggggttgctggagctccttttagcgtctctgaaggggattctgtgtgaggggattgggactggggggttggggagcaggaagcagtccccaggggagccatccaggcccattcaagggttgagcacttgtttagggttagagctgccccctctggggaccgggattgtccagccaaggccattgtcctgcccccttcccccagtccctcccaggcttctttgaacctgaagtcagatattttttctccacaccccccaccccctggttttccccacccagggcctagggctggaggcctgggccagggaggtgggggagggagaacggggcctaccgtggtattagatgtctgagttttggttgagaggggagcaaggaacctgatgtgcaggttccatagtggagggggcccaaagcgggtgtcttatcactctgtttcagcaaaggttgggaaactgaggcccartcagtccaaagtctggtcccttgaaggggaagtaggggccaaccccttagtctgttagatgaggagagtctggagtctgattctggaagacggaggggtggggggatggggggtggggggatatagcacggaggccttgtctggcagtctactcttgaagatggggtgaaatttggcaggctgggcagatggtgccaggcacccaggctgcggggtggctggatttggccagtatcgggatgggaatgcctaggattctggatggatcgggggaaggcataagggagcagctggccattgtgcttatggctg

SEQ ID NO: 43585 - DNA, 1710 bp, Homo sapiens
aaaggtgccgtgatggttctgtcctggggattgagatggctggggaggggcctcctcctgttccgaagcatgttcctcccacccccaccaggccccataatctacctgccttttgggcagttaaaggccgagaagtgaacacagctgcaaccccactgccttgtagaccttccggcagacctgtggcaggtattgaaatgcacgcatacaattaggctcaaaaagtctacacagacaggagatgggcacacgaacagaggcaacataagagtgggggaaaagtctcaaaagactcacggatgccaccaagatgaagacagctggccacgggacacccatccccttagaaggcagacagagccactgaccccagcagacaagcccaggcagggctgagcctggagcctgcaatgagaagccttacttaagtcgacagaggtcagcgtgcccagtccagacctggccttctggccttcgaagctgtggggagccctggcccagagccccctctggagcccccagacttaccccaggccctccactgagatcaagttttgggagcagacagacaaacatcatccctcacagacaggcattccgttggctattctcttgcaaacagaatcaagcactagaccagcagcatgagcctcaggatactcaggccaggcccagaaaaacagaccctgaaggggagcttagggcagccttcctgcacccctccacaaatcactcgccacctcctctgcgtctttctgccagccagccccactaaacaaagcacatccctcaatcttccgggctcggggagggatgcacgatgaagctggacgcctgagtcccccagaggaaggaggaactagatacctaggtccctgtagggggcccttggtgcccgtctgaggctcagtctttgaggggattgcagaggggggttgctggagctccttttagcgtctctgaaggggattctgtgtgaggggattgggactggggggttggggagcaggaagcagtccccaggggagccatccaggcccattcaagggttgagcacttgtttagggttagagctgccccctctggggaccgggattgtccagccaaggccattgtcctgcccccttcccccagtccctcccaggcttctttgaacctgaagtcagatattttttctccacaccccccaccccctggttttccccacccagggcctagggctggaggcctgggccagggaggtgggggagggagaacggggcctaccgtggtattagatgtctgagttttggttgagaggggagcaaggaacctgatgtgcaggttccatagtggagggggcccaaagcgggtgtcttatcactctgtttcagcaaaggttgggaaactgaggcccaatcagtccaaagtctggtcccttgaaggggaagtagggrccaaccccttagtctgttagatgaggagagtctggagtctgattctggaagacggaggggtggggggatggggggtggggggatatagcacggaggccttgtctggcagtctactcttgaagatggggtgaaatttggcaggctgggcagatggtgccaggcacccaggctgcggggtggctggatttggccagtatcgggatgggaatgcctaggattctggatggatcgggggaaggcataagggagcagctggccattgtgcttatggctg

SEQ ID NO: 43586 - DNA, 586 bp, Homo sapiens
agaaagcctctgaaatactttccagataggaaaacagtttgctttgtttctgtttttgtcatttaaaagatatactttcaaatctgtatccaaatttgttacrtaagtcaataattgtaaatttcactgcaatcatatgtttcctaaaagagttgccttgaacttatggaactgaaccccattttgctaatcacttactccttgcagtctatttcttatacaaatcaatatccttagagtatacatttttacacctactatttagttctgtcatgccgacagaatggctaatggctgtgtagaaaagacttgacataatagactgctatccatagacaggccttgtttcccatataaacctgctggtatctgataaggtggatttctcactatttcctaactgataagaatggtggctgtaagtaactgcttgtgcaaactgcggagtttctgtgcacctgctttccttttggagacttttggaagttttgtgcctgcgaagcagagtgagtcaatgtaaccagtcccagacaaaatcttagtaatggagtatgtagagagcatctcttgtagacaacagttcaca

SEQ ID NO: 43587 - DNA, 586 bp, Homo sapiens
agaaagcctctgaaatactttccagataggaaaacagtttgctttgtttctgtttttgtcatttaaaagatatactttcaaatctgtatccaaatttgttacataagtcaataattgtaaatttcactgcaatcatatgtttcctaaaagagttgccttgaacttatggaactgaaccccattttgctaatcacttactccttgcagtctatttcttatacaaatcaatatccttagagtatacatttttacacctactatttagttctgtcatgccgacagaatggctaatggctgtgtagaaaagacttgacataatagactgctatccatagacaggccttgtttcccatataaacctgctggtatctgataaggtggatttctcactatttcctaactgataagaatggtggctgtaagtaactgctkgtgcaaactgcggagtttctgtgcacctgctttccttttggagacttttggaagttttgtgcctgcgaagcagagtgagtcaatgtaaccagtcccagacaaaatcttagtaatggagtatgtagagagcatctcttgtagacaacagttcaca

SEQ ID NO: 43588 - DNA, 700 bp, Homo sapiens
tttggaaagtctgaaagagcctgagcctctgcgctctcctgactcagaacgatcttctaaactccagccagtaacagaagtgaaaactcaaatgcagcatggattaatctctatagcagcccgcactgttattacacatctggtaaatcacctgggccattatccaatgagcggtggtcctgctatgctaacaagtcaggtgtgtgaaaatcacgacaatcattacagtgaaagtactgaactttctcctgaactctttgagagtccaaatatccagttctttgtgttaataatacaaccttagtgtcctgtatccagatcagatcagaagagaatatgcctggaggaggtttatctgctggccttgcatcagccaattcaaatgtcagaatcatagtacgtgatctctctggaaaatattcatgggattctgctatactgtatggcccacctcctgtaagtggcttgtcagaacctacatctttcatgctttcattgtctcaccaagagaagccagaagagcctcygacatctaatgaatgcttagaagatataaccgtaaaagatggactttccagtttaaaagatttagagaaactgtaccaacttgggatacaataagagatgaagaagatgctcttgatgaactcttgcagtatttgggtgttactagtcctgaatgcttacagagaactggaat

SEQ ID NO: 43589 - DNA, 588 bp, Homo sapiens
aggtttctgaagtaacacaattgaatttcaacacaacctacattgaaacttttgataccagctcacctttttgaggaataaataagtagcttttaaacgtatctgtattatctgtttaattacactttcattattttaaatataggcttattcagctcttaactgtcactgtagtgaagttgatacaggaggtgatgttgkgctaaatgaatgctcaattcatgaagctaccccaccctctggaaatggcccacaaaaggcaaacatctaattttgaattttttttacaatatatatttcatatttttttctaatttgaatgactttttttgagaagcaaacatttttgcccaaatttaaaaatgttagccataaatcatggagcttaaataatggactgatagtcagcagttaatgtaaaggttgttgaaatttcagataccccaaattttcagtatatacctaaagtttctgattcagcaagtcctttcctgtatttcagtttcactaattttaaaaagccattctttaataaatactgtattaatatgatttggcagaatgctatgggagggtttcctctagaat

SEQ ID NO: 43590 - DNA, 448 bp, Homo sapiens
tggggagtcaggattctataagtagattggtggggaattgatttagaggttttatttgacacgactttggggtttgagggtcactctggtggcagtataggaaatagcttgaaggatgagtagcactaaagagttcaaacagaaaacaggacccgtgtatttggcaggaccacwgtcttggctcctgatcaaaatgagaggtgaagctggctgggcttctgggtcaggtgaggacttggagaacttttctgcctagccaaaggattgtaaatgcacaaatcagcgctctgtgtctagctaaaggtttgtaaacgcaccaatcagcactctgtaaaaacagaccaatcagcactctgtaaaacggaccaatcagcactctgtaaaatggaccaatcagctctctgtaaaatggaccaatctgcatgtgggtggggccaaataagggatt

SEQ ID NO: 43591 - DNA, 448 bp, Homo sapiens
tggggagtcaggattctataagtagattggtggggaattgatttagaggttttatttgacacgactttggggtttgagggtcactctggtggcagtataggaaatagcttgaaggatgagtagcactaaagagttcaaacagaaaacaggacccgtgtatttggcaggaccacagtcttggctcctgatcaaaatgagaggtgaagctggctgggcttctgggtcaggtgaggacttggagaacttttctgcctagcyaaaggattgtaaatgcacaaatcagcgctctgtgtctagctaaaggtttgtaaacgcaccaatcagcactctgtaaaaacagaccaatcagcactctgtaaaacggaccaatcagcactctgtaaaatggaccaatcagctctctgtaaaatggaccaatctgcatgtgggtggggccaaataagggatt

SEQ ID NO: 43592 - DNA, 608 bp, Homo sapiens
gcgccaagctggggggccaccaagcccgttttccgccgtggctgcctgggtgcagcggcaatgcctgtggcgtgggctgctggcctggcctgtggggcagctgcaagtttcccttttaatggaaatctctctcttgcagccatacattgtgtttgactcgagtgtgtttttcttggctttaagaaacaggattagttgcactctttgtaatttttggtattaaaggtatttttaacaaatgcagtctgtatcgtgggaacatcctgaagttcctggaatgtctgtagtctaaagtcaagcctgttcccacccctggccttcctctttaaaggcttgatgttgttcgatgggatgtctatttttgttcatttaggtttcaaattraagcgtgactagcactgggaaattggcattcccctgcagtcagctcttcttcctccagccccagatgtgggacggtagagcagaggggcaaaaggatcggacggcactgtgtgctctaggcagggacagctgaggggccaatgccctgcccctcccagccagaggaggatgcccccatctgttcactgcaccctccagtgggaaacgagcaaaacaagaggcaa

SEQ ID NO: 43593 - DNA, 608 bp, Homo sapiens
gcgccaagctggggggccaccaagcccgttttccgccgtggctgcctgggtgcagcggcaatgcctgtggcgtgggctgctggcctggcctgtggggcagctgcaagtttcccttttaatggaaatctctctcttgcagccatacattgtgtttgactcgagtgtgtttttcttggctttaagaaacaggattagttgcactctttgtaatttttggtattaaaggtatttttaacaaatgcagtctgtatcgtgggaacatcctgaagttcctggaatgtctgtagtctaaagtcaagcctgttcccacccctggccttcctctttaaaggcttgatgttgttcgatgggatgtctatttttgttcatttaggtttcaaattgaagcgtgactagcactgggaaattggcattcccctgcagtcagctcttcttcctccagccccagatgtgggacggtagagcagaggggcaaaaggatcggacggcactgkgtgctctaggcagggacagctgaggggccaatgccctgcccctcccagccagaggaggatgcccccatctgttcactgcaccctccagtgggaaacgagcaaaacaagaggcaa

SEQ ID NO: 43594 - DNA, 559 bp, Homo sapiens
tgaatgcttgctgggtgtgcacacacacgtacatgcactcatgcacacctgtgtccacatgcacacacacatgcacaaagtgcccacactgattcagcccactcccaggtctgttgaaatctctgcccattttatccctcccttcctggccctggccaccgctctccagacctgggcagcagctgggctctaaacctgataaagtcaggtcacagacagcccttcactcatatccttagaacattcagtggatctatcttttgagaataaagatcaaattcctcactgcagtgtgcaaggccctgcatgcccagcccgggtgaccttgccatgcctggcccagtccctccaccagagctgcactggcccctactgtgcccttctcaccttctcccatcacaggccctggcaggggttgtgcccatggctggagggctttttgctcagtgaaggcacagccacacctcagctcagcygccacatcctcagggaaatgccccccgccgcccccggcaactcctaccagataatcccggcactggaatgctctcttaccccc

SEQ ID NO: 43595 - DNA, 694 bp, Homo sapiens
aaccatgcttggctaatttttaaatatttgttgggatggggtctttgcccaggctgatctcaaactcctgggctcaagtgatctttccatctcagcctcccaaagccctaggaatacagatgtgagccaccacgcccagcttgtttattcagttctcttgactttcaacctagttagttctctcttcaytgagattaccaggtaaagactatttatgaattagcataacttccttatttgtgttagctttacttataaaggcgaagtaagatgctttagcttcccaaatctggcaatgccattcattacggagtaagtcaacactgcttaatgcagtaatgggtaatgcagccatttgaccacactgcccagtgcttaaacaaatgctttttacacctctggtgaagcagaattctacttctcggttaatcagccactaggaaaaccaaccctggaaacaccagaaacatctggaaaagcaacaaattcatatattccgaagtcatccagagcatcttcatggcctgaaatgtaaaacaaatactgcttacaaaccgaatgccttgatttgctgttgttttttaaacctttgtaaaacttatctttattgtctgttttaaatggtataggtacaaaatgaatttaacatttcctaattcctatagtcgtattgccattaagcagtgttggaaat

SEQ ID NO: 43596 - DNA, 575 bp, Homo sapiens
gctctgctttaatgggatgggggctggtaacactggggaatcatctgagtccccaggggctctgggactccctgaagagggtgatttaatccctgatatatggatggaattagcgtggagagatgaaagcgtgggagtaaatgagtctcttgtgcctcaacatttggatcccctcatctgtgatcaagctccataatcaggaaagggagtcgaattggtcttttttttttttatcagcagtcagaacgaactggtrtgctggtgatcctttatctccagaagataggtagaaagacttctgtgcattgtcaaagctctggactccaccaaagctctttgatctgggagaggagtgcactgttcttagaagagctagaagggaccagaaaccactgtttctttttttccctctagggtctccccagcctgaccctggggaggtcctagaggctaaaatgagaaacagtggtttctggcgtctcaaggagacattggagctgtactgcacatgaaacttcagggtgtcaggaatgtcagaaaaggccgtgtgggctaaaggactgagccttggtgct

SEQ ID NO: 43597 - DNA, 575 bp, Homo sapiens
gctctgctttaatgggatgggggctggtaacactggggaatcatctgagtccccaggggctctgggactccctgaagagggtgatttaatccctgatatatggatggaattagcgtggagagatgaaagcgtgggagtaaatgagtctcttgtgcctcaacatttggatcccctcatctgtgatcaagctccataatcaggaaagggagtcgaattggtcttttttttttttatcagcagtcagaacgaactggtgtgctggtgatcctttatctccagaagataggtagaaagacttctgtgcattgtcaaagctctggactccaccaaagctctttgatctgggagaggagtgcactgttcttasaagagctagaagggaccagaaaccactgtttctttttttccctctagggtctccccagcctgaccctggggaggtcctagaggctaaaatgagaaacagtggtttctggcgtctcaaggagacattggagctgtactgcacatgaaacttcagggtgtcaggaatgtcagaaaaggccgtgtgggctaaaggactgagccttggtgct

SEQ ID NO: 43598 - DNA, 846 bp, Homo sapiens
tttggaattggaaatccaagcttcctcttctgtgcctttaaggtcctggccgctgacccacagctcccttctcttccctcctccttttgtcactgacttttttttttttttggatatggaatcttgctctgttgcccaggctggagtacagtggcacaatctcagctcactgcaacctccaccttccgggttcaagcaattctcatggctcagcttcccgagtagctggtattataggtgtcaccatgtccggctaattattgtatttttagtagagacaggttttcaccatgtaggccaggctagtctcaaactcctggcctcaggccatccrcccacctcggcctcccaaagtgctgggattacaggtgtgagccaccatgcccggccctcttgtcctaactctgccatctctttgcagtctcccctgagcagcttttcctgggcccgcactgcccccctccagagctgcactctcaaaccacccccaatgccccctggccctggctcctgccccggggctctgatcctcagctagtgaggtctagagggtcagagggagccagactccctacagaagctaaggcgggagacctgtgctgtgatgtgggtaatctgcccccttccagctggggccaaatagaagggggaaaggctgcccccagaatacagggctctcagaggccctggggatctgtgctggcagtcaggaggactgtcacctcagtgcagttgcctgcaaggagggctgtgcaggaagctgcatgttgctcagagaacaaaaaaaggaaatgaaatgcaccatctcgttattagcatgagcttttgaggcagacacttaaatat

SEQ ID NO: 43599 - DNA, 846 bp, Homo sapiens
tttggaattggaaatccaagcttcctcttctgtgcctttaaggtcctggccgctgacccacagctcccttctcttccctcctccttttgtcactgacttttttttttttttggatatggaatcttgctctgttgcccaggctggagtacagtggcacaatctcagctcactgcaacctccaccttccgggttcaagcaattctcatggctcagcttcccgagtagctggtattataggtgtcaccatgtccggctaattattgtatttttagtagagacaggttttcaccatgtaggccaggctagtctcaaactcctggcctcaggccatccgcccacctcggcctcccaaagtgctgggattacaggtgtgagccaccatgcccggccctcttgtcctaactctgccatctctttgcagtctcccctgagcagcttttcctgggcccgcactgcccccctccagagctgcactctcaaaccacccccaatgccccctggccctggctcctgccccggggctctgatcctcagctrgtgaggtctagagggtcagagggagccagactccctacagaagctaaggcgggagacctgtgctgtgatgtgggtaatctgcccccttccagctggggccaaatagaagggggaaaggctgcccccagaatacagggctctcagaggccctggggatctgtgctggcagtcaggaggactgtcacctcagtgcagttgcctgcaaggagggctgtgcaggaagctgcatgttgctcagagaacaaaaaaaggaaatgaaatgcaccatctcgttattagcatgagcttttgaggcagacacttaaatat

SEQ ID NO: 43600 - DNA, 586 bp, Homo sapiens
ttagttcaggctactagaacaaaaatgtcatagactcgggggcttaaacaacagaaatttgtttctcacagttctggaggctgggaagtcccaggtcaaggtgcgggcagatacagggtctggcgaaggtcctcttcctggctggcaggcgaccgccttcttgctgtgacctcacacagcagagtggagtgagcacgcactcttgtctcctctatgagggcactaatcccgccacgagggctccacactcrtgacctcatcacctcccaaggcagcaactcctaataccagctcagggagttagagttttaacatatagtctggagagtgggtggggacaacacttgctgcaattcagccacccaggctgcgctgcgacatttacaccatgtgcccccagtgacggtcagtacctcaaagaggacccccagcctggaaatgggtggtctctggccccataggaggggtaaagaatgaagcggggaggcctgatttatagtgagtgagctccagtaacttaagagaagaaaacctgacctgcttatgccagaaaatgttatgactcggccctgcgcagtggctcacg

SEQ ID NO: 43601 - DNA, 572 bp, Homo sapiens
cacttttggggccaccagccccatgacaggtgccctttcctgcactccagcctctaggaccttttggcctttccccagtttgagagctgcaggccccagggtttctctgagttgtcataggcagttgtggctgcgtctcttcctctgtgaatacaggttcctttagcagccractctggggtcctttcccagcacagatgtccagagagaggcacacggtggctgtgggccttggggggttctgggctccctgcctggtctggcccagcgggtgcctgggatggccttggtgctcctgttctcacctgtactctctgcccccagggaaggctacaacaatccccccatctcaggtgagaatctgattggcctgagcagagcccggcgcccccacaatgccatctttgtcaactttgaggatgaggaggtgcccaagcagccactggaggctgcagcccagacgtggaggagagtctgcactaaccccgtggaccggaaggtggaggaggagctgaggaaggcaagtcctgcgctgcgcctggccccggtggctccagcctctctgttggctt

SEQ ID NO: 43602 - DNA, 551 bp, Homo sapiens
tatatatgacaataayagcataaaggagcaaggaggcaatgaagttattatatatactggagcaaggaaaggtcaccagacaatagcttgaatatacaggaagaaatcaagagtaaagtcagtgataaatatacagtgtaatataaaagacttgaaaagtgtttttctccttacttgtcttactgaattgaaaagaaataagattgtgtgaaacaataattataacaccatgttgttgagtttataacatatatagatgaacatatacgacaataatactacaaaccacaagcaaggagggaggaaatggagttatactggagtcaagttcctgtattttactaaaattagtattaatctgaagtagatcctgataaattaaaatgcatattgtaatccctggagcaaacactaacaaaataactttaaaatatacacttaaaaagaaaaagggaatttaaatgctacactagaaaatacttaatacaaaagaaggtagtaaaagatgaacagaagaacaaaaaggcataaaacatagaaaacaaattgtg

SEQ ID NO: 43603 - DNA, 551 bp, Homo sapiens
tatatatgacaataatagcataaaggagcaaggaggcaatgaagttattatatatactggagcaaggaaaggtcaccagacaatarcttgaatatacaggaagaaatcaagagtaaagtcagtgataaatatacagtgtaatataaaagacttgaaaagtgtttttctccttacttgtcttactgaattgaaaagaaataagattgtgtgaaacaataattataacaccatgttgttgagtttataacatatatagatgaacatatacgacaataatactacaaaccacaagcaaggagggaggaaatggagttatactggagtcaagttcctgtattttactaaaattagtattaatctgaagtagatcctgataaattaaaatgcatattgtaatccctggagcaaacactaacaaaataactttaaaatatacacttaaaaagaaaaagggaatttaaatgctacactagaaaatacttaatacaaaagaaggtagtaaaagatgaacagaagaacaaaaaggcataaaacatagaaaacaaattgtg

SEQ ID NO: 43604 - DNA, 600 bp, Homo sapiens
taaggacaccagctcaccagctcctggctgcaggcaccttctagcacaggcctgcttgttctcatcagtgttcaaccaacattggttggatgactaaatcaacatgcagaatgtgggtaacctgagaatgggcactcatttgccaggtttctcaaagacctaacctcttagtcttcaagacgtttgtcttgggtgcggtcatgggccagagccagtgccagaaccccaggagtatagagaccaactgcccgaccctggtcctccaaggctccctgacatgagaccaactaagacagcataacccgtggggcaggacagactcctggggtggcagctgtgttcatcatcttgactgggtcaagatgtatccagctgtacctttyatgtgcggtttattgtatacatccgttgaaacatattaagacaaaaaagggaaaacaaagaccacaaaggagggacagggaagaacccggaaggcgctggcagcacagggaggaggcaggtgtttgcagtcagacctgagtcccaggccccactcagcccttcctgcctaggaccagagcactgtcccagatctctccaaacctgttttcccgtggg

SEQ ID NO: 43605 - DNA, 533 bp, Homo sapiens
tcagggatgctggcacccactcgaacatcctcacaaccaggtgtcatccaggtagccccaccgttcctgaaactccatgcctagtgaatcagcagccaggctctgagtaccggctgggctcatggttggyggaggatctaaaggcctggccccatgcccccggatgcatggtggacatggtggacatggcggggtggtctggaggggctgtgcagcaggaggctctgccccctgggttatgtacaggaaagcgatgtcaggcggcaaggagtgtgaaattgacaaggggttttaattcacagggaagaggcttctgatgaagtttaagtaaaaaaacaaacaacaatgaaaaaaaaagatataaaattctagtcacaagaaaaaaattaatgggccagaaaagcagtcaggacagacacatagctgggtgaccagtgctcacttcaaaacttggagccgggagctggggggtggtttcatcttcttcatgcttttctgctgtccatcttctcaccagtgtacatgcattgccc

SEQ ID NO: 43606 - DNA, 533 bp, Homo sapiens
tcagggatgctggcacccactcgaacatcctcacaaccaggtgtcatccaggtagccccaccgttcctgaaactccatgcctagtgaatcagcagccaggctctgagtaccggctgggctcatggttggcggaggatctaaaggcctggccccatgcccccggatgcatggtggacatggtggacatggcggggtggtctggaggggctgtgcagcaggaggctctgccccctgggttatgtacaggaaagsgatgtcaggcggcaaggagtgtgaaattgacaaggggttttaattcacagggaagaggcttctgatgaagtttaagtaaaaaaacaaacaacaatgaaaaaaaaagatataaaattctagtcacaagaaaaaaattaatgggccagaaaagcagtcaggacagacacatagctgggtgaccagtgctcacttcaaaacttggagccgggagctggggggtggtttcatcttcttcatgcttttctgctgtccatcttctcaccagtgtacatgcattgccc

SEQ ID NO: 43607 - DNA, 543 bp, Homo sapiens
taattcttctttttactgctttaggtaaactaaaaaagggagtaagaaatacaacatcctcatgcctgcaaaataaagcagcatgcttttcaattttattaaaataaatttaggttaacatggaatcaacatccttactatgaacaagacctcttaaaaattaagaaaaggacaataccccaacaggaaaaaaaggatacaggaggaagcagaaaaaataattcacaaaagaaaaaacacaaattgtcaaacatgaagaaagattcaatttcataaaatatccaaaagaatgcaaacatttaagaacactcagcttttccttaccaaattggcaattaaaaaccaaaacaaaacacccaggttttacgaggctaagggccaagaagccctctaactgactcatctttctgaagggcagaaatattgaaaatgttctttggacccagtaattctatttctaagaatttatccttaaggctgggcgcagtggctyatgcctgtaatcccaccactctgggaggccaaggtaggattgcttgaggg

SEQ ID NO: 43608 - DNA, 608 bp, Homo sapiens
atttgtaggcaaggccagtctccagaatgccccacatctttcaaagacacacgttcacctaccttgtttgtgaataatgacctcttattttctttccagtggaaccaagtaggagctgccagacatcccggggaggcttttctgtgctgtctcactgcaaagaaacacagcctgattcctatttctggtgcagaaccaagcagaggatytgtgctgggatttttttttttaatactttaagttctagggtacatgtgcacaaagtgcaggtttgttaaatatgtatacatgtgccacgttggtgtgctgcacccattaattcgtcatttaccagcacaggggaacatcacacacctgtgctgggttttaaagaaggccttttagatactttaggaaagccatacttcttccacagttgggatttattagaaaaggtgctatatgtctccaggtactcgaccaatctttgactgatgtctttgggactcagatgggtggagacatcagaccagatgtggaggccaggctcccatctggttctcaggagtcatcttccccacctatgatctcattatatcacagttttattaaaagcccatcattagctc

SEQ ID NO: 43609 - DNA, 546 bp, Homo sapiens
tgctctgtcacccaggttggagtgcagtggtgtgatctcggctcattgcaacctctgcctcccgggttcaagcaattctcctgcctcagcttcctgagtagctggaattacaggcacctgccaccacacacagctaatttttgtatttttagtagagacggggtttcaccatgttggccaggatggtctcgaactcctgacctcgtgatctgcctgcctcagcctcccaargtactgggattacaggcgtgagccaccacacctggacacgttactgaatatttctgtgcctaggtttcttcatgtgaaatgggattgttgtgagaacacaaagggattcccagggcagttcctagtgcatagtctggctgcctttgtatgtgtgtgtgtgtgtgtgtgcacgcgcgtgtgtgtgtgtgtttaatatagagacagggtctcactctgttgcctaggctcgtttcaaactcctgggctccagtgattctcctgcctcgacccaaagtggtgggattacaggcatgagtcaacacacctggtcacttt

SEQ ID NO: 43610 - DNA, 628 bp, Homo sapiens
ccaggggccaccctggtggggccccacggacccctggcctccggccagctagcagccttccacatcgctgccccgctccctgtcactgccacacgctgggacttcggagacggctcccccgaggtggatgccgctgggccggctgcctcgcatcgctatgtgctgcctgggcgctatcacgtgatggccgtgctggccctgggggccggctcagccctgctggggacagacgtgcaggtggaagcggcacctgccgccctggagctcgtgtgcccgtcctcggtgcagagtgacgagagcctcgacctcagcatccagaaccgtgttggttcaggcctggaggcygcctacagcatcgtggccctgggcgaggagccggcccgaggtgagtgtctgctgcccactccccttcctccccagggccatccagatggggcagagcctggtacccccgtcttgggcccacactgaccgttgacaccctcgttcccaccggtctccagcggtgcacccgctctgcccctcggacacggagatcttctctggcaacgggcactgctaccgcctggtggtggagaaggcggcctggctgcaggcgcaggagcagtgtcgggcctgggccggggcc

SEQ ID NO: 43611 - DNA, 593 bp, Homo sapiens
tgagtgccggtgggtggggcagctctgtccttcccagccaggtgggacctgggccctgcagacactgggcagggctcaggaaggcctctctggggggggcctccgggccaagggaacagcatgggagcctgtgagtgcggcgggcggatggggggrtgtggggtggagccaggaggagcagaacccggggtccagtggctgcctcttctaggtgaggagtatgtcgcctgcctccctgacaacagctcaggcaccgtggcagcagtgtccttttcagctgcccacgaaggcctgcttcagccagaggcctgcagcgccttctgcttctccaccggccagggcctcgcagccctctccgagcagggctggtgcctgtgtgggtcagcccagccctccagtgcctccttcgcctgcctgtccctctgctccggccccccgccgcctcctgcccccacctgtaggggccccaccctcctccagcacgtcttccctgcctccccaggggccaccctggtggggccccacggacccctggcctccggccagctagcagccttccacatcgctgccccgctccctgtcactgccacacg

SEQ ID NO: 43612 - DNA, 587 bp, Homo sapiens
atgtctaataacaaggtctttcctacctgccccacagggctgttgtgaggaccaaatgagatcaagaatgcaaaagctctctgtcaactgtgaaacactaccaggagtaaagattcacaaggcatgagttgccacaaggcagtatagcatggtggttaggaggttaagctcttaaaccagattacttggattccagtataaccccaggatacttaactttgttttgtggtgttgttgttttgttggtgttgttgcttggtattttgtctaattttyagaaacagggtcttgctctgttgcccaggctggagtgcagtgggcatgatcatagttcactgcagccttgaactcctgggcttaagctatcctcctgcctcagcctgtggagtagctgggactacaggtgtgcaccaccgcacctggctaatttatttaatttttgtggagacagggtcttgctttcttgcctcagcttgtctcgaactcctgacctcaagcaatcctcccatcttggcctccaaaagagctgggattataggtgtgagtcactgcgcccagccaatttaaattctttaagtctcagtttt

SEQ ID NO: 43613 - DNA, 623 bp, Homo sapiens
ttactgtaacctagtcattctgaagatggggggttagtgtggggtaagggctactgataaggaagctcacacaaagaagggccaacaaagaaaaaaccagaaggtgcaatcagtgtagaaggggaagaaaccaaaaatacaattttgtcctttgctaatttcctcaggaacttacaagaaaaactgaatttagtgtttgaaaactgacaaatttcaagtgacctctttggyatagttgcattagatggcaagtgattcatttattgtattagttggatctaacataccaccatgcagtgtgatttagcaacacaggaggataatctaattgttattatttggacaggttattaacttcctaacccttttcccccgtcattggtgatcatagtaacaaattgtaatgagtcatgaactattttgggggaaatattgagcatcgttgatgctagaaaatttatggattgccaaatggttggtctcttgaaaatacccaagattcatgtaatactagaaagtaattattcaatttattcatccttacaactttaggaatatgggtattttcattcctcaccaaatcctgtattttgctttcttaattacatttttaaaaaatattc

SEQ ID NO: 43614 - DNA, 536 bp, Homo sapiens
atatctaactcaaattttgtatgcagaaaaccttcctccaagaatgagaacaaaataaataaattatttaatttgataaatagaaacttagtttgtcaccaacaaatttacacataaggaacacgtaaaagttaacttcaagaagaaggaaaatgatatgaaagggaaggtctaaaatccaagaagcratggtgatgaaagtggtttacagataaatctaaaacattacaaaaatgatgataataatagtgataatgtctaatttgaaggatttgaaaagggacagaagtaaaacatgggacacaaatgacatgcagatggcagggagctgataggagtctaagcattccagagactctcccataggggaataggttaagatacagtatcaactgtagacatcagtacactttttaaaaacatatattgctttatataaataaaatcttacataaacttcataagggaaaaagagaatgtaaatctgaaaactctagaagtatataaagtagaaagtggaaatctctccttatttc

SEQ ID NO: 43615 - DNA, 584 bp, Homo sapiens
tgcaatttctactagcttaccagtgtagtcatgtttgtatggtcacccccatgccactgtcttcttctttttgatcatctgctctggattgtttgagagagcttgaaccaggctaaactaaagtgactcacagcactccctggtgtttctattgtgagtcggcgtcagaacttgtagaaccgcaaaaacatactcagatttcagttctccatgttcactttagagatcacatgagacactatatgttactgagtaaaagaaactgaatccatgccatggatccatatggcatgtggacagttaagagctgaactaggttggcatttgcagcaggggagttggaaaagtggcctgatcatacctagccagcaggtctctcggtgcagtgacaagacaatcaaattggcaggctttgagaactttcctctttcagcataaggagggaggggggcagagaggcagtgagaggcatttaactgtgctgatgtgactttttaaatttgttgccactgatgccacggacgttaattctkgcagggttaattatgagaaattaaaaagctgctctgaacagactgtacctt

SEQ ID NO: 43616 - DNA, 1933 bp, Homo sapiens
tgacttcaaggatattatatatacaactttgactcttagctattctgatatttttttctaatataccttaagccttgtaagattagttacgttttttggacaattatagtgctactgctactggtaagtaggattgttccacataatgaatgacatccctagcgctagttatactattcttctgctttagaatcagcaagcctgaaagagaccttgagagttcatttaatccacagcctggcttagtcaatcaagatctgacagataaatctatcctaatatttaaggcagctataaaagcaaatttcacagtgtcccaagggaacttattttgttttaagtctttcactgcctagaaaatatatcttcctcatatctaatcaatgcaggacatagagaaagtaaggaagaaaagaaaatatgtttaataattgcattcagtattcaaggcaaacagaatattgatggctttacatgtacataatgagaaacccttgaaaaagctagtgtctaagacattattgtgcaattttagaaagtaaaaaatgaagaattgaagaatgtattcatcatactcagaattacacagccaataaacaataacagaaattctccagagaaaactgtagtatacaaagaaagggatatggcagagccctcaattatgttacattttcagaaactattgtgggttctcttttgcatctctccttttcagttaagaacttctcagcattatcccctcatattgtccacttttcttgagaaaacccacagcctgaaagaggcatccctacatattcatcaactcatttatacatatacttaacaaatcttaatcaatgctaattacatggctgtaattgtaacaggctttaactgatacactggtgaataaaaaaaatacatatttcctctcttcaagaagttaaagaccactagcagagtcaaacattcaagaaataatcacactaagatatagttactaattgtgtcaggcaacagaaagaacaaaaatatataggataatgtaaccaagtaatgtaacagaaagacattcttaagactgggaggtggagaagacctcctagaaagaattatagttaaaccaaatgaataaaagttaacctggtaagaaatgtagaaaaagggttaaggagaataaaagaaacagtctacatacagaaaattgaatgcatgaagaccctagtatagaaataatctagcataatagaaaaattaaaaagaggttaatattcaaagcagattgatcaaggcagaatggtacaaaacatagcagagaagcatgaagcaagggctatacaggtagaattttgtgctccattccaatggaaaaggaagtcattgatatatttaaatttgtcatgatatgatttataaagattattctaacatatggaagatgtttaatctctgctaaaaacagcaataaaatatgctttaaacatccacaaacctataaggacaaagatcagtagaaaaaaattatggcagcaaaatttgaaaactggaaatcacaaagatatgcagtagctgatgttgaacaataaaaagcttatttcaagtcaggagaggtaaaaactgagaagcgatttgatttgcatttcagaatgccctccaaactctaataycttgggagaagtatgagaatgggtccaatcccaggaatattggttgataaaattttcgttgcagttgcccaccccacgccaccccagatccctgctgcagttccccatttccactttgtacagccaggccactggcccacattatgccctaccctcagcagaaaaaggatgcttactctctggagaaaataaaatagagtctctgaactgagagtggacaggcagaggtaccatactgaaaacagactaaatgaaatgctatatactgaatatcaagacta

SEQ ID NO: 43617 - DNA, 843 bp, Homo sapiens
acatctttggcagatagaaaggtatggacaggcatatgggtatcacgcaaacgtatttgtggctacctaatgccctttagtatggtcaaagatacagcactctctgctgctggaatgtttttctaatcaagttcagtatttataattttttggaaggaaatttgccactgctttaagaaataaagaaagaaacaaagcttatgatgtactccaaagttgagtaaaaagggcttaggaattttacatggttcttgagtcaccgaatacatcttttggaatttatttattttatttttttgcttgcttccccagtaacttaaattctgattaatgcaggcttttctttggtactagtagctctgtagtggtgggaaaactgactaaaacctatataatacatggtaaataatggtttttatttttcaacttgtgcagtcatcttccttaagaatatagctacacaaagcttaaacaactacttatttatattggttcagtaaaataataaaaccttcaatttagagggcaaatgattaggtctcagtgtccatttcaatgattccttcactctttagctgacagtgcagaccatgatggtatcgactatgataggggatgctggctcctagaaagcacgggtttcttcaggagggtgatggaaaggcatgtgctgacagggtcagagttctgtgtgagagtcccgtggtcttcagaacagcctttctaagccacagtgtactcattcaatcaacacgtaggcctctactatgtgccaggctttacaaaacaggtataacagtagctgaaatggtagtagctagcttttgyttaccacttagtcat

SEQ ID NO: 43618 - DNA, 578 bp, Homo sapiens
gaaagccctgcctctacctctacttaaaaaaaaaaaaaaaaaaaaattagctggatgtggtctgcacaactgtaatcccagctacttcagaggtgggagaatcacctgagcctgggagatcaaggcttcagtgagccgagattgtgccactgcactccagcctaggcaaccagagtgagaccctgtctcaacaacaacaacaacaacaacaacaacaacaacaacaacgccacccaaaacccccacatacacacatacrtggcaacaacaaattatttgaattaaccattcgaattcaaattcttcattacatctaaatccgaactgttgatgtctcatctccactgcacttacctgcataataacccaaatctgctcctctcagtcttccctatttcataaagccaccattaaccacattactcaggcttaagactaggcataattcatgactcttctctgtcattccaagtacaagtcaccggcagctcctattagccctgccttcataatctgcttctgatcacttttcatcacctcattagccactgcagtggtccaagacaacatcatctttc

SEQ ID NO: 43619 - DNA, 623 bp, Homo sapiens
taaaagaggcttcagagagctgcctgatccctccatctcccctgccatataaggacagagcattcatccctttagcccttctgcatgtcagggcagagttcaccatttccatcacatgagaacccagcaccatcttggaaggcaccaactaggaggcagagattccccctccagacacraatctgctgacaccatgatcatggactcctcagcctccagaactgtgagaaatagatttctattgtttgtaaattgcccggtctcaggtattttgttatggcagtacaaaatggactaagatacatggtatgagtctcctcttttaactcttttatctatctaatcatggagaaagtcttagttggtgctgtgggatgaaaggaagctcagaaagaaaacctctttcctttctgtttcctttctgacctttgctaatatcttcctcaccccacattcccttttttaaaggtaacacaagccaaacttacacaatttgacaagcaatagatgataaaaagaagtgataccaggtatcatttaatttctttcctatggttactttgaatatatgaaagcaatactgtttttcctgttatggcagtgattaaaagctttactttgta

SEQ ID NO: 43620 - DNA, 568 bp, Homo sapiens
ttgtaggagtagttcattctcatacttcttttaaaaatgtttactttttaatattttctccttcctcatttattcctcacaacaaacctaagtaaatagtatttccattttatagacaagggtcagagtgattaagtaatattataaggactcaacctgggtgatacacctctcagtagagaggtagttgagaatctaatccaatgaacatgataatagatatctacttatctggagccatatttctcaaagtatggtccaagaataaccatcagaatcacctagcatgtgagacagaattaggatttctaagagatggctccaaggaagatacagttttaacttctcttaaggcagttcttcctgtaatagtaaaccaaatacctggrctatgttatttaatacctagaagaagtgtcatcactgatgagtctttttttttttttttttttttttttgagacggagtcttgctctgtcgcctaggccggagtgcagtggaatgatcttggctcactgcaagctccacccaccaggttcaagcaattctcctgcctcagcctcacgag

SEQ ID NO: 43621 - DNA, 578 bp, Homo sapiens
tctgagtgggaggctcctacctctggaatcaccttgacagcccaatccagtgacgcccaaacccccagaccatggtgccaggcgtgttgggagggaattctgtcagatgtggttggaatgctagtgctatttatagtgcgtcctgtttattataagttacattcttaccaagcccaaagcaatggatgctgttttttgttttttsttttttcttttttttctgagggaacagaacaaataaatattcctgagagtctaagtcttagggagaaatcaaggaaatgactggacttatatgggaaacccatgaagggacctttttaataagcttcaaaagaagccagaggctgttctcctcagggggaaggataactagagtaagcgacctgcacatagagtcctattaacctgtgagaaaatgaccctcttcagatctccttgagagggtcagaggacaaaagtgaagtaattcaatagcaataaatgtgggtttcaagtgccacacaagaagtcttcagttactttatacccccacagtccagttgccttcggattcaattgacctgagataatatatg

SEQ ID NO: 43622 - DNA, 565 bp, Homo sapiens
ttaataattgtccagtttcactcatgctgggtcagtctttataaaggttgcaaaatattagtccagaatacctaaatttcttcgtatctcaagttcccagcctacctgctctattagtagagctctgtttacagttcagtgtctccactcttttatttcctatwgggcatgtatacatcttctaggttcctctgtaggtgctgcaaagtagaccttatgtgaattcttgccgtcccttcttgaaaaccttgaggttgaggactgattagcgtctcaaagagcaaatgtgcattttaggcatttggtttcctttccagtgttttaactctggaaaagagaaaggagcttgggaaaacctctttgacacagtaaagcaagaaacaaaggctgtcctgacaaatatatcccaacaatgctggatgtgcacacctcctgggaaggaatggtgaaatagctacattatttccacttatgccccactccaatttataaattaagagacacaatcttcatcaaggacttctggattgctcttgagggctacctgaccatgacggcagaaatc

SEQ ID NO: 43623 - DNA, 565 bp, Homo sapiens
ttaataattgtccagtttcactcatgctgggtcagtctttataaaggttgcaaaatattagtccagaatacctaaatttcttcgtatctcaagttcccagcctacctgctctattagtagagctctgtttacagttcagtgtctccactcttttatttcctattgggcatgtatacatcttctaggttcctctgtaggtgctgcaaagtagaccttatgtgaattcttgccrtcccttcttgaaaaccttgaggttgaggactgattagcgtctcaaagagcaaatgtgcattttaggcatttggtttcctttccagtgttttaactctggaaaagagaaaggagcttgggaaaacctctttgacacagtaaagcaagaaacaaaggctgtcctgacaaatatatcccaacaatgctggatgtgcacacctcctgggaaggaatggtgaaatagctacattatttccacttatgccccactccaatttataaattaagagacacaatcttcatcaaggacttctggattgctcttgagggctacctgaccatgacggcagaaatc

SEQ ID NO: 43624 - DNA, 574 bp, Homo sapiens
tcaccttggacacactttgtcaggacctcctgaggttgtgtcacaggtgtgtattctcaatgttggcaaaataaactttctaaattaactgagatctgtctyaaattttaggggttcacaccactctctccttgcttgtaagatttccactgaaaagtctgctaccagatgtattggagcttcacagtgtgttattttatcttttgcttttgctgcttttagaatcctttctggattgttgatttttggaagtttgcttattaaatgccttttttaagttgtcaaattattggcataaagttgttcataaaatgtatttattatattttaagttctgtaagatttatgttctctcatttttcctaacagtggtaaattgtgctttattttttggtttatcagtgtagctaggactttataaattttttaagtgttttcaagatccaactgtttaaaaaactttttgaaaactaaacaatagacacaacttaagttgaatttcacaaatttttctaaacaataaacactgcttaagttttactttacacacttacatttgttgtaattttaagat

SEQ ID NO: 43625 - DNA, 574 bp, Homo sapiens
tcaccttggacacactttgtcaggacctcctgaggttgtgtcacaggtgtgtattctcaatgttggcaaaataaactttctaaattaactgagatctgtcttaaattttaggggttcacaccactctctccttgcttgtaagatttccactgaaaagtctgctaccagatgtattggagcttcacagtgtgttattttatcttttgcttttgctgcttttagaatcctttctggattgttgatttttggaagtttgcttattaaatgccttttttaagttgtcaaattattggcataaagttgttcataaaatktatttattatattttaagttctgtaagatttatgttctctcatttttcctaacagtggtaaattgtgctttattttttggtttatcagtgtagctaggactttataaattttttaagtgttttcaagatccaactgtttaaaaaactttttgaaaactaaacaatagacacaacttaagttgaatttcacaaatttttctaaacaataaacactgcttaagttttactttacacacttacatttgttgtaattttaagat

SEQ ID NO: 43626 - DNA, 605 bp, Homo sapiens
ggtgtaaccaaaatgtgaggcattgcgattttagaaactgtgtctttaaaattttccattgcattttagaaatatttggtgtagtttgtcatgttgcagtttcctytgtttctccagctttttttcactacccaaaagtctccactcctgctagaccatctactccactcttctttccatttcctatctcaaatccccctttctctaattacctctatcaagtttgactcacatatacttaaacaaagattggcttctggtaaagtatatagaaataaagctatgtacactagaattttgcttgaggggaactcacagtggggaaaggatttgtataattccattttttctttggggactttatctctgttctctgggcttcttatcaaaccaattcacagggctcttctgtataatatttgcatttccctgtttacaaatcactttgatatacatttgatccttgtgagaactgcttaagacagggagcagcattacccttcttgaacagattaggaaactgaggctcacccaaaaaagggacaccatggaccacgtgctaaactaggcagattttccacgttttaaaaaaaatttactcattc

SEQ ID NO: 43627 - DNA, 614 bp, Homo sapiens
tagtctagcccataggagtccttgctcttcccctctttgggcctcagtttcctcacctagaaagcagcagggaagggtcaagaaagtaggcaacttcataagatgacccagcttcaacaccccacattgttaggacttcctctaagacatatcactgaaggtcagctttcgctatcccagtgctttcaagggttacatggacaggataaaagttatgatccccaaacacatcttcctacactgtagagataagaaagagggctgacattatcctaggcaaactgatgcagaaacaaaatcaaataccgcacgttctcatttacagatgggagcattgggttcacatggacaggaaaatgggaaccataagtctggccacagtggctcacacctgtaattccagcactttgggaggccaaggtgagcagatgccttgaggtcaggagttcgagaccagcctggccaacatggtgacacccatctctacaaaaaamaattagccacgcatgatggcgcatgtctatagttccagctacctgggaggtaaggcaggagaatcacttgaacccggaagacagagactgcagtgagctgagattacaccactgcactcc

SEQ ID NO: 43628 - DNA, 620 bp, Homo sapiens
atactactgttactacttgagaccatcattacaagactgaacgaagggggactaacgcagaaatgaaaacttaacacaaaagaaattgttttaaaaaggggggccaggggaagaagaagagagctcccttcttctagtgagcaaaggcagccgcctgagcctctacagccccttgtatttattggatagaaagagcagggaggaggaggtaactattggtcagctgcttgatygatcacaggttcacatgattgctaacaggcttcagatttgcctaatcacaagaaacacttgtgcctgggttgtgactaccctcagcattccttctgggcaggagatgcagtttgtcagtttgccagcgccctgctttcatgagaacagttttctgtttattcatatagcctccagtggtatactgagttgatcacgaccctcactcttttggcctgcagcaagtgaagtagctaactgtagatgcttcagattaagattttaggtatattctgtttaaactctgtacaggcaaatcttctcttttgtatgactgtgactttagataaaattgtccctgaaaatatcgtttgttctgggaacagacatgaatgcacagaaggcatgca

SEQ ID NO: 43629 - DNA, 620 bp, Homo sapiens
atactactgttactacttgagaccatcattacaagactgaacgaagggggactaacgcagaaatgaaaacttaacacaaaagaaattgttttaaaaaggggggccaggggaagaagaagagagctcccttcttctagtgagcaaaggcagccgcctgagcctctacagccccttgtatttattggatagaaagagcagggaggaggaggtaactattggtcagctgcttgatcgatcacaggttcacatgattgctaacaggcttcagatttgcctaatcacaagaaacacttgtgcctgggttgtgactaccctcagcattccttctgggcaggagatgcagtttgtcagtttgccagcgccctgctttcatgagaacagttttctgtttattcatatagcctccagtggtatactgagttgatcacgaccctcactcttttggcctgcagcaagtgaagtagctaactgtagatgcttcagattaagattttaggtatattctgtttaaactctgtacaggcaaatcttctcttttgtatgactgtgactttagataaaattgtccctgaaaatatcgtttgttctgggaacagacatgaatgcrcagaaggcatgca

SEQ ID NO: 43630 - DNA, 576 bp, Homo sapiens
ggcctcgtttccttcatgtccaatgcaggggttccagtcacatgcrttgggcaccattacatgtccaagctgtgccaggatctagaaaaatggctggactcaggccaaggggccttcctgtctggcagtgaaaataagaggagataccaagggccctgagtctggaggggaagtcatgagcacagggcagtgccagggcccgggagctgccacagaggagcccaccttggtgacagacacctgtaggcacatccgtgatgcccagtgcccaacacagggaactggacaaacgtttcatgcacgactcttttttcccttcttggctaccttgaggaccttgattataatagttatcctttttttctttttctttttttgagactcttgctctgtcgtccaggttggaatgcagtggcaaaatcttggctcactgcaatcttcacctctcaggttcaagtgactctccttcctcagcctccctagtagctgggattaccggtgtgcaccactaggctcagctaatttttgtatttttactacagatggggtttcaccatgttggccaggctgatcttg

SEQ ID NO: 43631 - DNA, 1861 bp, Homo sapiens
ggggactagttgtactagttgtactagttggagtgaaagtattgggaggaactcataaaaggccaaattctgcctatatagaaatggcctgatcacccccaagaaagaggacctaaagcacrcctagaagggaaggtaaataaatatttcttgagccattaccaaagctcatctaaacaattacagtagcttttttttttttttgagatggagtcttgctctgttgcccaggcttgagtacagtggcatgatcttggctcactgcaacctccgcctcccaggttcaagcaattcttctgcctcagcctcccgagtagctgggactacaggctagcaccaccatgcccagctaattttttgtatttttagtagagacggagttttgccatgttggccgggctggtctcgaactcctggcctcaagtgatccgcccacctcggcttcccaaagtgccaagattaaaggcatgagccacggcaccagtcctacagtagctttcttacagggctctctggtataacaaccattacaaacttaatgagttaaaacaacccaaatttattatcttgcagttctggaggtcagaagtctaaaacgggtcttgctggaccaaaatcaagatggcggcagggttggattcctttctggaagttcgtagagagaatcccttttcttgccttttccaccttctagaagctatccacatgccttgactcagggcctccttccatcttcaacggcagcaaagtcaccatttacttatttattatcttctttattatctacctcctccccttaagatgcctttttcacactgcatctcttttgttctgactccttttcctctctcttccccatttagggacccttgtcattactttgggtccacctggatgatccagaaaaatctccttattttaaggtcagctgattagcaaccttaattccatctgctcccttaattcctctttaccatgtaacccaacatattcacaagttccaggtgtttgtatggggatatcttttggcgagcattattctgtctactacatcttgctttgacatccattcgcttaaaaaacacacacagcagccagggttatctcacaacctagacttaatcacatcattcctctgctgaaacccaacccacacacccagtgaccacccacggaattaaaactcaaactttctttttttttggaagagatgggagtcttgctatgtggcccaggctagtctcaaacttctggcctcaagcaatcctcccacctctgcctccgaaagtgctgggattgtaggtgtaagccaccatacccagcctttaaaatccaaactttttttgtgtgtccttaaaaaggtctttattactaaaagctggaaggtcagtctttaacccccaatcacaaaatgctactttgcctcgacaagcaggctttttagttgagttggtgtctcttttgtagttaagacaagcatttgcccttgttgaccagtgatcaggaatccgttcttgtaattttgccctttcatccttgataggtgaaatcagtaccttttccacaactttgtttattcttcattttttttgtcttcggagtaaaagaccaagggacattaacaagttgatggtcccctagatatgggctctagtgccagcgagtctgttctcttcttcagtgtcaaaaggactgctcattctggagcatctactcttctggactaaaatccaaacttttttttattttttaacttcaagttctgggatacatgtgcagaacgtggaggtttgttacgtaggtatatgtgtgccatggtggtttgctgcacctatcaacctattatctaggttttaagccc

SEQ ID NO: 43632 - DNA, 1861 bp, Homo sapiens
ggggactagttgtactagttgtactagttggagtgaaagtattgggaggaactcataaaaggccaaattctgcctatatagaaatggcctgatcacccccaagaaagaggacctaaagcacgcctagaagggaaggtaaataaatatttcttgagccattaccaaagctcatctaaacaattacagtagcttttttttttttttgagatggagtcttgctctgttgcccaggcttgagtacagtggcatgatcttggctcactgcaacctccgcctcccaggttcaagcaattcttctgcctcagcctcccgagtagctgggastacaggctagcaccaccatgcccagctaattttttgtatttttagtagagacggagttttgccatgttggccgggctggtctcgaactcctggcctcaagtgatccgcccacctcggcttcccaaagtgccaagattaaaggcatgagccacggcaccagtcctacagtagctttcttacagggctctctggtataacaaccattacaaacttaatgagttaaaacaacccaaatttattatcttgcagttctggaggtcagaagtctaaaacgggtcttgctggaccaaaatcaagatggcggcagggttggattcctttctggaagttcgtagagagaatcccttttcttgccttttccaccttctagaagctatccacatgccttgactcagggcctccttccatcttcaacggcagcaaagtcaccatttacttatttattatcttctttattatctacctcctccccttaagatgcctttttcacactgcatctcttttgttctgactccttttcctctctcttccccatttagggacccttgtcattactttgggtccacctggatgatccagaaaaatctccttattttaaggtcagctgattagcaaccttaattccatctgctcccttaattcctctttaccatgtaacccaacatattcacaagttccaggtgtttgtatggggatatcttttggcgagcattattctgtctactacatcttgctttgacatccattcgcttaaaaaacacacacagcagccagggttatctcacaacctagacttaatcacatcattcctctgctgaaacccaacccacacacccagtgaccacccacggaattaaaactcaaactttctttttttttggaagagatgggagtcttgctatgtggcccaggctagtctcaaacttctggcctcaagcaatcctcccacctctgcctccgaaagtgctgggattgtaggtgtaagccaccatacccagcctttaaaatccaaactttttttgtgtgtccttaaaaaggtctttattactaaaagctggaaggtcagtctttaacccccaatcacaaaatgctactttgcctcgacaagcaggctttttagttgagttggtgtctcttttgtagttaagacaagcatttgcccttgttgaccagtgatcaggaatccgttcttgtaattttgccctttcatccttgataggtgaaatcagtaccttttccacaactttgtttattcttcattttttttgtcttcggagtaaaagaccaagggacattaacaagttgatggtcccctagatatgggctctagtgccagcgagtctgttctcttcttcagtgtcaaaaggactgctcattctggagcatctactcttctggactaaaatccaaacttttttttattttttaacttcaagttctgggatacatgtgcagaacgtggaggtttgttacgtaggtatatgtgtgccatggtggtttgctgcacctatcaacctattatctaggttttaagccc

SEQ ID NO: 43633 - DNA, 1861 bp, Homo sapiens
ggggactagttgtactagttgtactagttggagtgaaagtattgggaggaactcataaaaggccaaattctgcctatatagaaatggcctgatcacccccaagaaagaggacctaaagcacgcctagaagggaaggtaaataaatatttcttgagccattaccaaagctcatctaaacaattacagtagcttttttttttttttgagatggagtcttgctctgttgcccaggcttgagtacagtggcatgatcttggctcactgcaacctccgcctcccaggttcaagcaattcttctgcctcagcctcccgagtagctgggactacaggctagcaccaccatgcccagctaattttttgtatttttagtagagacggagtttygccatgttggccgggctggtctcgaactcctggcctcaagtgatccgcccacctcggcttcccaaagtgccaagattaaaggcatgagccacggcaccagtcctacagtagctttcttacagggctctctggtataacaaccattacaaacttaatgagttaaaacaacccaaatttattatcttgcagttctggaggtcagaagtctaaaacgggtcttgctggaccaaaatcaagatggcggcagggttggattcctttctggaagttcgtagagagaatcccttttcttgccttttccaccttctagaagctatccacatgccttgactcagggcctccttccatcttcaacggcagcaaagtcaccatttacttatttattatcttctttattatctacctcctccccttaagatgcctttttcacactgcatctcttttgttctgactccttttcctctctcttccccatttagggacccttgtcattactttgggtccacctggatgatccagaaaaatctccttattttaaggtcagctgattagcaaccttaattccatctgctcccttaattcctctttaccatgtaacccaacatattcacaagttccaggtgtttgtatggggatatcttttggcgagcattattctgtctactacatcttgctttgacatccattcgcttaaaaaacacacacagcagccagggttatctcacaacctagacttaatcacatcattcctctgctgaaacccaacccacacacccagtgaccacccacggaattaaaactcaaactttctttttttttggaagagatgggagtcttgctatgtggcccaggctagtctcaaacttctggcctcaagcaatcctcccacctctgcctccgaaagtgctgggattgtaggtgtaagccaccatacccagcctttaaaatccaaactttttttgtgtgtccttaaaaaggtctttattactaaaagctggaaggtcagtctttaacccccaatcacaaaatgctactttgcctcgacaagcaggctttttagttgagttggtgtctcttttgtagttaagacaagcatttgcccttgttgaccagtgatcaggaatccgttcttgtaattttgccctttcatccttgataggtgaaatcagtaccttttccacaactttgtttattcttcattttttttgtcttcggagtaaaagaccaagggacattaacaagttgatggtcccctagatatgggctctagtgccagcgagtctgttctcttcttcagtgtcaaaaggactgctcattctggagcatctactcttctggactaaaatccaaacttttttttattttttaacttcaagttctgggatacatgtgcagaacgtggaggtttgttacgtaggtatatgtgtgccatggtggtttgctgcacctatcaacctattatctaggttttaagccc

SEQ ID NO: 43634 - DNA, 592 bp, Homo sapiens
agctggttacctcctttacacagacattctatcaacttttcttttttgtcctattaatcgtccattgtctcatttttcctaaaattgcctgtgcagcctccttccagaggcatattccatcaaggtttttcttgtagccatgctgaacactcagttattttaaataatttagatacataattttaaatatattatagttttgctccagaataaatgagatttaaatctctttctttgttccccaaataagagttcaaaagctagatggtcttttggaggctcaccaacacctaayggtacttatttctgtctcacaaaataaaactttggcatcagtcttctggacatgccacacaaagccacatttggtggataacccctgcatgacagatagtgaaagggcatgttcctccctgcccaagggagcccaggattatcctgcctaattgcctacaatgtgtggatctcattagaagaacttgccagtgctatacatagtaaagaatgtatgtctgataatatttcagttaggtttggaccaaggccaggagtctctctggcagactaaaaccactttaccaacacttcactt

SEQ ID NO: 43635 - DNA, 604 bp, Homo sapiens
gggtaagaaaatgcacttttgcttctttatagcctatcttatctgcacgttaaagacagagctaaaatgtggtgtgtgaaatatatgtagcaatgaagtttttattgattgatatgtatggctttgtgcagctgaatactgctggtaggagttactggcgtatgtaatacattatcttattacactcattttatggaagctgatcctgatgrgacagtggaaggagagcttactctggctttctggaaaagcaattaatcctactgcttatgtagtaaccatgtcttggatcgcactggtgtgctggcaccctttctccttttattaaaacaaaaatgcagctgctgaccagaagtgcggctctccaagtggggctttcatcatgttggtaagagattcatatccagggttgacatcatttcagttatggccttttcattattaaagtttggaatttcaagtttgtttattaaagatttaaagctataggttaaatcaccaaattgaaatccacttattttcctatactatgataagtggataaggtgtgctggaaaatatgtttttcagattttaccaccagatgaattatttaaattgtgaa

SEQ ID NO: 43636 - DNA, 537 bp, Homo sapiens
gacatgcccatcaggatgccctttgggcctagacctgatgtgagaatgatgggcttggagtgttctggaaatagctgggaggcctgtgtgtttaggagcgccttaaacagtaggatataagggcagagaagtagctgggaactgagaaaagaactttggctgttattctagtaagactgaaaatttcaggtgggatttgaacagagwtgtgttgtgatctgacttggttcattctgctgtggtgaagagactggaggtgcggggcaagtatggaagcatggagaccattaatttatgggggcaatggtagagggaagagaaacaatgctattaactggagtaggagcacacagagaacaagccatgttttaagatttctaatgaaatgtgcagatgagattgttgggtaagctgttaagaattggattttgaactaaggagacagtctaagcttgagagatttgcagatgattagtacacagaaaaggccctctttccttttcagtctctatactctagagcctttgtaagcaacca

SEQ ID NO: 43637 - DNA, 537 bp, Homo sapiens
gacatgcccatcaggatgccctttgggcctagacctgatgtgagaatgatgggcttggagtgttctggaaatagctgggaggcctgtgtgtttaggagcgccttaaacagtaggatataagggcagagaagtagctgggaactgagaaaagaactttggctgttattctagtaagactgaaaatttcaggtgggatttgaacagagttgtgtkgtgatctgacttggttcattctgctgtggtgaagagactggaggtgcggggcaagtatggaagcatggagaccattaatttatgggggcaatggtagagggaagagaaacaatgctattaactggagtaggagcacacagagaacaagccatgttttaagatttctaatgaaatgtgcagatgagattgttgggtaagctgttaagaattggattttgaactaaggagacagtctaagcttgagagatttgcagatgattagtacacagaaaaggccctctttccttttcagtctctatactctagagcctttgtaagcaacca

SEQ ID NO: 43638 - DNA, 537 bp, Homo sapiens
gacatgcccatcaggatgccctttgggcctagacctgatgtgagaatgatgggcttggagtgttctggaaatagctgggaggcctgtgtgtttaggagcgccttaaacagtaggatataagggcagagaagtagctgggaactgagaaaagaactttggctgttattctagtaagactgaaaatttcaggtgggatttgaacagagttgtgttgtgatctgacttggttcattctgctgtggtgaagagactggaggtgcggggcaagtatggaagcatggagaccattaatttatgggggcaatggtagagggaagagaaacaatgctattaactggartaggagcacacagagaacaagccatgttttaagatttctaatgaaatgtgcagatgagattgttgggtaagctgttaagaattggattttgaactaaggagacagtctaagcttgagagatttgcagatgattagtacacagaaaaggccctctttccttttcagtctctatactctagagcctttgtaagcaacca

SEQ ID NO: 43639 - DNA, 639 bp, Homo sapiens
agtaaatggcatatgttaataatcacactattaagagatgtcattttgaataatgtaaagagaaaaacttcgaagtcaaacagacggggattcaaccccagatccactgcttgcaagctgtaaggccccaggcaagttccttaccctctctgggtttaaattattatcctttggataataaatcctaccataagatttataagagggaggtttgggatagaggctggttgcctagggggacaacatgtacaacaaagccagtgaaaagtcctcccacaaaccccaaactatgagtgggtaaagaccaacctccaacactcacaaaccctgcagcgtgttggaggtggtgcagaggccatggggaggagggaaagaaggaaatatcagtgtgtctgacagacttcagaataggagacaccccaaagaagcaaaaagtattccactggaaggcacagcagaccaactggagaagagcagctacaattgctacaattgggagtgactkcagtaagggtgagtgcaagggatccagggtaagaagttctgcaggattcgagcaagggatgccctctttttctccttggttggcaggacatttagagtctcagggaatctaatatgctaagggttatatgaaat

SEQ ID NO: 43640 - DNA, 589 bp, Homo sapiens
ccacaagccacatgtggctattgaacatttgaaatgtggtttgtctaaattataaaatagactctagatttcaaagacttaatgcaaaaaaagacataaaatacctcaatagctttgtattgattatatgctgaaatgatattttggatgtaatggattaggtgtaatatattattaaaattaatttcacttttttcttttttagtaaaacagctctaacaactctaraaaaagctttaataaagaagtcataaaatctcaccactcaaaattcttgccctagattttgttccctttctcccattctttattttgaatgtatttttattcttttttcctgtttttttaattgataaaaatggcttacatatatggtgtacaacattatgttgtaatatacattgtaaaatggcaattgacataagaatcatctcacatacttaccattttttataatgacaacacttaaaatctagtctcttagcaattttatttttttttataggcgggatcttactatgctgctcaggctggagtgcggtggcaccctaactcagctcactgcagccttgacattctgggcacaagc

SEQ ID NO: 43641 - DNA, 616 bp, Homo sapiens
tataaattacccagtgtgtgttattctgttatagcattgtaaaacggactaagacagcagtctttcctcataatttgcctttggctactttccaaggagaagctcatgatccaggtcaggaatgctgtgtcattgcccctccaatgttagctatgttcatgttgactggaatactcaatacattttgtccaaaaattcctacttttgttttaagtattgtccagttccatatccacgaagcaygtacctactattctttgtgccatatgtttttacatggatgaaaattataatattcctggaagaaaccccagaattctttggattcctgagacaggtgaaggggctttctgaaggacacatagctagttgaagtcagaactaggcttacaactcacttccctttttctttcatcaattttgggtctcctaaagtagtgatttgcaaactcattggcatgcaatgagtttaaagaaagagaaaaaaaatattcctggagcccatctcctgagattcggacttagtaaatgagagttggtgctcaagattttaaattttgagcaaagaactctgatgctggtaattgaagaattcactcactgtcaaacactgtca

SEQ ID NO: 43642 - DNA, 539 bp, Homo sapiens
cagagtatctctcagcaacagctatacaaaaggacttttttctttacattcattttaactgagtatgactatttttcagttgacttaatcaggagaaaagacaatttagtataatggaaatccagatagttgataccttgggatcattctcttatttggtatgatagcagacacggcataaactcagcaaaaaatgcttacctamtagctaacttctggctactaacaatacaaataacatttaagtttgcataaatcttaggaggtaatcatttcgttgtacattgcacacatcggaactctgaggaatttcttttcagtttggaaaaattctcataagagcttcttataacaagcttttattaatgtcatgatacatgctcaactttcatcaatgttctatagatgtttgaaatgtaatataatctatgtgtaaatttaaaatatttaaaaaactttaaattcttaatatttttactgtgctcatttacttttgtctaattggtctatcaaagtccaaaaagacattaaaaatttca

SEQ ID NO: 43643 - DNA, 564 bp, Homo sapiens
gtaaaaatggtgcttagcgggaaatgtatagtattaaatgcatatgtcagaaaaagaagatccaagtccaatctcataccttctgaatctagagaaagaagagtaatttaagcctaaaatgaacacgaagaaagaaaaagtatttaagtgagggtaggaagtggtgagagagttgagagattgcccatgggtacgatgttcactctttggatgatgggcacactagaagcccaatcttcaccagcacgcaatatacccacgtaacaaacatgcacaggtaccccctgaatctaaaataaaataaaatttaaaatttagattaaaaaatcaacaaaatttraaacaaaagctcaatagagaaaaccagtgaaaccaaaagctggttctttgaaaagattcataaaattcatagacttctagccaggtgtatcaaggttaaaagaggcaactaaagaggggtaaccattacggatctcatcggcaaaaggaattaaatattctaccagatttaaggaatggcttgaccttttaagagaagaaagagctgatgctgctaacaaaatg

SEQ ID NO: 43644 - DNA, 564 bp, Homo sapiens
gtaaaaatggtgcttagcgggaaatgtatagtattaaatgcatatgtcagaaaaagaagatccaagtccaatctcataccttctgaatctagagaaagaagagtaatttaagcctaaaatgaacacgaagaaagaaaaagtatttaagtgagggtaggaagtggtgagagagttgagagattgcccatgggtacgatgttcactctttggatgatgggcacactagaagcccaatcttcaccagcacgcaatatacccacgtaacaaacatgcacaggtaccccctgaatctaaaataaaataaaatttaaaatttagattaaaaaatcaacaaaatttaaaacaaaagctcaatagagaaaaccagtgaaaccaaaagctggttctttgaaaagattcataaaattcatagacttctagccaggtgtatcaaggttaaaagaggcaactaaagaggggtaaycattacggatctcatcggcaaaaggaattaaatattctaccagatttaaggaatggcttgaccttttaagagaagaaagagctgatgctgctaacaaaatg

SEQ ID NO: 43645 - DNA, 1280 bp, Homo sapiens
attcggggtcctctgatgcagtgattctcaccctcagcataacaaaactgaggctcaaaggatctaatgggtgggctcaggctcctgcaattatagacgggctgaactgagactcgggctctgagcacagacgctggggctacgttccacgggttcaaatctggctctcctgcctgccggctttgtgatcctgagcctcagcattccaatctgcaaagtgggggtgataattgcacctacctcacagggtaggtgtcaggattgaatgggttagtgcacacagagggcttggagtggggctcagggtcagtgccaggaagtgtaaacagttataatggagcctgcgtcccctcactcccaggccagggctcattttactatgcctttgtcccgctctcactcctctctgcckcttctgctcagaaggtgtctgactcagcaaaagtgcccggttatgcctccctctcaagggaactgtcaggcaagcgggtgccctgcttgatccccccggcttggccccggagcctgacatccatctggctgctcccacagcaagaagctctgtacatgaaggggcgcgagctcaccccccagctatcgcagaccagcatcctgtcccttgctgattcccacacggagttcttcgatgcctgcgaggttctcctctccgccagctcttctgagaatgaggtgagggaggagagaagctggcagtgaggcggggtaggggggaccttgggaacagaagggtggggtccacagagaccatagattcctcagccccttctcaccacctcagctgctatctctgggactatgtccagatcagctgagtttgtgtggcccagctcagaaatctctgctagggactcttctcctagaggagtgtgacatttgtatccccattgggttctcctgaaactactgccatagttgcaaccccggtcatcttcctatgaccctgtctcagcttcagcactcccttgattccctcttccaaaaccctgaccctcagtaatccccaacttcccttccctctgtgtcccatcaagtccctgagctttttcccgccagccacagggcccggccctccccttcccaaggtggctgggcacactccgtgatgccaggcatcccggggcaatgtcttagggctcagagtgcccccaatacattctcttccccttcccaccaaagggctagttgggcagattcttgccaggccctgggcactgcccagctgcccgggggaggcccagtctgcccggcctgtcatctgt

SEQ ID NO: 43646 - DNA, 501 bp, Homo sapiens
aaatcatattccaaacacagatcgaacagggtgtgtcactaaaagcctgtgtgcacattcacagcagatgccaagcagccatctgtgtggggccagttggagctcacaaacaccaggcctgtaattgctagaaagggcctggmagtgctagtacctcttcatgccaggccatcttggtacttccagggggtcaagtataatgacaaaataaagccactcttacccccttatagtcacttttactctttactctgtcttctcaatgtttaaggggaggtcttggttagattttgcctgaggcaaaaaacaacagcatcttttactaagaattttacattgttccctaacaaccaccctaaaaaataatattactatcccattctaaccagtacagaaagaggtgagtaaaggttcaaagacaaagagctgtgggtggagggataagtactctttcaggatgtcagattcttagcccagctcatcccctgccacttggtcatg

SEQ ID NO: 43647 - DNA, 501 bp, Homo sapiens
aaatcatattccaaacacagatcgaacagggtgtgtcactaaaagcctgtgtgcacattcacagcagatgccaagcagccatctgtgtggggccagttggagctcacaaacaccaggcctgtaattgctagaaagggcctggcagtgctagtacctcttcatgccaggccatcttggtacttccagggggtcaagtataatgacaaaataaagccactcttacccccttatagtcacttttactctttactctgtcttctcaatgtttaaggggaggtcttggttagattttgcctgaggcaaaaaacaacagcatcttttactaagaattttacattgttccctaacaaccaccctaaaaaataatattactatcccattctaaccagtacagaaagaggtgagtaaaggttcaaagacaaagagctgtgggtggagggataagtactctttcaggatgtcagattctyagcccagctcatcccctgccacttggtcatg

SEQ ID NO: 43648 - DNA, 608 bp, Homo sapiens
ggatttcaataataactgagcaaaaagggcaaatgcagtcagctccagcaaaaaatcccacccagaagacaaaaggactctgtgatgagatgttgtgtttcttttttcattggatccagctggaaarcatcatcgtagagaaatgagaccctgcctcgtggttacctttaggcattgcacttgcatggaagcacttgtgttaaaccacacagaggagctctgataagggcaagaaaagacaaaggctaaaaaactttagtgactttaccttaagctatatctcaagtgattaataggtaaattttataaaagatcagtatttcctacatttttcacattttatgactttttgccattacttaaaacatgtttcgctataccacactacattacactggatgaatttcactacactacactacactacactacattacactatatgactggatgtcactaaaacaccacaaagcacagaagcttacattttgaataggaaatatccaactttgtagaaaacaaaacaagatctcagtatggagagagtccttttctctatatgcacaatggagtccatgccagaccacagaacatgagacactttcctt

SEQ ID NO: 43649 - DNA, 627 bp, Homo sapiens
ttccagttggctgtcacccacagcaacctgctcatggcaaatgcaggctggcaagtgctgctgacactcctgcccagggaatttagactagatacacacagtcagyagctctttattcagagcccagtagggcctgtcatgctagagggaactctgcaaaatgaggatcaagagaacttacttgggactcccatctcccagtcactttgaacagcagtctgtaaccgacagttccccttctgatcactgccaaaaagcaacgttactctctgtatacacaaagagcaagggataactgttggtttcctttattccatagctcatgtcctggttatgactgccatgtgccaaaaaaatatgcaagagtttgcatttcacaaacatttgactttcataagtcttcatttcccacagaaagccctgttctacagcattctgagaaacatctttcaccaaaccagggtctcacctttgtctctgcagtagaagagtaaactgaaaagaaaactttgtgtatttggatgttggctctaaactctatctggccctggtctcctgctatgtatgatttagttctgcttggaactgaatcatggtagaactaaattacagggttggtcaatagaa

SEQ ID NO: 43650 - DNA, 627 bp, Homo sapiens
ttccagttggctgtcacccacagcaacctgctcatggcaaatgcaggctggcaagtgctgctgacactcctgcccagggaatttagactagatacacacagtcagcagctctttattcagagcccagtagggcctgtcatgctagagggaactctgcaaaatgaggatcaagagaacttacttgggactcccatctcccagtcactttgaacagcagtctgtaamcgacagttccccttctgatcactgccaaaaagcaacgttactctctgtatacacaaagagcaagggataactgttggtttcctttattccatagctcatgtcctggttatgactgccatgtgccaaaaaaatatgcaagagtttgcatttcacaaacatttgactttcataagtcttcatttcccacagaaagccctgttctacagcattctgagaaacatctttcaccaaaccagggtctcacctttgtctctgcagtagaagagtaaactgaaaagaaaactttgtgtatttggatgttggctctaaactctatctggccctggtctcctgctatgtatgatttagttctgcttggaactgaatcatggtagaactaaattacagggttggtcaatagaa

SEQ ID NO: 43651 - DNA, 627 bp, Homo sapiens
ttccagttggctgtcacccacagcaacctgctcatggcaaatgcaggctggcaagtgctgctgacactcctgcccagggaatttagactagatacacacagtcagcagctctttattcagagcccagtagggcctgtcatgctagagggaactctgcaaaatgaggatcaagagaacttacttgggactcccatctcccagtcactttgaacagcagtctgtaaccgacagttccccttctgatcactgccaaaaagcaacgttactctctgtatacacaaagagcaagggataactgttggtttcctttattccatagctcatgtcstggttatgactgccatgtgccaaaaaaatatgcaagagtttgcatttcacaaacatttgactttcataagtcttcatttcccacagaaagccctgttctacagcattctgagaaacatctttcaccaaaccagggtctcacctttgtctctgcagtagaagagtaaactgaaaagaaaactttgtgtatttggatgttggctctaaactctatctggccctggtctcctgctatgtatgatttagttctgcttggaactgaatcatggtagaactaaattacagggttggtcaatagaa

SEQ ID NO: 43652 - DNA, 627 bp, Homo sapiens
ttccagttggctgtcacccacagcaacctgctcatggcaaatgcaggctggcaagtgctgctgacactcctgcccagggaatttagactagatacacacagtcagcagctctttattcagagcccagtagggcctgtcatgctagagggaactctgcaaaatgaggatcaagagaacttacttgggactcccatctcccagtcactttgaacagcagtctgtaaccgacagttccccttctgatcactgccaaaaagcaacgttactctctgtatacacaaagagcaagggataactgttggtttcctttattccatagctcatgtcctggttatgactgccatgtgccawaaaaatatgcaagagtttgcatttcacaaacatttgactttcataagtcttcatttcccacagaaagccctgttctacagcattctgagaaacatctttcaccaaaccagggtctcacctttgtctctgcagtagaagagtaaactgaaaagaaaactttgtgtatttggatgttggctctaaactctatctggccctggtctcctgctatgtatgatttagttctgcttggaactgaatcatggtagaactaaattacagggttggtcaatagaa

SEQ ID NO: 43653 - DNA, 608 bp, Homo sapiens
agacaataagagaaaagcctctctcaggggatgtattagtctgttctcatgctgctaataaagacatacccaagactgtgtaatttataaaaaaaaaaaaagaggtttaatggactcacagctccacatggctggggaggcctcacaatcatggtggaagagcaaaggacatcttttatggcagcagacaagagagaatgagagagccaagtgaaaagggaaaccccttataaaatcatcagatctcgtgagacttactcaccatcatgagaacagtatgggggaaactgcccccatgattcaattgtctttcactgggtccttcccacaacacatgggaattakgggagctacaattcaagatgacatttgggtggggacagagccaagccatatcaggggaggacaaagccaaaagtttcaaagagtaaaattaataatcccatttgcagaagtaaataacaaagaggagaaggagaaatggtaaagtgctgaattgaagcagaaatcacttttaaaaaaccaaagagccaaagtgagaagtctgtataaacagaatcccagtaattaggagagacaaacggagtggcaggcaggaaggcaatgcc

SEQ ID NO: 43654 - DNA, 581 bp, Homo sapiens
actctcttgaagtatatgtaaatataaatgtaaataaatataaatgaaataaatgtaaatgatgtttgaatcactatagaaactctaagattaatagtgtaatttctttgataaataatctattcatttcaaagaaaatataatgttctgaatttttcagtatttgggaacaatgagaaaagtagagcagtagatagttgtacagaattatcacaaaatctgttgtgtatgtacatgcgtatagattccccaagaaatgtattaaaattttctcaaccactaaagaattaaacrtaatattggctcatacatccctaaatccaagtacaaattctacacaaattaagtttgaaagttattttatagtatatatccatttgataaagaagttttacatttagtacactttgtttctataaacgaatatagtcctgaaattcaagtataaaatatacttgaatgagagtttaatttaagccaattcaattaaactaaaactagagaatttgaaaatctcagattggaaacatcttttgctgcttcctcatgcaacctcccttctttctcatctgatacatgca

SEQ ID NO: 43655 - DNA, 622 bp, Homo sapiens
ctgctcataataatcagattgccttatagtgcgtcccaaagtactctgtttttttgttgttgccataatactttgctataccaattagtgggcagggagtgggggagggaatgaaaaagtgtttattgagcatttacaatgtcctgttctaggtacttaatatgctttcacacatataattaatataataaccctgtgaagtagatgatgttataattttacagattaggaaactgatgtgcagtaaggttattatggaaattatctgaggatacgcagctattaagtgccttctccaggtatcaatacaggtctgaccctaaagccttttctctttctactttgctacggttaagtgggacttgattaggactttaacttttcttctatatcagaggttaattgtaattatcacatcccagttctaaacaacagcraaccatgttattgacagtatcttttacataattaaatcttgtatagatggtcaaaattatttcattttctaatcaacaaatatttggtgaacactcatgcaaagtactattttgagcaggatccagaaaagccacaaactgttattcaaggagactgcaattaagtcgaagagaagaccaatgca

SEQ ID NO: 43656 - DNA, 518 bp, Homo sapiens
aaattagggcttgaaataacataattttgtcctagtctcttgggtgattctttttgctttatttctattttgagatgataatagattcagaagaaatyacaaagcatagtacagacaggtccctgtcacatcttataggttcaatggtagcatcctgcataactagtacaatgccaaaaccaggaaagtggcattggtacaatccacagaccttattcagatttccagttttatttgtacgtgtgtgtgtgtgtgtgtgtgtgtgtgtatgttttatgcagttttatcacatgtaggtctgggtactcactaacacagtcaagacacagaaaacttccatctacagaaagatcccatgttgccattttataaccacacctacgttaccccccacttcttccccacctcctgaatcctagttcctggccatcactaatctattctccatttctatagttttgtcatttcaaaaatgctatacaaatatgtaaccattgggtattggttttcttcattca

SEQ ID NO: 43657 - DNA, 637 bp, Homo sapiens
cttggttaacaaaacttcaattctgtattgtccaagggacctacagagtgtccactatgtgccatgagcttgatatttagccaagtacattgcctgcattgtactacataagactacatcgagtagttggtcacagcattcataagctaatggctacctcaaggccaaacataggacacaaaataattacaaatcagtgcaataggcttctgttagaaatgaacagatggctcgaacaacctgaatttcaatgacaaaaaaggcacaactcctgcatacaagataatttcgtctttctcttctaattttctgcaaatacaaaatgaagcaactacattttccattttaaatgatatttaaataaatgttggtatgagttccatggaattttgcccattcttttaggatggtgaacccacgtaacccagctttaattacttctattccccatcttactgaagaggcttagctcagtgcctggcccatagtaaggactcaataaaaggttgttataattaagcttatcactcctatttaaatatgctgttcaattttcatctgggtgtgctaacttccctgtaggaatgctactctggctcacatacatctaraacccctctagatgtgtaatggtctt

SEQ ID NO: 43658 - DNA, 565 bp, Homo sapiens
aaatcaccatgttgagaaccagtgacctaatgtgcactgaattaaccttgaaaatacatgtgtttaagagaaactcacagaaacctcagcactcattcagcaccactcattcagccactcatggagccactcccgtgtgccagggcaggacaaggagactctaggtgagatcacagctgtatcccaccccctggcccatagcgagactgtcctctttggyttccttgccaccagcctgccgcctgccacctgccacagcctctccatcatccacacagtttctataaagagatctgaactatcacttatctctttaagaccctcaacagccttagaggataaaatcccaatgcccgttagcatactcgagacccttcaccatctggcctcagtcacctgcgtagccccctctaccccagtctccgactgaatggtctagtccccttcaccttctctgtctgtgccctaaatgggatcatgcctcctctaccctgaccacacccttgtctccacccctgccttggctccaattgctcactttttttttttttttgagacggagtct

SEQ ID NO: 43659 - DNA, 565 bp, Homo sapiens
aaatcaccatgttgagaaccagtgacctaatgtgcactgaattaaccttgaaaatacatgtgtttaagagaaactcacagaaacctcagcactcattcagcaccactcattcagccactcatggagccactcccgtgtgccagggcaggacaaggagactctaggtgagatcacagctgtatcccaccccctggcccatagcgagactgtcctctttggcttccttgccaccagcctgccgcctgccacctgccacagcctctccatcatccacacagtttctataaagagatctgaactatcacttatctctttaagaccctcaacagccttagaggataaaatcccaatgcccgttagcatactcsagacccttcaccatctggcctcagtcacctgcgtagccccctctaccccagtctccgactgaatggtctagtccccttcaccttctctgtctgtgccctaaatgggatcatgcctcctctaccctgaccacacccttgtctccacccctgccttggctccaattgctcactttttttttttttttgagacggagtct

SEQ ID NO: 43660 - DNA, 397 bp, Homo sapiens
gagggtggctatatgattatgtgcagagggggtggaaactgttgctcaaaactgaatcttaaaatttgttttgtcattgctttacccaaaatagtcgaycctagttggatttttttggagaaaatattttgtcccttttaaaaaggttctagtaagaagcagctttaatgctgtttgtggaaggaaaaagttacaaggagaaagagtgaatacagtgcatgattaaaggagtgatggaaagtgacaatggctttcaaaagagcacaggcgaattgacacgtattatgacaaacacgatcttacagtgacttcattttcttgtgagtgttgggaaatactttctagatattctaataatgatgccgttagcattgtacaatttttaattaaaaagctt

SEQ ID NO: 43661 - DNA, 557 bp, Homo sapiens
acgtatgtttatagtggcactattcacaatagcaaaggcttgcaaccaacccaaatgtccatcaatggtagactggattaagaaaatgtggcacatatacaccatggaatagtatgcagccataaaaaaggatgagttcatgtcctttgtagggatatgaatgaagctagaaaccatcattctgagcaaactatcacaaggacagaaaaccaaacaccacatgttctcactcataggtgggarttgaacgatgagaacacttgggcacagagtggggaacatcacataccgggccctgtcgtggggtggggggaagggggagagacagtattaggagatatacctaatgtaaatgatgagttaacgggtgcagcacaccaacatggcacatgtatacatatgtaacaaacctgcatgttgtgcacacataccctagaacttaaagtataataataataataatttttaaaaaaacagaaaaaatatagaaaagaaaaaaaaagaaaaagaaaatggagtagcttgggtctctgacctgtggaggcatcattaacctc

SEQ ID NO: 43662 - DNA, 586 bp, Homo sapiens
tagcataatatcaaagggctccatttatggcaagaatccagatacaatagaggcaatatcatgttggattgrcccaacataacattgcatatttttctaattggcaacaaaatatgacttaatacttacatgatattcttgtttatttataattggcatgtagaacaataattggtatccagttctgggtccttcaggatgacatgatattaagagacaggacagatattattggcataatacacaagaagaccttggtgaattatcttctacttgtgtttttaatcacgttaactatagaagcattcctgtctatgttgtactatttgtctttcaagggactgggaaaggcttcatcactgggcactatgcttgctgaagaatagaaggaaatggcatttgcacttccaaagtcacaggataaaagagatgcctcccactgtcatcttctaccctctttgtgggtacttattctctgggtaattattgtctaattttcctgtttgatattagcctcacccttagcacctaggaaggaattgaatgaatactttcctgaggctctaagactcacataaagcccaca

SEQ ID NO: 43663 - DNA, 568 bp, Homo sapiens
tgatgtttcttcatttctctttcaacttgcctccttgtttttctagaaaaataagcagcacacaaacttgctccagtgtttttggccttcttcttcaaacccactggttcttagacctttccactaaggggttcatctcccaagaaacatttcaaacaaaataccaaccacgatgagcatcttacttctagcaggtgtgataytgaaaggatactcttccaaagcatggtaaaattacctgctttcttcccctatactgcggtcccccaaaaggtggctcttaaccattcagataacaattcatccgttcacacatacacactgagctgaggaacattgaaatatcaaaaaggtgcctggcatggtccctctcctttgtgaagatatgaaaataggtggtgctttgagtatccaatgcatagtgcagacaaacctagagactccaaggcagactgagtaccaagactgataagtgcttgatgctacgaggacccatgcagagaactgttcaggtgggcagattctttttaagggcaccttcctaaacaggccagtctgcttactgaag

SEQ ID NO: 43664 - DNA, 603 bp, Homo sapiens
gaaaaaaaagaactcaccatcctgcaagaaagaaacctgtttaattttaatgcgatgtttcccagcttagctgagtatgaaatcctgttctcctctccttcaacttcctagagagtagtatgccttagaacagcagtttgggaaacactatcctaaatcatgtttctgtgtttaaatgttctatttaaacaaactggtaaagacgcagttcttcaagatactctgagccacagagccttgtgaggtggggcaggatccgaggtgctcctgcttcctgcctgcccgtccctgctctgccttctgtggtctgtgccaggatggctttgggaaatcatgttgctacagacagaaagcctcacttccctaggggttaggccagaactaagaaccaggcrggaacttggacaggcatggagtaggcatcttttcaagttcacagttccttcccaccacatgctggccacacaaaacaagaacagcaattggtatcggcacttttccagtcatggttactgatgtgatcctttttgcctcgaacaaaacctagtaggtaattcagatataatttttcttatttaaaagattagaggaataagacccatg

SEQ ID NO: 43665 - DNA, 548 bp, Homo sapiens
gtcaggggagccaaagtaagtgtgcaatgaaaagttattaacaaaagtcaaaaaaagaaaatgcagtctggccatccaattcctaaaccatgtacagagtacacagaaagagcacaggaggcttcctgcagcagggcagtacagctctctgcccttcaggaaaactgagattcctccacctgggaaacagcaagggacaattagggaaagctctccagaggaggaggcatctcaggtgggccaaagaagaaaaatttccacaggacagaaaaggcagagaagaggccaggcatggtggctcacgtctgtaatccgaacacttygggaggccaaggcaggcggatcacctgaggtcaggagttggagaccagcctggccaacatggcaaaaccccgcctctactaaaaatacaaaaattagccgggtttggtggcacacgtctgtaatcccagctactcaggaggctgaggcaggagaatcacttgaacccgggaggcagaggttgcagtgagccgagattgccccactgcactacagcctgggggaca

SEQ ID NO: 43666 - DNA, 557 bp, Homo sapiens
gccgctcaccactccctgcctgaatcaaaggagcagcttaggtgctagccttacttaccctagaaagtctcattatgtgagcaataaatcttctcataccctcttggtacatgtgtgcagtcatcagttttgacatccaaacaaattttcctcagatgggatccaccccacgctccgcaaagcaaccataagacagtgggggtaacagtgtagaaatactactctgtggaggcctttgaggaaaagcactgaggctgagacctgaaggagaaggatctggtttcttaagaagccagaggaaagagaatcccaagcagggctagtggtaagtgcagctgccatgaagcaagaggccagccctataacaaggaggcaaaataaagtagagtggacagagagtaagtaggggaactggagaccagacaggagtcagttcctgcagagccttagactacagcaagaagtttggacctgattctaaatgtagagacgagattgtytctcaaaatgatgtcacatgtgctcatgaagacttctgtgaaaatagttttaatttg

SEQ ID NO: 43667 - DNA, 595 bp, Homo sapiens
caaaatgttgattctgatacttatatctaatgagcctactgtctttgtgatttgaaaggatttgtgctacatcagatgaagtttcagtgttagatttcatggcatcagtattgaatgcttctcactcaaagcaggaaaagaacagtattttgcactttcagatcacttgaatatctctcagttagtattaaatatgctatttgaaggttaaaatataccaatagcactattttatgctttctttttgcctaatcatataaatgtttttacttcatgagggttattcttgttggcatggagtgccctgcaaggcagcatccttttgaggctcaagggaaaaggattatagccctggaatccttctcagaaaaatcagcaactattgtcttcaaatktattcactttatccctattccaaaaatgttttccctcttttgtcattaaaggaaattttgctccactatcataaaatcatatactatatcctctctactgtatggcgcatagtataattttgtggttagtttacaaaaacttttctacgatattcaatgggaaaattgggaaatttaaaacatttctctctccctctctt

SEQ ID NO: 43668 - DNA, 595 bp, Homo sapiens
caaaatgttgattctgatacttatatctaatgagcctactgtctttgtgatttgaaaggatttgtgctacatcagatgaagtttcagtgttagatttcatggcatcagtattgaatgcttctcactcaaagcaggaaaagaacagtattttgcactttcagatcacttgaatatctctcagttagtattaaatatgctatttgaaggttaaaatataccaatagcactattttatgctttctttttgcctaatcatataaatgtttttacttcatgagggttattcttgttggcatggagtgccctgcaaggcagcatccttttgaggctcaagggaaaaggattatagccctggaatccttctcagaaaaatcagcaactattgtcttcaaatttattcactttatccctattccaaaaatgttttccctcttttgtcattaaaggaaattttgctcyactatcataaaatcatatactatatcctctctactgtatggcgcatagtataattttgtggttagtttacaaaaacttttctacgatattcaatgggaaaattgggaaatttaaaacatttctctctccctctctt

SEQ ID NO: 43669 - DNA, 595 bp, Homo sapiens
caaaatgttgattctgatacttatatctaatgagcctactgtctttgtgatttgaaaggatttgtgctacatcagatgaagtttcagtgttagatttcatggcatcagtattgaatgcttctcactcaaagcaggaaaagaacagtattttgcactttcagatcacttgaatatctctcagttagtattaaatatgctatttgaaggttaaaatataccaatagcactattttatgctttctttttgcctaatcatataaatgtttttacttcatgagggttattcttgttggcatggagtgccctgcaaggcagcatccttttgaggctcaagggaaaaggattatagccctggaatccttctcagaaaaatcagcaactattgtcttcaaatttattcactttatccctattccaaaaatgttttccctcttttgtcattaaaggaaattttgctccactatcataaaatcatatactatatcctctctactgtatggcrcatagtataattttgtggttagtttacaaaaacttttctacgatattcaatgggaaaattgggaaatttaaaacatttctctctccctctctt

SEQ ID NO: 43670 - DNA, 604 bp, Homo sapiens
taaaagtcaatcagagaagttgtactagtcttcttgggctgccgtaacgaaayactttagagtgggtggcttaaacaacagaagtttatttttttccacagttctggaagctgaacgtttaaaatcaggatgctaacatggttggattctggtgaggtctctctttctagcttacagactgccaccctcttacagcgtccttacgtggtgaagagagacagtgcatgctctctggtggctcttcttgtaagggcactaatcccatcatgagggccccatcctcatgatctcatgtaaacctagttacctcccaaaggctccatttctgagtaccatcacattgggggttaggactttggaatatgaattggggatgacacaattcagtccatagcagaagtggttaaaggaaaggaccaacattgcattttttttagttcagcatgtgcccctaaaacttaatttattttaaaatgtagttggaaaatagtaattggaaaacagttttttaaccttttctattgttgcaattttgttgtctatatcttctcatagctttattgagatattatctttatatttctcacaatatcctaatatgtgc

SEQ ID NO: 43671 - DNA, 604 bp, Homo sapiens
taaaagtcaatcagagaagttgtactagtcttcttgggctgccgtaacgaaatactttagagtgggtggcttaaacaacagaagtttatttttttccacagttctggaagctgaacgtttaaaatcaggatgcyaacatggttggattctggtgaggtctctctttctagcttacagactgccaccctcttacagcgtccttacgtggtgaagagagacagtgcatgctctctggtggctcttcttgtaagggcactaatcccatcatgagggccccatcctcatgatctcatgtaaacctagttacctcccaaaggctccatttctgagtaccatcacattgggggttaggactttggaatatgaattggggatgacacaattcagtccatagcagaagtggttaaaggaaaggaccaacattgcattttttttagttcagcatgtgcccctaaaacttaatttattttaaaatgtagttggaaaatagtaattggaaaacagttttttaaccttttctattgttgcaattttgttgtctatatcttctcatagctttattgagatattatctttatatttctcacaatatcctaatatgtgc

SEQ ID NO: 43672 - DNA, 604 bp, Homo sapiens
taaaagtcaatcagagaagttgtactagtcttcttgggctgccgtaacgaaatactttagagtgggtggcttaaacaacagaagtttatttttttccacagttctggaagctgaacgtttaaaatcaggatgctaacatggttggattctggtgaggtctctctttctagcttacagactgccaccctcttacagcgtccttacgtggtgaagagagacagtgcatgctctctggtgkctcttcttgtaagggcactaatcccatcatgagggccccatcctcatgatctcatgtaaacctagttacctcccaaaggctccatttctgagtaccatcacattgggggttaggactttggaatatgaattggggatgacacaattcagtccatagcagaagtggttaaaggaaaggaccaacattgcattttttttagttcagcatgtgcccctaaaacttaatttattttaaaatgtagttggaaaatagtaattggaaaacagttttttaaccttttctattgttgcaattttgttgtctatatcttctcatagctttattgagatattatctttatatttctcacaatatcctaatatgtgc

SEQ ID NO: 43673 - DNA, 604 bp, Homo sapiens
taaaagtcaatcagagaagttgtactagtcttcttgggctgccgtaacgaaatactttagagtgggtggcttaaacaacagaagtttatttttttccacagttctggaagctgaacgtttaaaatcaggatgctaacatggttggattctggtgaggtctctctttctagcttacagactgccaccctcttacagcgtccttacgtggtgaagagagacagtgcatgctctctggtggctcttcttgtaagggcactaatcccatcatgagggccccatcctcatgatctcatgtaaacctagttacctcccaaaggctccatttctgagtaccatcacattgggsgttaggactttggaatatgaattggggatgacacaattcagtccatagcagaagtggttaaaggaaaggaccaacattgcattttttttagttcagcatgtgcccctaaaacttaatttattttaaaatgtagttggaaaatagtaattggaaaacagttttttaaccttttctattgttgcaattttgttgtctatatcttctcatagctttattgagatattatctttatatttctcacaatatcctaatatgtgc

SEQ ID NO: 43674 - DNA, 604 bp, Homo sapiens
taaaagtcaatcagagaagttgtactagtcttcttgggctgccgtaacgaaatactttagagtgggtggcttaaacaacagaagtttatttttttccacagttctggaagctgaacgtttaaaatcaggatgctaacatggttggattctggtgaggtctctctttctagcttacagactgccaccctcttacagcgtccttacgtggtgaagagagacagtgcatgctctctggtggctcttcttgtaagggcactaatcccatcatgagggccccatcctcatgatctcatgtaaacctagttacctcccaaaggctccatttctgagtaccatcacattgggggttaggactttggaatatgaattggggatgacacaattcagtccatagcagaagtggttaaaggaaaggaccaacattgcattttttttagttcagcatgtgcccctaaaacttaatttattttaaaatgtagttggaaaatagtaattgraaaacagttttttaaccttttctattgttgcaattttgttgtctatatcttctcatagctttattgagatattatctttatatttctcacaatatcctaatatgtgc

SEQ ID NO: 43675 - DNA, 557 bp, Homo sapiens
ctggcttctcctggatttttcaaatctggctttcataggtagagctaattcagggacagaaycatgcagaaattcacagaatgatgagggtctctagataatggtgtttcctggggagagcatgttgtcctaccccaaaaatagcagccaaacagtgtgccaacaaggtgccatggggtgctcaatgttggatttaatttagctcctccttgggtggttggctattgtaaaaaatttactttgacaatgctttcagatttgatgaaacggtggctttatcttttgtaattcctctggaccttgtaattttaaaagtaagcaaccttagagtgggaaaaaaattaaaatgtgttaaggcaccacttctaatatattaaaataagtataatgaatacttaagaaataagtataaggaactcatctcatactattatttgggagagaaaaaatctaatttggtaacttctacatgtgcctgtggttcaagtcttgatgtcattagagtacgaaatcaaagaagggtttttactcaaaccatttactgttcattgtatgca

SEQ ID NO: 43676 - DNA, 584 bp, Homo sapiens
aaaaatcacataatttcattatcatgagaaaaacctagaaagttctgatgctataatgcctatcttggcttcccatcataatcttttagtgtcaggatactaacccacgtatattttggcttattacttacctttcagccccaaatgcttcttgccacaagatttccttctctgtaacaatgtctttttttttttctctgtaattctcaagacattttactgaggaagagtgatctaaaaatctgggtcattgctgaatgattgaccaagagatatttgcataaacaattctcagagagtatttcaggtaattcattgtaccmgtttttagaaaaaatggattgtaaatgtagcgtagaaatattcttgagacagcttattcaacaatctaattgcttactaatctagattaatgttttcctttgagcagaagcagaggctcataagcatgaagcctaatttactgtttgacagagtctgatattcaaaagcaggcttatgtggctagttataagtgaccaaggtttggggtaaccctcttgtggttttacaagtgattgtccttaaaaatctaagtttcttca

SEQ ID NO: 43677 - DNA, 520 bp, Homo sapiens
agggctcagactactactatgatttgaagacttactaaaaagtgacaggaatcagatgctgttgcattggtgaatgaatagacaagtaaatcagtagaacaaaatagagacctcagaaaatagacccacacaaatatagtcaactattttttgacaaggaagcacagtcaattcaatggagcaaagacagtcttttcgacaaatgatgctgaaacaattggacattcatataaaaataatctagacacagaccttatatctttcctcaaaatgaacttgaaatagatcataatagatcacagacctaaatgtaaagtccccagcatgtggcaggtgctccatcartggtcactgtgggtatttggaagtgttctgaggctttttgagttggctggccaagaatttgtggtgcttgagtgaagttgagtgggccttgtgaaatgcccgatgttctccccagtgtggccaggggaccatctgcatcagagtcacatgtagtcttcattaccaaggcaaattc

SEQ ID NO: 43678 - DNA, 612 bp, Homo sapiens
atggaagtttcctgtctttgtccatctaagcgttcactaaaatcatagtaaatgccagagcatgacttgttttggggaatggatggaaggactgcacactccagccagggggatggttgctttcggaactcacagggtcaggaccagcctcaccgtgtaacttcagggcctctcttcttcaccttttggttgcttcattatgttggcgtaagaaaaaaggaacaggccaggcatgatgacgtgcgcctgtggtcccagctactcaggaggctaaggcgggaggatcactttagccgaggagttgraggctgcagtgagctatgatcacaccactgcactccagcctgggcagcaggagagatcatttgaggcgaggagttcaagaccagcgaggacaacaaggcaaaaccccatctctaccggaaaaaaaaaaggaggaattcagaaaaggccaaggttccatagacctggggtagcaggaagtaggggaccgggttggcgaggcctttatgggatgaagagattgagaaaggccttcaggaagaggcagagcttatttttcctttttatttttatatttttgatacagagttccactctgttgcccaggct

SEQ ID NO: 43679 - DNA, 600 bp, Homo sapiens
attgtgaagttaataggaaagagaataaatcactgattgggttggcagagaagaattccttacagcttacttcaaaaccaatatttaaaggatttttattagacaaaaagttttctagaaaatattattatgggggcctyatttactgtattcttgttgtaatacaaaataaatgattttagctacgacctgactagggaaatggtgaatggacagagagggaatgttggtatttattagccatttggtataacggaaaaagcattgaacttggaaattaaaagagctggatttgttatgagttaatcatgaaaccttggataagtcacttagcccagtgaatctcaaactgtagtgattctgaaaaaaatcacacggagaacttgtttaaaacacagattcctgggatagggcctgaaactgcatttctaacaaactgccaggtgatgctgatgctgctgatctgggggccacactttgaggagtaagggagtcttaggctctactctccttatttttaaaaggagtctaccatgttagatgattgcataggtctcttctggccctgtaaaattctctgaggcccaattttgtttcact

SEQ ID NO: 43680 - DNA, 600 bp, Homo sapiens
attgtgaagttaataggaaagagaataaatcactgattgggttggcagagaagaattccttacagcttacttcaaaaccaatatttaaaggatttttattagacaaaaagttttctagaaaatattattatgggggccttatttactgtattcttkttgtaatacaaaataaatgattttagctacgacctgactagggaaatggtgaatggacagagagggaatgttggtatttattagccatttggtataacggaaaaagcattgaacttggaaattaaaagagctggatttgttatgagttaatcatgaaaccttggataagtcacttagcccagtgaatctcaaactgtagtgattctgaaaaaaatcacacggagaacttgtttaaaacacagattcctgggatagggcctgaaactgcatttctaacaaactgccaggtgatgctgatgctgctgatctgggggccacactttgaggagtaagggagtcttaggctctactctccttatttttaaaaggagtctaccatgttagatgattgcataggtctcttctggccctgtaaaattctctgaggcccaattttgtttcact

SEQ ID NO: 43681 - DNA, 600 bp, Homo sapiens
attgtgaagttaataggaaagagaataaatcactgattgggttggcagagaagaattccttacagcttacttcaaaaccaatatttaaaggatttttattagacaaaaagttttctagaaaatattattatgggggccttatttactgtattcttgttgtaatacaaaataaatgattttagctacgacctgactagggaaatggtgaatggacrgagagggaatgttggtatttattagccatttggtataacggaaaaagcattgaacttggaaattaaaagagctggatttgttatgagttaatcatgaaaccttggataagtcacttagcccagtgaatctcaaactgtagtgattctgaaaaaaatcacacggagaacttgtttaaaacacagattcctgggatagggcctgaaactgcatttctaacaaactgccaggtgatgctgatgctgctgatctgggggccacactttgaggagtaagggagtcttaggctctactctccttatttttaaaaggagtctaccatgttagatgattgcataggtctcttctggccctgtaaaattctctgaggcccaattttgtttcact

SEQ ID NO: 43682 - DNA, 596 bp, Homo sapiens
gttcaaagatgcagcttctctgaagacatctgcaataccaggcaactgaccagctccatcatccacttccttttgtctctttttttcctcactcttrcttccctgggattgcattccccaatacagtgtcagtccagaatgcttttgcctgggctctattttctagagaacctctgttaagacagaaagtaaactcattttcctccagaggtgggggtttctaaacattccatatgtgacatccaggtcctaaaagcaaaatggcttgtgggatgaccgtgaggaaggtttaaaagaaaagcccactatttattgagcacctactatgtgagaactttatgctaaatgttccaattgctatttcatttaattctcacaatatccctatggatttttactaccataattttaccaataaatgagagtttggattttaagtcacttattcaagctagtcagtgattgagctgggctttcaacctagttctgctgagctccaaaccagtactcatgtgattcaaaagtcacacaaaatgctataatgcacttgaaaaaatgccttaacagaggaagtcacctaagtgtatctagttgta

SEQ ID NO: 43683 - DNA, 616 bp, Homo sapiens
cactgcaccatatttgtagtcttttatccctcaccccctcccactcttcccctcaagtatccaaagtccattgtatcattcttatgcctttgtgtcctcagascttagctcccacatatcagtgagaacatatgatgtttggttttccattgctgagttccttcactgagaataatagtctccaatctcatccaggtcactgcaaatgctgttaattcattcctttttatggctgcatagtattccatcatatatatattatatatatatggtctatatatgtagtgtgtgtatataaatatatatataccacagtttctttagccacttgttgattgatgggcatttgggttggttccatgattttgctattgtgaattgggcttacacagaaatttaaatgggaggagaaaatggataaccccatcccttttgttgaaggatggggttttgccaaagagaaagagaagtaaaacttaatgacagtggatttggttccttggtgcagaaaagatcccccctccttttccattacagggcctgaccccagctttgaaatgtgaagttttgattgctaatacaaattgaatttatttgtttttttttctcactttca

SEQ ID NO: 43684 - DNA, 565 bp, Homo sapiens
atatacatatttcagaactactgtctatcaatgaaaattttacaaaactgacttccaggaaaagactactacacagtacccttttcttatactctgacagacagtcctgcctttcaaaatgataagataatgagtttgtggtttgaacacagctctgtgttttaaaggtagcattgaaaattaaagtgaagtattaattaaagattaatcaaaagtgctagacctctagtaagttcagtgctttttgcttaattctgaatggcccactttgaaagagtatttcaattgagctagaattttaatcagctggctagaagttgggagaacaagagraataatcctgagggtaaatgtttaaaaatgcatcaaaggctgttggaaaataagctcttaatctgtgtcatgttggagggaaagaatgttgacaagaggacaggatgcattggtttatcctggcctccagggtggtgacattcctgagatccatcagtgagaatggccagccggctcccctttcagaacaagctactctcactaatgctcaagggagaagcctggatacctg

SEQ ID NO: 43685 - DNA, 590 bp, Homo sapiens
atgtaaataattccacattaccctgttactaaccatcacagcgtcttaggaaatcggccaaactcgctccctcctcattagctgacatccaaaggaggaaggttctgaatgaccttgcataggtcccatggcttccttttgcccctcgccttcctaaattaactgtctacttatgccaagcaaatctgtctccagaccttgcagccagttacagctcytgtcaataggatctaaatgaaaaaggtgaagaacatgctttccccagtctggcatattgctagaggtttgtaagttgtcaggagccgagaagtgtggtggttttcattatctatcgctgcctaacaaaccacaccagagcttagtgatttaaatgacctttttatctcctctcccagttctgagtgactgggctcagtcgggccgttctgcttctcgtgatggcactggggttgcagtcatttgggacctggaaagggctagaacttctgagtctgctcacttacatggctggcagtcaatgtgggctgttggctgtgagctcagatgggactgtgtggaccagagcaccttggttcccattcgtgtggtct

SEQ ID NO: 43686 - DNA, 596 bp, Homo sapiens
ctatttaatggtaaaatgtttgtaagactaaaggagataacaatggtgtcaataaatctcattagaaaacttatcatatcatttttcctagtccttcaatgtttgctattttatcaatatcatcatcatcagtaaacatgtactgaatgtttttaatgtatacacactgattattttacaaaacctgtccctttgtgttgcctaagagcaaaggaagtgacactatgttgttaattcttatgttgggctataaagattcagatgtgagaacttcaacttttctgtaatagagggcattccccaataagatgtatgctaaaacagccttttgttggattataaaaatattgggttgaattatatgaaactgtcatttttgtagggcaaaaccagtcaattattgggaatgtcaaagggttttaatgttgtatggcactaacccattgtaaacaataaattataaggaacccataataccctgacagagatatatactgttaataatttcatgctagttttttaatatatgtatttgaaatayattcccaaaatgggatcatattgtatatatgtatttctttaggcaattattcttc

SEQ ID NO: 43687 - DNA, 572 bp, Homo sapiens
gcctatttaaagagcaccatccagtggggtggaaagcaaggggaaggacagcattaggacaaatacctaatgcatgcggggcttaaaacctagatgacgggttaatgggtgcagcaaaccaccatggcatatgtatacctacstaacaaacatgcatgttctgcgcatgtatcccagaatttaaaataaaataaataaagagcaccatctgactacttcctctttcatgtaagtgatcactccactctgcaggtgagactgggaaatgtcatttctccattaggcgcattgtcccaatcactatgacacaaaaaagagcatgaatatcaagcggacaacttgacgggtccccctcaccaaatacgaggtgacttctttgttatagaaaatatggaacatattttaatggtttttcttcactaaaccagggttaacagtggttgtatggacatttgggactgtgtcattctttgttgtggggacttcctggtgtatcgtaggatgcttagcagcatcggaagcctctaaccaccagaggccagtaggatcgctcccctactgtgacaaccaaa

SEQ ID NO: 43688 - DNA, 572 bp, Homo sapiens
gcctatttaaagagcaccatccagtggggtggaaagcaaggggaaggacagcattaggacaaatacctaatgcatgcggggcttaaaacctagatgacgggttaatgggtgcagcaaaccaccatggcatatgtatacctacctaacaaacatgcatgttctgmgcatgtatcccagaatttaaaataaaataaataaagagcaccatctgactacttcctctttcatgtaagtgatcactccactctgcaggtgagactgggaaatgtcatttctccattaggcgcattgtcccaatcactatgacacaaaaaagagcatgaatatcaagcggacaacttgacgggtccccctcaccaaatacgaggtgacttctttgttatagaaaatatggaacatattttaatggtttttcttcactaaaccagggttaacagtggttgtatggacatttgggactgtgtcattctttgttgtggggacttcctggtgtatcgtaggatgcttagcagcatcggaagcctctaaccaccagaggccagtaggatcgctcccctactgtgacaaccaaa

SEQ ID NO: 43689 - DNA, 603 bp, Homo sapiens
caagtggatttttttttttttgctccctttttttaaattttaatttgmgttctgagatacatgtgcagaacgtgcaggtttcaaggtggattttaaaaagggagagcaattgctgagagctagagctcagactggcacaaatgaatgctgagggtttctgaagaacagggaggcccaataatcaatcttaagtgttttgtgttgatggaatctaagccctctctatctccccatgtattgctgtattctgctcaacacaaaatggtcttagagtggtcactttttgtttgcacttatttcttgttagggggatcttttgggaggtggtatttgttcagttatctttattttgttgtcactgttggattgtaagtgtggttattttatggataaaaaggtaaagggactaaattccatggcttgttctgagtgacagctgagatgagtggtggataattacagacatacacaaatctggttgagcaggatttgaagaacaatgtaagctatcctcctcaacatctcaagaaagaatgatagaaatgtaaacctagagccctatggccatatttcatttgaatcctaaaagtcaggagcctccca

SEQ ID NO: 43690 - DNA, 1873 bp, Homo sapiens
atcaaagaaaaagcccatggcccaagctgtaaaaactaaggttcttcttggttactcatttattctttattaactttatgtatagaaagagagcgctttcttttcaggtttctctcatcctatacccagcaactatgtagtgctatggtttgaatgtgttcctcaaagttcatgtgttggaaacttaatccctaatgcaacaatgttgagaagtgaggacctttaagcatgaatgagtaatgaaggctctactcttatgaatagatcaatgccatgatcaagggagtgggttagttcttgagggaatgggtttctgataaaaggatgaatttagctttctttrtgctctcttgcattctcatatgctctcttgcattctcatgtgctctcttgctcttccacctctgccataggatgacacattatgaaggcccttgtaagacactgagactatgctcttagatttctcagcctctagaaccataagctgaataaatttatgtacattataaatgacccagtctgtggcatcctgtgtggttatagcagtataaaatgaactaagacacaaaatgataaacatttagtgagttctcaatatgtatttgttgaaaaaataattgtgtagttgtgaagttggtagagtgtgaatctggaacttctaggttttgcaccttttgaaaaagcccattctaggaaaaggatgatgaaaactagaggaaaagtacaaagaaaggaggagagaaaggaaaaaacagaagagtcacaaaggcatttatgagcctagttctaccatatttaataccctcttaactccttgccttccccactaacatgctttaataaactaattcaagttattggcacctggaagagtcctaacactgtattcaataagtagttgttgaaagagtgactgaatgataattgaataaacagattaataaatgaacaaatgaagcacatctctgcagagggtactacaagcccaaaacaagcagatgtgccacagcatcgtatgctggatatgatattttagcccacagtatctattctcactctccatttttatcttctatgtgtactgcaggggctagaaacttccttgaaaccagaagtctgtgaattaaattcaactaatgaatgatatacaagtttgagaggcttgaaagggtgatgtggttgggatattgttgcttctgctggttctaggaattaaggtgggaataaatacaagcactgaattcccaattttggtcagaaactttgtggttgtgagagacagctgtggcaatggcagggggagtagcagcttccttaatgtggttcacagtttttactgacatgcccttaaaattctagtctgatgggactcccttgaattcgtcttctttagcccttcctacagtgttgtaaacactcagttactttctgataaaacacctaaaaaatttctgttgtctgttgtaaacactgaatttctttcttttaaaacatctgaaaactttctgaatcctgactgatgggcacgcagggaattataaaagggtaagtattggatctaatacagtggttcacaaatgagggtgaagagcaactttgccccttggagaatatttggcaatgtctggatacatatatatatatacacacacacacacacacatatacatatatgtgtatatatacatacatatacatgtatgtgtatatatatatacatacatatacatgtatgtgtatatatacatacatatatttgtgtgtgtgtgtgtatatatatatatttgtcatgagttgggaaggtggtgctactagcatctggaacctaatgggtagaggccaaggaagctgctaaacattctgcaatgca

SEQ ID NO: 43691 - DNA, 644 bp, Homo sapiens
tgcattgggagtacatcgtaccagtattaatgctgcctgaggaggaaggtaactcctttccagaggagctgactctgagaaggggattgcagacacagagaatgggtaaatgttcagaattgttggcttacagtgtgtatgaattagaatggtaggtggggaggtaaaggtagcagagataagctatagggttaatatttatcttgtaaacaaggagaaactgtagagtgaatgatctaatcacattttcattttaatactgtcattctgaaaacatcctatgcgatggaatggagaaggaagtgatgactcagagtgtgaagagtgaagagttcttagtatttgttattggttaattctcttttgatttcaggggtcaaaaatctaatgtaacttgggctaacaaaaaagaagttaacaaaagaatttattggttcagaaaattgaaaatttccatgtcagatctagctracctcaggactggcctttgcagtccatctgtggtatctgtgttgtgttacagagttgggttcattgcaggttatgactcctgagttcacacatacctaaatgtttttcttaaaaaaaaaaaaaaaaccctccaaaatgaatcaatatagtgaactaattattaatgtctgtgt

SEQ ID NO: 43692 - DNA, 1845 bp, Homo sapiens
tgcatccagggtactgcagtgttttaattctcaagctggatgctggacacacagatgtttattatcttattttctagatatttttatgtgactgaaatatttcgtaaataaacagaacttttgttattgtaggctaattcatctcaattttggcatgtttttctgtgatttcacatccggttatttcccaagccttatttactccttattgcattgcattgtccatccatcatccgccgtttttccatttttacacaagttattcttttgtaatgtcctcctacctggtcttcctccctatgtgcttcccacccttcagtctatatcagtcctccagaatgacagctttgatggtatcagtaactggccagaagtcgtcagtagctctgtttatttacagaatattgttctcttcattagcatggaattcaggagcctctgtggtttggcttccaccctgcatttccatatttcccatgmttctcccttgccacagtatgagaacttcccctgctttcccatcttgatatccttgcttatgttcctctttcagggagtgcccttccacccttacctgtttccagtcctgcccaggcatgttcatgagcagagtttgggagaacttttttcaaagttgagtaatatctggatccctaataaaacagttcttatggattcctaatattgatttaaatgtattgcaaaatcacttcaatatacaaaactatgaaaacatataattaagtagaaaaatgtttctcacttctagataaccacaaagccaaaaaaaaaaaattacacacaaaaccacaaaccaatagagttctcattaacatgacttgttctctcctggttgtgatgtcagtcagctataaactgctttcacatgtggtatgcctactatcaaatgccacaagatgtctcagttcttcccttctctttctctaattgcaaagtcctcattcctggggtgctcccacccccagtggaataaatgcctcaatgaagcatcatcatgaatgaaaaggctcagtagtgttccccaccaagtggctgcatttctacatgaaaaaaatacatctgcctctaactttcaaactgcctaagtgcagatttatttaataaatattacctattgtctgctacagactgtgtcaaaggttgtgtggatccaaacatgtatcatacatggatcctgcccttgaggagtttcgtggcaaaagaaaccaaggaaacattatttacgggagggataaatgctagggggtgtgatttgaacttgtatagggaggcatctgaatttcaagttcagagctgttagtacatggcccttcagctattaaagggcacaagcaagaatatgaagttgacatgtttatttttaattttttcactttgttctcctttcacggcctcttttcagttttttagtatacgctatttccttcagttttctagaactaaggtggcaggtagtattaatctcatgttacaaagcaggaaattgagtttttgatagataaggaatttgcccaagacatactgctagtacgtggccatgctgggtgtcgtctccttctatactgcctctcagtcctctgttatgcttctttccttatgttatttcatgtgtgcatttgcagttatgcaattaaatggtatttttccctctattagggagaaagggcctggtcaaaagtagacactaagtaaatatctgttgaataaattaatgaacaattatatcttatgttgcaagaattaataactacaacaccattattaactgatatacccaacaggtgttttaactagatagtttaaaaggggaaactaagttatgca

SEQ ID NO: 43693 - DNA, 575 bp, Homo sapiens
cgcctggctaattttttgtatttttaatagagacggggtttcaccatgttagccaggatggtctcgatctcctgacckcgtgatccgcccacctcagcctcccaaagtgctgggattacaggcgtgagccaccgcgcccggcccgcacccagccttttacatttatttttatgctaactttatagaatatattttccactaaacctacacatggcctccccgtaaaacaaactcaggtattatgtgagaggagcatgctgtttcccagatgaggagaggaggatttgtaccttattgatccaatgatgtttagtcagatttcagcatggttgtgacagctaccacactatttcacttacacatagaaagggtataatgggtttgtgtgctaaagataggaagagaaaattccttctttcccacttcccttcggacttctgtctcctaaaagctcactctaaattttgccaagattttttttttttttttttagctttttgtttgttttgtttttagagacaggatctcactctgtcacccagtctggagtgcagtggcacaatcatggctcactg

SEQ ID NO: 43694 - DNA, 575 bp, Homo sapiens
cgcctggctaattttttgtatttttaatagagacggggtttcaccatgttagccaggatggtctcgatctcctgaccgcgtgatccgcccacctcagcctcccaaagtgctgggattacaggcgtgagccaccgcgcccggcccgcacccagccttttacatttatttttatgctaactttatagaatatattttccactaaacctacacatggcctccccgtaaaacaaactcaggtattatgtgagaggagcatgctgtttcccagatgaggagaggaggatttgtaccttattgatccaatgatgtttagtcagatttcagcatggttgtgacagctaccacactatttcacttacacatagaaaggrtataatgggtttgtgtgctaaagataggaagagaaaattccttctttcccacttcccttcggacttctgtctcctaaaagctcactctaaattttgccaagattttttttttttttttttagctttttgtttgttttgtttttagagacaggatctcactctgtcacccagtctggagtgcagtggcacaatcatggctcactg

SEQ ID NO: 43695 - DNA, 635 bp, Homo sapiens
cttcggcagcttcatcaggacaaattcatttcgacgataagagacgtagtattttgtctggtttgctgatgttgcctaaccgggggaagaaacacatttttgagaggcttgattccctctccagccacagtctcatgaatgaaaaactacatgttatattcagcaagtgaaaatgcccttttactttccttctacctgttctgcttgaaatgaacagactcctattcatccttcaaagccccaaattaacacccctcctctgggaagttgtcttctgcttccttcagtcagaactaacttctttcccyatgctctctcagcaccttgctgctctgcatccaacttatggaacaaggtggagaaagttccgatggagaaggagacaggccaaagatgcgctcgttaccaaaggtgatcactgaacctcgaggcatgacaaacaaagccggcaccatctcgagtgcttttcccaggcagctcatttgacctcataacaatcaaccccatgaactgtggccatgggcatctgttcccagagacagaaaggcccgtcaggacaggactgtggcaggtctctgattacagaggccacatatcctcactgccacagaacaggaggtgcagcttcctgagcc

SEQ ID NO: 43696 - DNA, 1893 bp, Homo sapiens
tgcattgtccatgaacaccaggcaaaagttataaattaatttgattgtaaattaatttgatattataaaaggaaaactaaaaccattctgtarccagagtagtggaaatacacgaaaatagatgactccgtcataccatcgatcctgtactagaacagaatttgcaataccatttagaatacttctggaactctgtcccagtaagagcaatagaagatgagcttttatcacaacaaagtgctctgagctgtatagttttcttgacttgttttttttttttttttttttttttttgagacagagtcttgctctattgccaggcctggagtgcagtggcacaatctcagctcactgcaacctctgcctcctgggttcaagcaattttcctgtctcagcctcctgagtagctgggattacaggtgtgcaccaccacgcccaactattttttgtatttttagtagagacggggttttaccatgttggccaggctggtctcgaacttctgacctcaggtgatctgcctgcctcagcctcccaaagtgctgggatttcaggggtgagccaccatgcctgacccttcttgacattttcagtttatcttatttgacccttgcaactgtgttcagtgagatatttagagcagctgttacttggataggaaaacaaagagctgaaaaggttaaattacatgcccaaagttatgtcaataatgacataactcagactctgtgctgtttccagtaacctctatcaggtcccctcttatggaatccagtaatgatgtggactttactgagtaaacccctagcactgcaaaccattgagtgtggattcagtggtgctacagactgaatgttgtgtcctacccaaaatccatatgttgaaatcctaatccccactgtgatggtatgtggagacggggcctttgggaggtaactgggccatgagggtggagccctcatgctgggattactacccttattaaaaaggaacaggaaagagctgcttcttcccccaccccacccccgttctctctggctctttttctgtctgtctctgtcctctgccacgtgaggatacagtgagacaacagccatctgcaaaccaggaagagggccctcaccaaacaccaggtctgctggcttcttgatcatggacttatcagtgtccagaactgtgagaaataaatgtttcttgtttaagccacccagtgtatggtattcttaaaatagcctcctgaactaagagacatgaaaactagaattggtctgcctatcagtgggattataaatgtgcagtgtattttaaagagttgatctccaaagtacagtacttagcacgtaatatgaagttaataaatgtttgctagataaaggaacgaatgcaggcagtatagaatgagaatgaagtatccagatgaagccttaagtttggctgaaagcacttgtctgaacatttaaagaccttttcatcatcaatgaggattattttaattcccttttataggattgtgttcagagtgttcctccccaaaatgttttttgaataccaaatgaatgtaaaaaggaatagggttataatgttctgtttctcatgtggaactcccttgttcatggcagttcaaatagactaatattagctaatatttatatacatcctactgtgtggcaggcactttaccaagggttttgcatatattatctcaatcctagaaacatgcagaataggttttcctgtgaagctgggggtcaagcagaagctagtctgacttagacgctcatattcttcctcgtacactgcagtggttgctgagccactgtcaggataacacaagagcacagcggctggagaaggcaggctggcagctggcatttcttcggtattactaccacc

SEQ ID NO: 43697 - DNA, 1893 bp, Homo sapiens
tgcattgtccatgaacaccaggcaaaagttataaattaatttgattgtaaattaatttgatattataaaaggaaaactaaaaccattctgtaaccagagtagtggaaatacacgaaaatagatgactccgtcataccatcgatcctgtactagaacagaatttgcaataccatttagaatacttctggaactctgtcccagtaagagcaatagaagatgagcttttatcacaacaaagtgctctgagctgtatagttttcttgacttgttttttttttttttttttttttttttgagacagagtcttgctctattgccaggcctggagtgcagtggcacaatctcagctcactgcaacctctgcctcctgggttcaagcaattttcctgtctcagcctcctgagtagctgggattacaggtgtgcaccaccacgcccaactattttttgtatttttagtagagacggggttttaccatgttggccaggctggtctcgaacttctgacctcaggtgatctgcctgcctcagcctcccaaagtgctgggatttcaggggtgagccaccatgcctgacccttcttgacattttcagtttatcttatttgacccttgcaactgtgttcagtgagatatttagagcagctgttacttggataggaaaacaaagagctgaaaaggttaaattacatgcccaaagttatgtcaataatgacataactcagactctgtgctgtttccagtaacctctatcaggtcccctcttatggaatccagtaatgatgtggactttactgagtaaacccctagcactgcaaaccattgagtgtggattcagtggtgctacagactgaatgttgtgtcctacccaaaatccatatgttgaaatcctaatccccactgtgatggtatgtggagacggggcctttgggaggtaactgggccatgagggtggagccctcatgctgggattactacccttattaaaaaggaacaggaaagagctgcttcttcccccaccccacccccgttctctctggctctttttctgtctgtctctgtcctctgccacgtgaggatacagtgagacaacagccatctgcaaaccaggaagagggccctcaccaaacaccaggtctgctggcttcttgatcatggacttatcagtgtccagaactgtgagaaataaatgtttcttgtttaagccacccagtgtatggtattcttaaaatagcctcctgaactaagagacatgaaaactagaattggtctgcctatcagtgggattataaatgtgcagtgtattttaaagagttgatctccaaagtacagtacttagcacgtaatatgaagttaataaatgtttgctagataaaggaacgaatgcaggcagtatagaatgagaatgaagtatccagatgaagccttaagtttggctgaaagcacttgtctgaacatttaaagaccttttcatcatcaatgaggattattttaattcccttttataggattgtgttcagagtgttcctccccaaaatgttttttgaataccaaatgaatgtaaaaaggaatagggttataatgttctgtttctcatgtggaactcccttgttcatggcagttcaaatagactaatattagctaatatttatatacatcctactgtgtggcaggcactttaccaagggttttgcatatattatctcaatcctagaaacatgcagaataggttttcctgtgaagctgggggtcaagcagaagctagtctgacttagaygctcatattcttcctcgtacactgcagtggttgctgagccactgtcaggataacacaagagcacagcggctggagaaggcaggctggcagctggcatttcttcggtattactaccacc

SEQ ID NO: 43698 - DNA, 1910 bp, Homo sapiens
ttgctgacctagcaaaatttcagtgctaggaatttatcctacagagactactcacacacgtgcctaaagggcaagactgctgcttgcaacatagtctatagaaacaaaagcaaggactggataatacattatggtacatccacacaatatatactattaactattaaaaagaaagtccatgttaaaaccgtatgtgctgttrtgggatggtgtccaaaatatattaagtgagaaagacaagaaagcaaagtgcaaagcaagatgaatggtattccaatctttatttgtgtagaaaagctcgcttctgtttgtatttgcatagaacatctctggatccacaaggaaatggtgaccacaggactgtggggaggattactgaagccaagggtggaaaggagacttttcattgttctttctgcactatttgaattttttaaaatcataggtattttctttccaaaaagaaaataaaaaataacaaaatacgtgggctgtcaaaaggatatctatatatgcttataattatataaatacctgtattgttatgttaaatggaaaaagataaattgaaaattgtttatatagtatagtcacagctatacgaaaggagaaaaatgtttggagaaaaaacattggaagggggctgggcgaggtggctcacacctgtaaccccagcactttgggaggccaaggcaggtggatcactagaggctaggagttcgagaccagcctggccaccatggtgaaaccccatctgtactaaaaatacaaaaattagtcaggtgtggtggcatgcacctgtaatctcagctactcgggaggctgaggcaagagaatcactcgaacccaggaggcagagattgcagtgagccgagattgtgccactgcactccagcctgggcaacaaagcgagactctgtttcaaaaaacaaacaaaaaaaattggaagaaaatgaggatatgtgccaaaatgttagccttgggatgatcagtgattgcatatctttcaactttttctatagtttcaacatgtctttactaatcacattttactcttttttttttttttttttgagtcagggtcttgctctgtcgcccaggctggagtacagtggcacaaacacagctcactgcaacctctgcctcccaggctcaagctgtcctcccatctcagcccccaagtatctaggactacaggcacacaccaccgcacccagctaatttttgaattttttgtagagaaggggttttgccatattgtccaggcttgcacattttactcttgtaatagaaaaaaataaactttttaaaaattatgttaaattaaaatataacatccatccacctttatagttcaattgcagatggtaaaaatcagggggaagaaaaagttaatagtctgctcaagatctttttcaacaccatgattctgcactaatgaagtttgttgtagtttctcaactccttttaacttttttctggtttggcaactgatgctgataaagacaagacatagcacataagtcagccccccccaaaaaaaaactgtatttataatacccaataccaataaatatgcagctggatgagcatttacaggcatgactacactgcaaattgataccacccttttggaaagcaatttggctatacgaatctgaagctataaaaagtgtttacaccgtctgacccagtaacttgacttctggaatccatcctcaggaaaaaacgggaaatgctggagagctttattcataaaggtcataattaaggatggtatgcagccataaaaaaaatcacaattgccaataacatgtagccacatggggtaacatttatgatatgccgctaagtagaagaaaaagaatacaaaactgcgtatatcctgtaattacgaccacttaataaaa

SEQ ID NO: 43699 - DNA, 513 bp, Homo sapiens
tacaaaaattagctggccatggtggtgcacacttgtaatcccagctacttgagaggctgaggcaggagaatcacttgaacccaggacgcataggttgcagcaagccgaatttgcrccactgcactccagcctgggtgacaagagtgaaactccatctcaaaataaataaataaataaataaatttctaacaaatggtggaaaataggcatagtcttaattatacagtacacatagtctttattagcattatattcatgcagatattattcctttaaactggtttcttatgaaggtatttccaaatatatccatggtgacttatgttcagtagtatccatttgatgtagcctgtggacctgggtgtagtagatgctattggtgccctgcccggctctcttcaccggctagcaccccatcccacatctgtttcaagtgcagcttacttctgcgacctctgattatctgcccttgcctgatgggaacctaggaagctatactccccttatagccaa

SEQ ID NO: 43700 - DNA, 604 bp, Homo sapiens
aaaaacagaaaacatttagctatggattaagtgttcagtaggcctaattaagaaccttaatctttggaattctgtgttatttacatgctgctatttagaatctaaagaataccattatagattgagaatgttttgtaggctctcgattatagaaatttctcctttctgtgggtgcttgcataatttaaatgccttcacatgtcctgcaagttaatttcttttatttaggattatggaaccacatgaaaagaacaattgagaaaaatagagtaaggtgtattaagcaaagctttgcataataaaatagctttacaacatataaagattttctggtcatatgcagcacgctgtgttgtttttgatgaaaggaattcagatcttaacatattcaaagtaaatcaagattattaaagcaacaaaattgtaataaaatttgtcacataaagaaatatmcagccttaaatagcttcactattcaaattttacaaatattgaaggaacatatataatacctacaaaataagatagagaatagaagaaaaatagagcacttttaaacttcttttatgagtccagtataatgttaataccaaaacctgaaaag

SEQ ID NO: 43701 - DNA, 622 bp, Homo sapiens
ctaacatccaagacaatggaaaaaaggcctccaaggcatttcagagacctgtgcagcagccagtctcatcagaggtcttgaagcctagaaggaaagaatgcttttgtgagccaggcctaggacccgattgccctgcttacataattgtaagtttcctgaggccccccctgaagcagatgtctgcgttctgcttcctggacagcctgtagaaccatgagccaattaaacctcttttctttataaattgccctgtctcaggtatttctttatagcaatgcaagaatggactaacacaacatcattctttgagtatttcattactatctggcacaacacaatatttcaggttcttctcagtcacaccccattttttaagaagcactgatttctttcmgtcgaaagtatgtagcaaccaaaagttcagtagtgaatgtgctcattattttgtggattttgctattcacgggccctttaggtggacagaactaggaagtatttgtattcacacacacacccacacaactttacgtctctatctatatctatcattacatctatatctatatattaaaccatgatttcataccaatactcccaattttaacctgctatcactcatgca

SEQ ID NO: 43702 - DNA, 582 bp, Homo sapiens
aaaaaacagagttatatgacagcaatattccataaaggaatcaaaacacaaaaaggcaaaaaatgagcttgttcagataagcagggtgccacacccacagttcaaaaagaaaatcgccttcaaggggttaaacttattcccaagcttgagagccatgttctgctgaagtggagacccagggtggaccagaccaggggtgacgaggcagggaaacctaaggatttaactctgtcagcctaccatgttctcttgccccattctcacagtgtggaaatgcttccctccttcaatgccttggtttttgccaacagaaaattctcacaaggagttgttacaggagaggggtcctgatccagaccccaagagagggttcttggatctcacacaagaaaaaattcagagygagtccctaagctgaaagcaagttcatttaaaaagtagaggaataagggctgggcatggtggctcatgcctgtaatcccagcacttagggaggccgaggcagacaggtcacctgaggtcaggagttcaagaccagcctgactaacatctagtgaaactctgtctctactaaaaatacaa

SEQ ID NO: 43703 - DNA, 582 bp, Homo sapiens
aaaaaacagagttatatgacagcaatattccataaaggaatcaaaacacaaaaaggcaaaaaatgagcttgttcagataagcagggtgccacacccacagttcaaaaagaaaatcgccttcaaggggttaaacttattcccaagcttgagagccatgttctgctgaagtggagacccagggtggaccagaccaggggtgacgaggcagggaaacctaaggatttaactctgtcagcctaccatgttctcttgccccattctcacagtgtggaaatgcttccctccttcaatgccttggtttttgccaacagaaaattctcacaaggagttgttacaggagaggggtcctgatccagaccccaagagagggttcttggatctcacacaagaaaaaattcagagtgagtccctaagctgaaagcaagttyatttaaaaagtagaggaataagggctgggcatggtggctcatgcctgtaatcccagcacttagggaggccgaggcagacaggtcacctgaggtcaggagttcaagaccagcctgactaacatctagtgaaactctgtctctactaaaaatacaa

SEQ ID NO: 43704 - DNA, 2063 bp, Homo sapiens
aaggggtgacttgcctaggctgcccccacttgcagtgacccccactcccaacagccacctggcagtgtggcccaaaggaatctggaagtgaacatcagcagagattctctggatccaaatttgagtgagggctggcgggaacccagactagctggaggctgcagattgcatgggtctctccgtctgtttctcatcattctcctcctacggtttgcttgtcagtcctttgctcttgtttacctctatgtggataattcctcgattataaatcagagaacttggcactgagttctggattatctgtgatctttaactttcccagggcaaaagaaattaaaccagcaaatctctttgtttctcatggttcagcatccaaatcatggaagtgcgggtctgtgtagagtgagacagcctaagcccacctctgccctggcccccacactctaggtgagcagtcatgcatgcatgcattcatttattcactcaacaaatattcagtgagcacccatgtggcagcctctcttctagaaactggagatacagggttaaaaaaaggacactgttccttcttaccctgtttgcatcttagtatggatgacagtaagcaaacaaaccaacaaacatacatactagtgataaatgccttgagaaaggaagcaggttaagagatggcagtgaggggtgcactattttacacacagtggggtcaggaagacctctctgaagaggtgacatttgagcagagattggatgaagagagagtaagcaatgttcaatccagaaagaacatttcaagcagaaggaatagcaagtgcaaaggcctggaataggaacaagtgtgatgtgtttggggaacagtaaggaagccagagactggagtagagtgaaaaaaggggacaactgtgatacattaggtcagagcagtgggcaggggccagccatggaagtggtgactttgggttttgttctgagcttcacaggatgtccttggaggttttggaggagagtgatgcagcaaagatgaacattcagaggctatagagaggctcatggaacaacartgggccagcttgggttaaacactggcattcagacacatggcaatggtagctgcacctcatgggtggtgcttccagtgggaactgttgagagctacatgtttcgacagggtgaggctgggcctgggagctcactacctctaccaattagtgttaagcccagaaaaaggaaatgctgcagtttaaattgtagggttggaacctgtgagtcatataagccccagccaaatgggccatggtgggctctgggaagttactggtgcagggtctgaagcccccagctgggctgtttggccacccatgggggcttccagacacattcggaagaagcagactcaaatacagaccccacctttggggtctggctttatttttggctgactgtatactgtctggtcagtttccttcccagtgtcttttactttggaaaaggcaggccacctcacaggggagcagagagaaagggggaaacacatggatttggggctcaatcagccccacaacacaaccctcacctcatcacttcgctggcttttggaaaagctactgaacctcccagagctgccagccacatgtggctgttcacatttaaatcaatttaagtgaaataaaattttaaaattttgttcctcagtttcacttaccacatttcaagggctgaatagcaacatggggcttgtggctatctattggacgtgagatgtagaagatttcccttatggcaggaagctctgttgaacagtttcatttctttaaaaaggaagcaatccacgagaactgaacaagttaacacacacaaagcacaaggtgtttgcctgtctcactacaggtgctcagcaaacggtggtcactgtgattgatcatgtgaatctccatcctcgctctgctactgactagctatgtggcaagtcattcaacgtctctgagcctctgttttctgatatgtaaaatgggaataaaaattaccgcggagcacatttccacagcataacatgatcctttttt

SEQ ID NO: 43705 - DNA, 587 bp, Homo sapiens
atgggggcacaccactgccctgatcctgaaagtctacaatgccagggagcaggactctgataagtatgtaacatgatggctcaacaycctgaccctgtgttgccttctgatatattgcattgtctccctaacctctttaggcctctatttactcatccatcaaatggggctgatcagagtccccattctatagggttattgtggggtttgagtgagttaatacatacaaagggcttagtccagtatctgcacagagtaggcataatatcagaattgctggtgctctccttgtcattattattattttctaaacacttgcaagcatttttgagaggctgttctaggctggagatttgctaggaattgaggtcaagatctggcaccggcctctgtgtgctcaactcaccctccttaaccagctgtggtgttcctgcccctcttacgtcccctcggcagtcagaatggtagacattgaaagcagccagagatgtcctggaccacacttccctgtgacatggtcctcttccctttccagtttgaagaccgtccttcttgctagaaaaatagaaataagaatcaccaagtag

SEQ ID NO: 43706 - DNA, 563 bp, Homo sapiens
tgtgtgtgtctctgtctgcatgtgtgcctccctctccgtccctgactatcctcccttcctctctctccttttcccctccccgctctgtctcttctctctatctgcaccccatctctctctgtcctgaagtctgcattctcaacacagggaaccttccagtctgacccaggtctcagcaggagccagacaaaaggccttgagggaagggacagatggagtgtccccatgctaatctcctttaaccacccccagcagaccaaccctgccaagtaggtactgtggtacccatttcgctgatgaggaagttgaggctcaaacagcagttaagacgtgtgtccaargccttggggccacagtgtgcagggccaggatttttagctgcatctgatccagttgcctcagattgcgggctgagtccacctttcctgaggctcctcaggtgtcccaggcctctcctcactccctccaccccatccctggaggcaggaccagaggactcctttgaggagctgcatagcttgggagctgcgcatcaggagcatctgcagtgctgcaggaccatc

SEQ ID NO: 43707 - DNA, 996 bp, Homo sapiens
agaatctgtcttcgtggagcatatactctagtgggaagaggcagtaaaacaagaatcataaaggccaggtgcagtggctcatgcctgtaatcccagcactttgggaggccgaagcaggaggatcacttgagcccagaagttcgagaccagtctgggccacatagtgggaccccatctctacaaaaaaattaaaaaattagctgggcgtggtggcacatgcctgtagtcccagctactcaggaggctgaggcaggaggatcgcttgagcccaagaggtcaagattacagtgggraaaaaaaaaaaaaaagaacagttgaatgtggcactgtcatgccgttcaacctgtaatttgaaggtagaatggacagggtttgctgagagaccggatgtgggatgtgagagaaagagaagaatcaggggcaactccaaggactctggtctgggaagagagacaggaggaaggaactgccatccccgggccaggcaggctagaaaggcagggacggccaagagctcagttctggacgtgttttgtatgacgtgtcccatagttgatgtcctagctcagggtctggagtgaaccaaatagggagttaggggtgagggcctgtgtgggcgggtaccccctgcctcctagggagggccctgcccaggtgggacatgcttatctcaaggaaaggagcccaggctgaatgcccttgagggtcaaagcagccacccagttctcacagccccaaagtcccctggttgttgccacagagcaggtgtctgcgaaaccaaaacacgggcctgacagctggaggctccatcacccgcttccctgagtgttgtcccgttgccatcgaagtgctttgctgttcattctccctcaccttctccccgctgtggggaggtgaccagatgctgtcatcactcccattactcacaggtggagactgaggttcaagggcacgaaggggctcaccaacagttgcatggctcaaaagtggcagaag

SEQ ID NO: 43708 - DNA, 996 bp, Homo sapiens
agaatctgtcttcgtggagcatatactctagtgggaagaggcagtaaaacaagaatcataaaggccaggtgcagtggctcatgcctgtaatcccagcactttgggaggccgaagcaggaggatcacttgagcccagaagttcgagaccagtctgggccacatagtgggaccccatctctacaaaaaaattaaaaaattagctgggcgtggtggcacatgcctgtagtcccagctactcaggaggctgaggcaggaggatcgcttgagcccaagaggtcaagattacagtggggaaaaaaaaaaaaaaagaacagttgaatgtggcactgtcatgccgttcaacctgtaatttgaaggtagaatggacagggtttgctgagagaccggatgtgggatgtgagagaaagagaagaatcaggggcaactccaaggactctggtctgggaagagagacaggaggaaggaactgccatccccgggccaggcaggctagaaaggcagggacggccaagagctcagttctggacgtgttttgtatgacgtgtcccatagttgatgtcctagctcagggtctggagtgaaccaaatagggagttaggggtgagggcctgtgtgggcgggtaccccctgcctcctagggagggccctgcccaggtgggacatgcttatctcaaggaaaggagcccaggctgaatgcccttgagggtcaaagcagccacccagttctcacagccccaaagtcccctggttgttgccacagagcaggtgtctgcgaaaccaaaacacgggcctgacagctggaggctccatcacccgcttccctgagkgttgtcccgttgccatcgaagtgctttgctgttcattctccctcaccttctccccgctgtggggaggtgaccagatgctgtcatcactcccattactcacaggtggagactgaggttcaagggcacgaaggggctcaccaacagttgcatggctcaaaagtggcagaag

SEQ ID NO: 43709 - DNA, 528 bp, Homo sapiens
ggaacagtgattctgagtcttttaatagagtttaaaatttgcttagatatcttaggcatattttgttaaatccactcctagatacttttgttgctatggaaaaatgtgtcaccttttatttgggttcagggaaatttatgaattcatttggaatatagagattttgtgtttcttgttaaatttaatccaggtattttatattattattattattattattattattattattattattggcatcttttctttcatgctgttttccagctggttgttatttctaccaagaaagactaatgaatrcatataaattgtgtgcccaatgaacacagtacatgctaaaaatggtgtctcatatcaatagcaaaattattgatcatttaataaaagcccttgggatgactggggaacagcatggaaaaagagtaaacttaacctggttctcatgtcttataacaagataatgtccagatgaatcaagtatttaaaaaaaatttttttaaagaatcttaaaagctatagaagaaa

SEQ ID NO: 43710 - DNA, 528 bp, Homo sapiens
ggaacagtgattctgagtcttttaatagagtttaaaatttgcttagatatcttaggcatattttgttaaatccactcctagatacttttgttgctatggaaaaatgtgtcaccttttatttgggttcagggaaatttatgaattcatttggaatatagagattttgtgtttcttgttaaatttaatccaggtattttatattattattattattattattattattattattattattggcatcttttctttcatgctgttttccagctggttgttatttctaccaagaaagactaatgaatacatrtaaattgtgtgcccaatgaacacagtacatgctaaaaatggtgtctcatatcaatagcaaaattattgatcatttaataaaagcccttgggatgactggggaacagcatggaaaaagagtaaacttaacctggttctcatgtcttataacaagataatgtccagatgaatcaagtatttaaaaaaaatttttttaaagaatcttaaaagctatagaagaaa

SEQ ID NO: 43711 - DNA, 608 bp, Homo sapiens
gtttcactgtgttggccaggctggtctcgaactcctggcctaaaatgatctgcccacctcagcctcccaaagcgctgrgattacaagcaggagccaccatgcctggcctcagagatatattgttaatgcgcagacctgtgtgtattttatatatttatacagaaaaggggagtgtgtgtttatataaatgtgggcatcaggatagccattttctagaagaatgcacagaaaactattgaccacagtcaacgctcgggtggagcttaataaggaagttcatttttatcataaactcttttggacactttttttaaccatgtgcataattttgcttgaaatcttggtttgatactccagaatattgatctgggcaaagattttctgtgtaacatctcaaaaatacaggcaaaaaaaaagcaaaaatagacaaatgggattatatcaagctaaaaagcttctgtacagcaaaggaaacaattaacaaagtgaaggaacaagctatagaatggcagaaattatttccaaactatccatctagcaagagattaataactagaatatataaggagttcaaacaactcaatagtaaagaaaaaaaacaacaacaa

SEQ ID NO: 43712 - DNA, 570 bp, Homo sapiens
gagccactggatagtggctttccgcaagattcttttccccaacctcaggaattaccttggacttttacaactaatatttgtttgataaaatatactgtcttgatgttagctctgatataagatttttaccttccttccaaagagtactgctactgttttggggagaactccttacctctaagtcatccctgagtcacacttgaaaaccacaagactcccccagacatactttaaaacctctggacaagatcatctctaaggttgctctatctcttgaatcctatgactctgcacatcagagaagcatgagtgctaaaccccagggtccaacagttgacagtttatgctgtttacagcatgtgcagaaacaycctggtgcccccttgggggtactggaacatctggtaaccgtcataattctttccatcctattttcttccagtaagcagaattgtttcctcctgtgactcagtcactgttcagtcgtaaagaaagacactctctggtgtgggagactgacagacactgctattactgagaaattagccttttgtctttgtccagggtcta

SEQ ID NO: 43713 - DNA, 546 bp, Homo sapiens
aatgatgctgtctatatttccttatcatgtgtgctatttcagatatcgaatattgacacttttccatgtgactttcgaaaaaaaagtcagttatgttatttttttgtttgtttttgcattattttttaaagcagtacacctcagtggtttcaaatgcctgaacttctatgctatcttccttttcttttccccacattagcaaagttaaccaatgacatgggcataggcaactcactttcctccttgacccagattgttaagaaacccaaacatacttttatggaagtaaatcattgcaactcagcattacccagctattaatgttacagtataagagtaatgaaggtcaccrgctagggccatccttgtgtattgtgccattcttgaatgggagtaactctgctatccaaagactctcagcaccatgtcaaaccggctggcttctagtaatgctgaagaaggcctatgtctaagcacatgtggagatgagcactgaggtaagccctaaaagcaagtttttctgcctcttttgggaacatttctaca

SEQ ID NO: 43714 - DNA, 510 bp, Homo sapiens
agtgtctcacaaggcgacttttgactgcaaaataatttataatwgactttgattctagtaagatttttgtagagttgggattcctttgtgcctttaatattcattcccattgtgtacaaatatttttatatcaagaacctattaaagatctgctcaatgatcagatcgagccatttgaatatggtgtacccccatattgatgctttaggcattggaatagaaagaatatagaatgggaggcttcttttggattctcagtatttggttttgcgtggtcgaaatctcaaaatttttgatgtttttcttcgcatcacttgtaattacatatatggtgagtcacttctcggtagtcctatctgtatggtcactattatgtaagtaaatatgcaaaataaaagttcttatatcatgaagaagaattcttattaacatgatatattttgtacaacacggtaatacataactcagtatgttttacaaacattagaaaaaacagtttctccatgcata

SEQ ID NO: 43715 - DNA, 510 bp, Homo sapiens
agtgtctcacaaggcgacttttgactgcaaaataatttataattgactttgattctagtaagatttttgtagagttgggattcctttgtgcctttaatattcattcccattgtgtacaaatatttttatatcaagaacctattaawgatctgctcaatgatcagatcgagccatttgaatatggtgtacccccatattgatgctttaggcattggaatagaaagaatatagaatgggaggcttcttttggattctcagtatttggttttgcgtggtcgaaatctcaaaatttttgatgtttttcttcgcatcacttgtaattacatatatggtgagtcacttctcggtagtcctatctgtatggtcactattatgtaagtaaatatgcaaaataaaagttcttatatcatgaagaagaattcttattaacatgatatattttgtacaacacggtaatacataactcagtatgttttacaaacattagaaaaaacagtttctccatgcata

SEQ ID NO: 43716 - DNA, 559 bp, Homo sapiens
ttccagagtttcagctttcttctccctttcttggctttcttgtctccattgatggcatcatcctttgttttgaggaacacctcttggtcctttggatgcagaagtctccttgaagtgttctcttcatctcccatgcccgagcccccttcatcctccacgatgtcttctctgactctggaaagagcctttgcacctgggcgtctgcctcttttggatggcaagccagaccctttcttggtcactgtgattcccaccgtaaaatggtctgccccttgctggttgacagccacacatctgtagtaaccactrtcactgacttggacctttgggatggaaagagttccatttggcaacatgtatacatgtgatgtgttagccaaatcattaattatccttctgtttggaagaatccagctaaggtgggcttcgggtattgctaaagcattgcaaggcaatgtcaccgactcccctgggttcttgccaattgtcactgtgtctttctcggctggctgagtggagggagactgcacaagtaccctatataccatgcggtccattt

SEQ ID NO: 43717 - DNA, 554 bp, Homo sapiens
aaccaacaaattctgkttttcttttcttttttttttttgtaagtttgagtcaggattaccgttgcttacaaccaaagcttctaatgatatggtcattaatagaggatccatttttaaagagagtaaagggagcacaagaactcaatgccagtaatgttggaggctctgaataggttggataagggacagcctcaagatgtccatgtttgaatccctggaacctgtgaatgttaccttatatggcaaaagggactttgcagatgtgattaagttgaggatctggagaaggggtgattatcctggagtatatgagtcagcccagtgatctaaccacaggtgcccttatatgagggaggcagagggccatgttcctccagagaggggagaaggggatggtatgcagtcagctttgaaggtggtggaagggccagagactaggaatgcaaacagtgaaaggaacaaagctctggaattcagcaaaggcaggggattttccctgcagcttccggagggagcagagggagagtggccctgtccataccttggttctggcc

SEQ ID NO: 43718 - DNA, 554 bp, Homo sapiens
aaccaacaaattctggttttcttttcttttttttttttgtaagtttgagtcaggattaccgttgcttacaaccaaagcttctaatgatatggtcattaatagaggatccatttttaaagagagtaaagggagcacaagaactcaatgccagtaatgttggaggctctgaataggttggataagggacagcctcaagatgtccatgtttgaatccctggaacctgtgaatgytaccttatatggcaaaagggactttgcagatgtgattaagttgaggatctggagaaggggtgattatcctggagtatatgagtcagcccagtgatctaaccacaggtgcccttatatgagggaggcagagggccatgttcctccagagaggggagaaggggatggtatgcagtcagctttgaaggtggtggaagggccagagactaggaatgcaaacagtgaaaggaacaaagctctggaattcagcaaaggcaggggattttccctgcagcttccggagggagcagagggagagtggccctgtccataccttggttctggcc

SEQ ID NO: 43719 - DNA, 554 bp, Homo sapiens
aaccaacaaattctggttttcttttcttttttttttttgtaagtttgagtcaggattaccgttgcttacaaccaaagcttctaatgatatggtcattaatagaggatccatttttaaagagagtaaagggagcacaagaactcaatgccagtaatgttggaggctctgaataggttggataagggacagcctcaagatgtccatgtttgaatccctggaacctgtgaatgttaccttatatggcaaaagggactttgcagatgtgattaagttgaggatctrgagaaggggtgattatcctggagtatatgagtcagcccagtgatctaaccacaggtgcccttatatgagggaggcagagggccatgttcctccagagaggggagaaggggatggtatgcagtcagctttgaaggtggtggaagggccagagactaggaatgcaaacagtgaaaggaacaaagctctggaattcagcaaaggcaggggattttccctgcagcttccggagggagcagagggagagtggccctgtccataccttggttctggcc

SEQ ID NO: 43720 - DNA, 509 bp, Homo sapiens
gctgtggtttaagggtacttagtgcctgcccttgtgggattcaataaagtaatgcttattctgaaagaaaaaataatcacatttcccctaaacatttttattttcttattgggcccttgggcagaacaaggaactgcctctaagccaaggtctgggcttatctggctgcagggaggagtgacaggtagggaggggaggcctgcctggccctggcccccttaagccacacacagsccacggcgaagcttggctaaagcctggctttggccttgatgaatgcagcctggtataagaaaaggattttctatcatttgttggaagtcaaaggaatctgggtccatctgtggttgtctaaggaccctagagctcctgtaggaggacccgtaggagcccttataggattccggggctgcttcacttagcagcatttggtacaaaggaagagacccttagagaacctaaaaacagccaccaatttgggagtgcttggcatgtctcagggacatatg

SEQ ID NO: 43721 - DNA, 509 bp, Homo sapiens
gctgtggtttaagggtacttagtgcctgcccttgtgggattcaataaagtaatgcttattctgaaagaaaaaataatcacatttcccctaaacatttttattttcttattgggcccttgggcagaacaaggaactgcctctaagccaaggtctgggcttatctggctgcagggaggagtgacaggtagggaggggaggcctgcctggccctggcccccttaagccacacacagcccacrgcgaagcttggctaaagcctggctttggccttgatgaatgcagcctggtataagaaaaggattttctatcatttgttggaagtcaaaggaatctgggtccatctgtggttgtctaaggaccctagagctcctgtaggaggacccgtaggagcccttataggattccggggctgcttcacttagcagcatttggtacaaaggaagagacccttagagaacctaaaaacagccaccaatttgggagtgcttggcatgtctcagggacatatg

SEQ ID NO: 43722 - DNA, 509 bp, Homo sapiens
gctgtggtttaagggtacttagtgcctgcccttgtgggattcaataaagtaatgcttattctgaaagaaaaaataatcacatttcccctaaacatttttattttcttattgggcccttgggcagaacaaggaactgcctctaagccaaggtctgggcttatctggctgcagggaggagtgacaggtagggaggggaggcctgcctggccctggcccccttaagccacacacagcccacggcraagcttggctaaagcctggctttggccttgatgaatgcagcctggtataagaaaaggattttctatcatttgttggaagtcaaaggaatctgggtccatctgtggttgtctaaggaccctagagctcctgtaggaggacccgtaggagcccttataggattccggggctgcttcacttagcagcatttggtacaaaggaagagacccttagagaacctaaaaacagccaccaatttgggagtgcttggcatgtctcagggacatatg

SEQ ID NO: 43723 - DNA, 509 bp, Homo sapiens
gctgtggtttaagggtacttagtgcctgcccttgtgggattcaataaagtaatgcttattctgaaagaaaaaataatcacatttcccctaaacatttttattttcttattgggcccttgggcagaacaaggaactgcctctaagccaaggtctgggcttatctggctgcagggaggagtgacaggtagggaggggaggcctgcctggccctggcccccttaagccacacacagcccacggcgaagcttggctaaagcctggctttggccttgatgaatgcagcctggtataagaaaaggattttctatcatttgttggaagtmaaaggaatctgggtccatctgtggttgtctaaggaccctagagctcctgtaggaggacccgtaggagcccttataggattccggggctgcttcacttagcagcatttggtacaaaggaagagacccttagagaacctaaaaacagccaccaatttgggagtgcttggcatgtctcagggacatatg

SEQ ID NO: 43724 - DNA, 586 bp, Homo sapiens
ctcaggtcagggtgactttgacacaggtctacaggatcaggagaacaaaagtaacacacagttttgaaagatcttacttaaatttattttaagaatataaatcagcaagtcaagattttattgtattgttgaattttgaaaatgctctatttatcttccttgaatttattttgacttgctagcatatctttctctaaattttctgaaatatttcagactttaatttataactgttttcttttctatttcttttcccttcctagactttcttttattctgttatgctgtgaactgtttcatttcttagacatttttacatggccataaattttagttggcatagtaccagtgacaaaattatctatatcttgtatgccatttttttgtatagctatttaatatctactgtatctaacagctacccaagaagaggatgtataaataatatcaaagacagcaaaaacaagatttaatttatcctaaatctagtattaagatttctggttaaaacaataaattcatstagttttagccaaatctcagaatgactcagttcattaatttcagatacaacagaaaacaaaat

SEQ ID NO: 43725 - DNA, 555 bp, Homo sapiens
aataaaattagccaggcatggtggcgcatacctgtagtcccagctactcgggaggctgaggcaggatcatcacttgaacccaggaggcagaggttgcagtgagccgagatcatgccactgcaccccagacagcctgggtgacagagtgagattctgtctcaaaaaaaaaaaaaaaaaaagcaaaaagcattccctactgaggagaaagtgtaggaaaaggcaaagagatggggaaatgccaagagtatgacaaaagtctgtctgtgcagccagagaagagaacaggactcagagatgagaatggagaatgtggacagacattcagactcaaggaagagcmagggaggtggattgaccccttcgtattggagacccagtgagataatatcaaagttgcattccccacttcgatgacattctccttttaaacactcctccaaggcatctctttgagatggcttccccagcccgtcatctcctaggtagaagaggcaaacacatgggtcacttgccctgctcctcattccagggctttcaggggaagttcagtccacc

SEQ ID NO: 43726 - DNA, 579 bp, Homo sapiens
aatacctggtcattgaggaaacagagttcctaaattctattgaagtttttaatcatcccttttagaagcatggagagagggatacaaggagaaggctaagggggaataattaatgcaatattaataacaatattgttcctggagcaaagtaaatagtagttctattacatgatgcacartttgaatcatgcatgcagtattttgttttgtttagaaagaagtggttacaaactagagcagttccaggcgggagcaatgaatatgaaagcatctaaaatttatcttgtaggaataacagcagaagagaatggaaacatttagcttgcaaaggacaagagctagaagtggttggtggtagtgatgttaaggaaagcgtggtggttgtcttccagtgtgtggtgggctatttctactacagggcagaacttgggtcccggagtggaaatgaacagggagcacatttctgttgaaaataagagaattttttcccatctaacaaggttgtttaaaaatggctttcttttcatgtggtgggctcgccatcattgagagaattcaagaattgcagtacagagcaat

SEQ ID NO: 43727 - DNA, 578 bp, Homo sapiens
ggcacaaggcagggggcttggtggggggttcarctcattcaggcagccttcgggctgcccacagtgctgggagtggggactcctgggtttgctcaaagtttgcaaaaagatgagttggtgatggatccagcaggtgtggtgctgggggccggccccgggccccaagcagggccgatgaaacaggatggtgtggatgcagtcatgggggagagccagacacagagctcagggagaagacagacagacacgcagaaacactccagtccagagaggggcctttccggacccctctgctgctgaccagagcccggctgcctcccgtccacagccagccagttgctcgggcttccctagctccatacagaccatctcatctactctaccccatctcccatttggatctcatctgatcacctggttcacaccacccccaccccccatctaatcactcagcctgcgcccgtacccccccgaccccaacctcataaagacccaagcgggtcactctgtatgccctgttccccatacaggctaggcccggtcacacagtctactctgttcccacacagacctggtcc

SEQ ID NO: 43728 - DNA, 578 bp, Homo sapiens
ggcacaaggcagggggcttggtggggggttcagctcattcaggcagccttcgggctgcccacagtgctgggagtggggactcctgggtttgctcaaagtttgcaaaaagatgagttggtgatggatccagcaggtgtggtgctgggggccggccccgggccccaagcagggccgatgaaacaggatggtgtggatgcagtcatgggggagagccagacacagagctcagggagaagacagacagacacgcagaaacactccagtccagagaggggcctttcyggacccctctgctgctgaccagagcccggctgcctcccgtccacagccagccagttgctcgggcttccctagctccatacagaccatctcatctactctaccccatctcccatttggatctcatctgatcacctggttcacaccacccccaccccccatctaatcactcagcctgcgcccgtacccccccgaccccaacctcataaagacccaagcgggtcactctgtatgccctgttccccatacaggctaggcccggtcacacagtctactctgttcccacacagacctggtcc

SEQ ID NO: 43729 - DNA, 1839 bp, Homo sapiens
ttattggaagagggagatgctcagcaactgttttcttgatcttcaggaggttacataagaaggaagagaaactgtaattgaacataagaacttggcaacattgtataatattgcagaggccttggtggtaaaggtttgagattctgtcatctgagaatttttgagaagggaccaagacagctaacagactcaagtgattttatttatttatttatttatttatttttggagacggagtctctcrctgtcgcccaggttggaatgtagtggcatgatcccagctcactgcaacctctgcctcctggattcaagcaattctcctgcctcagcctcccaggtagctgggattacaggcacccgccaccatgcccaactaatttttgtatttttagttaaaacgggggttttaccgtgttagtcaggctgttctggaactcctgaggtcaagtgatccacccaccttggcctcccaaagtgctgggattacaggtgtgagcgaccacgcctggcccaggcttgagtgattagttcagcatggtatcagtaatcctttacactctttaaagttattgaggaccccaaagagcttttatttacttgtgttctatctactttaccgtattataaattaaaatagaatttgcaaaagcatttaaaaatgataaataacataagccctgtatatgttggtatcaataacatttttatgacaaataactattttccaaaacaaaatttaaaaacttactgagaagaggggcatttccacatttttgcaaatctaatgtctagtctaaaagaagattgctaaattctcatatctgcttttctgttcagtctgttacaatatgctgtttgggttgaagtatatgaagaaaatctggcctcatgcagatatgtagttgcaaaaggaaatactttatagaccacaagaaaggatattgaggaccctgaagggtctttataccacacctttgagaaccacagttttagcaaaccaaccatgcaaagtgcagtcctcagaccaacagaatcagcatctcagggtgcttgtatttagtgtaaaattttggccccattccaggcctgttaaaatctgcattttacatagtccaagggtgattcatatgtacattaaagtttgagaagtatgagctgggtcagtaatcccttaaggtctttttcagttccatgtacctttatttggttaattaaataaaaagtaggctatatagtataataccaaaatgttatttaaataaactattgttcagtcattcatgtaaacttttaagtagcattataagtaaccaatttgacttaaaaattatattattatagcatttatatgcaattttgcattttttctgcctttttggttgttgctttttaaaaattttctttattttattttatttttttttgagacggggtcttgctctgtcgcccaggctggagtgcagtggtgcgatcttggctccctgcaacctacgcctcctgggttcaagtgattctcccgcttcaacctcccaagtaactgggagggacaataggcatgggccaccacagccggctaacatgtattttctggtagagatgggggtttcaccatgttggccaggctggtctcaaactcctgacctctagcaatccaccagccccggcctcccaaagttctgggattacaggcgtgaacgaccacgccaggcctggttgttgctttttaaaaaggaaaaccggtaaatcaagctgtagaaaatgtggaataaaaaacttgaagagtaagtccattggaactgtgctagaatccttagtttctaaggatgccgcaggtggcat

SEQ ID NO: 43730 - DNA, 615 bp, Homo sapiens
tggatcttataacaagaagaataactgctttgaccacataccatgtaggccacactgagatttctaacctcttccaacttcagccctcggggcacatgccctttgagagggaggccccttgcctgactgaggcctgtcttccaagttaggctttcctgcctgaggacctgcctctataggtaattcacgtggagagcacctctagtgagagcccatcctctaggcacttgggtgttgcctcactttatggcctctcttggacaccctgccaaggacaggaagcaataaacctagtatctgcaagtggatggacagcgggtggtttagactgtcctagaaacaggaaaatgaggaggcagcagcctgattcatacagcttaagacgaagaggagcctagaaggagattsagaactgtggatgccttgaaaagggagggaaacaagttaagggcttacagctgtggtcaggaagtgggagggctttgggttgatggagatctgggagcttcacctgtagagctcttgaggctctctgacaatctgtctccaaaagtgagtctgggacagatagactgtactctccagttaggcttttattcctccctgttatgcccg

SEQ ID NO: 43731 - DNA, 493 bp, Homo sapiens
ggagaaacctgagtatttaaaaacaaaaaactaaaacccatactagcaagtcattaaaaaatcatttgcaggtggcttttgtaaacacacctggttgtgttgcatttctattactaaaatatggtagatggttaggtaatatagaggacatctcttcttaaaagcactagattcatcaacactgccagatttttgccatattaagyttaaactgttttcagcttgaacatcatggggcagggctggatagggggaagaacccaatacaggggcgggaaaaggtttttcagactcctgaattaaaatttcactttgcactgccaaagccaaagcatgggctagcagccttcactatttcatagattacataaacttgtagtctgatgctgtaaatatcctaccacctggacattaaaaaaaaaaaaggtcccaaaacactaacaaggaaatagtaattaaaacgaacaaacatttagtgagctttccagtttgc

SEQ ID NO: 43732 - DNA, 507 bp, Homo sapiens
atattgataatatcttttccagaatttcatagattgactgtctagactgcttcaaattccccaggtaattgcataatcatcttacttctgatcccctaaatagtctggaacagtatttcacaatctatagttatcatgcaaatcaaaatcactgagcttctgaaggaggacctctctcaaaggctgtgagtttcagagtctcaggaaaatacttgcatttcaatctcccacctcagaatgctcgggcgggaagctttatatattagctatttgggtagaggaaatcctggtaaatggcctgsctccagaacctgtacctcttcatttccccagctgcccacccatacagcagcaatgagtagttgatgagtggaagaggaactagactgttaactctattaaaatctcaacttcaaaaatcaacatttcaggaaaatgataaaaatgcaagaatagcatatggcattttaatttaaatgaccatcaacatcatgtaagcctcacatt

SEQ ID NO: 43733 - DNA, 575 bp, Homo sapiens
ttaaagtggtggaaatttctgtatcaaaattatagcaatttgctataatttttatacaaattgctttagcaatttrtttatgaaataattaaaattgtgtaataagggcatagaaatagatacctagatctgtgaaacaaaattcagacatatatccacatgtatgtagaaataaacatatggcagaactgacattgtagataagcaaatgaatttctttttttataagtttggcttgtacaaagtgttaggaagaaaatatagaaatttatatccctaccccatttcacaaccaatattctgtttcaatggattaaaacttaaatgtgaaaccaatttattaaggaaagattgaatgtgaatttcttcttgaacctaggcagagaatattttagctaaatagaaagtctgaactgaaaaactgaatataaaaatattgaattgattaaagttaagagctgttcagcaaaaggcatgataaatcaaaagccatatttgaaatatgcatatttgatgaataaatgtccaaaatataatttctacaaatttgaaaagattacttttaataacttcat

SEQ ID NO: 43734 - DNA, 582 bp, Homo sapiens
aatatgtatcttaattcaccagatctacaaaatagtgttgaaatctctcacctggaaactttcattttaaaagctgctgactaatctctttgtcttctggattgaaaaatcctgaaacaaaaaatcaattttcttactggcattaaggcaaaatgcatgcagaaggatctgtctctggcgtaacatgccctgttgaggatgaaagtggttggtgtgtgttgggacctggggatttttaagagaaacttggaaatggggttctaatgtttccaggtcagttagcacactggatacaaattaagggatgctaaatagtgtggaggttccaaatcatactgtacatctgggctgtgatcacttgcacagaacagtagcagcaaaaatgctcgttctctgtgacactgggtctcgccgatgcccgccttcctgatttggggacacaggcgctcctctgtgtccttggatttaggagcagagcccactgtgcggccttcactgcaggagagttgyttcctgtctgttgagttgaatgtgacacaaaaggaaccttaggaagaactggggagatccagctcagcttgg

SEQ ID NO: 43735 - DNA, 518 bp, Homo sapiens
aaaaatagcaaatgtatttgtttatcacctaagatggagctgcatgtgataaaacccacaaaaaaatgacatatgattttttttctcgcccatataagtagagtgtaaaaataagcctcatgtggattacacggaaaatgtactaagatatttaaggtcctgagcctttcagctcaccaagggcaagacctttttctgttagtcaagaatgactgctagtgtgccagcccttacaccggaactcccagccttccccctttgacactcatcccaggaagaccaatggggaaatgagaaaggggcaaagtgtgcatcagaaggatttttcaagtttmattcaatatttacaggtgtagacccttgactctaactcagcatatcatcacctaacagcaatgggagcttgaaaacaaagagttaattctgtgcacccatgagccaaactaaagttaagggaagaagaaagaaggcaaagttaacaatgagataggcaataatattttctggtgcaccatcta

SEQ ID NO: 43736 - DNA, 588 bp, Homo sapiens
gatcctggatcccaaagagggcaaaaatgacaaggctttttggtgtctggcatggacttaattagtggtcacttttagattctaaatctaagttttacttcagcagcatcaattaccttttgtctagtagtccctcaggtaacagtattggatcagataatttctttatgtttggtgttttagggaatttctgaagtttggttatctgagaaaaggcaggatatcaggatgatgaatagcacagactttagggtcaggctgcttgagtttgaattcgagcgtggcattttctagctgtgtgaccttgggcaggttgccaacctctctgtgattcagaaatggcatctrccttatttggctgttgtgagcattgaatgagttgctgtgttttgaaaattcataacagtgcctgacatgtgtttgctattattatttccaaacacaagactcttttgtgaagggcacagtattatctagactgctcagggtttgcctgcttctgtcatatagaatttttgaaaggagcttgtttcttaactagctttatggcaataacactgtctgtaaccactggaaccagctgatgca

SEQ ID NO: 43737 - DNA, 588 bp, Homo sapiens
gatcctggatcccaaagagggcaaaaatgacaaggctttttggtgtctggcatggacttaattagtggtcacttttagattctaaatctaagttttacttcagcagcatcaattaccttttgtctagtagtccctcaggtaacagtattggatcagataatttctttatgtttggtgttttagggaatttctgaagtttggttatctgagaaaaggcaggatatcaggatgatgaatagcacagactttagggtcaggctgcttgagtttgaattcgagcgtggcattttctagctgtgtgaccttgggcaggttgccaacctctctgtgattcagaaatggcatctgccttatttggctgttgtgagcattgaatgagttgctgtgttttgaaaattcataacagtgcctgacatgtgtttgctattattatttccaaacacaagactcttttgtgaaggrcacagtattatctagactgctcagggtttgcctgcttctgtcatatagaatttttgaaaggagcttgtttcttaactagctttatggcaataacactgtctgtaaccactggaaccagctgatgca

SEQ ID NO: 43738 - DNA, 588 bp, Homo sapiens
gatcctggatcccaaagagggcaaaaatgacaaggctttttggtgtctggcatggacttaattagtggtcacttttagattctaaatctaagttttacttcagcagcatcaattaccttttgtctagtagtccctcaggtaacagtattggatcagataatttctttatgtttggtgttttagggaatttctgaagtttggttatctgagaaaaggcaggatatcaggatgatgaatagcacagactttagggtcaggctgcttgagtttgaattcgagcgtggcattttctagctgtgtgaccttgggcaggttgccaacctctctgtgattcagaaatggcatctgccttatttggctgttgtgagcattgaatgagttgctgtgttttgaaaattcataacagtgcctgacatgtgtttgctattattatttccaaacacaagactcttttgtgaagggcacagtattatctagactgctcagggtttgcctgcttctgtcatatagaatttttgaarggagcttgtttcttaactagctttatggcaataacactgtctgtaaccactggaaccagctgatgca

SEQ ID NO: 43739 - DNA, 589 bp, Homo sapiens
ttcaaaataaactcgtcaccaaaatgatttttttttcactataaaatgaaggcaggatgaaccatatttataactaattggcaatgaacagctgtgtgagaaaggcctgtgagttgcttctaaatgctttattactaatatcaactcygtttctacagaccagaacttctgactcacagtaccactgaagttactcagccaagaacgaatacaccaggtaaactagttgtgaaatccttttttaaaaacacagatcagccaggctcggtggctcacacctgtaatcccagcactttaggaggctgaggcgggcagatcacaaggtcaggagatcaagaccatcctggctaacatggtgaaaccccatgtctactaaaatacaaaaaaattagccgggcctggtggcgggcacctgtagtcccagctactcgggaggctgaggcaggagaatggcatgaacccaggaggcggagcttgcagtgagccgagatcacgccattgtactccagcctgggcaacagagcaagactctctcagaaaaaaaaaaaaaaaaaagcacagatcaatactttttaagcttttaaaagtt

SEQ ID NO: 43740 - DNA, 555 bp, Homo sapiens
cacaagcttgctctgaaaattttagtcatcttaaaaaaaaaagtaaatcttgatatgacttcatagctctaaatcactcctggaatgcacmatctattagtagcaaaagacttctcatatattctaattgtatgagggtggagttagcattctccaccagctgcagctttctttctgttttgctttcgaggtagggtcttactctgtcccccaggctggagtgcagtggtgtgatcatagctcaatacagtctcgaagtcccaggctcaagcaattctcctgcatcagtctcccgagtagcatagtgtgccactatacccagctaattttttgtagagatggggtctctctatgctgcccaggctggcactggcaactttcttctttttagaataattaccgtacttaggatccaatattcttcccatctcacttgttttagaatgtgtgtcctcaggtttggattttaatcatgtcccgagggatcttgccttctaaataaaggaacactcactgggtaccaatgttcttttctgtctcctctggtgaatcaga

SEQ ID NO: 43741 - DNA, 555 bp, Homo sapiens
cacaagcttgctctgaaaattttagtcatcttaaaaaaaaaagtaaatcttgatatgacttcatagctctaaatcactcctggaatgcacaatctattagtagcaaaagacttctcatatattstaattgtatgagggtggagttagcattctccaccagctgcagctttctttctgttttgctttcgaggtagggtcttactctgtcccccaggctggagtgcagtggtgtgatcatagctcaatacagtctcgaagtcccaggctcaagcaattctcctgcatcagtctcccgagtagcatagtgtgccactatacccagctaattttttgtagagatggggtctctctatgctgcccaggctggcactggcaactttcttctttttagaataattaccgtacttaggatccaatattcttcccatctcacttgttttagaatgtgtgtcctcaggtttggattttaatcatgtcccgagggatcttgccttctaaataaaggaacactcactgggtaccaatgttcttttctgtctcctctggtgaatcaga

SEQ ID NO: 43742 - DNA, 555 bp, Homo sapiens
cacaagcttgctctgaaaattttagtcatcttaaaaaaaaaagtaaatcttgatatgacttcatagctctaaatcactcctggaatgcacaatctattagtagcaaaagacttctcatatattctaattgtatgagggtggagttagcattctccaccagctgcagctttctttctgttttgctttcgaggtagggtcttactctgtcccccaggctggagtgcagtggtgtgatcatagctcaatacagtctcgaagtcccaggctcaagcaattctcctgcatcagtctcccgagtagcatagtgtgccactatacccagctaattttttgtagagatggggtctctctatgctgcccaggctggcactggcaactttcttctttttagaataattaccgtacttaggatccaatattcttcccatctcacttgttttagaatgtgtgtcctcaggtttggattttaatcatgtcccragggatcttgccttctaaataaaggaacactcactgggtaccaatgttcttttctgtctcctctggtgaatcaga

SEQ ID NO: 43743 - DNA, 1439 bp, Homo sapiens
tgtgatcctttggatttctgtggtataggttatgatgtctcctctttcatttctggtttcatttatttgagtcttctctttttttttcttagtctagccaaaattttattgattttgtttatttttttccagaaaaccaacttgtagttttgttgatcttttctgtttttaagtttctatttcattgattgctgctctaatctttgtttccttccatctagtaactttgggtttattggagaggttgtagattttattaagggtttgaagtagctgattcatacaaatataaaaactaaagaaatatcaatgaaggtcatagtttatactaattcattggaggtgggaaagcaaaatgcaaaacatattgaccatcagtgctagatacaaggattcaacttgctgctggaaatagcatgtgtgctattgcmcacatgcattttgtgaaagtatacatggtttggaaccctacagaactaggcataagaaatctttccaaataattcccctaagcagaaagaagagggtcaaatatttcaattccaaaataaaagttttcattttcaataaaatcacataatttgagaaaagtagagcatagcaatatataatcttatttggaaaaaattactgtgagcttatgacattaaaataacttgtattttccatctctgacattagtaaatatagttaagcagcagcactggttttacttaccatcaactctcctgtttatccctagttcccagattttggactttaatagtattctctactactctttactacttatggtagggaagctgattccatgttttggggcagtaaaacaaaacaaattggaatgagtctgggacatcttgttattgctagaaaacaaatatgtttttaagaatgttggagactgtactaaaacactaaaaaatcaatggagtcaagttaaagagattcctgctgatcaaatttcgatgatttgatgagagagagggagaaagtgagcatgaattatggttgactgaaagaagttgggtctagtctgaaaggtcattagcttaaaatgatgcttgagagagaaaagttaatataagccatataaaaagatagttataatttaaagaagggtaaatgaaatagggtatgtttaatggggatttaatatatgtgggtattttatttcctatgaaaacaaatttatattccttactatatagtcgctatagtgggtagtacaatagacacaaaaataggaagtcaagtttcccttaaaacttagtatcataatgaaatcagaaagactaacaacatggggccccacataataactggataggaatgaagactagcattttattggtaccagtgaccacgctgtagaaagaaatcaatggtgatctcaaaaatgatagttcgggcacgtgttctgaggaggaggactgaaa

SEQ ID NO: 43744 - DNA, 561 bp, Homo sapiens
atttgggtggggacacagccaaagaatatccggatttaacctgataagacctgataagtcatggcatcaaattctcacttttgcagatgtgtgaaggataaactgaaggcccttaaatcaagagttgcaaggtttttgctgttattcagaaatggggagtatctgtgttgaagtatgacctgaagaggaagatgggatacaaatggcattccagagatggaagatgctgaacttggtgaccaattagatgtggctagattactggcttcagtggctgggttgctaarggaccgtttttcctttataggaaatgcaggaggaaaaggaagtctggttggaatgggggacagggggcagaaagaataagttgattttcaatatgccaagcttgatgcagggatataatggctaggatctagagacatcattcattcaataataatttattacatttctactatgtgctggtcactgtccaccaggacatttaatgggcccagcaaaatgttctagagtggcaatatggatgaaggaatcactatgtaaatgaaaattgatgcc

SEQ ID NO: 43745 - DNA, 561 bp, Homo sapiens
atttgggtggggacacagccaaagaatatccggatttaacctgataagacctgataagtcatggcatcaaattctcacttttgcagatgtgtgaaggataaactgaaggcccttaaatcaagagttgcaaggtttttgctgttattcagaaatggggagtatctgtgttgaagtatgacctgaagaggaagatgggatacaaatggcattccagagatggaagatgctgaacttggtgaccaattagatgtggctagattactggcttcagtggctgggttgctaaaggaccgtttttcctttataggaaatgcaggaggaaaaggaagtctggttggaatgggggacaggrggcagaaagaataagttgattttcaatatgccaagcttgatgcagggatataatggctaggatctagagacatcattcattcaataataatttattacatttctactatgtgctggtcactgtccaccaggacatttaatgggcccagcaaaatgttctagagtggcaatatggatgaaggaatcactatgtaaatgaaaattgatgcc

SEQ ID NO: 43746 - DNA, 561 bp, Homo sapiens
atttgggtggggacacagccaaagaatatccggatttaacctgataagacctgataagtcatggcatcaaattctcacttttgcagatgtgtgaaggataaactgaaggcccttaaatcaagagttgcaaggtttttgctgttattcagaaatggggagtatctgtgttgaagtatgacctgaagaggaagatgggatacaaatggcattccagagatggaagatgctgaacttggtgaccaattagatgtggctagattactggcttcagtggctgggttgctaaaggaccgtttttcctttataggaaatgcaggaggaaaaggaagtctggttggaatgggggacagggggcagaaagaataagttgattttcaatatgccaagcttgatgcagggatataatggctaggatctagagacatcattcattcaataataatttattacatttctactatgtgctggtcactgtccacyaggacatttaatgggcccagcaaaatgttctagagtggcaatatggatgaaggaatcactatgtaaatgaaaattgatgcc

SEQ ID NO: 43747 - DNA, 891 bp, Homo sapiens
tttggaaacacttatatttaaagatttaattcctctagaataaatattccatgacatgaagaatatttataaattgttttgtttaaaacaggtagctttgtgtttaaaactaataaataataacaattgtttgctatcataaacctacagaaaagatatggtgaattgaacatagaatgggaagacaagaggttacttagcctctctgaaattagtttccattataaaaagagggaattgagttaaatcatgggttttcaaatggagcgtatggaatcctgaggctcgccatggttctttggagatttacagaaatgagagatggatatacccaaacagtgagggttaagcttcatataaattctgtcaattactggcttattacatgcatcaagatcacgcctatggttttatttgagggggtagaagtgcttgggaataaaacataaaaactctgaattagataatcttcatgtccttattatagagttgttcagaataagaatgagaatgcaaaacagaacaaacaaaggaaagtaggaaaaaacttycacattaatcttcatagaaatagtataaggtaggtgtcatttttgggagcaggcccctcaaaatctggccataaactggccccaaaactggccataaataaaatctctgcagcactgtaacatgttcataatggccctaacacccatgctggaaggttgtgggtttaccagaatgaaggcaaggaacacttagcccgcccagggcagaaaaccgcttaaaggcattcttaagtcacaaacaatagcatgagctatctgtgccttaaggataagttcctgctgcagttaactagcccatcctattcctttaattcaacccatccctttgtttcccatgagg

SEQ ID NO: 43748 - DNA, 594 bp, Homo sapiens
tttttttttaccactgaacaatccaaatgtctccctgaacaaattcttcatttaaaaaagaagaaaggaaaaggatatcactttaaatggtgragtgtgtggtaggtgaggaggcacttacatgataagtggagagtttagttaattagattattatagcattggactgtagccactgtgtccggcaactctaattagacatcaatgctgcaataagcctattttgaaaattaagatataattggaaaaacacgtgatagtcatcttctcacccttagaatttcaaagcacatatggacctgaactacctgaaattctgaaaaagcttcataaggagatgatgtgccactggctctcatttataggcatgtctgttatctgggccaaaactgtatatcctgcttgcattttttattacccaaaaagttgctcgatgatttcacctaaatcgctaatgattaagtggggcacatatataaactatccagcattgctccatttcttttcccttagtgaacacggaaagatcaaactcattttaatcattaaacataatatgagaaggttaaaaatgctcttttaaatagttctatg

SEQ ID NO: 43749 - DNA, 594 bp, Homo sapiens
tttttttttaccactgaacaatccaaatgtctccctgaacaaattcttcatttaaaaaagaagaaaggaaaaggatatcactttaaatggtgawgtgtgtggtaggtgaggaggcacttacatgataagtggagagtttagttaattagattattatagcattggactgtagccactgtgtccggcaactctaattagacatcaatgctgcaataagcctattttgaaaattaagatataattggaaaaacacgtgatagtcatcttctcacccttagaatttcaaagcacatatggacctgaactacctgaaattctgaaaaagcttcataaggagatgatgtgccactggctctcatttataggcatgtctgttatctgggccaaaactgtatatcctgcttgcattttttattacccaaaaagttgctcgatgatttcacctaaatcgctaatgattaagtggggcacatatataaactatccagcattgctccatttcttttcccttagtgaacacggaaagatcaaactcattttaatcattaaacataatatgagaaggttaaaaatgctcttttaaatagttctatg

SEQ ID NO: 43750 - DNA, 645 bp, Homo sapiens
gcatttagaatatttgcataaaagatgatttgattttggctgctccagaaactactggaagaaggaaagagttactagaattcagataaaccacaatgactcgttacttctctttgttactattgggaatcagagacatagattttgttgatatyagtcattcaaatgaaataagcatgaatgtgcatacattggctttgttttccaaggagctaacttttggatacaatagcaatttaatgaaaattccttagagaataacatgatacttcaaaccagactattttagaaacaagaataatgttgaattaattaattgattcataaaatggttatcttcaatgaatattggagtcattcccaaatgtgaaagcttattaatatctaatgcttgtagcagttttattttgtagaaatatgtcaatattgataagtgatgatactttttattgaggtttacatattataccttattgccgtgagtggatgaaaaaactttcagaaggctgaactagagaacacaagaaacttgggcaataattacaccacgtgagtctgagaaataatgaatactgtctactaggattcaccaaacatatatccaagctgatcaatttaggacagttccactgaggagatgtgaag

SEQ ID NO: 43751 - DNA, 645 bp, Homo sapiens
gcatttagaatatttgcataaaagatgatttgattttggctgctccagaaactactggaagaaggaaagagttactagaattcagataaaccacaatgactcgttacttctctttgttactattgggaatcagagacatagattttgttgatattagtcattcaaatgaaataagcatgaatgtgcatacattggctttgttttccaaggagctaacttttggatacaatagcaatttaatgaaaattccttagagaataacatgatacttcaaaccagactattttagaaacaagaataatgttgaattmattaattgattcataaaatggttatcttcaatgaatattggagtcattcccaaatgtgaaagcttattaatatctaatgcttgtagcagttttattttgtagaaatatgtcaatattgataagtgatgatactttttattgaggtttacatattataccttattgccgtgagtggatgaaaaaactttcagaaggctgaactagagaacacaagaaacttgggcaataattacaccacgtgagtctgagaaataatgaatactgtctactaggattcaccaaacatatatccaagctgatcaatttaggacagttccactgaggagatgtgaag

SEQ ID NO: 43752 - DNA, 645 bp, Homo sapiens
gcatttagaatatttgcataaaagatgatttgattttggctgctccagaaactactggaagaaggaaagagttactagaattcagataaaccacaatgactcgttacttctctttgttactattgggaatcagagacatagattttgttgatattagtcattcaaatgaaataagcatgaatgtgcatacattggctttgttttccaaggagctaacttttggatacaatagcaatttaatgaaaattccttagagaataacatgatacttcaaaccagactattttagaaacaagaataatgttgaattaattaattgattcataaaatggttatcttcaatgaatattggagtcattcccaaatgtgaaagcttattaatatctaatgcttgtagcagttttattttgtagaaatatgtcaatattgwtaagtgatgatactttttattgaggtttacatattataccttattgccgtgagtggatgaaaaaactttcagaaggctgaactagagaacacaagaaacttgggcaataattacaccacgtgagtctgagaaataatgaatactgtctactaggattcaccaaacatatatccaagctgatcaatttaggacagttccactgaggagatgtgaag

SEQ ID NO: 43753 - DNA, 600 bp, Homo sapiens
attctgtttcgaatatagccacagaaataaaggatggacaaaactctgggacaggtaattttgcaatacacatttaatgtcatgttcacttagggtagaagagaacttctcttccctgaataaatcgcagggggctcattgaatctgcacattctgattcagcaggcctgagatcctgcttttgtaataagttctcgggtgacgctgatgytgctggtccttggccatgatctgagtagtaagattatattcttccccacagtgaaattggcaagaacgattggagagcagtgcaagatataacaggttaagggacagcatattcttgctttaattctacagcatgtttccatcgtaaagggaaggagaacgagattaactaataaaaattataggcgtcagatcatattgttaaaaccacatggaagaagtgattggaataacccataaacaatgtagaaacagaactaaggagacgtctgatgtggtaattattttactcaaggaagaaggattgagaggcaagaaggagggaaaagaagatgttatttatgtaattttggggtttctgctgcagaaacctgatgggactcacttcag

SEQ ID NO: 43754 - DNA, 1880 bp, Homo sapiens
gaattattaactgtatagtctatgaaatatactgtatgtattgattattttgtttgaaatcccattcaggatacaagtgacaagaaagattctgttttgaacatagccacagaaataaaagatgaacaaaaatctgggacaggtaattttgcaatacayatttaatgtcatgttctctcaagatagaggagaacttcccttccccgaataaatcagcagggggctcattgaagctgctctttctgattcagcgggcctgagattctgcatttgtaataagttctggagtgatggtgattctgctgatttttggccatgatctgagtagtaagattatagacttccctacattgaaattgggaagaagaaccactggagagcagttcaagacataacaggctgaggggacagcataattgtgctttaattctacagcatgtttccatcaagaggggaaggagaacaagatgaagtactagaaattataggcgccagatcacattgctaaaaccagagggaggaagtgatcgtaataagccataaacactatagaaggagaagtaacgagaccgctgatgtagtaatcattttcctcagggaagagggattgtgaggcaggaagaagggaaaagaagttatttatttaattttagggtttgtactgaggaaacctgagggaactcacgtcagatgcatttagaatgtttgcataaaggaagatttgattttggctgctccaggaactactggaaggaggatagagtgccagaattgtgataaaccacagtcacctgttacccctctttgttattattgggcatcagagatatatgttttgttgttatcagttagtcaaatgagataaatataaatatgcatacactggctttgttgttcagagagctaacttttggataaaatagcaatttaatgaaaatactttagagaataaaatgatccttcaaaccagacttattttagaaacaaaaataatgttaaattctttaattgactcctaaaatatttatttttaatgaatattggagtgatttccaaatgaacaaccttactcatatctaatgcttgtagcaactttattgcatgtaagtatatcaaatttgataattttttatacattttgattaggtttgtatattataccttgttcccatgagtgactgacaaaactttctgaaggttaaaccagaaaatacaaaagtgtaggctcattattataccacatgggtatgaaaaataatgaataccatataataggattcaccaaacagatatccaagctgaccaattcgggacacttccactgaggagctttgtacattcatctaaagtgttattgtcattgtgcacctgctcaattgtcaggcaagtcaaagagcatgatgaatatttgtagtataatggtttaaacccttctgatgtcttgtatgaaagacatgcgcaatcctggctcacttcaactttcaccttctgggttcaagtgattctcctgtctcagtctcctgagtagctgagtttacaggtgtgcaccaccaacctggtaatttttgtatttttactagagacaggctttcaccatgttggccaggttggtctcaaactcctgacctcaagggatccacccacctcggcctcacaaagtgctgggattacaggcatgacccaccgagccctgcctacatgatttttttaaatttttttagctttttaaaaataaagatagaatgtttctgtgttgcccaaggtggtctgaaatgcctggacttctcaagtgatacttctgcctgaaccttttgagtagctgagattataggaacaagtcactgtgctcttttatgtttttaatattttataagttccta

SEQ ID NO: 43755 - DNA, 571 bp, Homo sapiens
cgggatggccaagcccagaaactgttaattgggtgaaataaagcatatttgattttcttatgacaaaaaaggccttttgccattgtctacagatgatactttaaatctttattttatgactaaargtgaattccagagcaacattaaatgttgtccctttaaatttttaatcatttacataacgattaccataatattcaatttaaacataaaatgtaattgaaagtatgagattaatatgtggacatgaaatcatataatattccatggaaaaaacagaatgtataaggcaaagaggtttaaagtaacatcaaaactaacgctcactatacaaattctatgaaatcctcataattacactgtgaagcaggtgttgttagagccacataatctcaaacaaattatttattatctaaaattacatagatattaaaaggttaggccatatatgaatttaggattctctcaaaaattttttctctttctcctacatcaaacttccctaaattatagaaaagtcacaatgttaccaaacatattcacaaaacacatataatcttgaatccaaatt

SEQ ID NO: 43756 - DNA, 571 bp, Homo sapiens
cgggatggccaagcccagaaactgttaattgggtgaaataaagcatatttgattttcttatgacaaaaaaggccttttgccattgtctacagatgatactttaaatctttattttatgactaaaggtgaattccagagcaacattaaatgttgtccctttaaatttttaatcatttacataacgattaccataatattcaatttaaacataaaatgtaattgaaagtatgagattaatatgtggacatgaaatcatataatattccatggaaaaaayagaatgtataaggcaaagaggtttaaagtaacatcaaaactaacgctcactatacaaattctatgaaatcctcataattacactgtgaagcaggtgttgttagagccacataatctcaaacaaattatttattatctaaaattacatagatattaaaaggttaggccatatatgaatttaggattctctcaaaaattttttctctttctcctacatcaaacttccctaaattatagaaaagtcacaatgttaccaaacatattcacaaaacacatataatcttgaatccaaatt

SEQ ID NO: 43757 - DNA, 1922 bp, Homo sapiens
tttatttaaatcctacttaaattaatatataccctgcttagtcatcttaagctattgaagtatttccattctataccatatgttttcttgttgtgcacctaaagccattgtttacaaactgctgaagtrtctcaggataccacagcaaacatacgaaggacgggcaggatattttcaatgtcttagagaagcaacagcaacatttgtcagactaaggttgcaacattagaatgctgcattccttccagttatatttatttttaaatcaggctggagcagaaaacaaggccaggttgaatagggcctgggagacctcacttagtggtttgaactttattctaaattaaatggaaagcttaactaacattttaagcaggaaaagtgccacaggaattatattccagacatcataatcttgagggtatttctccacaaatatgaatttttgtgttttttgaaagaaatatatggaagattctatctcttgacctacaaataaaaactattggaaataatcctttaattgtatacactgtatttagaagttctgcaaaacactacatttcaaactcattagatgagttcaaccatagtagggtttgactcagaagtaatataaactgtaataatttgggtgacacacatgccatttatgtccaattataatgtagtacagtctcattgatgtacatcatttaaaatatatcaacttctcatattttaaaaaatgcttagcacaatgaccaaaagaaatttcatcagtatctttataaaatgggataatgaataatttttaaatatacttttgtcctaactaaatttcctgcaataacacagtcatatttataatttaaaaagtctttcattaaattattttacatttatatttatcaggctctttaaattaaaaaattgggctgggcacagtggatcacacctgtaatcccagcaatttgagaggctgaggctgatagattgcttgagtctaggagtttgagaccagtctggggaatatagtgagaccctgtctctaccaaaaaaagagaaaatgttaaagtttaaccaggcatggcggtgcatacttctagtctctgttactgtgaaggcttaagcaggaagatcacttctgccagggaggtagaggctgcagtgagctgtgatcacgccactgcactccagccagggtgacagaacaagactacatatatatatataaaaagaacaaatacatcaatataccaaaaatataatgcaaataacaaactatgataaagtttgtgagaaatacgacatactaattgttgcaacaaaaatgacttcataatataaataaatcttgaaaaataaattcaaatgcttaattgcactaaacatcaagaaatgcagattgaaacatatttttgtatatgaaataaggaaagattgaaaaaatttttttttctggaaatagatttaaaaagcaccttcgatattatcattaggagttcggcttttttggtaagttatttagcagcataaataaattctttttcaagtgttcctctttgtgccggattttcttcttttatgaactgtgaaaaattgagaatgaccataatgtcaaaaaataccatttagaaagaatgggaacaaccattctgtccccaaatactgactgagaaattactgattatcacaaaaaggaacataatatagcctgcgacgatcatgttttacaagaatatctaaggacatttttatatttactgtacatgaaaaagagagacctggattacagtatgaccccattttactatgtttgtctgcatttatttaacatgcaaatttcattaatctcttactttgttcggggctcaatgatgagaattgggaatacagcagtaaacaatacaatgccttccttcaaagatcacatggacaca

SEQ ID NO: 43758 - DNA, 1922 bp, Homo sapiens
tttatttaaatcctacttaaattaatatataccctgcttagtcatcttaagctattgaagtatttccattctataccatatgttttcttgttgtgcacctaaagccattgtttacaaactgctgaagtatctcaggataccacagcaaacatacgaaggacgggcaggatattttcaatgtcttagagaagcaacagcaacatttgtcagactaaggttgcaacattagaatgctgcattccttccagttatatttatttttaaatcaggctggagcagaaaacaaggccaggttgaatagggcctgggagacctcacttagtggtttgaactttattctaaattaaatggaaagcttaactaacattttaagcaggaaaagtgccacaggaattatattccagacatcataatcttgagggtatttctccacaaatatgaatttttgtgttttttgaaagaaatatatggaagattctatctcttgacctacaaataaaaactattggaaataatcctttaattgtatacactgtatttagaagttctgcaaaacactacatttcaaactcattagatgagttcaaccatagtagggtttgactcagaagtaatataaactgtaataatttgggtgacacacatgccatttatgtccaattataatgtagtacagtctcattgatgtacatcatttaaaatatatcaacttctcatattttaaaaaatgcttagcacaatgaccaaaagaaatttcatcagtatctttataaaatgggataatgaataatttttaaatatacttttgtcctaactaaatttcctgcaataacacagtcatatttataatttaaaaagtctttcattaaattattttacatttatatttatcaggctctttaaattaaaaaattgggctgggcacagtggatcacacctgtaatcccagcaatttgagaggctgaggctgatagattgcttgagtctaggagtttgagaccagtctggggaatatagtgagaccctgtctctaccaaaaaaagagaaaatgttaaagtttaaccaggcatggcggtgcatacttctagtctctgttactgtgaaggcttaagcaggaagatcacttctgccagggaggtagaggctgcagtgagctgtgatcacgccactgcactccagccagggtgacagaacaagactacatatatatatataaaaagaacaaatacatcaatataccaaaaatataatgcaaataacaaactatgataaagtttgtgagaaatacgacatactaattgttgcaacaaaaatgacttcataatataaataaatcttgaaaaataaattcaaatgcttaattgcactaaacatcaagaaatgcagattgaaacatatttttgtatatgaaataaggaaagattgaaaaaatttttttttctggaaatagatttaaaaagcaccttcgatattatyattaggagttcggcttttttggtaagttatttagcagcataaataaattctttttcaagtgttcctctttgtgccggattttcttcttttatgaactgtgaaaaattgagaatgaccataatgtcaaaaaataccatttagaaagaatgggaacaaccattctgtccccaaatactgactgagaaattactgattatcacaaaaaggaacataatatagcctgcgacgatcatgttttacaagaatatctaaggacatttttatatttactgtacatgaaaaagagagacctggattacagtatgaccccattttactatgtttgtctgcatttatttaacatgcaaatttcattaatctcttactttgttcggggctcaatgatgagaattgggaatacagcagtaaacaatacaatgccttccttcaaagatcacatggacaca

SEQ ID NO: 43759 - DNA, 1922 bp, Homo sapiens
tttatttaaatcctacttaaattaatatataccctgcttagtcatcttaagctattgaagtatttccattctataccatatgttttcttgttgtgcacctaaagccattgtttacaaactgctgaagtatctcaggataccacagcaaacatacgaaggacgggcaggatattttcaatgtcttagagaagcaacagcaacatttgtcagactaaggttgcaacattagaatgctgcattccttccagttatatttatttttaaatcaggctggagcagaaaacaaggccaggttgaatagggcctgggagacctcacttagtggtttgaactttattctaaattaaatggaaagcttaactaacattttaagcaggaaaagtgccacaggaattatattccagacatcataatcttgagggtatttctccacaaatatgaatttttgtgttttttgaaagaaatatatggaagattctatctcttgacctacaaataaaaactattggaaataatcctttaattgtatacactgtatttagaagttctgcaaaacactacatttcaaactcattagatgagttcaaccatagtagggtttgactcagaagtaatataaactgtaataatttgggtgacacacatgccatttatgtccaattataatgtagtacagtctcattgatgtacatcatttaaaatatatcaacttctcatattttaaaaaatgcttagcacaatgaccaaaagaaatttcatcagtatctttataaaatgggataatgaataatttttaaatatacttttgtcctaactaaatttcctgcaataacacagtcatatttataatttaaaaagtctttcattaaattattttacatttatatttatcaggctctttaaattaaaaaattgggctgggcacagtggatcacacctgtaatcccagcaatttgagaggctgaggctgatagattgcttgagtctaggagtttgagaccagtctggggaatatagtgagaccctgtctctaccaaaaaaagagaaaatgttaaagtttaaccaggcatggcggtgcatacttctagtctctgttactgtgaaggcttaagcaggaagatcacttctgccagggaggtagaggctgcagtgagctgtgatcacgccactgcactccagccagggtgacagaacaagactacatatatatatataaaaagaacaaatacatcaatataccaaaaatataatgcaaataacaaactatgataaagtttgtgagaaatacgacatactaattgttgcaacaaaaatgacttcataatataaataaatcttgaaaaataaattcaaatgcttaattgcactaaacatcaagaaatgcagattgaaacatatttttgtatatgaaataaggaaagattgaaaaaatttttttttctggaaatagatttaaaaagcaccttcgatattatcattaggagttcggcttttttggtaagttatttagcagcataaataaattctttttcaagtgttcctctttgtgccggattttcttcttttatgaactgtgaaaaattgagaatgaccataatgtcaaaaaataccatttagaaagaatgggaacaaccattctgtccccaaatactgactgagaaattactgattatcacaaaaaggaacataatatagcctgcgacgatcatgttttacaagaatatctaaggacatttttatatttactgtacatgaaaaagagagacctggattacagtatgaccccattttactatgtttgyctgcatttatttaacatgcaaatttcattaatctcttactttgttcggggctcaatgatgagaattgggaatacagcagtaaacaatacaatgccttccttcaaagatcacatggacaca

SEQ ID NO: 43760 - DNA, 1776 bp, Homo sapiens
tgcataattgatctactcatcttctcttatggagcgtgctagtactcttctatttctatttccacatttctttgttcttagataaaccaaaccatctttctacatttgttatgtacccctgaattcaaaatgaaacccaaaacattcttcgctccaactaaccatcaaaacttaaatgtatgtggcttttaggtcacccaatttttttctactacaaagagaatcttttcccacttttcgtatttttccagataaatctsatgacactgttcctgatgtttcatggtccttaattatggcagctcttcagtagctgcaatgtgtccatctctgaaatcaaacagtatgttgaaagaataaccgttaacagggaaccagtccccttgggctgtgtatacataatatggccctgccataagatggtctgctctaggggcattctcacgggtagaatgtctttctgtaagcacgatggggattctcagggatagtccacacaacccagatatttgggctttttaaataaaaatgtacattgaaaaattcagaaaacattacatataactgtgaactctatttataagtaattcatacctagagcaaatagtggggaaaactccaggctccaaacgcatatcattaatgctcaccgaaatattagcaaacagtgtttcccatcatcctttttgttaaggagtcagcaacctttttatccagttctacctgtttatcctgcttattctcagccatgtttcaagacataaatccaacttgcaccattagcacctttcctgttattcctggaccacctgttggtcttattatccctggcctaggtgagtctaggaacagctgttaccagtcccttgggtccacttctatttctgcaagaagagcaattccctgacaacacagaagataacttcttctctctacaccaccctaactttaaaaatgattccagctgctagtttggccccacctgggcctggttgtgttgcagagagattggactcttcttctggggcttctttctgaactcattaaatcacacaaaggtgacagattttctgtgaagcgctggacttgctacaatattcctctacctttcagcacttctcagcattcattcatcaactcaagaggaccagaaatcttgggccttatgagcaggtggcctctaaaaaacagagattttgaggggccaaaggggtttgaaagctttgctcccatcttctgggctcggagttgtcatggatttaattagtcctccctgtttcctccttcagctcctttctctcctgggtgatgaccctttgtagtagaatgcctccactggtgccattctatacaaagggttgtttggggaccttgcagaaacttcggcagtattccctggactctgaaatatgggagaagtcagaagcattaaaatctgctctcaggaactttgctttccactgagtgaaatgaagtgctacttttgctttctatggagctgcctattaccttacatgaaggtcttgtattcttggttttttgtttgttttctctggacacgctgtgtagttacacatatttatggggtacaatttgatgttttgatacatacatgttgtataatgatcaaatcaagatatttagtgtatccattacctcaggcatttattatttctttgtggtgagaacattctcgggttttaaacattctagggggatgtcatgagtactttgaaactattacaaaagctgtggatcttcttccaaacactgcga

SEQ ID NO: 43761 - DNA, 627 bp, Homo sapiens
tgtaccaagaagtgaaattcctgaattttatgcatacttttaagtatactcttataggtctatatgatttatatacttattttgctgtttttattgycaaaattttctccatagtgagtgtaccaatttagcaattttatactatcagatatataaatcttaaacacaagcccccaatctgtgcccatctgtacacttccttataaagtccagttttagccaagagttctgctaagccagtttagcaaaaacccctacacccttgatatctgagcactcttttctttttttttttattattatactttaagttttagggtacatgtgcacaacgtgcaggtttgttacatatgtatacatgtgccatgttggtgtgctgcacccattaacttatcatttagcattaggcatatctcctaatgctatccctccccctccccctacaacagtccccggtgtgtgatgttcccccttcctgtgtccatgtgttctcattgttcaattcccacctatgagtgagaacatgcggtgtttggttttctgtccttgcgatagtttgctcagaatgatggtttccagcttcatccatgtccccacaaaggacatgagctcgtccttttttatggc

SEQ ID NO: 43762 - DNA, 614 bp, Homo sapiens
tggmttgcctattgctgtcccctggaccagacagcaaagccaatgagtgcaaaggagttaacactttttgtgcaaattttgaccagtgcaagccagaatatataagtgtctgacatataaattcttccttcctccataccacggacaaactgttccaggagccctctcctggggacattccacatgactgagcaactagttctgtgactcctcaggctgtttgtcttggtaatacaccaaatcccaaatcccatttgcttataattgttttccctccttccctcacacatagagccctgggattgcccccactaaagcctgagaatgttaactttgcttcagtctctgatttccaagagacattgtctaaactttttttttcttattggttttccacaaggcttaaagcaaagaaatgcaaacatagaattttaatcaggagaaattttgtttagtttaacaatatgactaatgcaattttcacagacttctgaatgaaatctgagcaacacgtaactatataaccataatgtaacattttcctgctgtcttaattaaaaattaataaaactgactatattccttttttaattaatcatcaccagaatttacaa

SEQ ID NO: 43763 - DNA, 559 bp, Homo sapiens
agtctctctctgtcatccagactggagtgcagtggggcaatctcggctcactgcaacctccgcctcccgggttcatgccaatctctggcctcagcctcctgagtagctgggactacaggcccccgcgaccacgcctggctaattttttgtatttttagtagagatggggtttcaccatgttatccaggatggtcttgatctcctgacctcgtgatctgcctgcctcagcctcccaaaagtgctrggattacaggcgtgagccactgtgcccaactctctgttacttcttaaaccttttataattatactattccaggggttctggtgacctcaggctctgatcaaaaacttggttgagcattagaaatggtggaccttcagtgaaaaagaaatgggtttggatataatatatttaaatacataagttttctactctgtcattattttgcttattccagagtgaaagatggaatgctcggaagcaatggtttttgtctcccctggaagaactatgaatgaagtgatagttctgatgtgatataatcatttcatatcacat

SEQ ID NO: 43764 - DNA, 572 bp, Homo sapiens
tgttacaaacagtatggaaaactgtttggtatatattattctcataaagttagacaacctaccttataatccagtaattccaatccttatttattcacggcccccaaatgaaaacatacgttsgactaaaaactcatacaagcatatgctccttataataatctccacctgggagcaactcatatatccttcagcaggaaaaatggttaaataaatagtatggtatatttgtacaataaaatactacataacaataaagaggaacaggttcctgatacactctctgaagcacagaaatattacattgagaaaatcatgatctttatgtgaagtgtaagaacactaaatctagggcctggtgcagtgacacacctgtagtcccagcactttgggaggctgaggtgggaggatttcttaaggccaggagtttgaggttacaggaagccatgattgcgccgctgaagtccagcctgggcaacagagtgagacactttcttaaaaaaaaaaaaaaaaaaaaaaaaaaacagtacatctaatctgtgatagcaaaaataagcaaatagttgtacctg

SEQ ID NO: 43765 - DNA, 572 bp, Homo sapiens
tgttacaaacagtatggaaaactgtttggtatatattattctcataaagttagacaacctaccttataatccagtaattccaatccttatttattcacggcccccaaatgaaaacatacgttcgamtaaaaactcatacaagcatatgctccttataataatctccacctgggagcaactcatatatccttcagcaggaaaaatggttaaataaatagtatggtatatttgtacaataaaatactacataacaataaagaggaacaggttcctgatacactctctgaagcacagaaatattacattgagaaaatcatgatctttatgtgaagtgtaagaacactaaatctagggcctggtgcagtgacacacctgtagtcccagcactttgggaggctgaggtgggaggatttcttaaggccaggagtttgaggttacaggaagccatgattgcgccgctgaagtccagcctgggcaacagagtgagacactttcttaaaaaaaaaaaaaaaaaaaaaaaaaaacagtacatctaatctgtgatagcaaaaataagcaaatagttgtacctg

SEQ ID NO: 43766 - DNA, 528 bp, Homo sapiens
caattttgtagatgttttcttgtagacatacacaatattttctctagactatgtaccagggtgatattggcccttacgtggaaaagtatgtcctgatacagagtcatgagggtttggaattggttgaaagatgaatgagggaaggattactgaggaaaattatcagtgagggaatgagaagaaacaaagaactcatcaaatctcttgctagtacaaaagcaaagttgctgtttactgtcatgagggaacatacgagagaagaagacatttgtacagaaaaacaagagctttgtttacacaaactttgagaggcttgatagccatccaaatggaatggtttataagaaaaggraattggctacgagaatagacttcaggaaaaagtttgggctacaattattaaatagttatctgaatgatatcaatgtataggtaaaagtttagtcatggcactgatgacatcacctagcataccagagtccaagtgaagaaactttgttcaccctgaaatgagctgcctaagtgaaa

SEQ ID NO: 43767 - DNA, 579 bp, Homo sapiens
tagagtgcagtggcgcgatctcggctcactgcaacttctgcctcccgtcttcaagtgattctcctgcctcagcctcccaattagctgggactataggtgcgtgccaccacacccagctaattttttgtatttttagtagagatggggtttcaccttgttagccaggatggtctcgatctcctgacctcatggtccacctgcctcggcctcccacagggctgggattacaggcgtgagccactgcgcccagcccagattttactttttgttcttctgtttatctccctgcaactggagcttatctgtggttccctattggatccccaatgccaggaccacagctggcactcagtaaaaatgartggagcaaatgaagaagtgacagaaagttgaatctgcctgagaaggagatataagacaaaaatcctaaaaagctgaaaagatacaaacagtgacatcatctgaaaacaaaagagtaccctggactcgatctcaggttgtgaaccatgactagcgcaggaaagaacaggagagaggatgggatggaggtgtcccagcacaaactcaacattctgggga

SEQ ID NO: 43768 - DNA, 579 bp, Homo sapiens
cagactggggtctccccgccctgggccaggccctgcaccagatatggccccaggagagggggtgccgctaaccctgtttccctgatgagggatatgaaggctcagagaggttgaaccactagccttgaggtcacacagctataaggggcagggctggggctccccaccccagatgcctcactgagctctccagccccacccccatcccacccctcaccctggccctcaagaggccacagtgactccctggcgcttgatgggagccaggcgcgyccctccttcccccatggctggacattccaatgaagctgaagccaccagctttgaagtgagagctaaacccggattagggcggctccaggctggcctctccttcccagccccattgccaggcccacgctcaccaaccacgtcaggccagagtcctggcggcacaaaggggtctggggcctagaggaggcaggacctgccccgcacaacacagtccctctcatagtctgttaagaagcctcgggggcccccacgacctgctactagcctgaaaccccacgtcacgcgggtgccagcacagaagctccc

SEQ ID NO: 43769 - DNA, 580 bp, Homo sapiens
agtgatcctcctgcctcggcctcccaaagttctgggactataggtgtaagccactgcatccagcccatttttattgattctttactccagctttatttttatttattttgattttttttgtttaaacttacagagttgaatgattgcttcttttggtttcaatcttttttgtttgatattaaaacaactaaagccatgaattttcctctaatgggtgctttgaccatattacacaggttttgatctatagttttcattgtaattaatgtctaaatagtctgtaactctaaacttgattttcccttagacccaagagctatttagaagagtgctttccactttccaagtacttggttttggggttatccttttgtgttaacttcttgttttgttgtattatgtttacaaaaagtaacctaaaaattcctatgtagggtgttaactaacattttaaatgagattttcttagagatcaatttttataaatgttcyataagtatctgaaaataatgtggaataaaatatatctattcaaatcctccaaataattatttatatatccttagctgtcaaattttca

SEQ ID NO: 43770 - DNA, 494 bp, Homo sapiens
taggtttcttggagagaatcgcctgtggacgtgggacattcactgyagcaccgagctaacgtgattctaataacaacttgtaaagctatttaacatggagaaccttgccaatacatattccaaaatgtcacggcgcctggttataacgggcaggctgtttcccagatttagagagttgagtcatctctgcctgcttatatgtaacaaggtctgtgcaaggtgtttggcggccggttattatatggatgctaacctttcaaccctatattggcattaaagacatgtcatcttgttttcaggcgtactgcaagagccttttcccagaaggtcagatttttttttcacctggccccaggcccgtctcatgccaccaatagaaataggctctcgacaccttcatatacatcacaacttttttttttttctgaatcattcacctgcactggtttataggtcctggcagttaggagcatttgggtctttttgttgggtca

SEQ ID NO: 43771 - DNA, 647 bp, Homo sapiens
tcaaatttgatgaaatggttaagattataatgttttataatttgtttatttgaaaatrtacattttaaatgtttgctagagagctctaatatcctcaagaatacctacaatgtaaacactgttctatgcatagactaaatccttagcaatagacagaaggaactgagtgctctttgagtgagggaatgggcttgaccagtgtttgaagatttaaaaatgaatatgaagacatgttgtgacactagggtatgattatatttttatatttaagtagaatctgattatcatcagaaaaactctaattttaaaatccatagctggcaatatccatgaattcagcccaggtcatcaaatgctgaaagcacatgggtcagattgactgtctccattttttcttgcttacttcaaagctatgaagaaatccaaagcccttgctgatactcttccatgatatattccttttaaatgcttgaaaagttttcccttcctacaggaatcccccaaacacagctgtccttacactgagcccctattcaaattttggttcctctttctaacattggtcgtcagtcaattttgctggtctataccaactgcagatctagagccaatgcttatagaacttttctgagaattcttttaatttc

SEQ ID NO: 43772 - DNA, 478 bp, Homo sapiens
cgcaggctggagtgcagtggcatggtctcagctcactgcatcctctgcctcccgagttcaagcaattctccctgcctcagcctctggagtagctgggattacaggcacctgccaccacacccagctaatttttgtatttttagtaaacacggggtttcaccctgttggccaggctgatcttgaactcctgacctcagctcccacctcggcctcccaaagtgctgagattactggcatgagccactgcatctgacctcagttattattttcaatgaaatgtttcaacctctagcaacatggtgtaacaaaaattccaaccaacatacctgctacactacaacaatatcttggatatttgaagaagyataatataaagaaagaaacgaagcatagaaataaaaaagaaatataaagaaagaaagaaagaaagaaagaaagaaagaaagaaagaaagaaagaaagaaagaacgaacagaaa

SEQ ID NO: 43773 - DNA, 478 bp, Homo sapiens
cgcaggctggagtgcagtggcatggtctcagctcactgcatcctctgcctcccgagttcaagcaattctccctgcctcagcctctggagtagctgggattacaggcacctgccaccacacccagctaatttttgtatttttagtaaacacggggtttcaccctgttggccaggctgatcttgaactcctgacctcagctcccacctcggcctcccaaagtgctgagattactggcatgagccactgcatctgacctcagttattattttcaatgaaatgtttcaacctctagcaacatggtgtaacaaaaattccaaccaacatacctgctacactacaacaatatcttggatatttgaagaagcataatataaagaaagaaacgaagcatagaaataaaaaagaaatataaagaaagaaagaaagaaagaaagaaagaaagaaagaaagaaagaaagaaagaaagaamgaacagaaa

SEQ ID NO: 43774 - DNA, 539 bp, Homo sapiens
tttaattgaaatacagtaaatattatayacaaaggacctgacttttatgaaaaaggctacttaacacagaatgtctcatgtagtaattaactatttcaaataaattctccctctgaaacaaagaattccagttcttcagaacacatacaagaaagaacatctatgtctccttccagtgttttcttttcaaaatatatcttctgaagtctacagaccaccatatacaaatgtgtacagagaaaatgagcaagtggattctgaaatatattcaaatgcatttgataaaacgaaactgacacatgaaatgcataattctcagactattcttctcaatataatttcagctattaaataatagattagatcactcagagacagagatacaagctaatgttggatgaggaggtcattcaattttacaaccagtgcatattagcaaatttaatttggaaagtcataatgataattctttgacaggtacaaaaagctcttgcaaatttaacatatttgtctcacccttagaactgatatttataaaa

SEQ ID NO: 43775 - DNA, 560 bp, Homo sapiens
tacaactgtatttcaaaaacatctaaggttcttcaaagatgttatggtgattccaaaagcattcagtttgaattacaataatttttrtttatgtatttatatgtatttatttatttatttattttgagatggagtctcactctgtcacctaggctggagtgcagtggcatgatctcggctcactgcaacttctgcttcccaggttcaagtgattcccctgactcagcctctcgagtacctgggattacaggcacccaccaccatgccctgccaatttttgcatttttagtagagacagggtttcgccatgttggccaggctggtttcgaattcctgacctcaggtgatccacctgcctcagcctccaaaagtgctgggattacaggcgtgagccactgcgcccagcctatatttttaaatatctttcaaacgtagtaaaataacacaccgaaatggaatatacaccagattagcacatacggtgctaatttttgctgccagatgatttagtttttggtgcagaccttgattggtagctactcctaccattttatttatct

SEQ ID NO: 43776 - DNA, 560 bp, Homo sapiens
tacaactgtatttcaaaaacatctaaggttcttcaaagatgttatggtgattccaaaagcattcagtttgaattacaataatttttatttatgtatttatatgtatttatttatttatttattttgagatggagtctcactctgtcacctaggctggagtgcagtggcatgatctcggctcactgcaacttctgcttcccaggttcaagtgattcccctgactcagcctctcgagtacctgggattacaggcacccaccaccatgccctgccaatttttgcatttttagtagagacagggtttcgccatgttggccaggctggtttcraattcctgacctcaggtgatccacctgcctcagcctccaaaagtgctgggattacaggcgtgagccactgcgcccagcctatatttttaaatatctttcaaacgtagtaaaataacacaccgaaatggaatatacaccagattagcacatacggtgctaatttttgctgccagatgatttagtttttggtgcagaccttgattggtagctactcctaccattttatttatct

SEQ ID NO: 43777 - DNA, 584 bp, Homo sapiens
attttagatctgtggtcaagtaagctcctccatttcataagttcaaaagcaagaaaaatatcagggaattaatacaaattctactaaaacttttagagtactctgttttagaggggctctatgattgctaatatttaaagctatatattgtgaagttctaaaacgtaagatgaattacaacatttccctaacccacttatcacattttcagggcatgttacrtttcagaggggcatatatttggttcttataatttgtttactttgattgtttcattataaaagaaatacaagtttgtgttaataaatgaatgataaagtaaaagacaaaagtcttcatcctcttgccctgtcctcaccttaatccccagaggttacgattgttagcaacttggtaactatccttctagatcttttctatgtatagatacatacaaatgcttgagcattgatgtaatgtatattataaaaagaagctttctatttcaaatggatccagtggatacaacacaatttacttacccattcggttatttaacattttcaatgttttctcccatttgatttcagagctgaaggggaaaa

SEQ ID NO: 43778 - DNA, 584 bp, Homo sapiens
attttagatctgtggtcaagtaagctcctccatttcataagttcaaaagcaagaaaaatatcagggaattaatacaaattctactaaaacttttagagtactctgttttagaggggctctatgattgctaatatttaaagctatatattgtgaagttctaaaacgtaagatgaattacaacatttccctaacccacttatcacattttcagggcatgttacatttcagaggggcatatatttggttcttataatttgtttactttgattgtttcattataaaagaaatacaagtttgtgttaataaatgaatgataaagtaaaagacaaaagtcttcatcctcttgccctgtcctcaccttaatccccagaggttacgattgttagcaacttggtawctatccttctagatcttttctatgtatagatacatacaaatgcttgagcattgatgtaatgtatattataaaaagaagctttctatttcaaatggatccagtggatacaacacaatttacttacccattcggttatttaacattttcaatgttttctcccatttgatttcagagctgaaggggaaaa

SEQ ID NO: 43779 - DNA, 1641 bp, Homo sapiens
gggttaactcttttcagatatttcccagtctgaaatctgtttacttctagctgcaactatagcagcacaaataacaactgaaactgctattgtggtggcacctgtgtagagacaacatttggcagtatagctaaagagaatccattctccagggtaataggcatcagcatttagaacaaagcacattgaacttttcaactagaattaggggaatgcacgggataaagtctctgtatagtattttaggtttatactttgaacagttgtagacagaagattgatacttctttacattttgtataaccttcctaatgaaagtaaataatagttaattccccagaaggtcccatgatgaacacaagtgagcaatgcagaacgtggatgaggagggaggagattctactagaccagaatattaatgttgggtggacctgagtgtttgcctattgcctactgaggcctaagagttatgtcagtatgaattaggtatgactgacagtaacagaggaactaaaaagcccctcgtagtttaataatatggaagtttatttctcttttcaaaaagttgatggaggtagatatttgagagataatatggctaatagggtctatctctactgagtccctgaagacctgtactccttccagctcactgctcctccattttttgggtgaggcccgtatcctcatgaaaaaagatagagttccagtgactgaaaccacatttccagcagcaggaaagcaatttctcattgctttcgtagtgtgaaagcagcattgagtagttgcaacaaagacctcaaatattcgctatctcatcttttacagaaaaagtttgccaactcatgctctggaattgagaatatggtttcacaaattttgaattaatccatttttttgtaactgtcaggtttctagtttgaaaaaaatgatttctataaattagtattacatttggatgcatcaaaaaataagatttaatactattttgtatattattactcggataagaggaagaaaggatggggagtgagacttaaaataatacagatttatttcttaaaaaattccgaagtaaattgtggcaaaatattagcacctgttaaatattggtgatggggcatgtggaagtctgttatttctgtatttcttcggtatgtttaaaacttctataattaaataatttaaaaaagtttaaaagagagatgattatggttcctttaaaaacaaaaaaagaactgtagttaagtttcaaggccattccagtttggatgtccagaggaagctccttacagaatggtgtgtggagaaggttgactcccattggagtgtgatatatatatatatatatatgtattttattatactttaagttctagggtacgtgtgcacaacatgcagatttgctacatatgtatacatgtgcctggagtgtgatattttttgtgattgaacctccagaatcrtatcagcagttcctgagacttcacatctgtaaaatgtgtgctacacattttacacctctgcttgtgtactacaaaaagagcacctgcatacaaaaccagaaaagaaggcaaatgtctcctagaaaagtaacagactgtgttagaattagtacatttctgagatgggaaggtttga

SEQ ID NO: 43780 - DNA, 1957 bp, Homo sapiens
cctctccacatatgcttcctggtcacttagtttgggctcaagactgagagatcctggcaagagtccggagagaatgaacacctctgtctgctacagcccatagacacacacaccattctgccttccgaacagcccaggtaagcaattccttgggaggtgcaaactgtcccactggtagcaacaactaaaatgggagagggccccacccataacagtgtccccacctctgctcaccaccctggcttctccctatgctctgttgatttgaagcgaggggctttgctccctcctgaggggtcattcarcagcgcagctccaaggtccagtcacagcccagtgagtgagtcccgggctccctgggactaccctttgaaacctgcctttcataagttcctaaaactttttgcccacaatggtctggctgttcactcctcaggcacgatttcccagacactggagcctgttaatccacagggaatccccttcccaatgggagtggtctgctgtggagaaattctgggaaacagcaaatagtccaaagaaaaacatcccattgtaacatgcaattgtcaatgagcatgaccagcagttccctgaagtcagatatgatgttcctttcctggaaagaaaatgggagaaatattttatccccagactatatttcctggattcacaaagtacattcctctcactggagcatgtgtgtgcaggagctaatttatcttgcgctcctagtccttcatggtagggcagggcatttcaccacttgtcaattttgatccccacactggtaatttgaaacctattcctgaaaactatgcaaatgcaacccagagacaggcactgccatcaatcaccctgaagcatagagcagatgctcagaagtgatgttgtcatgatgttgtcaagatgttgtctcacatagaaattttcaaaacaagtcttcttgttcaaattaaaacatcaagcacatagatgggttaagccctttgctcatctcaggccctctcagtgtggctgccttggcccactcgggctgctacaacaaaaggctatagactggtactgcataggcaacagagaggtatttctcacagttctggagggtggaagcccaagatcaaggcaccgtcatattgggtgtctgctgaggtcccacttcctgcttcagagatggttctgcccacatgacctaatcaccttccaaagaccccacctcctaataccatcatctaacgtgtgaggatttcaacagaggaatttgggggagacataaacattcagactgtagcagtagcaaaaacaaattgtatcagatgctagaggagctccaaaagtgaactctgttacaaaccaagggactcaattcacccagtttcaaccaaagtggaagcttttccactgtgaatgattggccagaagtgggaagtgaaaatgggggtagggtggggagctgggagtgaaggaaaatgtagcaccaaggccaggaggcaggaagggtccacagaagcctgtggacaaaatttgaagagacaccaatcagctcagatatggtttcttctgcacccatggtccaatgcacaggtgcatgggagaagggttttgtataaccagagttgtaattgtgtaaagtaaaaaagtgaggctgggtgctgtggctcacgtctgtaatcccagcactttgggaggctgagggggatggatcaggagttcaggagatcaagactatcctggataacacggtgaaactccatctctactaaaaatacaaaaaattagccgggcgtagtggtgggcgcctgtagtcccagctactcaggaggctgaggcaggagaatggcatgaacccaggaggtggagcttgcagttagccgagatcgtgccactgcactccaacctgggctacagagagactccgtctgaaaaaaaaaaaaaagtgagatggggcagggacttg

SEQ ID NO: 43781 - DNA, 1957 bp, Homo sapiens
cctctccacatatgcttcctggtcacttagtttgggctcaagactgagagatcctggcaagagtccggagagaatgaacacctctgtctgctacagcccatagacacacacaccattctgccttccgaacagcccaggtaagcaattccttgggaggtgcaaactgtcccactggtagcaacaactaaaatgggagagggccccacccataacagtgtccccacctctgctcaccaccctggcttctccctatgctctgttgatttgaagcgaggggctttgctccctcctgaggggtcattcagcagcgcagctccaaggtccagtcacagcccagtgagtgagtcccgggctccctgggactaccctttgaaacctgcctttcataagttcctaaaactttttgcccacaatggtctggctgttcactcctcaggcacgatttcccagacactggagcctgttaatccacagggaatccccttcccaatgggagtggtctgctgtggagaaattctgggaaacagcaaatagtccaaagaaaaacatcccattgtaacatgcaattgtcaatgagcatgaccagcagttccctgaagtcagatatgatgttcctttcctggaaagaaaatgggagaaatattttatccccagactatatttcctggattcacaaagtacattcctctcactggagcatgtgtgtgcaggagctaatttatcttgcgctcctagtccttcatggtagggcagggcatttcaccacttgtcaattttgatccccacactggtaatttgaaacctattcctgaaaactatgcaaatgcaacccagagacaggcactgccatcaatcaccctgaagcatagagcagatgctcagaagtgatgttgtcatgatgttgtcaagatgttgtctcacatagaaattttcaaaacaagtcttcttgttcaaattaaaacatcaagcacatagatgggttaagccctttgctcatctcaggccctctcagtgtggctgccttggcccactcgggctgctacaacaaaaggctatagactggtactgcataggcaacagagaggtatttctcacagttctggagggtggaagcccaagatcaaggcaccgtcatattgggtgtctgctgaggtcccacttcctgcttcagagatggttctgcccacatgacctaatcaccttccaaagaccccacctcctaataccatcatctaacgtgtgaggatttcaacagaggaatttgggggagacataaacattcagactgtagcagtagcaaaaacaaattgtatcagatgctagaggagctccaaaagtgaactctgttacaaaccaagggactcaattcacccagtttcaaccaaagtggaagcttttccactgtgaatgattggccagaagtgggaagtgaaaatgggggtagggtggggagctgggagtgaaggaaaatgtagcaccaaggccaggaggcagraagggtccacagaagcctgtggacaaaatttgaagagacaccaatcagctcagatatggtttcttctgcacccatggtccaatgcacaggtgcatgggagaagggttttgtataaccagagttgtaattgtgtaaagtaaaaaagtgaggctgggtgctgtggctcacgtctgtaatcccagcactttgggaggctgagggggatggatcaggagttcaggagatcaagactatcctggataacacggtgaaactccatctctactaaaaatacaaaaaattagccgggcgtagtggtgggcgcctgtagtcccagctactcaggaggctgaggcaggagaatggcatgaacccaggaggtggagcttgcagttagccgagatcgtgccactgcactccaacctgggctacagagagactccgtctgaaaaaaaaaaaaaagtgagatggggcagggacttg

SEQ ID NO: 43782 - DNA, 1957 bp, Homo sapiens
cctctccacatatgcttcctggtcacttagtttgggctcaagactgagagatcctggcaagagtccggagagaatgaacacctctgtctgctacagcccatagacacacacaccattctgccttccgaacagcccaggtaagcaattccttgggaggtgcaaactgtcccactggtagcaacaactaaaatgggagagggccccacccataacagtgtccccacctctgctcaccaccctggcttctccctatgctctgttgatttgaagcgaggggctttgctccctcctgaggggtcattcagcagcgcagctccaaggtccagtcacagcccagtgagtgagtcccgggctccctgggactaccctttgaaacctgcctttcataagttcctaaaactttttgcccacaatggtctggctgttcactcctcaggcacgatttcccagacactggagcctgttaatccacagggaatccccttcccaatgggagtggtctgctgtggagaaattctgggaaacagcaaatagtccaaagaaaaacatcccattgtaacatgcaattgtcaatgagcatgaccagcagttccctgaagtcagatatgatgttcctttcctggaaagaaaatgggagaaatattttatccccagactatatttcctggattcacaaagtacattcctctcactggagcatgtgtgtgcaggagctaatttatcttgcgctcctagtccttcatggtagggcagggcatttcaccacttgtcaattttgatccccacactggtaatttgaaacctattcctgaaaactatgcaaatgcaacccagagacaggcactgccatcaatcaccctgaagcatagagcagatgctcagaagtgatgttgtcatgatgttgtcaagatgttgtctcacatagaaattttcaaaacaagtcttcttgttcaaattaaaacatcaagcacatagatgggttaagccctttgctcatctcaggccctctcagtgtggctgccttggcccactcgggctgctacaacaaaaggctatagactggtactgcataggcaacagagaggtatttctcacagttctggagggtggaagcccaagatcaaggcaccgtcatattgggtgtctgctgaggtcccacttcctgcttcagagatggttctgcccacatgacctaatcaccttccaaagaccccacctcctaataccatcatctaacgtgtgaggatttcaacagaggaatttgggggagacataaacattcagactgtagcagtagcaaaaacaaattgtatcagatgctagaggagctccaaaagtgaactctgttacaaaccaagggactcaattcacccagtttcaaccaaagtggaagcttttccactgtgaatgattggccagaagtgggaagtgaaaatgggggtagggtggggagctgggagtgaaggaaaatgtagcaccaaggccaggaggcaggaagggtccacagaagcctgtggacaaaatttgaagagacaccaatcagctcagatatggtttcttctgcacccatggtccaatgcacaggtgcatgggagaagggttttgtataaccagagttgtaattgtgtaaagtaaaaaagtgaggctgggtgctgtggctcacgtctgtaatcccagcactttgggaggctgagggggatggatcaggagttcaggagatcaagactatcctggataacacggtgaaactccatctctactaaaaatacaaaaaattagccgggcgtagtggtgggcgcctgtagtcccagctactcaggaggctgaggcaggagaatggcatgaacccaggaggtgsagcttgcagttagccgagatcgtgccactgcactccaacctgggctacagagagactccgtctgaaaaaaaaaaaaaagtgagatggggcagggacttg

SEQ ID NO: 43783 - DNA, 623 bp, Homo sapiens
cattactaataattactcagggacagagggcataaattgggatcattctgggcaaaaaaggatgtatggcccaccmtagtttggtgaccatgtggcctgaggaagagtgaatgcccagtaattgatgaagtgtttatatctgagttagatggaatttgcctgctaaagtaatgtaagcatagcaactataagcttttaagagttttagaaagactttaagaggggtaatggctcttggctttgagaaaaactccctctgacccagtgtggaaggaccatgggtatgaaactaaggacagctataagtaaaaaggttatcttaacaattaggcaaaacctgatgaagactgaaaataatacattattagcacagtctacactcaagggaaggaatcatttgaattgcagatggatgaccaattggatatgggcaataaaggagagaggggagtctaggaaaattcccagacacttggcccagacacttggaaaatgatttgctgagatagagaactcagatagccacttttgggaaaatagcctgagatcttcaatttagtgtgtctgggatacttcaaactctactagcagaaaaatttacatgaaattaggtaataaggagt

SEQ ID NO: 43784 - DNA, 600 bp, Homo sapiens
ttttgccatagtttgaagggaaagttagtgaattgccaggatcaacctgcagtttccccaaaacttgcacaggagtggctttcatcrctgcatggggagacctcctttgcgggtctgcttagcggtagctggattgtctctgagggatacctggctttcctaactgttcctggagaatcttaaagacgaaaatggaagaaagggctcacatctttgttttgtgctgcaagcaaagtcttggaaaaatgaatgatgccaatggaatctatttcttgtaattaatttcctcaagctactggatctccttttcttgctgagattgtggtttggcagctgcagtttgatagccccattctgagactggatccctctcttccctcatctggtagttttcacgtcggggcattcctgaactccgtctgcctcgtttcaggctgggatcacagatcaggagcgaaggctttatgatattaactagtcaacagatacattctttgaagaatttctgtgtttttaattaccccacgaaagcctttggacgcacgggttatgaggggcattttgcattgctaaattccagccttgattgcaaacctgaaa

SEQ ID NO: 43785 - DNA, 524 bp, Homo sapiens
tgccccagaatcttacaaggttggatttttaccatagtgaatttatatgatccagaaatgtgcttttatcagcacaatgaaaaatctacattgtgaagaatttacattgtcccaactcacaagagcctaaataaaaatgaatgaaatgtattaatttatactaagaaacgtatccattagatggaccttaatacttcatatcatcagtgcacgtgatgaatgaaaatttaagggaaactgatgttttcatamctgtttttcagctaaactagtttgtagcattctgctctgttatatattgccgtgtaacaaatgaccccaatgcctaacagctcaacgcaacaatcattttattttatctcggaaatttatgggtcaagaatttcggcagggcttgggtgggttatttctctgctctgagtggcatcagaggtcaaccggtgtccagatgtgcagtctagaaggtccaaaaggatttctcatacacacccagtgccttgatgtggatggctgtaagactggtc

SEQ ID NO: 43786 - DNA, 527 bp, Homo sapiens
gttttggtttttcaaatgcttttttttttttttttttcagagctaattttcaaacccaatacagcatgcttttcttaccaaattttgtgagcatctgtctcgagccgttcagcccctgacagacgctcagcagcctccagaactcccacagatgttgtgtgtcccaagaaaggcccacttcctgtttctggccactagcgggaggagaggtggtcccaccagttgcattttgcaggggttttccttgccgccatttcctgccggttgcctttgaatggattacagatggtcagaaaaagacttyttggcacagtgagaggaccagtctccagtgctttgtgggaaaggatttatagcaggatggcagtttacgcctaccaagaatgggcctggctgccgcggccttatagggaaaactgcctgcctgcagagatgggctctgggggtggagggaacggccaggatgaaggggatgtttaaatcgatgtggcacctttcagccagtcggtgcttagaccgccgcgtgt

SEQ ID NO: 43787 - DNA, 589 bp, Homo sapiens
gttaggcctcaagcgtgccatggcattcagttttaccggtgagtgagagtgtgaagtttcatgtcaaattcatcacaatgctctgtccacggcccgctgctaccctcctctttcagaggctggggccctcttgctgaccctcagttctagaccttgtcctttcactctgccctgctctgaggccccgtgtagtggtatccttcccagtatgcaacacgagaaaggcaccaatactgtgcatcagaaattcttagtcaagaaagaacacatctggcttgaggtaccaggaaccctttcttgcaatgaaaacatttgatatgggtctcatagaaactgcagaactatgagctgtgaaggatgtttcaagttgaaggatcagcattagcaaagttgtagatgtagggaagatcaagatgtattgagaaaaakcaaacatgtccagtttggttctagccaaaacttacagggtacgtgttggtaaatagtggcagatgatgctaaaatataggatgtgaccaaataactaggcaacgtttactttgatttgttagcaattgagagcttgtgttttgagcaagggaataaaatg

SEQ ID NO: 43788 - DNA, 1955 bp, Homo sapiens
caaacaatttaatcttccactccaattcttaatgtaaatgtttaatataaacctgatgttaacatgatgtacatgaatttactggcaggcaaagctgggatttacattatgctgaaaatcagatgttctttacagccggggttgggaaagcccttagagatggcaaagatttctttttcggtggcaggtgtaccatgcccatggcatcatgggggaccagccactcaccaatgctgaccctgtgactagcaggtagaatttagctaatgtcaaaagagtacaatggttcagtaaaaatatgaatttctatgtctaaaattttctatgtcttcttctgacacagaaaatgtccactcttggctgtgtgtggacattggatgattattggatcaccccacacccaaatccaataatttctttgcagactgttccatgaataacaacctagactctagaccaccagctgacaaactaaagtccgtgggccaaattaggcccgcagcctgtttctgtatggccgcaagctaagaatagtttttacatttttaaatggttggaggaaaaaaacaaaatattttatggcatgtaaaaattatatgaaattcaaatggcagtctccataaataaagttccattggcacacagccatactcattcatttatgtactgtctatggctgcttttacaccacgattgcagagttgaacagtggtcacagtgactataagcccacagaaactaaaatatttgctatttgtctcttcacataaaatgttggcacagccttgctctggatagcccatacactatgatgctgttgataacagtagctagcaactgctgattgcttttttgtactaggtgtatatattgactgccccattggcacatgtagtatacaaaatcacttttaaaaaattaagtgtttatagcattgtcatctacctttttgtgctcctttagatttaggctcttctacatgttaatgcttattgggaaggagatttgtaacaatccttcaaagtttaccatattcccagatgtttgatgctttataaatcaggtaagtatttcacaaaactggctgatcatcagtattaccaggggatcttaaaggatgcctgtgctggcctggtgcagtggctcatgcctgtaatcccagtactttgggaggccgaggcgggtggatcacctgaggttaggagttcgacaccagcctggccaacatggtgaaaccccgtctctactaaaaatacaaaaaattagctgatgtggtagcacacgcctgtaatcccagctactcagaaggctgaggcatgagaatcgctcaaaccagggaggcagaggttgcagtgagccgagactgcgccactgtactccagcctgggcaacaaagtgagactccatctcaaaaaaacaaaacaaaaccaaacaaaagcctgcgcataatgaagcaggatctggggatggaaacgaagacttttgtgtgacttttataagtcccaccagtgatgctaagaatcaacctgatttgggaacaactggacaagctacagtcatgcaccatataacagctttttggtcaatggcaagctgcatatacaatggtcccattagattataacggagctgaaaattyctatcacctggtgacattgtagtcaccatgcgataagatattcctcacgggtttgtggtgatgctgatgtaaagaaacgtacactgccaataatataaagctctagcatgtacaagtacatatggtacctaatacttaatagtgacaataaacgactgttactggtttatgtatttactatactatgcttctaacactattttagagagtactccttctacttacatttttttaaaaagtgaactgtaaaacagcctcaggtccttcaggaggtgctccataaggcagcattgctatcacaggagatgacagctcc

SEQ ID NO: 43789 - DNA, 585 bp, Homo sapiens
aattacaggaaaaactgcagagtgcgtacccactagatgcctcattgcacaaaaacccgaactgtccagagcctggagcagtaggtttttattttaatgaagtccaatttgtagtttttgttgttgttgtaagaattaaggaaagaggagaaacaagaaggtcggctcgacagtcaacaggtttacttccaacctgggagggacgtctgattgagttaggtcagaagtagcaatctcttacagactaagagtttttaaggattcagggtgggagagttatcagaggcttggactgcttctgtgtctctttgttgtgcttatctgggagggagagttgtgtgtctgttcccctacatctttgtgcagctgcaggaatatccctcgagtctgcttttggcttccctatcttagtgtacctgaagggaaagsaatgtgcttattaagggccactgttttactggagcccattgtatgagggtgaagtttggcagttacccaagagactttcccctgccttcctctgtgccccagccttcttatctgtgttttactgtctgctcttttttggctgcttgtagttagaaa

SEQ ID NO: 43790 - DNA, 541 bp, Homo sapiens
tcctgtacttaagcaacttttaaatagcactttatacactctcaaaagatcaattacatcagagtagctatggcttgtgaaagtaaaaaagggaagtgagcaatatcttaagaatacctggcagataagaaatgcagctgttatgattgcctaactraccacctgtttcctgttgaaggagccagttgtactagtggagagattttaaaaggaattaaaatacattcttcaaatttacatcaaaatggatatcatactatctactgtttcatgattaagaacacatacaaagcccttcttttatcatgcctatagttcctggtgttcctgaaaagttatagtgagactcaactatgtactgaaagaaaggagaggtagaaatcatactcagcagcaaatgggatgcctgaatctgaatcccagctctgcagtttactaaccatgtgactgtagaaaatgttccaatctctcttatttttctcatctcttaaatggtgatactaataatagttacatcctagggtgttgtgagaacgaaatg

SEQ ID NO: 43791 - DNA, 541 bp, Homo sapiens
tcctgtacttaagcaacttttaaatagcactttatacactctcaaaagatcaattacatcagagtagctatggcttgtgaaagtaaaaaagggaagtgagcaatatcttaagaatacctggcagataagaaatgcagctgttatgattgcctaactgaccacctgtttcctgttgaaggagccagttgtactagtggagagattttaaaaggaattaaaatacattcttcaaatttacatcaaaatggatatcatactatctactgtttcatgattaagaacacatacaaagcccttcttttatcaygcctatagttcctggtgttcctgaaaagttatagtgagactcaactatgtactgaaagaaaggagaggtagaaatcatactcagcagcaaatgggatgcctgaatctgaatcccagctctgcagtttactaaccatgtgactgtagaaaatgttccaatctctcttatttttctcatctcttaaatggtgatactaataatagttacatcctagggtgttgtgagaacgaaatg

SEQ ID NO: 43792 - DNA, 547 bp, Homo sapiens
gaaaaagtttcctattttggaacattttgtattttgtattttcagattgggatgctcaacccatatataaataaatatatgtaaacacacacacatacacacacacacatatatgattattgttaatagaacattagactggaagggaatgaccatagcacattaatcccctcattttccaaatgaagaaatttagggccacagaaatgaaatgactagcccacagggacacagccagttaattgaatttcaaaatcaatctgcagagatatatatatakagagagagagatatatagatatagatatatagggtgtgtgtgtgcctcctgagttccatgaatgtttaccaaaaaatttctttcctaggttctcacattgtaaaactatcatgttaatgtcatagacccatatatttgtttcttcacatgatgcttcctccctaactctgtaggacaaagaaatacactgcatatttatgttaagttttgcaggtgcctgtttgtttacactgtgaatgggtaaccatggttgcttcagcattatca

SEQ ID NO: 43793 - DNA, 775 bp, Homo sapiens
ttgacatgaaaggcattgttactccacactcctgtagttcagcaacttgctaaggttgtagaaagagggcccagaattacgttagaaacttcatagaaacagaatatttcagtaataacctcaccacagtgtctgttttgagccccctagctcatggcacctgtgtggaaaattccaccccgcctcatccaagactggctctggggtcatcactgagtaatgaggaaatggtaccacgagaggtcagaaggagattcgcacagattcttccacaccccattgtgaaacttagaatatttcctcaacgcaagcaaaagtctgtgcctattaccatcacctcctctttattgcttttttttattattatactttaaagttctgggatacatgtgcagaacatgcaggtttcttacataggtatacacgtgccatggtggtttggtgcacccatcaacccgtcatctacattaggtatttcttctaatgctatccctcctgtagctccccagcccccaacaggccctggtatgtgatgttcccctccttgtgctcatgtgttctcattgttcaacttatgagtgagaacatgcggtgtttggttttctgttctcgygttagtttgctgagaatgatggtttccagcttcatccaagtctctgcaaaggacacgaactcatcctcttttatggctgcatagcattccatggtgtatatgtgccacattttctttatccagtctatcattgatgtgcatttggattggttccaagtcttc

SEQ ID NO: 43794 - DNA, 617 bp, Homo sapiens
taaatacatagataaaattaaaagtrgctttgtagttggctggaggtcctggactcctccagcgtatcctctagtgatgggcagctgggttacttccagtcttttccgagcaggtcagagtggctctctggggtggaaatggttgagaggaacaggctcattctggtctattctctggggacttctgtctgcctccccaggaagttgacctctccctctcccggtctgcacagccttctgtttttgtctgtgggcctcatttcaaagcttcgtgccctgggctgggcatggtggctcatgcctgtaatcccagcactttgggaggctgaggcaggaggatcacctgaggtcaggagctcgagatcagcctggccaacatggtgaaaccccatttctactaaaaatacatagccaggcatggtggcgggcacctgtaatcccagctacttaggaggctgaggtgagagaatcacttgaacccaggaggcggaggttgcagtgagctgagatcgtgccactacactccagcctgggcaataaagtcagactccattgcaaaaaaaaaaaaaaaaaaaaaaaaagcttcgtgctctgaactctgtccccacatgactgtg

SEQ ID NO: 43795 - DNA, 617 bp, Homo sapiens
taaatacatagataaaattaaaagtggctttgtagttggctggaggtcctggactcctccagcgtatcctctagtgatgggcagctgggttacttccagtcttttccgagcaggtcagagtggctctctggggtggaaatggttgagaggaacaggctcattctggtctattctctggggacttctgtctgcctccccaggaagttgacctctccctctcccggtctgcacagccttctgtttttgtctgtgggcctcatttcaaagcttcgtgccctgggctgggcatggtggctcatgcctgtaatcccagcactttgggaggctgaggcaggaggatcacctgaggtcaggagctcgagatcagcctggccaacatggtgaaacccsatttctactaaaaatacatagccaggcatggtggcgggcacctgtaatcccagctacttaggaggctgaggtgagagaatcacttgaacccaggaggcggaggttgcagtgagctgagatcgtgccactacactccagcctgggcaataaagtcagactccattgcaaaaaaaaaaaaaaaaaaaaaaaaagcttcgtgctctgaactctgtccccacatgactgtg

SEQ ID NO: 43796 - DNA, 546 bp, Homo sapiens
cctggtctctgcaaggtccctggagccctagggggccaatattcaccctataacaaagaggctgggggccgggcgcggtggctcacgcctgtaatcccagcactttgggaggccaaggcaggcggatcacraggtcaggagatcgagaccatcctggctaacttggtgaaaccccgtctctactaaaaaatacaaaaaaattagccgggcgtggtggcaggcacttggagtcccagctactcgggaggctgaggcaggagaatggtgtgaacccaggaggcggagcttgcagtgagccgagatcgcgccactgcactccagcctgggtgacagagcgagattccatctcaaaaaataaaaaaataaagaggctgttcatgtggggtggggaccatgtgggctggcaccccagggaagtgccagcaagcccaagacaagctctcaagaggctgaaggcgattaaaactcctcactactgtggtcctgcagtggtgggggcatgggagaaccatggggcccaggtttttaaactttttttcagacacc

SEQ ID NO: 43797 - DNA, 546 bp, Homo sapiens
cctggtctctgcaaggtccctggagccctagggggccaatattcaccctataacaaagaggctgggggccgggcgcggtggctcacgcctgtaatcccagcactttgggaggccaaggcaggcggatcacgaggtcaggagatcgagaccatcctggctaacwtggtgaaaccccgtctctactaaaaaatacaaaaaaattagccgggcgtggtggcaggcacttggagtcccagctactcgggaggctgaggcaggagaatggtgtgaacccaggaggcggagcttgcagtgagccgagatcgcgccactgcactccagcctgggtgacagagcgagattccatctcaaaaaataaaaaaataaagaggctgttcatgtggggtggggaccatgtgggctggcaccccagggaagtgccagcaagcccaagacaagctctcaagaggctgaaggcgattaaaactcctcactactgtggtcctgcagtggtgggggcatgggagaaccatggggcccaggtttttaaactttttttcagacacc

SEQ ID NO: 43798 - DNA, 626 bp, Homo sapiens
tcaccttctgacaggccccagtgtgcattgttcccctctatgtgtccatgtgttctcatcatttagctcccacttataagtgagaacatgcggtatttgggtttctgtgcattagtttgctaaggataatggcctccagctccatccatgcccctgaaaaggatacaatctcgttcttttatatggctgcatagtattccatgctgtatatggaccacattttctttatccagtctaccattgatgggcatttaggttgactccttgtctttgctattggaaatagtgctgtgatgaacatatgcatgcatgtgtctttatggtaaacaatttatattcctttgcatatatacccagtaatgggatggctgggtcgaatggtagtcctgtttttaggtctttgcggaattgccacgctgactcgcacaatggttgaactaatttacactcccaccaacrgtgtatatgtgttcccttttctccacagcctctccagcacctgttattttttgactttttagtaatagccatttaccttacctgtctcttactaataggagtattagcagatgcccgactagagagagaccacatgaggcagggaagtgcaggaaagagagcttgtc

SEQ ID NO: 43799 - DNA, 1415 bp, Homo sapiens
tgttgacacctgtgacgtgagacgtgccagacaatgcatttgtcctttagtggtcagagccgataaccaggtggctgcacagattaagaagcagacatctgtgcagacttctaactgcccagtaaagaggtaaaccaggggccactcctaactcagactcacccactgttaatattttgtcccatttgctctgtcatccactccttccccccaacacaattttcccccacaccacttaactacttaagagcaaataacctcagtgtgtatttccaagaataaggacatcctttaagtaccagaatagttgtgtctttttttttttttttttttttgkgatggagtttcgctcttgttgcctaggctggcatgcaatggcgcaatttcggctcactgcaacctctgcctcccgttcaagcgattctcctgcctcagtctcctgagtaactgggattacaggcatgcgccacagtgcccagctaattttgatatttttagtagagatggggtttctccatgttggtcaggctggtctcgaactcctgacctcaggtgatccgcccactttggcatcccaaagtgctgggattacaggtgtgagccaccacacccagcccaaggttgtacagtttttattggtccaaaccaatttctgagttgagttctacagtttgcatgcccctgactccggcaatcctagttcaagggcaccagacttctgcagccaatgaatgcaattaggactcagaagtcatgtcttcaccctgccccatagctgtgtggatgtacagaagaggagctcacatttattgggcatttacaatgtgccagtaaacgtggcactactacttgctaaaccctttccatccatcaattaactcacataatcctcacatttaaccccattttactggtgaggaagtgaggcttaaagagagcaggtaacctgccaaggtcagggagctgtatgtggtggaggtgaattagagtctaggtagtctgactccaaagtccacacacttggataccgtctctttacacatgctgtcacccacatcaaaagcccttttcatacatttttctgcatgatgaagttgcctagctgtgctttgggcttcaacaaaaaccaaccctgctgcccaggccagtatcctgaagagggctggatgagacagagaagtgatccggcacaactcacaactcagtacaagcaaaagacaatccaaggttaccacaactgctgatactttccttaagtcctcctgtacatcctgtttggagatgtagggcccagagaggctgaaaagccaacaaggagtctctccgcactcctctgtcacctaagactgaacagggggaactcgcattcctctgccggtacacatttctatttagaacacaaagcaataaacatg

SEQ ID NO: 43800 - DNA, 589 bp, Homo sapiens
ccttccacctaaacactcaagtatttaatayagtgataaaaccaacttacatttcttcacattcagtaatttttcagggttgctcttcagtgtgaactctttgatgtctgatgagagatgaactgcacttaaagcttttcccacactcattacatctaaagggtttctctccggtatgagttctctgatgttgaatgagagctgatgaatgaatgaaggcttttccacactcgctacatttgtacggtttctttccaatatgaattctttgatgtttagcaaaattggagctccggctgaaggttttcccacattcattacactcatagggtttctctccagtgtgaattctctgatgttgaacaagatgtgtgctctgactaaaagtttttccacattcactgcattcatatggcttttctccagtatgaactctctgatgcttagttagggatgagcaatggctaaaggctttcccacattcttgacatttataaggtttctctccagtatgagttctttgatgtttaatgagtgctgatgaatgaataaaagctttatcacattcattacattcataaggcttcac

SEQ ID NO: 43801 - DNA, 562 bp, Homo sapiens
tcttggtccaaatcgactgcgagggaaactttggttttaaaacgaggggtgattgcccgctctgaggtcgacaccacgcttmctcaggtgactgagccttagttttccatcagtcaagtgggaagagcagcccattgccagccgctccccgggccctgtcccgcctggacgcctcccgcccgcagagaatccgcagagtcccgtagcaccgcctccctccaggagcctgcgccccggcccctgggtcagggttgggatgcgggctctgcagacgccccggagaacagctttacctgcgggctgtccctgcccggtttagtccaagggcctcggtgtgagggcctccgctgtcaaggcgggggaaccggttctcttggtttctctctccttccccagaggcttcaacgcagacgtgagccccagccgggcccgccccgccccctgctctccggctctcacaccgcaccccccccgaaaaaggctgcccacctgccctgggaccccccggatgcctccacgagagtggcccctggagaatgcactctgagacagtgactatccg

SEQ ID NO: 43802 - DNA, 1653 bp, Homo sapiens
tcttataatacgcttagtagaggaatgtgccttggaaatctcagggcacagcaagtggacaaatgctgttacaaaacaactgcatgtaatttggcaatatgcttttttcctcagtttaattaagctcttaatttaatttataagcagcttttgccattatcactgatgtctttccaattccttatatactgacatccctgcctcactaatgcggaactcttctttcttcatttacctccaagcaaccctaaacataatgaaaatataaataatgaaattgtaaataaaaatcattatgtttcaaaatgctttccaaacacaaaaactaaattaacagtagaatgctctacagtccatgccctaattaaaccttagtgagttttatgagctaaattgtgcccacccacccccgccaaattcatgtgttgaagtcctaaccctcaatatcacggagtatctatacttggagacaaggtctttagagaagtacacaattaaggttaaataaggtcagtagggtgcgtcctaatccaatgtgactggcgtgcttctaagaggagaacatttacacacagacacatacagagaaatgacgatgtaaagacacggggagacgatagcagtctatggaccaattgaataggtctcagaagaaaccaaacctaccaatacctttaatcttggacttttggcatctaaaactgtgagaaagtaagtttctgtttaagccatccagtccatggcactttgttacgacagctctaccaaacgaatgcagtgagctttctcaattgttttggcaattctacatatttcattatcttctgagattttaaaaatgaagtaactataattaaagttgcaaatggagtattaatgttataaaaataagcactctttagatatttttacagtgctcaaagtttaatgacttaaagcacctatggctgtaagaaagagaaagaacgaaagaaaaaaagaaagatcttcagtaagaagcaaaccattctatgcagttataataaaaccactaaaataatatcccatgaactatgaatgcatacatgcaaattaatattctgacacatggtagaaattttctggccaaayatcctttaaaactcttcggacaggcgaaaacggatgctttagagacggtgtattaaattgctttatcattcactccaaatcagcaatttgagtgctttcactttttctctagcctgccttaactttaatcacctgatataccccagcgtaaatcaggttgcaccttctatcaccaatgtcagtacagtcaaatgagaatttgatccacattatagagacaatatattcaatggctattattggtattaacttctgtaatgatcttggtactgagctactatcaagtccaaaacgactctgaaagattggactaggtgaattttacagcctacaatggcttattgaggtcttccattaaatcttttcttgttttattttgttgtttgtttttgagacacagtctggctccggcccaggctggggagcagtggcgcgatctcagctcactacaacctccgcctcccggttcaaggaattcttccgtctccgcctcctgagtagctgggattacagttgcccaccaccacacctggctaattttgt

SEQ ID NO: 43803 - DNA, 1653 bp, Homo sapiens
tcttataatacgcttagtagaggaatgtgccttggaaatctcagggcacagcaagtggacaaatgctgttacaaaacaactgcatgtaatttggcaatatgcttttttcctcagtttaattaagctcttaatttaatttataagcagcttttgccattatcactgatgtctttccaattccttatatactgacatccctgcctcactaatgcggaactcttctttcttcatttacctccaagcaaccctaaacataatgaaaatataaataatgaaattgtaaataaaaatcattatgtttcaaaatgctttccaaacacaaaaactaaattaacagtagaatgctctacagtccatgccctaattaaaccttagtgagttttatgagctaaattgtgcccacccacccccgccaaattcatgtgttgaagtcctaaccctcaatatcacggagtatctatacttggagacaaggtctttagagaagtacacaattaaggttaaataaggtcagtagggtgcgtcctaatccaatgtgactggcgtgcttctaagaggagaacatttacacacagacacatacagagaaatgacgatgtaaagacacggggagacgatagcagtctatggaccaattgaataggtctcagaagaaaccaaacctaccaatacctttaatcttggacttttggcatctaaaactgtgagaaagtaagtttctgtttaagccatccagtccatggcactttgttacgacagctctaccaaacgaatgcagtgagctttctcaattgttttggcaattctacatatttcattatcttctgagattttaaaaatgaagtaactataattaaagttgcaaatggagtattaatgttataaaaataagcactctttagatatttttacagtgctcaaagtttaatgacttaaagcacctatggctgtaagaaagagaaagaacgaaagaaaaaaagaaagatcttcagtaagaagcaaaccattctatgcagttataataaaaccactaaaataatatcccatgaactatgaatgcatacatgcaaattaatattctgacacatggtagaaattttctggccaaatatcctttaaaactcttcggacaggcgaaaacggatgctttagagacggtgtattaaattgctttatcattcactccaaatcagcaatttgagtgctttcactttttctctagcctgccttaactttaatcacctgatataccccagcgtaaatcaggttgcaccttctatcaccaatgtcagtacagtcaaatgagaatttgatccacattatagagacaatatattcartggctattattggtattaacttctgtaatgatcttggtactgagctactatcaagtccaaaacgactctgaaagattggactaggtgaattttacagcctacaatggcttattgaggtcttccattaaatcttttcttgttttattttgttgtttgtttttgagacacagtctggctccggcccaggctggggagcagtggcgcgatctcagctcactacaacctccgcctcccggttcaaggaattcttccgtctccgcctcctgagtagctgggattacagttgcccaccaccacacctggctaattttgt

SEQ ID NO: 43804 - DNA, 1653 bp, Homo sapiens
tcttataatacgcttagtagaggaatgtgccttggaaatctcagggcacagcaagtggacaaatgctgttacaaaacaactgcatgtaatttggcaatatgcttttttcctcagtttaattaagctcttaatttaatttataagcagcttttgccattatcactgatgtctttccaattccttatatactgacatccctgcctcactaatgcggaactcttctttcttcatttacctccaagcaaccctaaacataatgaaaatataaataatgaaattgtaaataaaaatcattatgtttcaaaatgctttccaaacacaaaaactaaattaacagtagaatgctctacagtccatgccctaattaaaccttagtgagttttatgagctaaattgtgcccacccacccccgccaaattcatgtgttgaagtcctaaccctcaatatcacggagtatctatacttggagacaaggtctttagagaagtacacaattaaggttaaataaggtcagtagggtgcgtcctaatccaatgtgactggcgtgcttctaagaggagaacatttacacacagacacatacagagaaatgacgatgtaaagacacggggagacgatagcagtctatggaccaattgaataggtctcagaagaaaccaaacctaccaatacctttaatcttggacttttggcatctaaaactgtgagaaagtaagtttctgtttaagccatccagtccatggcactttgttacgacagctctaccaaacgaatgcagtgagctttctcaattgttttggcaattctacatatttcattatcttctgagattttaaaaatgaagtaactataattaaagttgcaaatggagtattaatgttataaaaataagcactctttagatatttttacagtgctcaaagtttaatgacttaaagcacctatggctgtaagaaagagaaagaacgaaagaaaaaaagaaagatcttcagtaagaagcaaaccattctatgcagttataataaaaccactaaaataatatcccatgaactatgaatgcatacatgcaaattaatattctgacacatggtagaaattttctggccaaatatcctttaaaactcttcggacaggcgaaaacggatgctttagagacggtgtattaaattgctttatcattcactccaaatcagcaatttgagtgctttcactttttctctagcctgccttaactttaatcacctgatataccccagcgtaaatcaggttgcaccttctatcaccaatgtcagtacagtcaaatgagaatttgatccacattatagagacaatatattcaatggctattattggtattaacttctgtaatgatcttggtactgagctactatcaagtccaaaacgactctgaaagattggactaggtgaattttacagcctacaatggcttattgaggtcttccattaaatcttttcttgttttattttgttgtttgtttttgagacacagtctggctcyggcccaggctggggagcagtggcgcgatctcagctcactacaacctccgcctcccggttcaaggaattcttccgtctccgcctcctgagtagctgggattacagttgcccaccaccacacctggctaattttgt

SEQ ID NO: 43805 - DNA, 1653 bp, Homo sapiens
tcttataatacgcttagtagaggaatgtgccttggaaatctcagggcacagcaagtggacaaatgctgttacaaaacaactgcatgtaatttggcaatatgcttttttcctcagtttaattaagctcttaatttaatttataagcagcttttgccattatcactgatgtctttccaattccttatatactgacatccctgcctcactaatgcggaactcttctttcttcatttacctccaagcaaccctaaacataatgaaaatataaataatgaaattgtaaataaaaatcattatgtttcaaaatgctttccaaacacaaaaactaaattaacagtagaatgctctacagtccatgccctaattaaaccttagtgagttttatgagctaaattgtgcccacccacccccgccaaattcatgtgttgaagtcctaaccctcaatatcacggagtatctatacttggagacaaggtctttagagaagtacacaattaaggttaaataaggtcagtagggtgcgtcctaatccaatgtgactggcgtgcttctaagaggagaacatttacacacagacacatacagagaaatgacgatgtaaagacacggggagacgatagcagtctatggaccaattgaataggtctcagaagaaaccaaacctaccaatacctttaatcttggacttttggcatctaaaactgtgagaaagtaagtttctgtttaagccatccagtccatggcactttgttacgacagctctaccaaacgaatgcagtgagctttctcaattgttttggcaattctacatatttcattatcttctgagattttaaaaatgaagtaactataattaaagttgcaaatggagtattaatgttataaaaataagcactctttagatatttttacagtgctcaaagtttaatgacttaaagcacctatggctgtaagaaagagaaagaacgaaagaaaaaaagaaagatcttcagtaagaagcaaaccattctatgcagttataataaaaccactaaaataatatcccatgaactatgaatgcatacatgcaaattaatattctgacacatggtagaaattttctggccaaatatcctttaaaactcttcggacaggcgaaaacggatgctttagagacggtgtattaaattgctttatcattcactccaaatcagcaatttgagtgctttcactttttctctagcctgccttaactttaatcacctgatataccccagcgtaaatcaggttgcaccttctatcaccaatgtcagtacagtcaaatgagaatttgatccacattatagagacaatatattcaatggctattattggtattaacttctgtaatgatcttggtactgagctactatcaagtccaaaacgactctgaaagattggactaggtgaattttacagcctacaatggcttattgaggtcttccattaaatcttttcttgttttattttgttgtttgtttttgagacacagtctggctccggcccaggctggggagcagtggcgcgatctcagctcactacaacctccgcctcccggttcaaggrattcttccgtctccgcctcctgagtagctgggattacagttgcccaccaccacacctggctaattttgt

SEQ ID NO: 43806 - DNA, 566 bp, Homo sapiens
cactcctgcctgggcgacagagcaagagtccgtctcaaaaaaataaaaaataaaaaataaataatattggtcccttagggctgtctggagggtgaaatgaatcacactatgtcaaccacctgccaccaggtgcagactcacaaaaggatttctggtaagtgtggtcactgtaggctgggcgcggtggcccacgtctgtcatcctagcactttgggaggccgaggtgggcagatcacctgaggccaggacttcgagaccagcctggccaacatggcgaaaccctgtgtctactaaaaatacaaaaaaattagccaggcgtggtggcgggtgcctataatcccagctacttgggaggctggggcagaagaatcgcttgaaactggtgggcrgaggttgcagtaagccgagatcgcgccattgcactccagcctgggcaataagaaacaaagtccgtctaaagaaaaaaaaaaaaatgcggtcactgtaaatgagaaaactatggttgcctagccagaaacaaaagatgatcctacaagtcgatacaacaagaacagaaaattataaaa

SEQ ID NO: 43807 - DNA, 590 bp, Homo sapiens
ctttatgataaccccatagggtaagtcttgctactcttcttactcataactactgtgttttcacactaatgagtgtaatgagggataatacattacagtttataaaataaattaataaactatagtttatttgattttcccaatatctctgctaagtttttatgatgaggaaagccagactcacgttaagtggtaacaacagcaatgataaccrtggctaacacttactgagcacagactacattgctctgagctacacagttaggtgcatcattttcttatcatcatcatcatcatcatcatcatccgtattttgtagataggaaacctacgctcagtcaggttaaggaatttctgtaagattatagcatcagtgagtagtggaaccaagattttatttaactcagtctgactcttgggctcatcctcttctactctttgctttctgctagagacagtcagaaaggaactgggggctgtggatcaggttctgtggatcctaccatttctattccagtagcggctctcaactccagtgaacaagagtgcacttgtagaaatgcagattctgggccctctcccggcaatta

SEQ ID NO: 43808 - DNA, 553 bp, Homo sapiens
cacctcttgacacatatgcttagagcttccacatatgtactttggggagacaaagacagccacagcacctggttagcatccccctgactctctcctgaggcaggcacctgcttagaacctggggctcgccccactctcctgacctcctctcctgggggccaggaagtgccccacgggggccgaccctgtccacctccgtggctgtgctccagctgacttgctcgggccctgtcctgtgaatggaggaaggatgttgggctcagccttcgcacctgccccggtagattccatgataagggacctgagcggcctggcccggcgccacactccgaccctgttcctgactgcacctcccgcagccactcccagcctcrgtttctctatcggtagataagcctctagcacacctcagcacctgaggctgttgggagggaggagcgagacaatgtgtgcggccgccagccgtctgctggggggaaacgagtccgtcttattaaggtgatacggtttggctgtgtccccgcccaaatctcatcttaaattgtagttccca

SEQ ID NO: 43809 - DNA, 591 bp, Homo sapiens
gatgatgtcatttctaatgcacccctttatcaataacatattgcttaaagataccacaaatgaaatttaagttatttttgaacaggtaaagataatgaacggaaggtaatttgagtgattctcataaaatcttttaacgtgagatagaagacaattgacatacaactgccaggatttttataacaccagaacagaatgcactagtcaaaagaaaagtacttaaatacattgttgtagtttgatgtgtattcacctatgtggagtagtaaacaaagccctacaacagtaagtggcttagtagtaatactttgattcttagtgttcaaatattaaagagatacagcttacaggcatacctacaagtttctccatggtgtctttaaagtgttgaaaaaacagtcttaaggtaygagattctactttaaaaatgcttggcaaggcagtcgaagaagtacaaaccatagagaaattttgctgtctcatgaaaagagcaaaatggtgatccccttattctcccattgtactaactttatgaagcagaagagcctcatttcttcccgtccctaaattgttaaagaagaggcgtggtta

SEQ ID NO: 43810 - DNA, 629 bp, Homo sapiens
atcaatgttgaaagtattaatgattacatttttttccttactgagtctttgaagtccaatgtttgtttgacacatacaacacatctcaatttggactagccagacttcaagtgctcaacggccccatgtggctagtggctaatgtactggacagctcargtctagaaagcaagggctgataaatgaaaaggaagcaaatagcatccattgataggaatacaagttgtgtaggatgtaagccactgactttgagtgccgatttcttagttttattttagtgaaaataaaatcagttcacacccagtatcagttccctaaccctatattcccctaaggtcccagattactcaacataggatattcctaccacaaagagttttcgttcccttttggaccctcttatgaagagttgtcattcttcacattcttaggcatgatggacctctgaatgacaggttcccatctgaccaaaaagcctccaatttcagctttgagttatttcagacttttcagatggaagtcattttatatctgtggtttcaaacctgaccagtcatctaaatcacttgagtatttaaaacaaaaaacataacacgcgccctggacctgctgaatcccaatccagagat

SEQ ID NO: 43811 - DNA, 578 bp, Homo sapiens
tttacatttagaaaaatagaaaaatatctggaagaatataccaaattatatcttttaaagaagctgtctctttggggcaggattgtagttggcttacaccttctttgtgcctttttgttttcatttagtctcaagatgtacaatttatagatagcacttttataatccaatccctgtagatctattttcttcagtttttaaaagagcactttattgaggaatgactcacctacaaagttgtatatatttaatgtatacaacttagtgagttttgagacaagtataaacccatgcaaacgtcaccatagtttatgccataaatctatccatcaactccaaaagtttcttcccattctctctaattattattatcattattattattttgtgataagaacacataagatacactctcttagcaatttttctttaagtataaaatacagtgttgtttaccataggcatggygctgcacagtagacgtccggggcttattcatcttgtataaccaaaacgctgtgccctttagctaatgctctgcgtttcttcttgccccagcccctggcaaccaccattcc

SEQ ID NO: 43812 - DNA, 578 bp, Homo sapiens
tttacatttagaaaaatagaaaaatatctggaagaatataccaaattatatcttttaaagaagctgtctctttggggcaggattgtagttggcttacaccttctttgtgcctttttgttttcatttagtctcaagatgtacaatttatagatagcacttttataatccaatccctgtagatctattttcttcagtttttaaaagagcactttattgaggaatgactcacctacaaagttgtatatatttaatgtatacaacttagtgagttttgagacaagtataaacccatgcaaacgtcaccatagtttatgccataaatctatccatcaactccaaaagtttcttcccattctctctaattattattatcattattattattttgtgataagaacacataagatacactctcttagcaatttttctttaagtataaaatacagtgttgtttaccataggcatggcgctgcacagtagaygtccggggcttattcatcttgtataaccaaaacgctgtgccctttagctaatgctctgcgtttcttcttgccccagcccctggcaaccaccattcc

SEQ ID NO: 43813 - DNA, 578 bp, Homo sapiens
tttacatttagaaaaatagaaaaatatctggaagaatataccaaattatatcttttaaagaagctgtctctttggggcaggattgtagttggcttacaccttctttgtgcctttttgttttcatttagtctcaagatgtacaatttatagatagcacttttataatccaatccctgtagatctattttcttcagtttttaaaagagcactttattgaggaatgactcacctacaaagttgtatatatttaatgtatacaacttagtgagttttgagacaagtataaacccatgcaaacgtcaccatagtttatgccataaatctatccatcaactccaaaagtttcttcccattctctctaattattattatcattattattattttgtgataagaacacataagatacactctcttagcaatttttctttaagtataaaatacagtgttgtttaccataggcatggcgctgcacagtagacgtccggggcttattcatcttgtataaccaaarcgctgtgccctttagctaatgctctgcgtttcttcttgccccagcccctggcaaccaccattcc

SEQ ID NO: 43814 - DNA, 578 bp, Homo sapiens
tttacatttagaaaaatagaaaaatatctggaagaatataccaaattatatcttttaaagaagctgtctctttggggcaggattgtagttggcttacaccttctttgtgcctttttgttttcatttagtctcaagatgtacaatttatagatagcacttttataatccaatccctgtagatctattttcttcagtttttaaaagagcactttattgaggaatgactcacctacaaagttgtatatatttaatgtatacaacttagtgagttttgagacaagtataaacccatgcaaacgtcaccatagtttatgccataaatctatccatcaactccaaaagtttcttcccattctctctaattattattatcattattattattttgtgataagaacacataagatacactctcttagcaatttttctttaagtataaaatacagtgttgtttaccataggcatggcgctgcacagtagacgtccggggcttattcatcttgtataaccaaaacgctgtgccctttagctaatgctctgcgtttcttcttgccycagcccctggcaaccaccattcc

SEQ ID NO: 43815 - DNA, 636 bp, Homo sapiens
ttccttttacttttaaaagaggatgcatgaaaacttcataaagtagtttgcttccagactaagaagaaaggaggctgggtgtggtggctctgcctgtgatcccagccctttggaaggccgaggcrggcagatcacctgacgtcagtcgttcaagaccagcctggccaacacggtgaaaccccgtctctactaaaaatacaaaaattagccgggcgtggtggtgggtgcctgtaatcacagctattagggaggctgaggcacaagaatggcttgaactcgagaggcagaagttgcagagagccgagatcgtgccaccacactccagcctggtgacagtggagtaggccacatgcatctgtggtcctgagtaaatgcccttgggcccattttcaaaagcctgttgggagaaagcctgttactcctccactgagagtctcagacccagctcagatggagacagggagaggtgcaggtggatcaagcccaagctccggacttcccagctacctcctgaacctcatcatcccacagctcccaaaggaccccagttacctcggaacagctccagaaactgagggctgtttgctcagcgccccagcatctgtgcagagcaccggaaaagctcaccaactgttt

SEQ ID NO: 43816 - DNA, 636 bp, Homo sapiens
ttccttttacttttaaaagaggatgcatgaaaacttcataaagtagtttgcttccagactaagaagaaaggaggctgggtgtggtggctctgcctgtgatcccagccctttggaaggccgaggcaggcagatcacctgacgtcagtcgttcaagaccagcctggccaacacggtgaaaccccgtctctactaaaaatacaaaaattagccgggcgtggtggtgggtgcctgtaatcacagctattagggaggctgaggcacaagaatggcttgaactcgagaggcagaagttgcagagagccgagatcrtgccaccacactccagcctggtgacagtggagtaggccacatgcatctgtggtcctgagtaaatgcccttgggcccattttcaaaagcctgttgggagaaagcctgttactcctccactgagagtctcagacccagctcagatggagacagggagaggtgcaggtggatcaagcccaagctccggacttcccagctacctcctgaacctcatcatcccacagctcccaaaggaccccagttacctcggaacagctccagaaactgagggctgtttgctcagcgccccagcatctgtgcagagcaccggaaaagctcaccaactgttt

SEQ ID NO: 43817 - DNA, 547 bp, Homo sapiens
gtggaggttgcagtgagctgagattgcaccattgcactccagtctggatgacagagtgagattttgtctcaaaaaaaaaaaaargagtttaacactaattttttgaaagttagaggaagcagaatgcaccgcaagtaataaggagaaacaagattgattccagcgccgcacaaagggaaaccaccaattctgaaagtaaatcatgtgaagggttttttgtgggttttttttatactttaagttctagggtacatgtgcacaatgtgcaggtttgatacataggtatacctgtgccatgttggtttgctgcacccatcaacacatcatttacattaggtatttctcctaatgctatccctcccccagccccgacccccccgacaggccctggtgtgtgatgttccccttgaagggtttttttaaagaccaggtcaaagctaaagatcaagcttttctttccaaacgctttagctaaaagtaggagctaattttcacatctccgaaggtggctccaggactccaagtcacaccttggcaagggtgtggc

SEQ ID NO: 43818 - DNA, 547 bp, Homo sapiens
gtggaggttgcagtgagctgagattgcaccattgcactccagtctggatgacagagtgagattttgtctcaaaaaaaaaaaaaagagtttaacactaattttttgaaagttagaggaagcagaatgcaccgcaagtaataaggagaaacaagattgattccagcgccgcacaaagggaaaccaccaattctgaaagtaaatcatgtgaagggttttttgtgggttttttttatactttaagttctagggtacatgtgcacaatgtgcaggtttgatacataggtatayctgtgccatgttggtttgctgcacccatcaacacatcatttacattaggtatttctcctaatgctatccctcccccagccccgacccccccgacaggccctggtgtgtgatgttccccttgaagggtttttttaaagaccaggtcaaagctaaagatcaagcttttctttccaaacgctttagctaaaagtaggagctaattttcacatctccgaaggtggctccaggactccaagtcacaccttggcaagggtgtggc

SEQ ID NO: 43819 - DNA, 580 bp, Homo sapiens
tgatgttctttgtgggcacagcataggggcagggcagaccaaaaaggcagcgtttgggtggaaaaatggagtcagctgttttcacttagggccaggcttagagtgggtttagctgggaccccaggcattctgtatcaataaggtgactcagtgttatgagctacatatttgtgtccccttcaaagtcatttgttgaaagcttaaaccccaacagggtcagttgcagtggctcatgcctgtaatcccagcactttgggaggccgaggcaggtggatcacttgatgtcaggagtttgagrccagcctggccaacatagtgaaaccccatctatactaaaaacacaaaaattagctgggcttcgtggcatgcacctgcagtctcagttacttgggaggctgaggcaggagaattgcttgaacccaggaggcagagattgcaatgagctgagatcactccattgcactccagcctgggtgacagagaaagactccatctcaaaaaaaaaaaaaaaaagaaagaaaaaagaaaaaaaaaaaaagaaaagagaaaaagaaaaccacaatgggatgctaatagaatg

SEQ ID NO: 43820 - DNA, 527 bp, Homo sapiens
tgaggctgacatgttgcagcagaatgggcaatagaaatcaattactaagattaaaatacagcttttacaacagtgagtggaaaggactgaccttctaaattaacagcagcctaaatggaaagcctactttcttrtgttgcttaattcacatctggggacctgatttaaacatgtcttgcgctgttgttgccatggttgctttgcccatcccatcaacctcatcctgtcacttttctctctgacttctttctctgcccacatctctccctccctgctgctcccgtctcctgtcttcttctggccatttgagatgttccagcagaagatgacccttccccttgtgcgctggaaacgggccacgggcggcagtgccagaacggcacggtgtgcaagcccggctgggatggtcccaagcacggcatcaccaactttgacaactttgccttcgccatgctcacggtgttccagtgcatcaccatggagggctggacggacgtgctgtactgggtacgtagcatgagtgggca

SEQ ID NO: 43821 - DNA, 601 bp, Homo sapiens
tgagaaatattccatccagtgtgcttcccttgcagagatgctgtgataattaatgaactcattggaaaggaacgatattctctatccctttgaagtttggttttacaagaagatctttatatacaaggctgtaaaaattctgttctccttcctgccctttttttcctcaagcccaaaggtccaggagagattatctgcctrtgaaacttccatttcataaatgccagtctcccctgtagtataacctgcagtgtactcagctggtcaatccaagccctgaggccttctcttttcacaaatcaatctgtaagcctgcagactggaagcccctgatagcttgagagctgccaacaaatgggctagggaaagccgtggtttattcacagatgctcttgaccttctgtgttcttttcgaggttgcccacatcttcactgaagaaaccactcgagatggcttggcaggagccacgctctgtgccaggtgttgggcctgggtagtgcacagacaggtgagttgttacattagagagccataagtccaacgcaaagaggtgtgtggggggtaggtacagatcaggaggtagctcaggcaagatgaacc

SEQ ID NO: 43822 - DNA, 601 bp, Homo sapiens
tgagaaatattccatccagtgtgcttcccttgcagagatgctgtgataattaatgaactcattggaaaggaacgatattctctatccctttgaagtttggttttacaagaagatctttatatacaaggctgtaaaaattctgttctccttcctgccctttttttcctcaagcccaaaggtccaggagagattatctgcctgtgaaacttccatttcataaatgccagtctcccctgtagtataacctgcagtgtactcagctggtcaatccaagccctgaggccttctcttttcacaaatcaatctgtragcctgcagactggaagcccctgatagcttgagagctgccaacaaatgggctagggaaagccgtggtttattcacagatgctcttgaccttctgtgttcttttcgaggttgcccacatcttcactgaagaaaccactcgagatggcttggcaggagccacgctctgtgccaggtgttgggcctgggtagtgcacagacaggtgagttgttacattagagagccataagtccaacgcaaagaggtgtgtggggggtaggtacagatcaggaggtagctcaggcaagatgaacc

SEQ ID NO: 43823 - DNA, 512 bp, Homo sapiens
caccatcatagctcactgcagccttaaacacctgaactctgatcctcccacctcggcctcccaaggtgctgggattacagatgtgaaccaccgtgcccagccaccctattgctctgaaatagggttgttccttctttgtgccatgggacatagtctactgaggcatcatcaatcctacctttgaagrggggccctccaagggctcagactatcttccattaaacagcactgttctctggtcttagttacccctcaacccccagagattgagaaaccacctcagtccatacccatgctgaccgctaccacctctgtgaaaacttctctccatcttcttcccaaatggccacacctgaggtcaatcttgacttcctcccacaaccaggatcctctcccctaaggagctatcggtcactgatccgagggccaggactcttttcccaaatctgccctcctttatccccagccccactgaagcagggcccaccactgagagcttcaggccatctcat

SEQ ID NO: 43824 - DNA, 512 bp, Homo sapiens
caccatcatagctcactgcagccttaaacacctgaactctgatcctcccacctcggcctcccaaggtgctgggattacagatgtgaaccaccgtgcccagccaccctattgctctgaaatagggttgttccttctttgtgccatgggacatagtctactgaggcatcatcaatcctacctttgaaggggrgccctccaagggctcagactatcttccattaaacagcactgttctctggtcttagttacccctcaacccccagagattgagaaaccacctcagtccatacccatgctgaccgctaccacctctgtgaaaacttctctccatcttcttcccaaatggccacacctgaggtcaatcttgacttcctcccacaaccaggatcctctcccctaaggagctatcggtcactgatccgagggccaggactcttttcccaaatctgccctcctttatccccagccccactgaagcagggcccaccactgagagcttcaggccatctcat

SEQ ID NO: 43825 - DNA, 534 bp, Homo sapiens
tgcccagctaatttttgtattttctgtagaggcaggttttgccatgttggccaggctggtctcaaactcctgaactcaagcgatcctcccacctcagcctcccaaagtgctggaattacaagcatgaaccactgcacctggcctctatgttacatactggggctttgtgtaaaatttcatttgaaaaacagtatgttgctctttgaaaaaaagcctgggcaacatagtgagagcctgtctttacaaaaataaaaaataggctgggtayggtggctcacatctgtaatctcagcaccttgggaagcctgggcaacatagtaagacctctgtctctacattttttttttttttttttttgagatggagtcttgctctgtcacccaggctggagtgcagtgacgccatctcggctcactgcaaccgctgcctcccgggttcaagtgattctcctgcctcagcctcctgagcatctgggactacaggcatacaccaccatgcctggctaattgtgtatttttagcagagacggggttt

SEQ ID NO: 43826 - DNA, 534 bp, Homo sapiens
tgcccagctaatttttgtattttctgtagaggcaggttttgccatgttggccaggctggtctcaaactcctgaactcaagcgatcctcccacctcagcctcccaaagtgctggaattacaagcatgaaccactgcacctggcctctatgttacatactggggctttgtgtaaaatttcatttgaaaaacagtatgttgctctttgaaaaaaagcctgggcaacatagtgagagcctgtctttacaaaaataaaaaataggctgggtacggtggctcacatctgtaatctcagcaccttgggaagcctgggcaacatagtaagacctctgtctctacawtttttttttttttttttttgagatggagtcttgctctgtcacccaggctggagtgcagtgacgccatctcggctcactgcaaccgctgcctcccgggttcaagtgattctcctgcctcagcctcctgagcatctgggactacaggcatacaccaccatgcctggctaattgtgtatttttagcagagacggggttt

SEQ ID NO: 43827 - DNA, 596 bp, Homo sapiens
cttcccagcatcccagctcttcagtacttctctttactcatatatcctcgcatgctttggttcttaggccttaggttactttccattatcttcttttatcttttcagtattccattacacatatctctattcctttccttccaactttctctgcctccttttgtctatgactaatttgttgtttttttctaagtacccctgataggagctgctgttaatccaaaattcttttgttagccaaaaacatacccagaaataaattcatgtatatccattagtcagatatttttatatctattaagttttatatccataaaatttgtgtgagtttgctaggagttcctcccaagggggtggcactcagataggtctttggttatagatggagggccatgagctcaggtgacccaggtgactgggccgaagaggcagagtccttgtggaaaacacaaaggtctaagagtagggtatctgagactggcaggagccagggcagtatggagattggaaaagggttgtatgaggracttgtctttacagtattagtaaacatgctgcagtactttgttgatttcttggtaaaattgtgaaaaaaa

SEQ ID NO: 43828 - DNA, 596 bp, Homo sapiens
cttcccagcatcccagctcttcagtacttctctttactcatatatcctcgcatgctttggttcttaggccttaggttactttccattatcttcttttatcttttcagtattccattacacatatctctattcctttccttccaactttctctgcctccttttgtctatgactaatttgttgtttttttctaagtacccctgataggagctgctgttaatccaaaattcttttgttagccaaaaacatacccagaaataaattcatgtatatccattagtcagatatttttatatctattaagttttatatccataaaatttgtgtgagtttgctaggagttcctcccaagggggtggcactcagataggtctttggttatagatggagggccatgagctcaggtgacccaggtgactgggccgaagaggcagagtccttgtggaaaacacaaaggtctaagagtagggtatctgagactggcaggagccagggcagtatggagattggaaaagggttgtatgaggaacttgtctttacagyattagtaaacatgctgcagtactttgttgatttcttggtaaaattgtgaaaaaaa

SEQ ID NO: 43829 - DNA, 528 bp, Homo sapiens
taagccatgagttctgcttgtcctttagccagccatgtgtacacagacttgttgtcacactctggcaccatgaccaggtttgtgtcagggaaacaaggtgaggagaggctagtgggaggctgcctggaaaaggggacatcgagagaggtttgaagagggtatatgccaagagaggacaccagccacatagagagttgtcagagcagcaaagtcacggagccatgtcgtgcgtgagggcaagccaggctgagaagcaggcaggggccctaggagctgctcctagaacatgggaaggctgcattccccatctctsaaaatctcagaagtaaccaagagacccactgagtcatttttggccaaggatcctcaggtgttttcacacacgagccatttggagaaggcaatgagcccccaaggagtaacagtcctttcttaacgagtcacacccaaacacctgacactctgttgctcgcttctgtgtctttgatttctagatgtcatagctatgtgaaaaacaaactttaaaaa

SEQ ID NO: 43830 - DNA, 1063 bp, Homo sapiens
caaaggtcttgaggtttggcttgtcccaaaagcgaaaagaggaagagcgtgattagagctcttatgataagttcccattgcagggtaaactcagcctcactagggcattgaaaagggctggccataacctcagggtgtctagatgggtctagcaagctgttccctgcaacactgtggtgggtgggggaaaggaggttggagctgaacacctgccttcctgtggccacgacatggagcctgggttggagtgctgtttactccaggggctcctgagttggaagcacacaaagggcaagcctctgtcttagaactggccctgtggattggtacgggggctgcggaccccaccctragtcacctctccagcctgattctcaccactgcctccttgcccttgacatttcagcagtccataaacctgcactccaggatcactcctttacaggaagcattatcctgccttaagaatctgcccttggccaggcgcagtggctcgtgcctgtaatctcagcacttagggaggctgaagtgggcggatcacttgttaggagtttgaggccagcctggccaacgtcgtgaaaccccatctctactaaaaacacaaaaattagcctggcatggtggtaggcgcctgtaatcccaactactcaggtggctgaggcaggacaattgcttgaacctgggaggtggaggttgcagtgagccaagattgtgccactgcactccagcctgggtggcaaagtaagactgtgtgaaaaaaaaaaaaaacctacctttagctggttgtggtggttcacatctgtaattccagtgactccagaggacaaggaagcaggaggattgcttgaggcctggagtgtgagatcggcctggacaacagagtgagaccctgtccctaaaaattttaaatttaaaatttagctgggtgtggcagcccatgcctgtagtcccagttacttgagaggctgaggcaggagaagtaattgagcccaggagttggaggctacagtgagctataattacaccagtgcaatccggtctaggtgacagaatgaggccaaaa

SEQ ID NO: 43831 - DNA, 570 bp, Homo sapiens
tatcattgcagacttgctatttaggcacttaggaatttttcactagaaggcatgtaagtaagaccatgggcatttgtaatgaatttagcattcattctttgactacatgactgtccccagagctgtaactttattgaattttttagaagccattwagctagcaactgagcctaaccagccactcaccgtcattattcagtgctcttttattattgtctatttctcctccaacttggctacactcacaaagtgataaaaacttgcatttgttttctttccttttcagagacagcgtcttgctctgttgctcaggctacagtacagtgacatgatcatggttcactgtagcctcaaactcctgggctcaagtggttctctcacttcagtctcccaagtagctgggactaaagacatgtgccaccatgtccagctaattttttatcatagagacgggatcttgccacgttgctccgactgggctcaaaactcctgacctcaagtggtcctcctgcctcagcctcccaaagtgctgggattacaggcaggcatgaccacctgtgcccagccccc

SEQ ID NO: 43832 - DNA, 570 bp, Homo sapiens
tatcattgcagacttgctatttaggcacttaggaatttttcactagaaggcatgtaagtaagaccatgggcatttgtaatgaatttagcattcattctttgactacatgactgtccccagagctgtaactttattgaattttttagaagccatttagctagcaactgagcctaaccagccactcaccgtcattattcagtgctcttttattattgtctatttctcctccaacttggctacactcacaaagtgataaaaacttgcatttgttttctttccttttcagagacagcgtcttgctctgttgctcaggctacagtacagtgacatgatcatggttcactgtagcctcaaactcctgggctcaagtggttctctcacttcagtctcccaagtagctgggactaaagacatgtgccaccatgtccagctaattttttatcatagagacgggatcttgccacgttgctccgactggsctcaaaactcctgacctcaagtggtcctcctgcctcagcctcccaaagtgctgggattacaggcaggcatgaccacctgtgcccagccccc

SEQ ID NO: 43833 - DNA, 572 bp, Homo sapiens
attacttcattctttttttttgagccggagtctcactttgttgcccaggctggagcgcagtggcatgatctcggctcactgcaacctccgcctcccaggttcaagcgattctcctgcctcagcctcctaagtagctgggactacaggtgcccatcaccacactggrctaatttcttgtgtttttggtagagacagggtttcaccatcatggcctggctggtcttgaactcctgaccttaagtgttccgcccatcttggcctcccaaagtgctgggattataggtgtgagacaccgcgcccagctgcctattacttcattcttatttgaaaacaaaatattgaacatttccctcagcaagccacactgtgtcccactccaagatgttcactgctcccacttcctctctacctaatgggatgagatctttaggatacgtttgcctccctattcctttcccttcttccctctccttttccatttatttaccttgagggctttcaaaggtttttctttgttccctatccagtccttttccaacttaggttttttgttgttgttgttgttgttttgt

SEQ ID NO: 43834 - DNA, 1474 bp, Homo sapiens
ttgtttgcttctcttgttttctgttatgtcatctttaagtctcatgtggctttctatttttagtgatagacattatatatggaaaaattgtagagctaatttgaagccttggatgatattyttctccagagaggatttacatttcccctgccaggggcttggaaattaacaatcagggattgagatgattaaagctggccatcattccctgttggggcattttgcagtttgctcttcagattcccaacctaaggagtgggagacttagcagggcctctcctcggtggatgctgagctccaatgtttatctccctgtgagctctgtgaggctgtgagttctagctcagcttgttaacctcttcttctctgctgtcattggaagaaaacccaaggtgtaaaaaagaagaccctgttctctggtattcccttttctcagccctgtaatcattacattttgtccacctttctagttctcagtgagaggattgatctaagttacctactctatcattattgcaatggttcctttatatagttctattgaagtgaaaccccttcatatgttacataagtttaccataacactgttctgtttgggcctgattttaacttcatttttatttgctttggttttcatttcattttttctgtactaattttacctttatgactctcacccattatctgataataaatgtacatattcttttatagattcttttaaaatcttctaaatagtatatagtattaacgatgttcttaaaattaattaaacttgcttatttgctttttaggataactttccatttgatcctccatttgtttgagtggtgttacctgttctctcaggagcataagtttaagtgattaagtgattacttgaaatgcttttttttttttttttagtttaaaaaatttttttgtagagatgaggtctcactatgttgttctggctgttcttgaactcctgggctcaagtgatcctcccaccttgctctcccaaggtgctgggatgacaggcatgagctgctgtgcctgggctacatttttttttttaatatagtgtgcaccagaatcatttggagagctagtcccagggtttcagattcagtaggtctgtggtgttgcctgagcatttacgtttttaagaagttcccaggtgaaactgatactgttgttctggggcctacatctggaaccactggttataaagcattatgttgttgataggtagagattttagtgttatatatatgcatatatacacatatatatacacacacacgcacatatttacacatacacacacacatatatatatatattcatacatactttttttatcataaaaaccaaagattttttcaaatgtaaattgtgattgaaggtttagagaacgttatgattacagagtggtcccccacatacctatgatcctaattagtacttctaggaataatcatgggaaatctca

SEQ ID NO: 43835 - DNA, 532 bp, Homo sapiens
ttcaattaaaaatttcaaccacttggtccaaatgatgcattaattccaaggtcagtgtaagaaggtgatgattagaaaacccttagagaatctgttgatatttagaaatttatcgttatttgaaaaacttgtaataaattcaacaaatattaactatttaacaaaaacaagacattactagtaagttgtcaaaagaattctcctgctggccttttctagcaggctggttaattattaggacaaaatggttcacctaattgacaaatttatctcatttggttaagttggggtatccctgaggtwatatggatcatgtgtattaatacttgaaacgtatttattcaaatactggtgttttatttacttgttgtttgactttaggcataaatctaactttgtgaacattgttttgtccttctatgtggcaggaataataatagaaccatatatgttaccctgaggatgaagcgtgattataagttagtacatagaagtatgactgattctcctcaattcacatagcttaggctgc

SEQ ID NO: 43836 - DNA, 544 bp, Homo sapiens
tgcaaacagcagcaggggtctttcacctctgcttttccacccctgaaagtgatagcagcttcttgtttttattctccagattcctccacccagagatgtgaggcttgtttgcagttctgtacacagcacagctgaaccttttcactcaggttcctttcctctttccacacagctagatgacaactctaacctcctcaagcacaatccatgttagaaggaaagatctagagagatgctaaaataaggcacactaggcaaagtagagggtttggtgccagtctacatacggcacgagatcctcagtctgccttccttagcctatttccagatcgctggctggcagacgagcctgatcccactgccttgcctctgacctagagttacagtcatcttccytccaagtctgagcagccacacgaaccccagatacttacatctgggagcaccccagtgacaaagccagtgacttaatgtatttaatctatatgtatccattattttgataaatgtttaaccatatatttatttttaaattgcaagaatg

SEQ ID NO: 43837 - DNA, 565 bp, Homo sapiens
catcattttatgccattcaggaagggagtgctaagcacctgtgttcttctcctgggacataagtggcttttctcagcataggattgccttaaggacaggtgtgcccagaagcaaagctttccagaagccagaggagstgcccttgtgatgatgggaccagctgtgcccaacttgtcccacccttagggcttcgtcctgcctggtggctgcacaggcttggccagaaaggacccatcccctgcccctcccatcaaggaggcagcccgaattggggacagagagagcctactttccccacgtggccgggggagaaaggagaaccacggagctggctcactaatcactcacccctacacccagggagccagaggatttagaatatggccgggctgttcccaaaatgaggtgccggtcagagggaaagccaaagcacggaggacagggttagaattcgcaattacctccatgagttggcaaaacgaaggaagcaacagagcgcggtgcagtgacaggagcgagagggtgctgggcaagggcggccctgagcagcaggaagtgagggaga

SEQ ID NO: 43838 - DNA, 565 bp, Homo sapiens
catcattttatgccattcaggaagggagtgctaagcacctgtgttcttctcctgggacataagtggcttttctcagcataggattgccttaaggacaggtgtgcccagaagcaaagctttccagaagccagaggagctgcccttgtgatgatgggaccagctgtgcccaacttgtcccacccttagggcttcgtcctgcctggtggctgcacaggcttggccagaaaggacccatcccctgcccctcccatcaaggaggcagcccgaattggggacagagagagcctactttccccacgtggccgggggagaaaggagaaccacggagctggctcactaatcactcacccctacrcccagggagccagaggatttagaatatggccgggctgttcccaaaatgaggtgccggtcagagggaaagccaaagcacggaggacagggttagaattcgcaattacctccatgagttggcaaaacgaaggaagcaacagagcgcggtgcagtgacaggagcgagagggtgctgggcaagggcggccctgagcagcaggaagtgagggaga

SEQ ID NO: 43839 - DNA, 552 bp, Homo sapiens
aaggcagccccaagccagcaggaggaaggaaattgtaaagatcagagcagcgataaacgagacagagatgagaaaaactggcgagtcgacgaaaccaaaagttggttctttgaaaagagctaggtgattgacaaacctctagcggggctgaccaaaagcaaaaccaaaaaaaaaaaaaaaaagaggaaataagatgcagataactacacgcagaaacgaaaggaggacattactaccaactgtatggaaataaaaggcattatcagagaacacggtagcattatgaaccagtgtgtgacatccaattaggtaatctacacgaaatggacaaattcctagaaaaacgcgaatgaaacagatcagcgatggtttcaggttcagctcacatctcttagatactgacatgccagcatggtgctgagcatatatatatayacatatatatatgtaatatacattttatatgcaatatatatgttatatattatatgcaatatattatgttatatattatatactatatattatattttatatgtacatctcattaca

SEQ ID NO: 43840 - DNA, 552 bp, Homo sapiens
aaggcagccccaagccagcaggaggaaggaaattgtaaagatcagagcagcgataaacgagacagagatgagaaaaactggcgagtcgacgaaaccaaaagttggttctttgaaaagagctaggtgattgacaaacctctagcggggctgaccaaaagcaaaaccaaaaaaaaaaaaaaaaagaggaaataagatgcagataactacacgcagaaacgaaaggaggacattactaccaactgtatggaaataaaaggcattatcagagaacacggtagcattatgaaccagtgtgtgacatccaattaggtaatctacacgaaatggacaaattcctagaaaaacgcgaatgaaacagatcagcgatggtttcaggttcagctcacatctcttagatactgacatgccagcatggtgctgagcatatatatatatayatatatatatgtaatatacattttatatgcaatatatatgttatatattatatgcaatatattatgttatatattatatactatatattatattttatatgtacatctcattaca

SEQ ID NO: 43841 - DNA, 549 bp, Homo sapiens
cacacatttgcatgcacacacagacacacatgcacacacagacgcacatgtgcacacacacgtgcacacacatttgcacacacagacacgtgcacacacagaggtgcacatacacgcacagacacacatgtgcacacagacacacacatgtgcacacacacagacacacacacacgtgcacgcacacatgcacgcaggagcgagcgcctccacccagccctgcatctgaagcaaggtcctgctagtaaacatgcacagactcaagaaacgaggggctgcaggacttttcctcctcctgcccaaaggcacctgcactcacaaaagactcagaggctccgcctggccgggtcagcgaatggagttgtagcaccgtttcaggaccgtgatagagaaagacgggaagttagacttctgacccrtcacaaactctgagtcaaagtgcgatgtgcccaggccagcccggtgtgacctcagctcctgatccataaaatcaggacagtgaccgaggatgctggggccacctcacctgcagccccgggtcagcctcag

SEQ ID NO: 43842 - DNA, 569 bp, Homo sapiens
aggcgggcggatcaccaggtcaggagatcgagaccatcctggctaacacggtgaaaccccgtctctattaaaaattcaaaaaattagccgggcgtggtggcgggtgcctgtagtcccagctactcaggagactgaggcaggagaatggcgtgaacccaggagacggagcttgcagtgagccgagatcatgccactgcactccagcctgggcgacagagcgagactcygtctcaaaaaaaaaaggaaagtgaccttctcaggagcacaaagacccggggggtcttggagacagtacttggctcaggtgtctgatcccagcacaaaactgtagataaaataaccctggtgaaaaagcccatcacagggcctgggagggagaacattgctcgtggttctgacccgcagctttccttgtttatgaaatggatacagccaggcatggtggctcacgcttggcatcccagcactttgggaggccgaggcgggcggatcacctgaggtcaggagttcgagaccagcctgaccaacatggtgaaactcccgtctctactaaaaatacaaaaattagc

SEQ ID NO: 43843 - DNA, 530 bp, Homo sapiens
aaaaattttttttttttttttttttttttttttttttttttttttttttttttgaggaggagtgtcactctgttgcccaggctggagtgcagtggtgcaatctcggctcactggaagctccacttcccaggttcataccattctcctgcctcagcctcccaagtagctgggactacaggcacccgccaccatgaccggctaatttttttgtatttttagtagagtcgggctttcaccatgttagctaggatggtytcaatctcctgacctcgtgatccacccgcctcggcctcctaaagtgctaggattacaggcgtgagccactgtgcccggccggaacaatatttttttaagtactaaaaggaaaaaattagtcaacctagaaatctctaccccatgaaaacatctttcctttttttaatttttattttcattttgagatggagtcttactctgtcttccaggctgcagtgcagtagtgcaatctcggctcactgcaacctccacctcctgggctcaagcaatcctcg

SEQ ID NO: 43844 - DNA, 593 bp, Homo sapiens
tggtcctatttatttcctgttattttcttcagattatacttacctattttattttaaactgtctctctagtagaatagaaaatgtataatgattctcaatcatttttatttgccacagtacttctgagaaatctgtagtggttgcttacaacagcaggaagtctgtaagagaagacagtgaatagaagggcagcaaatattaacatctctggtgcgaacagaagaaacttctstagttacaaccacctcacattctgatgcttccctcagggggggcacatgaaccccactcccacctctcatgcttacccctttgaaaatcactgttgtaaaaatccaaattgtgtttcatcagcttctatgagggcattctgcacacacaatgttaaactgagtcaatagtatttgggtttctggtcagaacagtggagtataactgtagtttaaaaggatcatttgcattacttaaacaatccttgacagtaacttttcagaaaaaaaaaaattagagtattatttatctgaaatttattatcctgagtgttaaaatagactaaaatgaatacttagatctgataatcatttggctagac

SEQ ID NO: 43845 - DNA, 541 bp, Homo sapiens
cgggacagagcaagactccctcttgaaaaaataaataaataaaaaaggaaaaggaagaaaarcaactgtttaaattgtattaggtattataagtaatctatagatgttttgaagtatacgggagggtgtgcataggtcatatgcaaataatatgccatttatgtaagggacttgagcatctatgccttttggtacccaggaattgcctggcaccaatccctagcagatactgagcaagggacaactgtatttccaattagggagataagtcaagattttacaaaagtggtagtatttgagttggctctcgtaagaattttgagtgaagatgcactgaaagggccaatccagataaaaggaagagtgtgaactgaagctggaaagtgcgtcctgtgttcaggagatgaccacatcaatttcttctaatagagacaaatggggtcagatagctgcagtctttgaatgccatactactgtctgaacttcattctctagtctgtggggagtcatcaaagtttataagcaggagtgtgacagaccc

SEQ ID NO: 43846 - DNA, 541 bp, Homo sapiens
cgggacagagcaagactccctcttgaaaaaataaataaataaaaaaggaaaaggaagaaaaacaactgtttaaattgtattaggtattataagtaatctatagatgttttgaagtatacgggagggtgtgcataggtcatatgcaaataatatgccatttatgtaagggacttgagcatctatgccttttggtacccaggaattgcctggcaccaatccctagcaratactgagcaagggacaactgtatttccaattagggagataagtcaagattttacaaaagtggtagtatttgagttggctctcgtaagaattttgagtgaagatgcactgaaagggccaatccagataaaaggaagagtgtgaactgaagctggaaagtgcgtcctgtgttcaggagatgaccacatcaatttcttctaatagagacaaatggggtcagatagctgcagtctttgaatgccatactactgtctgaacttcattctctagtctgtggggagtcatcaaagtttataagcaggagtgtgacagaccc

SEQ ID NO: 43847 - DNA, 541 bp, Homo sapiens
cgggacagagcaagactccctcttgaaaaaataaataaataaaaaaggaaaaggaagaaaaacaactgtttaaattgtattaggtattataagtaatctatagatgttttgaagtatacgggagggtgtgcataggtcatatgcaaataatatgccatttatgtaagggacttgagcatctatgccttttggtacccaggaattgcctggcaccaatccctagcagatactgagcaagggacaactgtatttccaattagggagataagtcaagattttacaaaagtggtagtatttgagttggcyctcgtaagaattttgagtgaagatgcactgaaagggccaatccagataaaaggaagagtgtgaactgaagctggaaagtgcgtcctgtgttcaggagatgaccacatcaatttcttctaatagagacaaatggggtcagatagctgcagtctttgaatgccatactactgtctgaacttcattctctagtctgtggggagtcatcaaagtttataagcaggagtgtgacagaccc

SEQ ID NO: 43848 - DNA, 541 bp, Homo sapiens
cgggacagagcaagactccctcttgaaaaaataaataaataaaaaaggaaaaggaagaaaaacaactgtttaaattgtattaggtattataagtaatctatagatgttttgaagtatacgggagggtgtgcataggtcatatgcaaataatatgccatttatgtaagggacttgagcatctatgccttttggtacccaggaattgcctggcaccaatccctagcagatactgagcaagggacaactgtatttccaattagggagataagtcaagattttacaaaagtggtagtatttgagttggctctcgtaagaattttgagtgaagatgcactgaaagggccaatccagataaaaggaagagtgtgaactgaagctggaaagtgygtcctgtgttcaggagatgaccacatcaatttcttctaatagagacaaatggggtcagatagctgcagtctttgaatgccatactactgtctgaacttcattctctagtctgtggggagtcatcaaagtttataagcaggagtgtgacagaccc

SEQ ID NO: 43849 - DNA, 596 bp, Homo sapiens
tttattcttcacagttggcattcaaatgattcaatgtatcttactttttgttaagtcatgaagctttcagaggaagaggtcacctttcctctgaaataaggtcacccttatttygcattcagggacagtggaagatgagtaattaattaatctcaccaaggttctgtaaggtgtcaaaagggatggcagagaagacgccaatatcctctgtttgcctgctaagtcatattgtctcttggaaaactgcaactttatatgtcttttctctaataataataataatgtcaactattattaattgagcatgtactatttactgagcactcccttgagaagtggaaggtgaactaaaaagcagttggtggacactgctaagtactaatacatgttccaagtattagcaagattaaaaggtttttgaatccagaacatgaatatgtcatcttagttgtaaaaactactgcaacaaagcaaactaaaccctttgggtggaagatttacatcaatccttttaagataaatattggtccctatcacactaaggcaagaaaatacacagcagaggagaattcattatcttgaagattaacacatgg

SEQ ID NO: 43850 - DNA, 563 bp, Homo sapiens
tgatgtgcacagcagttttctcattccagggggtacagctttgtcctgagttacttgtcaggctagctctccactgtgggccatgttatgcctagcaatttcagctatgataccatattggaactcctggaataatagtattgatccagagcaagccctttaaattctgtagttttgactgctaacaaccttgaaagccattcttacagacaaattagtgcctctatcccctggacccatttattctagctctttaccattagctactgccactaccatctctgctggtccaaagatgagcattcaagactgctgagaccagctcagtcatggakaccctaacccagcggtgctagaggaattaaagacacacacacacagaaatatagcgtgtggactgggaaatcaggggtctcatagccttcagaggtgagagcctcgaacagagatttacccacatatttattgacagcaagccagtgataagcattgtttctatagattatagattaactaaaagtattccttatgggaaacaaagggatgggcctaaataaagggat

SEQ ID NO: 43851 - DNA, 545 bp, Homo sapiens
aactacatgcagcccatttgaatggaaatacagttctctctgtttaatccaactacaacctaatcctactactaacttatatttatatcatgctgaccatttacaaagaactttcatagacatcacctcatctggttattctagcaaactctaaggaaataattttcttccttttcctgctaagggacttgaggcttacatgaattaaatgatttgctcaggatcacagagccaggcagtgggggatgtgcggggaagcacacctcatgtttggattaaaaagccacagctcctttggcggcatcaagctgcttctttgactacatactcattcgccttctagaaacctraaaagctgggctccccaatcacagactggcttcaataaacaaaaaggctgacctaagtctttctattcttcctgggtatacacagtcagtctgaagcccaaattatggaagcactccctctaattctgctctcatgggatggctttcaaggattgcagctggttgcgagccagctctgctgttgaatgggtgcag

SEQ ID NO: 43852 - DNA, 545 bp, Homo sapiens
aactacatgcagcccatttgaatggaaatacagttctctctgtttaatccaactacaacctaatcctactactaacttatatttatatcatgctgaccatttacaaagaactttcatagacatcacctcatctggttattctagcaaactctaaggaaataattttcttccttttcctgctaagggacttgaggcttacatgaattaaatgatttgctcaggatcacagagccaggcagtgggggatgtgcggggaagcacacctcatgtttggattaaaaagccacagctcctttggcggcatcaagctgcttctttgactacatactcattcgccttctagaaacctgaaaagctgggctccccaatcacagactggcttcaataaacaaaaaggctgacctaagtctttctattcttcctgggtatayacagtcagtctgaagcccaaattatggaagcactccctctaattctgctctcatgggatggctttcaaggattgcagctggttgcgagccagctctgctgttgaatgggtgcag

SEQ ID NO: 43853 - DNA, 577 bp, Homo sapiens
taaagaccctgaggtaagaacacagccagcatgtttgagagagaaggccaataaggctggagcagagtggtagcagagaaggagagcatgaggaccaagaggctgaatggggtcagaaaaggcagactcttgtagataaggtcagagtttgacattttaaaagacagatttgcctgggtgcggtggctcatgcctgtcatcccagcactttgtgagaccaagataggaggayagcttgcgcccaggagttcaagaccagcctgggtaacataatgagaccatctctacaaaaaaaatttaaaaattagccaggcatggtggcatgcacctgtagtctcagctactcaggaggctgaagttgggagatctcttgagcctgggaagtcaaggctgcagtgagtcataattgtactactgcacaccagcctgggtgacaaagcaagatcctgtctcaaagaaaaaacaaacaagcaaacaagcaaataaataaaaaccagatttactgatgtacagctgacaaacaatatactgcacatgtttaaagtatactcttttgggttagttttctttcatttag

SEQ ID NO: 43854 - DNA, 613 bp, Homo sapiens
cagatttaatgaaaaaaaaatggataattatctaaattgcaaaacaaaagctagaataatatatgagtaccatttrgtggtatgtctaggccaagtttgggtaaaatgatggacagaagccaaaggaccacaacttccaagaggaaatgctattgaccttgaacatgagctcaatgtcagagggagtgtttatgaaggaaggtcgcacagtggcgttcaatgctacagaggtttcctgtccttccatttccactcttgcctcacactgcagcaagaacagtccttaaaaatgcaaatgaggtccgggcacggtggctcctgcctgtaatcccagaactttgggaggctgaggcaggcagatcacctgaggtcaggagttagagaccaatctgaccaacatggagaagcaccatctctaccaaaaatacaaaattagccaggcgtggtggtgaatgcctgtaattccagctcctcgggagactgaggcaggagaattgcttgaacccggccgggaggccaaggttgcggtgagctgagatagcgctattgcactccagcctgggcaacaatagagaaactccatctcaaacaaaaaaacaaacaaacaaacaaa

SEQ ID NO: 43855 - DNA, 613 bp, Homo sapiens
cagatttaatgaaaaaaaaatggataattatctaaattgcaaaacaaaagctagaataatatatgagtaccatttagtggtatgtctaggccaagtttgggtaaaatgatggacagaagccaaaggaccacaacttccaagaggaaatgctattgaccttgaacatgagctcaatgtcagagggagtgtttatgaaggaaggtcgcacagtggcgttcaatgctacagaggtttcctgtccttccatttccactcttgcctcacactgcagcaagaacagtccttaaaaatgcaaatgaggtccgggcacggtggctcctgcctgtaatcccagaactttgggaggctgaggcaggcagatcacctgaggtcrggagttagagaccaatctgaccaacatggagaagcaccatctctaccaaaaatacaaaattagccaggcgtggtggtgaatgcctgtaattccagctcctcgggagactgaggcaggagaattgcttgaacccggccgggaggccaaggttgcggtgagctgagatagcgctattgcactccagcctgggcaacaatagagaaactccatctcaaacaaaaaaacaaacaaacaaacaaa

SEQ ID NO: 43856 - DNA, 533 bp, Homo sapiens
agacacaggtgttttgttttatcacagtccttggtttttgtttccatatttctgctatgatgacggaataagagctttatcttctcgttctttaactctatggtaattgcaagtactttacttaagagaaattcaattccaagggctcmcacaagagggaaataagagaacaaagtgctgatttgaaagctgacccttgtaagagaatcagcatgcatgggggctctaacatgccaaatactgatgcatgcatgcacttaggtcatctcaggggttccttctagagggtaaaaccatccctcattaaaggaaatcacctgcataaagcccatgccagagtgccaggcatcagtcaaagctcagtgaatggtgtctcttaacatttctatatattattatcagtgaaatcaactgaggctcagagtgtggagacaggagtagaatctagttctttttactgaaatgctactctcttctcactaagaagaaggataagaagttctgcttcttcccttcataaggcataggggctg

SEQ ID NO: 43857 - DNA, 579 bp, Homo sapiens
actcattcctggatgtagaggttgctgggagcagtaggatcatccactgggcgtgtctccaccactacaggcctgtggaaggaagagataagtcagttcatttattcattcatatgttcattgattcattaattcacaaagtagttaatagagactgtgccagccccatgctgaactatagcagtgaatgggcagacacggtccctgcccttaggaagcttgcattctagagaaggagatcaacatgaatcagtgaattacatgagtgcaaaaaagcatggcatgtctggcagggaaacctaacccaggaggtcagcccagactccccagagaatggatggtgcagcctgaaggggggttaggagggaacttggtgaaagggcaaggaagagtgttctggctggggagaacagcctgtgcaaaggatttgaggtgggagaaaggctgggacttggctggagatgtyatggccttgtgggctgtggccaggattgagtctttatcttgaggccatgggaggattttaagcagggagacagtgacacgatcagatttggatttaaagtgacccttctggca

SEQ ID NO: 43858 - DNA, 558 bp, Homo sapiens
attttcattcatgaccctcttaggctttctgaaaaatcctgtgactaaacttctcctatggggtaagtgactcattgaacaaacatacaaatgcacaacacacaataaatgctgagtaaactctttgtatgtttattgtttcagcctgtttaaaggaattcctgttatttgaaatataattaatgtccggtatgacacacagaatttccaatgtctcttgtggcactgtagtttgagttcatctgktcttctgagagtttcaaatataattattataaatatcaaaaggaagataatctataaagagattaaccatttgacacttttattgaggaaaatattaagcaacaaggattcccactccccgccaaatcactgaaatattttaggtaacgacttggccgtgcatggtggctcatgcctgtaatcccagcactttgggagaccgaggcaggcatatcacctgaggtcaggaggttgagaccagcctggccaacatggtgtaaccccatctgtattaaaaatacaaaaatcagctggcatggtggcaggtgcctg

SEQ ID NO: 43859 - DNA, 573 bp, Homo sapiens
tgtactcagtttacatgtactagttcttccaacttgccatgattttttttttgaagtgtaatcctctttttgttttccagagtactggcatcctagcctggttcaaagaaattgacatattatgtgtcactaatgaaaaggaaaaacatcaggctaaagactgtcatctagagagtattattcagaatctacttccacaaacttcccagggtgggccaggtrggtttagatttcaactctgccatttactagtttcaggactgtggcaaatattgaacattttttggagaataataatgcctacttcccagggttatcatgaaaaatgaattgagttaataatggaaagaatatggcagagtgatacgtgctctgcataatactatatatattcattattttatcttctttatggaacaaccattataaccactttgaactactttcacagcacaatggtaaaggccaagagagctcattcctctatagaatgaaactcaatatgaaggatgaaaggctggtcaaaataataagtcaaaagacttaactcttagcatatacctcaccatcctg

SEQ ID NO: 43860 - DNA, 495 bp, Homo sapiens
aaaaatgtattcatttgtcaaaactcactatacatttaaaatgacattatcttattatatatattataacttaataaagttgaaaatgtggcgtatgcttaaaacagaatatcaagtagcaattaaagattatgaattttatgtacacatggcaacatggaaaaggaggaaagaaccaagcaggatttatagcacaatacttcagcattaatggagagggagcttattatactggtcaaggaggtgtggactctagaaccagacagcctcagctgaaatcctggctccacacttatgagttacatacccttgggcaaattacttaatctttctgtgccaagagggatagsagtacttgccacacagggttcttgggaggatccgataaattaatgttgctaaaagcttaaaacagtgtctgggatttgaaaaatgctatgtaagtatttgttaaaaatatataataaaacagctgggccaagcacggtggctctc

SEQ ID NO: 43861 - DNA, 539 bp, Homo sapiens
atctatttttttcttttgkgcctgtgtttttggtgttatatccaggaaatcgtggccaaatccaatgtcataaaggtcttgccctgtatgttttaggtctcacatttagctctgagttcatgtatgttctggccaagtgtgcgtccagccactctgctattcgctgtgagtcagcgcacgctcgggtgggaggtgacggtctggctcactcctctgcgtgtggatatccagttttcctgggaggcgagggtctggccacactcctctgcgtgtggatatccagttctcctgggaggcgagggtatggccacactcctctgcgtgtggatatccagttctcctgggaggcgagggtctggctcattcctctgcatgtggatatccagttttcctgggaggtgagggtctggccacactcctctgcgtgtggatatccagttctcctgggaggcgagagtctggctcattcctctgcatgtggatatccagttttcctgggaggcgagagtctggctcattcctctgcatgtggatatcca

SEQ ID NO: 43862 - DNA, 600 bp, Homo sapiens
tgaaggatgagtaggagctctaggttggtaagacataatggaagacatttcaggcaaagagaataatgaattgcacgagtgaaggcagaaaggcttttggattccttatacacctgtgacctctaagaactctgaaagttaatgcaaatcctaggccagtgcttctcacactttctgtgtatacaaaccatctggagcacagtaatattcaggttctgattcagaaggcctggagcgagcctgtcattctgcatttctaacaagmtcccaggggcctggggaccacactttgagcagaaaggctctaagcactgtaaactgttgtgtgtttcagccaggcctgctacttggtgtagcctagaaacaagatggagatcacacatttgtcttttgccacgagaaaatttatagcaagtatctaaaggccctctttttgagactgtgatatttcagaaacagattctgcattgtacctgcaccagcccaggtataaatagagtgactcatcctggaggccacttgtccagatgacatgggagcaagcactacaggaaaggtgagggaaaggtcctggcaggccaggctagttcctgtgcatcc

SEQ ID NO: 43863 - DNA, 1264 bp, Homo sapiens
aaacacacacatacaagtccttaatcccagatgtacatctgctttattcttttctttttatagattggctactcatgcctaatcctcaagtccaagttcatctggtcctttggttgaagttttcatgcttgctaatgcaatctctgtgacgctacttttagattccaagaagaaagaatcatctggtactggatctgagatacatgctgaatccagagcctgtgagtctatagtgaaaagcagtctgaattctgacacagatgaccagtgtaaggtcttgaatatgtcacttcatgtccctgggttgcagtttcaagatcaagtcaggagagggagacagcaaaattattggtagagttctgagcctgacaggccagagtgtaggagcaggcagggaccaacaggaaggtgattctctatctctatccctgctcagaacttttcagaacttcacttttggcatcatcttcagagactgtactagacacacaagataaataatttgatttttttatgtgtacttttttccccactgcctatccttttaaatttcactcactttgttttcttttcctgtctccttcatctgccctttaaacaacagtctgaggagttacaaagatagagcctggtgcatgcatcagagaccataaggaaaggctggagggcaggaagaggagtcrtaaggctgttccaagcctggaagtctgactcacagtacatgggagtcagcctcatttttcatttctatattagctattattaggcttttagaaattggcaaatgtcagttttgactaactctgttttgttattgctgtgataatataactgtacctcatttctaaaccatgaaaatggagttttctaaaataactgatatgagttattaatcaaaatgaataatataagaaatacttcctactaattttaaagatatgggaactcaagctgataatatggtactttggactgagtactgttaatgacagttattagaattctggttgctaagaagtaaaggctggccttagtctcagggaccaacccatctgtatatattctttgatatgcttattaaaaaatccatttcattcttttatgatcatgctctatacttattgccctgagaaagaatcaacctcaggggtccaagctttgtgggaagaagtgatttcaaaagtggaacttaccaaagggtcagggaataacagaagcatttgcatttgtgtcttggctcttgagtgcctaagtccacaaattt

SEQ ID NO: 43864 - DNA, 1264 bp, Homo sapiens
aaacacacacatacaagtccttaatcccagatgtacatctgctttattcttttctttttatagattggctactcatgcctaatcctcaagtccaagttcatctggtcctttggttgaagttttcatgcttgctaatgcaatctctgtgacgctacttttagattccaagaagaaagaatcatctggtactggatctgagatacatgctgaatccagagcctgtgagtctatagtgaaaagcagtctgaattctgacacagatgaccagtgtaaggtcttgaatatgtcacttcatgtccctgggttgcagtttcaagatcaagtcaggagagggagacagcaaaattattggtagagttctgagcctgacaggccagagtgtaggagcaggcagggaccaacaggaaggtgattctctatctctatccctgctcagaacttttcagaacttcacttttggcatcatcttcagagactgtactagacacacaagataaataatttgatttttttatgtgtacttttttccccactgcctatccttttaaatttcactcactttgttttcttttcctgtctccttcatctgccctttaaacaacagtctgaggagttacaaagatagagcctggtgcatgcatcagagaccataaggaaaggctggagggcaggaagaggagtcataaggctgttccaagcctggaagtctgactcacagtacatgggagtcagcctcatttttcatttctatattagctattattaggcttttagaaattggcaaatgtcagttttgactaactctgttttgttattgctgtgataatataactgtacctcatttctaaaccatgaaaatggagttttctaaaataactgatatgagttattaatcaaaatgaataatataagaaatacttcctactaattttaaagatatgggaactcaagctgataatatggtactttggactgagtactgttaatgacagttattagaattctggttgctaagaagtaaaggctggccttagtctcagggaccaacccatctgtatatattctttgatatgcttattaaaaaatccatytcattcttttatgatcatgctctatacttattgccctgagaaagaatcaacctcaggggtccaagctttgtgggaagaagtgatttcaaaagtggaacttaccaaagggtcagggaataacagaagcatttgcatttgtgtcttggctcttgagtgcctaagtccacaaattt

SEQ ID NO: 43865 - DNA, 608 bp, Homo sapiens
cgagtgcgtgctgattggtctgtgggtggacctggaaaaagcatcatttgattggctaaaaagccatcgaggaagttctcactccagtcctgggctgtagtagctaggttttcaggctttgggctgtctttggcttgaaggtcggatttcaccagggacctggccctgtctgcctaggaatttgtctgcctcctgccactgatattatgtcaccttcactggctccaggtctcctctttggcttctgggacatggtgccakctctattggagtcaacaagggtccagcacaatagctggaaatttgcagaagaaaagaaaggttgctcagggacaggtgatgaaacaaataatgaggatgaagcttacaaagagcattctatttctcaagacttaaatatataaaaaatagcagcccaaaattattgaaagcaaaccacatttggtacggagctgtctctctgggctagtttgctggcgggtctgcatggtggaccacattgtcatctgtcttccgtgtccttcttcagcacgatgagctctgctgtgtgcgtcctggtgctggaactgctattaccaacgagctaattgagtttgctggccttgaaa

SEQ ID NO: 43866 - DNA, 608 bp, Homo sapiens
cgagtgcgtgctgattggtctgtgggtggacctggaaaaagcatcatttgattggctaaaaagccatcgaggaagttctcactccagtcctgggctgtagtagctaggttttcaggctttgggctgtctttggcttgaaggtcggatttcaccagggacctggccctgtctgcctaggaatttgtctgcctcctgccactgatattatgtcaccttcactggctccaggtctcctctttggcttctgggacatggtgccatmtctattggagtcaacaagggtccagcacaatagctggaaatttgcagaagaaaagaaaggttgctcagggacaggtgatgaaacaaataatgaggatgaagcttacaaagagcattctatttctcaagacttaaatatataaaaaatagcagcccaaaattattgaaagcaaaccacatttggtacggagctgtctctctgggctagtttgctggcgggtctgcatggtggaccacattgtcatctgtcttccgtgtccttcttcagcacgatgagctctgctgtgtgcgtcctggtgctggaactgctattaccaacgagctaattgagtttgctggccttgaaa

SEQ ID NO: 43867 - DNA, 1775 bp, Homo sapiens
tcagaaaaggaaaaagttactcagtgcccataaggtcaaacaaagccttgaagatgtgatggggcaagatattrtgaagaaataagatatgagaaacaagtttcacagaatagtcaacaattctagatatcaggtttccatactgcttgcagggtaagtgacctatctgcaccatgctgcagatgacctcaggaaattaattctgcatctggaagttgtgcaaactcagaaagttgtagccccagggaaataactctcttttgacccttgtgactcagaagcattgatactgctcgagaagattgtcccacatcacagaacaatacagctcaggtcctggacaaactcaactcaagtggtgcccaatgctcctcccagaggagagctgggctgcccacttggaaccctgccatagctgaacaggggcatgatggggcttagcgcttcacctggaaggaatcagtcatcggccagccacgttaagtcacttgagagtctcacagaagctctttggctctcaggctgccagctcactctagtttctgagttaatgaacaaaagatgatgtgtgttaatgcaaaggcataattgactctctatcaatgggattccattcattcaaaagatcactacttagcactttagtctggggtgtaatgaaaattggggtacattcttcatagactcatgtcttcacagtgctaacagtcagagtagccaattctataaacaccatctgttacaaaagctttaataggaggataaagggcagtgggtagatgtcacttacagggagctgttccttaaaactataaataccatgaagaaaaatagtgtaatcacttcccatctcattacaggtgagtgtttagttggtttcctctgatgtgcattccactgctttcctcagaaccatgaccacgatgttgctgtcattctccctagatactaaggtctagcataaggtagtagaggcagatgtcctgaagattctgagctttgcttggtaccaggggattaactacatttaagggtctgggatgacagctcccccagcatccttttctacaacctaaagataggatgtggatcaactttataaaacaatgtaagtggttgctgagaagagcaaggatttattcgattactgcattcttataccatgaaattaaatatagaatatttgattgaatattcaggaacttatttttcagctagttctggcacattttgttaaatatttttggcagtttctaagcatagtcaacttttaacattttcttgctctcctttttttcccttctatctagagatacgtctttgtgaagctgaacttggactgtaacctctttttggtcttattttcctaactgttaaatgaaggatgctgatattccttccaattctcacagtcggtgactcggtggcaaggcagacctagacaagacactgtcaccttcgtggagacatcctgatggtgctggacctttcttcaggttctctttcacatgtcccttcaacagggcgaccttccatgatctcacttctgaaatcaacactcctcatcactctttgttcctcccttgatttttctccttagcactcctcagcagctgcccagtgcttctctattcttttctcctcttattaaaatgtaggtggcatgaacgcagacctgcctcccttgtagcctgctataaccccagcacccgaacagcagtgctgcatgtagtagacgtctaggagctttttgtcgctggatgcttgataaatgc

SEQ ID NO: 43868 - DNA, 1775 bp, Homo sapiens
tcagaaaaggaaaaagttactcagtgcccataaggtcaaacaaagccttgaagatgtgatggggcaagatattatgaagaaataagatatgagaaacaagtttcacagaatagtcaacaattctagatatcaggtttccatactgcttgcagggtaagtgacctatctgcaccatgctgcagatgacctcaggaaattaattctgcatctggaagttgtgcaaactcagaaagttgtagccccagggaaataactctcttttgacccttgtgactcagaagcattgatactgctcgagaagattgtcccacatcacagaacaatacagctcaggtcctggacaaactcaactcaagtggtgcccaatgctcctcccagaggagagctgggctgcccacttggaaccctgccatagctgaacaggggcatgatggggcttagcgcttcacctggaaggaatcagtcatcggccagccacgttaagtcacttgagagtctcacagaagctctttggctctcaggctgccagctcactctagtttctgagttaatgaacaaaagatgatgtgtgttaatgcaaaggcataattgactctctatcaatgggattccattcattcaaaagatcactacttagcactttagtctggggtgtaatgaaaattggggtacattcttcatagactcatgtcttcacagtgctaacagtcagagtagccaattctataaacaccatctgttacaaaagctttaataggaggataaagggcagtgggtagatgtcacttacagggagctgttccttaaaactataaataccatgaagaaaaatagtgtaatcacttcccatctcattacaggtgagtgtttagttggtttcctctgatgtgcattccactgctttcctcagaaccatgaccacgatgttgctgtcattctccctagatactaaggtctagcataaggtagtagaggcagatgtcctgaagattctgagctttgcttggtaccaggggattaactacatttaagggtctgggatgacagctcccccagcatccttttctacaacctaaagataggatgtggatcaactttataaaacaatgtaagtggttgctgagaagagcaaggatttattcgattactgcattcttataccatgaaattaaatatagaatatttgattgaatattcaggaacttatttttcagctagttctggcacattttgttaaatatttttggcagtttctaagcatagtcaacttttaacattttcttgctctcctttttttcccttctatctagagatacgtctttgtgaagctgaacttggactgtaacctctttttggtcttattttcctaactgttaaatgaaggatgctgatattccttccaattctcacagtcggtgactcggtggcaaggcagacctagacaagacactgtcaccttcgtggagacatcstgatggtgctggacctttcttcaggttctctttcacatgtcccttcaacagggcgaccttccatgatctcacttctgaaatcaacactcctcatcactctttgttcctcccttgatttttctccttagcactcctcagcagctgcccagtgcttctctattcttttctcctcttattaaaatgtaggtggcatgaacgcagacctgcctcccttgtagcctgctataaccccagcacccgaacagcagtgctgcatgtagtagacgtctaggagctttttgtcgctggatgcttgataaatgc

SEQ ID NO: 43869 - DNA, 1775 bp, Homo sapiens
tcagaaaaggaaaaagttactcagtgcccataaggtcaaacaaagccttgaagatgtgatggggcaagatattatgaagaaataagatatgagaaacaagtttcacagaatagtcaacaattctagatatcaggtttccatactgcttgcagggtaagtgacctatctgcaccatgctgcagatgacctcaggaaattaattctgcatctggaagttgtgcaaactcagaaagttgtagccccagggaaataactctcttttgacccttgtgactcagaagcattgatactgctcgagaagattgtcccacatcacagaacaatacagctcaggtcctggacaaactcaactcaagtggtgcccaatgctcctcccagaggagagctgggctgcccacttggaaccctgccatagctgaacaggggcatgatggggcttagcgcttcacctggaaggaatcagtcatcggccagccacgttaagtcacttgagagtctcacagaagctctttggctctcaggctgccagctcactctagtttctgagttaatgaacaaaagatgatgtgtgttaatgcaaaggcataattgactctctatcaatgggattccattcattcaaaagatcactacttagcactttagtctggggtgtaatgaaaattggggtacattcttcatagactcatgtcttcacagtgctaacagtcagagtagccaattctataaacaccatctgttacaaaagctttaataggaggataaagggcagtgggtagatgtcacttacagggagctgttccttaaaactataaataccatgaagaaaaatagtgtaatcacttcccatctcattacaggtgagtgtttagttggtttcctctgatgtgcattccactgctttcctcagaaccatgaccacgatgttgctgtcattctccctagatactaaggtctagcataaggtagtagaggcagatgtcctgaagattctgagctttgcttggtaccaggggattaactacatttaagggtctgggatgacagctcccccagcatccttttctacaacctaaagataggatgtggatcaactttataaaacaatgtaagtggttgctgagaagagcaaggatttattcgattactgcattcttataccatgaaattaaatatagaatatttgattgaatattcaggaacttatttttcagctagttctggcacattttgttaaatatttttggcagtttctaagcatagtcaacttttaacattttcttgctctcctttttttcccttctatctagagatacgtctttgtgaagctgaacttggactgtaacctctttttggtcttattttcctaactgttaaatgaaggatgctgatattccttccaattctcacagtcggtgactcggtggcaaggcagacctagacaagacactgtcaccttcgtggagacatcctgatggtgctggacctttcttcaggttctctttcacatgtcccttcaacagggcgaccttccatgatctcacttctgaaatcaacactcctcatcactctttgttcctcccttgatttttctccttagcactcctcagcagctgcccagtgcttctctattcttttctcctcttattaaaatgtaggtggcatgaacgcagacctgcctcccttgtagcctgctataaccccagcacccgaacagcagtgctgcatgtagtagacgtctaggagctttttgtygctggatgcttgataaatgc

SEQ ID NO: 43870 - DNA, 620 bp, Homo sapiens
catgtcccttctctggatcaatatctgtaggctatacgtagaatatatattattttctctaaaacttccttgctgccctctgaatatttatcaaatcttgccttgtgctaccaacattgcctcagaaattatccaaataatcaccyctcaccctggaggaggcacgaactcctgtcatttcctattttctggtgacacaatgatcgtttccacagtgcttcccaaggctcttaggtttttggagcatggggtatagaagactctcttctctttctgtttgtccctggtgatcatttgaccataaccatgttgttctccaaaacgtcttagttcatagatcaaactgtattagattaaacgagatatgacttctgctccaaagtgcccctagagcgccttgcccttttcaaaccacacacttcttagggtcaggtgaattaagttaaatatgattcccttcaatgttaaagtgataggaatgagtctctgcacttcagtgctttaattttgtaaccaggagaggtgatggttgcattcagaaagaagagaaagcttgtgtctgttctctctgctgaccactggcatgccttgtgaaggaccaagtcctgcttgcggtatgg

SEQ ID NO: 43871 - DNA, 620 bp, Homo sapiens
catgtcccttctctggatcaatatctgtaggctatacgtagaatatatattattttctctaaaacttccttgctgccctctgaatatttatcaaatcttgccttgtgctaccaacattgcctcagaaattatccaaataatcacctctcaccctggaggaggcacgaactcctgtcatttcctattttctggtgacacaatgatcgtttccacagtgcttcccaaggctcttaggtttttggagcatggggtatagaagactstcttctctttctgtttgtccctggtgatcatttgaccataaccatgttgttctccaaaacgtcttagttcatagatcaaactgtattagattaaacgagatatgacttctgctccaaagtgcccctagagcgccttgcccttttcaaaccacacacttcttagggtcaggtgaattaagttaaatatgattcccttcaatgttaaagtgataggaatgagtctctgcacttcagtgctttaattttgtaaccaggagaggtgatggttgcattcagaaagaagagaaagcttgtgtctgttctctctgctgaccactggcatgccttgtgaaggaccaagtcctgcttgcggtatgg

SEQ ID NO: 43872 - DNA, 620 bp, Homo sapiens
catgtcccttctctggatcaatatctgtaggctatacgtagaatatatattattttctctaaaacttccttgctgccctctgaatatttatcaaatcttgccttgtgctaccaacattgcctcagaaattatccaaataatcacctctcaccctggaggaggcacgaactcctgtcatttcctattttctggtgacacaatgatcgtttccacagtgcttcccaaggctcttaggtttttggagcatggggtatagaagactctcttctctttctgtttgtccctggtgatcatttgaccataaccatgttgttctccaaaacgtcttagttcatagatcaaactgtattagattaaacgagatatgacttctgctccaaagtgcccctagagcgccttgcccttttcaaaccacacacttcttagggtcaggtgaattaagttaaatatgattcccttcaatgttaaagtgataggaatgagtctctgcacttcagtgctttaattttgtaaccaggagaggtgatggytgcattcagaaagaagagaaagcttgtgtctgttctctctgctgaccactggcatgccttgtgaaggaccaagtcctgcttgcggtatgg

SEQ ID NO: 43873 - DNA, 591 bp, Homo sapiens
gaggcagatttcaggttccatagtctgtgagcatttaacagaagatggaggaggtgctgtgaggccatggggaaaggaaggctgattacctgaatgggaatgggactatatgagagcaatctgaaaaatctcagtgggtatcatcacctcacatcattacaccaatgtaaattctgcctgattaaaatgtgaggtttgacaaaaatatgttcaaaatacattcagtgttctggggactctcctaggtgccaagtgtacagcattgagcaaaacagataaaattcctgccctgaagcagcttgcgttttagcagataaagacaaaygttccacttttttacaaagctttttacaaaagcttgaaggaaatggaagtggatatttattaaacctctggaggagttgaaatttctaagattagaagctgtagatgaactcacagaggaaaatattattagtcttgtcagcataaacattccccaaatgttaaggttatttactatcatgagttattcctcagtgtaattctatgtaacattgaggtttgtctagatgttaggataggtcctccaaagtagatatactaggtcaa

SEQ ID NO: 43874 - DNA, 591 bp, Homo sapiens
gaggcagatttcaggttccatagtctgtgagcatttaacagaagatggaggaggtgctgtgaggccatggggaaaggaaggctgattacctgaatgggaatgggactatatgagagcaatctgaaaaatctcagtgggtatcatcacctcacatcattacaccaatgtaaattctgcctgattaaaatgtgaggtttgacaaaaatatgttcaaaatacattcagtgttctggggactctcctaggtgccaagtgtacagcattgagcaaaacagataaaattcctgccctgaagcagcttgcgttttagcagataaagacaaacrttccacttttttacaaagctttttacaaaagcttgaaggaaatggaagtggatatttattaaacctctggaggagttgaaatttctaagattagaagctgtagatgaactcacagaggaaaatattattagtcttgtcagcataaacattccccaaatgttaaggttatttactatcatgagttattcctcagtgtaattctatgtaacattgaggtttgtctagatgttaggataggtcctccaaagtagatatactaggtcaa

SEQ ID NO: 43875 - DNA, 662 bp, Homo sapiens
tttttcttacctggaggcaaaatataataaaaaatcaaagagaaggggaagttttgagtaccacaatttttcttactcataaaattagattcccttgaaaatactattctcttcaaatcataatttagagctacagtatgatatatttcatgctactaagtggggtaatcttattcagctttgtgcatggaggagtatattcaataaatgaaaatatctacctctatagctcctaaatactggtgttttgtgtttatccatttacttaggccttcttaaatgtctttggaggaagttttgtgaattacttaaaatttttttacagcagtgtccaaggcctgagaaatacyatgaggtttggctggtgacacctggtggttagacgtgataattacacacaacatgtagcacaggctttactacaagccacaaaagcaccttgtattggtccattctcacactgctaatgaaaacattcctgagactgggtaatttataaagaaaaagagagttaatggactcacagatccacatggttggggacccctcacaatcatggcagaaggtgaaggaggagcaaaatcacatcttacatggtggctggcaagagagcatgctcaggggaaccaccctttataaaaccatcagatggcatgagactt

SEQ ID NO: 43876 - DNA, 598 bp, Homo sapiens
gaaacatgttaattagcaaggaattttttatgtaacagggtggaaccttgagcgctggtgggaactcttcccaaacacccacataaaagtcacctgaaaggggtacacttctcaccccacctgtgctatattcaccaccaaaccttggacaccaacaaaggcaaggaggtgccacttgactcttggtatcctcartctcactgagattcaccaaagtgaaagccacttccaatgagtctgagtggtccttctcttccatctttcagaccaaaccagcattttgggtttaagctacaattgaagattttgtctaccactcactatctttgagaaattcccctaatgtttctgaactgcaactgcctcatctgtaaatattctactcatttcataggactgttttgaggagcaaacaagataaaatatagaaaatgtttaaagatgaagcactgtataaatttgattttgacattcttggaatattcagggtctgggagtcaagtgcaacttaaatatggacagtgtgaagtctcttaattcttgtcctgggctgcaacaatatttttatcacctactagcttgatggtctggcttcttt

SEQ ID NO: 43877 - DNA, 544 bp, Homo sapiens
aaaatgcagaggcttacagaaaaaaggccaaatttattcttgttaacataaagtggcagtgagttaaaagagatcttagcaatcacctaatccaaaccattcatttaacaaataaaagccagagaggttaaatgtaattttgcactaacctgtaaattcaaaattgtggatggaaaaaacataagctattactaacattgtgatttatgacacacaaaaggaattttgaaaaacattccctgcatattgataaagagatgaattatagttctcatgtggggatgaggtagtaatgtattttacccagttagggtaaaacatcttctgtttcattattcaattataggatgcccamagaataatatcagtctgcattggtttgacttcctcagtttgactaagttccttcatacctttaacattgtcggcatctctttaggctgaatgtgatcacagttatgtatctattaaagatctagaagatgcaaatgccagccaactactttaattccagaaagaattattttccaacaccaaaggaaaa

SEQ ID NO: 43878 - DNA, 589 bp, Homo sapiens
gaacctatcacagcgcaatactcttctacgataatgcaccaaccacccagtgcatttagcatgtaacagaccgctgtcaagagcacctccccctgtttgctctgacataaaagaatgtgtagaaaatgtgatattcacaaggaggaaaacagaagatctaaatctcaggaagaatcaaaaggaaatgcaacaaggagtcataaaaaaaaaamcagaaagaaagaaatgtgaacatgtagaactacatggaaaaagcctgtgtaaagaatggataggagccacgttgtttttccacatcaaaatcactcctaacaccacactgcaactatcaagtcagttgattccagaccacaactctgttacactcacacacacagtcgtgtctctgtctctgtctccctctctctctctcacacacacacccacaattattcttcctgcaaagcttctcagactgtgcataaaaactagtttcaaatcaaaacaacttaagtggatataaccaattactttgttcccctgagcctcatttcttgttttattttgaaagcttgatcctccttccactctaacttccacaggccaaatt

SEQ ID NO: 43879 - DNA, 622 bp, Homo sapiens
gattagaaagcatagtccacgttctcttctgcatgctggggactgagaagtgaacaaaacaaagcctcacaccctgtggagctgataattaagtgcatgacacagacagcaaacataaagatccatacataccccctgggtcagataaggtatgtgtcaaggggctggaaacagtcgcaaattccttaacatgttttttttattaaatgtcttctttaataaagtgatagttcaacagggacctgaagacagctagccagatggacatattaagaggaaaattgtttcagattaattgagacccaagtaaaaattcagktcttttttttttctttttttgagacggagtgtcgctctgtcacctcggctggggtgcagtggtgcaatttcagctcactgcaagctctgcctccccagttcatgccattctcctgcctcggcctcccgagtagctcagactacaggcgcccgccaccacacccagctaatgtgtgtgtgtgtgtgtgtgtgtgtgtgtgtgtgtgtgtgtgtgtgttttagtacagacggggtttcaccgtgttagccaggatggtcttgatctcctgacctcgtgatctgccctcctcggcctcccgaagtg

SEQ ID NO: 43880 - DNA, 589 bp, Homo sapiens
tgtatgagctgccttgcttaaatttgagtatcattctctactgaaggatttcagagtgtattaatggcaaacaacattcaatgtaattgtgcattctctttcatgtatcattcagttcttgaaaaatgaaaattattatatcataaataattgttgtatgcttctcagtaatgtgaagtgctgtagactgaccatataaatacatatttgcataaaattggcaatcaaagatgatgcacggaagaacttacttgtcagaacaaatggtttgcaatattcattattttcttgtaaagaaamcattattggggatgacttaactagtgcagagttatttggtgagcaatgtattgatcagacatctggaaagataaaaatgccaatactcagactgacaatttgtctataaaactggatatatttcttacacacacacacagacacacacacgcatacacacggtttggctctgaaagtagtaattttcctttcctctatatgtccattgaaatcattcaagacgctcaagacacatttagcaatggtggatggcaaaatgaaggataacaggggttatttaagttaaaca

SEQ ID NO: 43881 - DNA, 960 bp, Homo sapiens
agctttactctctgcagcaatcagggccaattgcccaagcaagtggggagtttttgtcccacagtgatcaagggtctttcctcggtggggtgtgattacttgttgaccagaaatgttcaattgagaaacaatctggaactgcaaatatcacagaggttattctcaccacccagagggactccttgaggtttttccagcatctttatgtcaagctgtgatctgagtccatgccctccaggaaccagacatctagattcaagtcacacagtagccaaaggtaattttataatgaactcttccatccaggatgcctccccataattgttatcaccaaatgtatttaagccttgcttctgtcctgcattatttttccaacttgcctgtctatgaagacctgtggttgaagcctgcatatttgttgtgttctagtccttctagctgttttcttctagttcaataatttatagcatctgaggcacttcatgaagatgaccccagcaattgttattcctaaaaatagcaacttagaaaataatttttaagctttgatcayctgttactagctttgttaactttattgatttaaatagcaaactttaaaatttagtatatctggctctttttaatgttaaagtaccagatatgataaaaataatgcatacaaattcaattattgtaaaatatcttactactatactttcttcttaatatattctaaaatatcaacacaacagactcttcatttttcatgattttactaatttgttactataaatacacacatatacataatttaaaactgtcaatgattatgattaataaaaacactagattttaatagaatatgaaatatctatatgtaataaatatcccctacatattaaaaataattaaaatacatatcctattatagtcttcaatgttgcatttcatactggtaatcataatattacatattat

SEQ ID NO: 43882 - DNA, 441 bp, Homo sapiens
gacgctgtctttcaaagcacttcctagaaatacagcctcaattgttgggaattacaaagagaaaagacagggagactgatatcacaaaacacttgtttctggcgacttctgcatacctgaagagaaggtgtgttaggcagttttaatttacgagaaggaagacagcagaggaacactgtttctttttttttcttttcttttytttttattttctgaggcttgctttctcccaggctggagtgcagtggtgtgatctcagctcactgcaacctccgcttcccaggctcaagcgattctcctgcctcagcctcctgagtagctgggattacaggcgcgtgccaccatgcccagctaatttttgtattttcagtagagacaggattttcaccatgttggtctggatggtctcaatctcttgacctcgtgatccacccaccttgg

SEQ ID NO: 43883 - DNA, 633 bp, Homo sapiens
caaactctcttaacccaggtattccccagggtgaacggcattgggatgaaatccagctactctttcctggcacaagagtcaagaccaagaggagcctggcagtttccttgtcccatcagaagagcctcattggcatgctgatatggtttggctctgtgtccccacccaaatcacatgttgaattataactcttaatgttggaggagggagctggtgggacgtgactgaatgatgggtgcagatttcccccatgctgttctcctgataatgaatgagttctcacgaggtctggttatttaaaagtctgtaaaacttccctcttcactctctctcctgccaccatgtgaagatgtgcttgcttccccttcgccattccaccatgattgtaagtttcctgaggcctcccagccatgcctcctatacagcctgtgaaactctgagtcaattaaacctcttttctttataaattacacagtctcaggtagttcttcatagcagtgtagcaatggactaatacacacaccatctattagaratgactggaatgaggctgcagggaaatgatgactcctggagaacctaatgaagcagtgtcagtgggttgtgaaatacatttaattgtcaaattaggtg

SEQ ID NO: 43884 - DNA, 537 bp, Homo sapiens
tgcatcgtgtcacatttccatcaacaaggcasaagtttcctacttttccaaagcctgccagcacttgttattttcaggctgggcgtggtggctcatgcctgtaatcccagaactttgggaggctgaggtgggcagataacctgaggtcaggagttcgagagcagcctggccaacatggtgaaaacatgtctctactaaaaatacaaaaattagccagaaatctcttgaaccctggaggtggaggttgcagtgagccgagatcatgccactgcactccagcctgggcaacagagtgagactccgtctccaaacaaacaaacaaaaaaccacttgttattttctgttttatggatcatagcaatgttaataaatgtgtggtggtttcttctttctcttaaaaataatttttcttttcaaacaaaaactattttatttagaaaagccatgttgaatcatggcccagcttggaaagttatttatttattaaaattaattaatttttattaaaacttttttaaaatgtagatacaggcttgt

SEQ ID NO: 43885 - DNA, 605 bp, Homo sapiens
tatcttatttgtattttattataactagtagggcaatttaaatattcaatattctagaagatgaagaattgggttgacttggttagctcttctttttagtgatatttttggttaatttattgtcttggtacctactattgaaactcccttctctttcattattgcctctgacatcatctcatgtcagacgttcttatttctgctaacrttcatacttacagcagggctgttactggcggtgaatccgtaggtgtctgcagcaacctcaattcctacctcctcagaagaaagaatttgactgaggggcataaggcagaaggagacaacgaggcaagttttagagcaggagtgaaagtttattaaaaggctttagagcaggaaggaaagtacatttggaagagggccaagtggacgactttagagatcaagtgtgtggtttgatcttttgacttgggtctttttttgtttgttttttgttttttttttttttgagatggagtctctccctgtcacccaggctggagtacagcggtgcaatcttggctcactgcaacctccgcctcccgggttcaagcgattctcctgcctcagcctcccaagtagct

SEQ ID NO: 43886 - DNA, 605 bp, Homo sapiens
tatcttatttgtattttattataactagtagggcaatttaaatattcaatattctagaagatgaagaattgggttgacttggttagctcttctttttagtgatatttttggttaatttattgtcttggtacctactattgaaactcccttctctttcattattgcctctgacatcatctcatgtcagacgttcttatttctgctaacgttcatacttacagcagggctgttactggcggtgaatccgtaggtgtctgcagcaacctcaattcytacctcctcagaagaaagaatttgactgaggggcataaggcagaaggagacaacgaggcaagttttagagcaggagtgaaagtttattaaaaggctttagagcaggaaggaaagtacatttggaagagggccaagtggacgactttagagatcaagtgtgtggtttgatcttttgacttgggtctttttttgtttgttttttgttttttttttttttgagatggagtctctccctgtcacccaggctggagtacagcggtgcaatcttggctcactgcaacctccgcctcccgggttcaagcgattctcctgcctcagcctcccaagtagct

SEQ ID NO: 43887 - DNA, 605 bp, Homo sapiens
tatcttatttgtattttattataactagtagggcaatttaaatattcaatattctagaagatgaagaattgggttgacttggttagctcttctttttagtgatatttttggttaatttattgtcttggtacctactattgaaactcccttctctttcattattgcctctgacatcatctcatgtcagacgttcttatttctgctaacgttcatacttacagcagggctgttactggcggtgaatccgtaggtgtctgcagcaacctcaattcctacctcctcagaagaaagaatttgactgaggggcataaggcagaaggagacaacgaggcaagttttagagcaggagtgaaagtttattaaaaggctttagagcaggaaggaaagtacatttggaagagggccaagtggacgactttagagatcaagtrtgtggtttgatcttttgacttgggtctttttttgtttgttttttgttttttttttttttgagatggagtctctccctgtcacccaggctggagtacagcggtgcaatcttggctcactgcaacctccgcctcccgggttcaagcgattctcctgcctcagcctcccaagtagct

SEQ ID NO: 43888 - DNA, 605 bp, Homo sapiens
tatcttatttgtattttattataactagtagggcaatttaaatattcaatattctagaagatgaagaattgggttgacttggttagctcttctttttagtgatatttttggttaatttattgtcttggtacctactattgaaactcccttctctttcattattgcctctgacatcatctcatgtcagacgttcttatttctgctaacgttcatacttacagcagggctgttactggcggtgaatccgtaggtgtctgcagcaacctcaattcctacctcctcagaagaaagaatttgactgaggggcataaggcagaaggagacaacgaggcaagttttagagcaggagtgaaagtttattaaaaggctttagagcaggaaggaaagtacatttggaagagggccaagtggacgactttagagatcaagtgtgtggtttgatcttttgacttgggtctttttttgtttgttttttgttttttttttttttgagatggagtctctccctgtcacccaggctggagtacagyggtgcaatcttggctcactgcaacctccgcctcccgggttcaagcgattctcctgcctcagcctcccaagtagct

SEQ ID NO: 43889 - DNA, 3022 bp, Homo sapiens
atgcatcaatcttacacagtattcaatagggaaccagtgtcagtttttaagcagacgtttttaaagtattaagatgaatcaagtatcacagcctcatgctaatcaatatatttgaaacttcttagaaaaataaatcttgatgttaaccaaagtagatatccatatctacttggcaatgccttttaaaacatggccgtaaatgatttaaacaaataaatattgactactaggtaaaatgtttctcacaggagcatctttggtgagatctaaatggaagaaagactttgcaataaaaaaagcgactcttttttggagaccttccttgtcctgctcaagtcataagtcctagagccccatgctcttcttggtcactcctgtcagtggtgagctgtgagacaggacactgtgaaaatcaattactctctaagcattggatcatgtgaccctccaatccaaaggaccgccagcctgactcaggccagtctgacccactagtggtcttatggaatggaatggagggaaaaaaatgctgtataaaataatcagtggaaactataaaatcaagtgtttcctctatccaacatttatgttgcttcctttcactccttccagataaacaaaatcaccgtgatgttcagtataatgacatgagataactggctggctctccactaacaattcagagtatgggtttagagtcaggctgcctgtgttggaatccctcctcagcttgcaaattgtgggaccacaaacaagttacttttcttacttaaaccccagtttcctcatatataaaatggtgagtaaatatatcctttgtagcaacatggatgcagctaggggccattatccgaagtgaattacacaggaacagaaaaccaaatactacatgttctgacttgtaagtgggagcaaaacactgggtacacatggacataaatataggaacaataggcattgaaaactactagaggggccagggagggaagaagggctgaaaaactcatagctgctatgctcactacctggataacaggatcatttgcaccccaaacctcagcatcatgaaatatacccagataacaaacctgcacatgtaccccttgaatctaaaataaaagttgaaagtatttttttaaataaaataaaaatagcaagtaaaagtgagaaaatgcataataaggttggtagaaggataaaatgggacaatgcataaygggtttcatatagggaatgaactcgacacattaaaacattcatgattacatcattagtgcacagtgtaacaatttgctactaaaagtatgataaatttcgttgaataaaaaattcagtagaatgaacacaattatgaatccttttctagcctgtgcttttcctacaagtatacatgtagctccagggaacatggccacagtataaatgaacaaggtgcttcttcctagagtattcactttatcccaagtgtcaggagagggaaaataaattaactcataagtacctttttagttacccttatattaaattcataagaaatgttttatgtggttggatatatattattttccaaataatactgagtaaaaatatctacaagtgtacttttaagtctacaatttagagcttatatgtatgactttaaaagttataatatatgcttcttatattaaatgtctggaggaatgattccattcaaaacaaagcttgaaatattgtgcacatgtttttctccgtattttaagtttataatattttaaaattatactcatctttttttaatccagtgataaaaatatagtgcaacttctctgtcaaataaatttttccacagatcataagcaatttttattatcattttgtcaaagaaataacataaaaagtaaggatccatgtgaatttttaagataaaacacaagatatcaaagcttcccctctaatacctgcacggaattccatcttgtcaggcattcagacaacttaactacaaattaaaaaacaaaaaaactgattgcatattagttgtatttgagtatatttaatagttaataaaatgccaccaaaaggtcatataagacaagccaccagtgtccgaactccactttttttttttttttttttttttttttttttgaggcagagtcttgctctgtcacccaagctggagtgttgcagcgcgatcttggctcactgcaacctccgcctcccaggttcaagggattctcgtgcctcagcctgccaagtagctgggactacaggcacgtgccaccaagccttgctaatttttgtatttttaatacaggcaggatttcaccatgttggccaggctggtctcgaactcctgacctcaagcaatccgcccacctcagcctcccaaagtgctggaattacaggcgtgagccactgcacctggcctccaaattctactcttaaccacccaatggaaaaattcaactttgaaaaaatgtaagtcagataatgtatgccaagtgatacataggaaaccctgtaaaattttagctgcatttcccagattcagtcttccctattccccaattcagtgattagctcttcctgcaaatgtcaatttgcagttctactctgagatttccacccaagaggaacaaagcatacgttcacagaaacacttgaacatgaatactcacagcagtttcatttgtaatagcccaaaactgaaaacagcccagatgtccatcaacaggaaatgggtaaacaaattatgatatatttgcacaatggaacactactcagcaataaataggaaccaattgcttatacaaacatcaatatggatgagtctcataatactatgctgcaaaaatacatttagatggaaggaataagttctaatattcattggtacagtaggagaattaaagttaactataatttatcatttatttccaaatagctagaagagaagaattgtaatattcccaacacaaaggaaagataaatgttttaggtgatagatatcccagttacctgatttgatcattatgca

SEQ ID NO: 43890 - DNA, 3022 bp, Homo sapiens
atgcatcaatcttacacagtattcaatagggaaccagtgtcagtttttaagcagacgtttttaaagtattaagatgaatcaagtatcacagcctcatgctaatcaatatatttgaaacttcttagaaaaataaatcttgatgttaaccaaagtagatatccatatctacttggcaatgccttttaaaacatggccgtaaatgatttaaacaaataaatattgactactaggtaaaatgtttctcacaggagcatctttggtgagatctaaatggaagaaagactttgcaataaaaaaagcgactcttttttggagaccttccttgtcctgctcaagtcataagtcctagagccccatgctcttcttggtcactcctgtcagtggtgagctgtgagacaggacactgtgaaaatcaattactctctaagcattggatcatgtgaccctccaatccaaaggaccgccagcctgactcaggccagtctgacccactagtggtcttatggaatggaatggagggaaaaaaatgctgtataaaataatcagtggaaactataaaatcaagtgtttcctctatccaacatttatgttgcttcctttcactccttccagataaacaaaatcaccgtgatgttcagtataatgacatgagataactggctggctctccactaacaattcagagtatgggtttagagtcaggctgcctgtgttggaatccctcctcagcttgcaaattgtgggaccacaaacaagttacttttcttacttaaaccccagtttcctcatatataaaatggtgagtaaatatatcctttgtagcaacatggatgcagctaggggccattatccgaagtgaattacacaggaacagaaaaccaaatactacatgttctgacttgtaagtgggagcaaaacactgggtacacatggacataaatataggaacaataggcattgaaaactactagaggggccagggagggaagaagggctgaaaaactcatagctgctatgctcactacctggataacaggatcatttgcaccccaaacctcagcatcatgaaatatacccagataacaaacctgcacatgtaccccttgaatctaaaataaaagttgaaagtatttttttaaataaaataaaaatagcaagtaaaagtgagaaaatgcataataaggttggtagaaggataaaatgggacaatgcataatgggtttcatatagggaatgaactcgacacattaaaacattcatgattacatcattagtgcacagtgtaacaatttgctactaaaagtatgataaatttcgttgaataaaaaattcagtagaatgaacacaattatgaatccttttctagcctgtgcttttcctacaagtatacaygtagctccagggaacatggccacagtataaatgaacaaggtgcttcttcctagagtattcactttatcccaagtgtcaggagagggaaaataaattaactcataagtacctttttagttacccttatattaaattcataagaaatgttttatgtggttggatatatattattttccaaataatactgagtaaaaatatctacaagtgtacttttaagtctacaatttagagcttatatgtatgactttaaaagttataatatatgcttcttatattaaatgtctggaggaatgattccattcaaaacaaagcttgaaatattgtgcacatgtttttctccgtattttaagtttataatattttaaaattatactcatctttttttaatccagtgataaaaatatagtgcaacttctctgtcaaataaatttttccacagatcataagcaatttttattatcattttgtcaaagaaataacataaaaagtaaggatccatgtgaatttttaagataaaacacaagatatcaaagcttcccctctaatacctgcacggaattccatcttgtcaggcattcagacaacttaactacaaattaaaaaacaaaaaaactgattgcatattagttgtatttgagtatatttaatagttaataaaatgccaccaaaaggtcatataagacaagccaccagtgtccgaactccactttttttttttttttttttttttttttttttgaggcagagtcttgctctgtcacccaagctggagtgttgcagcgcgatcttggctcactgcaacctccgcctcccaggttcaagggattctcgtgcctcagcctgccaagtagctgggactacaggcacgtgccaccaagccttgctaatttttgtatttttaatacaggcaggatttcaccatgttggccaggctggtctcgaactcctgacctcaagcaatccgcccacctcagcctcccaaagtgctggaattacaggcgtgagccactgcacctggcctccaaattctactcttaaccacccaatggaaaaattcaactttgaaaaaatgtaagtcagataatgtatgccaagtgatacataggaaaccctgtaaaattttagctgcatttcccagattcagtcttccctattccccaattcagtgattagctcttcctgcaaatgtcaatttgcagttctactctgagatttccacccaagaggaacaaagcatacgttcacagaaacacttgaacatgaatactcacagcagtttcatttgtaatagcccaaaactgaaaacagcccagatgtccatcaacaggaaatgggtaaacaaattatgatatatttgcacaatggaacactactcagcaataaataggaaccaattgcttatacaaacatcaatatggatgagtctcataatactatgctgcaaaaatacatttagatggaaggaataagttctaatattcattggtacagtaggagaattaaagttaactataatttatcatttatttccaaatagctagaagagaagaattgtaatattcccaacacaaaggaaagataaatgttttaggtgatagatatcccagttacctgatttgatcattatgca

SEQ ID NO: 43891 - DNA, 3022 bp, Homo sapiens
atgcatcaatcttacacagtattcaatagggaaccagtgtcagtttttaagcagacgtttttaaagtattaagatgaatcaagtatcacagcctcatgctaatcaatatatttgaaacttcttagaaaaataaatcttgatgttaaccaaagtagatatccatatctacttggcaatgccttttaaaacatggccgtaaatgatttaaacaaataaatattgactactaggtaaaatgtttctcacaggagcatctttggtgagatctaaatggaagaaagactttgcaataaaaaaagcgactcttttttggagaccttccttgtcctgctcaagtcataagtcctagagccccatgctcttcttggtcactcctgtcagtggtgagctgtgagacaggacactgtgaaaatcaattactctctaagcattggatcatgtgaccctccaatccaaaggaccgccagcctgactcaggccagtctgacccactagtggtcttatggaatggaatggagggaaaaaaatgctgtataaaataatcagtggaaactataaaatcaagtgtttcctctatccaacatttatgttgcttcctttcactccttccagataaacaaaatcaccgtgatgttcagtataatgacatgagataactggctggctctccactaacaattcagagtatgggtttagagtcaggctgcctgtgttggaatccctcctcagcttgcaaattgtgggaccacaaacaagttacttttcttacttaaaccccagtttcctcatatataaaatggtgagtaaatatatcctttgtagcaacatggatgcagctaggggccattatccgaagtgaattacacaggaacagaaaaccaaatactacatgttctgacttgtaagtgggagcaaaacactgggtacacatggacataaatataggaacaataggcattgaaaactactagaggggccagggagggaagaagggctgaaaaactcatagctgctatgctcactacctggataacaggatcatttgcaccccaaacctcagcatcatgaaatatacccagataacaaacctgcacatgtaccccttgaatctaaaataaaagttgaaagtatttttttaaataaaataaaaatagcaagtaaaagtgagaaaatgcataataaggttggtagaaggataaaatgggacaatgcataatgggtttcatatagggaatgaactcgacacattaaaacattcatgattacatcattagtgcacagtgtaacaatttgctactaaaagtatgataaatttcgttgaataaaaaattcagtagaatgaacacaattatgaatccttttctagcctgtgcttttcctacaagtatacatgtagctccagggaacatggccacagtataaatgaacaaggtgcttcttcctagagtattcactttatcccaagtgtcaggagagggaaaataaattaactcataagtacctttttagttacccttatattaaattcataagaaatgttttatgtggttggatatatattattttccaaataatactgagtaaaaatatctacaagtgtacttttaagtctacaatttagagcttatatgtatgactttaaaagttataatatatgcttcttatattaaatgtctggaggaatgattccattcaaaacaaagcttgaaatattgtgyacatgtttttctccgtattttaagtttataatattttaaaattatactcatctttttttaatccagtgataaaaatatagtgcaacttctctgtcaaataaatttttccacagatcataagcaatttttattatcattttgtcaaagaaataacataaaaagtaaggatccatgtgaatttttaagataaaacacaagatatcaaagcttcccctctaatacctgcacggaattccatcttgtcaggcattcagacaacttaactacaaattaaaaaacaaaaaaactgattgcatattagttgtatttgagtatatttaatagttaataaaatgccaccaaaaggtcatataagacaagccaccagtgtccgaactccactttttttttttttttttttttttttttttttgaggcagagtcttgctctgtcacccaagctggagtgttgcagcgcgatcttggctcactgcaacctccgcctcccaggttcaagggattctcgtgcctcagcctgccaagtagctgggactacaggcacgtgccaccaagccttgctaatttttgtatttttaatacaggcaggatttcaccatgttggccaggctggtctcgaactcctgacctcaagcaatccgcccacctcagcctcccaaagtgctggaattacaggcgtgagccactgcacctggcctccaaattctactcttaaccacccaatggaaaaattcaactttgaaaaaatgtaagtcagataatgtatgccaagtgatacataggaaaccctgtaaaattttagctgcatttcccagattcagtcttccctattccccaattcagtgattagctcttcctgcaaatgtcaatttgcagttctactctgagatttccacccaagaggaacaaagcatacgttcacagaaacacttgaacatgaatactcacagcagtttcatttgtaatagcccaaaactgaaaacagcccagatgtccatcaacaggaaatgggtaaacaaattatgatatatttgcacaatggaacactactcagcaataaataggaaccaattgcttatacaaacatcaatatggatgagtctcataatactatgctgcaaaaatacatttagatggaaggaataagttctaatattcattggtacagtaggagaattaaagttaactataatttatcatttatttccaaatagctagaagagaagaattgtaatattcccaacacaaaggaaagataaatgttttaggtgatagatatcccagttacctgatttgatcattatgca

SEQ ID NO: 43892 - DNA, 605 bp, Homo sapiens
aaaatattattggccctgtgtgcttactgtataatatatggaacttaaatagacattattaaatattgttaaatgaagggctgaataggcaccctaaaacactttcatgttgaaaggatttgttaaccccactggtgccataagaaataacttcaacatttccctgattcctccttgcacaaaagtcactggcaaatggttcaaagaggttatgcagaaatgaagttctgggttaagaatagtatcctggagataggagcctcagttcaaatattggctctggcattcacattaccttaagcaagttactttacttctctggacatcagttcgtgtataaaatgagaggtygaccattacagtgactaggttcatttctagccctcaaattctatgattccataaaactattcagtgtagattttatttcttctactctttcccccatgtgaattttctattcattctgtccatactatgttttcacgttgggttaaatgattaatacagggaatctcgaagtggaattgcctaaattactttcatttaacaatttattaaattgctccaaccaaaaagagaggatttgagcagtacagcaaaat

SEQ ID NO: 43893 - DNA, 578 bp, Homo sapiens
tgggtcatcctccccagctgtgcaacctgcccagctgccaatgacttaccactgtgctccttggtgggaggatggccttggtttagcaccagggcctgtagccccagacagcagctgcaaaccctgccaccctaagaggccactgctaggtcatgtcaacaccaggaaatgtgtgtcattggagccctaagctgttctcatgtcctccaacccaggactcatgtccctgatctcatgtccccgatcaccagactgccagtggactctactttctgctgcctgcccagacccagtcaacttccagaaaagggcacataaagtgatccacactgaaaagcaattggcagacaaaacctaatgggctattcatccaaaggaaacttgggttttattaggggtatctggtgtcctcctggcctgcattctgacatataataagcatctaagtcatgacarttgagtgaacatacaaaaggtaaatacatatggcaaagcctagaattggaattggcagtttgaaggccattggcccaagaacagggtattttcggttgtgttctcttttctttctttttttt

SEQ ID NO: 43894 - DNA, 568 bp, Homo sapiens
gcagggaggggctgtgcaagtgctgacaagcgcctgccctcaagcttcttgccttggtcttacataggcacagagcctcttagtctgtggttgatgtgcttatgtttttttacagctcgttgcagagagaaagattgataaaaayctgcttccgcccaaaaagataattgggaaaaactcaagaagcttggtggagaagagggagaaggatctggaggtctacctccagaagctcctggctgccttccctggcgtgacccccagagtactggcccacttcttgcattttcacttctatgtaagttcctcatcgggttttcacctgtgcctgcaaacccacaactgccaaacttgaggcagcaaaccaggggagacctcagctttgaggtgggctggggtttgaccctaggttagaagatggaggaacgtcaccctggttaggaatgcattgtggccagaagcatgttagttgacagatttgccgtaaattagactaaatgtggccacagagatgctttcctccaccacaaggcattttgtttagcaaaaatggcctgtgggtgtttaa

SEQ ID NO: 43895 - DNA, 524 bp, Homo sapiens
tgagtatcactctgagggctttataaaaactaacacactgaaccttcacaaaggccttgtgttgtgggttctgttcaccttacaaaggtgatgtgggtattgtgatrtgggtactgttattacaccaattatacagatgaggaaatggagagagcctaatttactttcctatatcacagtgctagtaagaacagtgggatttgtgtcctagacttgggttccttacatctgaatacccttggtctcacagtttgaaatcccaatttagaattaggaaataaaatagataaatgatccatataaataatcataggaaactggctgcagaggagccatttgagatcaagttggggagggaggttggaattttactgtagaagattttgaaagcaaggttgagtttagactttagaaaattttgaaagaattctcatttaattttaagcaatattagtagttcatattttgatcatagagatgcacgttctctgtacaggatgtagaaaatacagaaatataaaata

SEQ ID NO: 43896 - DNA, 560 bp, Homo sapiens
cataatatttttattaagcacctgttcttcaaaataacaagccatagaagaaacggcacggtttacagagtggccggagctattttcacacttccaccctgactcttactgcctatgtgatctgatgctgggaatggtgatgttaagtgaaataattttaaaatgttacctcggtggaaaagacgcactaggagattagggactttgaattatcactgtacttgggcacctagaacagtgtttggcacaggctaagcacacaatagatatttgttctgttcttgtgttatgtgccacccactgagctacaggcaaagagttggttcaatgacatgttagaaacagcccagcctgcaaaggacgtgctgtgctagcccagcaatgggcctgcctgtcactcttcaggagctttaggaggcaacaattacygtttctttcattgggagctgcttattcctagcgcgtcatgctctgcagaatgacccattacctcgggccacagcctgtctgataaggggttggtgtctgacccacctagaagatgctcagtggcctcagaa

SEQ ID NO: 43897 - DNA, 577 bp, Homo sapiens
acaggttgagcccagggtaaacctggttgcatcccacactgttttcagtctgaccagaaaaaaagactgataataaataatgaattaacatttacttagtttttactatgcgttgggccttgttccaagtagtttatatgatttatctcattttatcttcatgcaatagtatgagataaacactccattatttccacttttatagaggaagaaacagagtcaagggaaatattgggacttgggtagtaagaactgaaccaaagtttgaatgcaggcagtctggttctatagcccatgttatgctataaatggtggagttggcattacaggcaaaaatatgcacgcacacacacagacacacacagacacacasacacacacacacacacacacactagcctgaggtcaggtgtgcatgatcctcctgcatcttgggcaaaatgtttcccctgctctggttcttggcatccttggtaaaataaggggatattagagcctcttgaaagtcctttctgttactaaaagcctatgagtctgtaagtagcaggacaaaatacagctttccttgtatgtctcc

SEQ ID NO: 43898 - DNA, 543 bp, Homo sapiens
aagctctgcctcccaggtacacgccattctcctgcctcagcctcccgagtagctggcactacaggcgcccaccaccacgcccgactaattttttgtgttttttttagtagagacggggtttcaccgtgttagccaggatggtctccatctcctgacctcgtgatctgcctgcctcggcctcccaaagtgctgggattacaggcatgagccaccgcacccggccctggaaatgattttatcttaaggtccagagatagatatatttaatcagagcattgtatcaatctgactataatcatcattggttagttcagagatgggtaaaggacccaatactgtaataacagaataaaaacttgacaataattagaacccagaaataaacagggactcagtcttaatgactgtgtttgaacttctgaatctaggcccttctttaaaagaaaaaaatacatatatattcattcattctctctctctctgtctctctctgtctctctctctctstctctctctctctctctctctctctctctctcctgc

SEQ ID NO: 43899 - DNA, 482 bp, Homo sapiens
tgtggatcagttcatgagcatttggacatgagtcatttcatgttgaacaaactatgctttcctctttaagcgtagscttaaaataaaattaattctcatagggttcatttcattattctaggctggaataggcaatacctttgctggagtaagcaatgcaataatgccaattatttgcatgatttagttattatctacctatgttactatatctgctaatttttgagcattaatttctaaatcatttgatatatgtaaggaaacacgtatcttaaatcaggagttggcaaactttttctataaagagataagcagtaaacatgtttggctttgaggcaatattatctccgtgacaactagtcaactttgttcttttagtgtttcagtagctatgagtaacatgcaaataaatcagaggggctgtgttctgataaaactttacaaaagcagggagtaggctggatttggcatatgggccacag

SEQ ID NO: 43900 - DNA, 593 bp, Homo sapiens
cttcctgccttctgggaggaggcgtctccaggcttgctggttggacctgggcagggaagcctcctgagattgggagtgctaggggcttatgattgttctcccctagcggagggaggagattctggtgtgaaatggagcagtggggacacactccagttcctggggtctgatcacaagggttcctgactcctcgggcacttccagctatgaggacaccaaggaagggaagaggcttgtcggtgatcagacccctacccctccacccagacttatgggagccagagggccaggagagctgggcaggaggctctgaggttgacgggaatgggaacacagcctcacacctcctgctgtagggcattcaggggaagaaggaccatctcccacagggagtgggtcccctggggcagtgactcttgggctatgacctcaagatgcatgcggtcgacaggcagagagcggataccatgccaggcaggggaagctgagggacaaaggtactgaggtgggarggggtgtggggtgttcaaggaacggggcctgtgaggctggagcccagagaagaccagagaagaggagccaagatcagagag

SEQ ID NO: 43901 - DNA, 589 bp, Homo sapiens
ataatattttagctactaataaatgccagtcaggatgctccattgcagctggcaaggaggactctctttaggttaagttgtgaagaaggatggcagcctagcagaatgaaggtggatatgagaagcctccctcatctgcagagaaaactattagtagtaggacaaaataaggccagcatacagagggaataaagctaatactaagatgaatagttattatttgaacaaaatttccttctgtttttaacccattatcaaaacaaaataatagtctttccagtttgttgctttcataagtgtttctgctcttgcaactaagggagtgctaacatagctctscaaaattacttactgattaatatagtactaatacctatagtacttattgactaatacagtactccaaaaatatttattgaattaatatatgttgaatggaatgaccttattctcctaagttctctgagctttatttctttactcaattataaaagttaaggtaatcgtacacacattaccttttctcaaatttaatatggtttataaatgtgctatacaaatatcaaagatcacgacatttaacctgcca

SEQ ID NO: 43902 - DNA, 636 bp, Homo sapiens
aaaaataaaaaagcataaggctgtaaaaattgctgaaactttgctcagcaaagaagctatttattcaaagtaaatgactcactgacgagaaaggaggaaggagcttcggagaagaagattagttagctgtgaatataaccctcccaggctctctcccaacctttctccctaaaaggtattctagcaggaatgtgtagtcactaagaatgtgaaaggggtggtggggtggtaatccagggcactggaaaagcttgaaaaatcccctaaagagagaatattgcctggtgcatcggggacaggcatcccttttcttgargaaaaaaggaaacagaatgctatgttcctttggaaaaaggtagaagtcgaggggagagatcagagccacaatggcaggagttttggggtccagtgactactatttatatcctccctattacacattagctgtgtgactctgggtaactagtttaacttctctgagcctatgggaacttgggggaagtaatataatgtctctcatagggcttcagtgaagggtaaatgagatatcatctgtaatgtttatcacacatagtagacactcaaatggcatttttttaatcagaagaggactgcaggatcaggaattttcatgta

SEQ ID NO: 43903 - DNA, 485 bp, Homo sapiens
tgttaggacaatttaactcaagatgttcaaaactgaaatgacatattctacaayatgtgataaaaccaccccctaacaacttaaagcaaaacagggatggaccttaaagacctgccttttcctcatcccccagccaatcagttttcaaatcttgcattttattttgaaaggtccttatacccctggtctcttgtttctagacttggcacatatttaagtttgttacctctctctactgacttttctctcttcaaacagtatctatgcctgccaaatgtgaacatacaaaaaacaaatcagaatgtgccattctgatttaaactgcttattaattaataccctcaagataacatctgggttcttagcttcaatgagtcaagcctacttacatctttttttgtctttggcttcacatttcctatcacatcccattccagcaatgccaagctgtgccggccttctaccccatctccattattttgccc

SEQ ID NO: 43904 - DNA, 617 bp, Homo sapiens
atacccaagttgtggattttcccaccacttggtgtgggtgtatttctgtgtacacacacatatacacacatacacacacacacgcagcccacctccaggcacagatttttgggtgctgggacatccaaagcagatgtgaaagatgcraagttgagaggagtttattttcattcttagccactgctatgagaaaataaccactcatttctttaacatttttatggcctttctccatttcctaacactagacgtcttaacaatatattccaaaatatttaccatgaactcagtcaattttgagattgggaattagggtagcagaagacaataatacagctgaaataaaaacaatagtggccactttttgattgcttacccaaatctcagctgcagacacctttgcctgctctattatcagaccccagctaataccaaatgctgtaggatgcttaacatataagatgctctaagaaatgtttgatatctaaagaacaaaggatttttgtttcaaaagcaaattttctggactaaaatttccaagtttcatccaaatttatgatatataacgaaacaagaaaggcattttactttttttttaaaaatagtgcctttatagt

SEQ ID NO: 43905 - DNA, 617 bp, Homo sapiens
atacccaagttgtggattttcccaccacttggtgtgggtgtatttctgtgtacacacacatatacacacatacacacacacacgcagcccacctccaggcacagatttttgggtgctgggacatccaaagcagatgtgaaagatgcaaagttgagaggagtttattttcattcttagccactgctatgagaaaataaccactcatttctttaacatttttatggcctttctccatttcctaacactagacgtctyaacaatatattccaaaatatttaccatgaactcagtcaattttgagattgggaattagggtagcagaagacaataatacagctgaaataaaaacaatagtggccactttttgattgcttacccaaatctcagctgcagacacctttgcctgctctattatcagaccccagctaataccaaatgctgtaggatgcttaacatataagatgctctaagaaatgtttgatatctaaagaacaaaggatttttgtttcaaaagcaaattttctggactaaaatttccaagtttcatccaaatttatgatatataacgaaacaagaaaggcattttactttttttttaaaaatagtgcctttatagt

SEQ ID NO: 43906 - DNA, 617 bp, Homo sapiens
atacccaagttgtggattttcccaccacttggtgtgggtgtatttctgtgtacacacacatatacacacatacacacacacacgcagcccacctccaggcacagatttttgggtgctgggacatccaaagcagatgtgaaagatgcaaagttgagaggagtttattttcattcttagccactgctatgagaaaataaccactcatttctttaacatttttatggcctttctccatttcctaacactagacgtcttaacaatatattccaaaatatttaccatgaactcagtcaattttgagattgggaattagggtagcagaagacaataatacagctgaaataaaaacaatagtggccactttttgattgcttacccaaatctcagctgcagacacctttgcctgctctattatcagaccccagctaataccaaatgctgtaggatgcttaacatataagatgctctaagaaatgtttsatatctaaagaacaaaggatttttgtttcaaaagcaaattttctggactaaaatttccaagtttcatccaaatttatgatatataacgaaacaagaaaggcattttactttttttttaaaaatagtgcctttatagt

SEQ ID NO: 43907 - DNA, 617 bp, Homo sapiens
atacccaagttgtggattttcccaccacttggtgtgggtgtatttctgtgtacacacacatatacacacatacacacacacacgcagcccacctccaggcacagatttttgggtgctgggacatccaaagcagatgtgaaagatgcaaagttgagaggagtttattttcattcttagccactgctatgagaaaataaccactcatttctttaacatttttatggcctttctccatttcctaacactagacgtcttaacaatatattccaaaatatttaccatgaactcagtcaattttgagattgggaattagggtagcagaagacaataatacagctgaaataaaaacaatagtggccactttttgattgcttacccaaatctcagctgcagacacctttgcctgctctattatcagaccccagctaataccaaatgctgtaggatgcttaacatataagatgctctaagaaatgtttgatatctaaagaacaaaggatttttgtttcaaaagcaaattttctggactaaaatttccaagtttcatccaaatttatgatatataacraaacaagaaaggcattttactttttttttaaaaatagtgcctttatagt

SEQ ID NO: 43908 - DNA, 531 bp, Homo sapiens
tggtcgcgcacgcctgtagtcccagctactagagaggctgaggcaggagaatcgcttgaacccgggaggcagaggttgctgtgaggcgagactgtactactgcacgccagcctgggtgacagagcgagactccatctaaaaaaaaatgctatagtaaacttccctttgtgtattttgcagagttgtgcaaattttacaagaatttccttctggaaattgcttagggaaaggtaggaatattatttttaaatttaacagataatgccaaatttccaacccaaaagctgtgccggtttgcactcccagggagagtaagcacccatcccccacaccctccctataccgagtggtctcaggcggtttcrtcttttcccagtaacatgaggtcagcctcctggagaggggagaagccctgactccaccgtccccaagtccccaaacttccccttcttcaatgtcccattcccctcctcaaatcattcagtggctgcatgtgtaccaggagtgccgggttccttcatgcttggcctt

SEQ ID NO: 43909 - DNA, 578 bp, Homo sapiens
catgggaaatcgtgtctatttttcattttaattatttgcattgcaacattgtaaattttggggaaaaagtttgacaggtcctttcaaaacattatttacatgcagtaccgcgtttagtgttgcacagtctgttgtctcgtagtaaccatatttagcacataatgaagtcggatagattttaattgttccgtagcagtcatcataaggatataacatttattgtgtgtttaccataagacaagcactatcctaagcttgaaaaaaaatccactcattcaatgcctcccaaatcccagaaggcagcaattggtgtggcatagaagtagagttgcagattctgcaaatggtagactcagtaagtgcccacctaaccaggaatgcagtrcagcaaaggctgttgtgtggcttgggacacgtcagtttcctcacccatgaaatgagggtgttggctgaattgcccatctgtggaactaagctaggactaaagggaaccatctgcaagagcttcatgtaacacaagtggtgtcagttatgctggttacaaaagggcccctttaaaaatacatgtttgaagtcga

SEQ ID NO: 43910 - DNA, 1206 bp, Homo sapiens
cacaactggattgcagtgtaactaagaaagtttgtgtgtcaataaccatatttatcctatgtgaagaaataatagtttcataggagaaggttaattggcatggagtctgtaaaagagaagtttggatagatgattgagctatgtatttgtcaaataatatctaaaggtaaaaagagatctagttcacagaggcgaatctctgattttttaatttgcattaacagaaacaacattggaagggagtatattaagattttaatagtgactatttctgccaatggtttctgttttattgtttactattttyggtatatttccaatgtttcttaataagtgtttattatttaaaaaatgagaaaacagcaatgagtaattcagtaaaataacatttttcaaaattgtgactgctatgattatgagccaattatgaaagaaagagacacagatagaaatagggtgaccaatctttcaacttactcaggaatgaaggattttctggatgggggatttttgttgctaaaatcgggacagtaggggacatattgggactgtggaaaaaccctacagggatttatttcctaactatgaatttctatcttggtctagagacgactgttctcataaataggtagaatagatgtggtatttctggaatgagatttaacatctttacgtagcttgccctattaaaagtagacaaatgcttgtgagagaatatcatatacttttgaaagctaatgtcttaactaattcgctgtgagcaaagctcttgaagactgtgatgtaacagagattcctaggtatcagtgaagatacggagatgaaaaagggaagttgaaaaaagaagctgagagataagcatggaaatcattttccaaactcatttttccaatctccattttcctgtattgagaagtgaaaatatgttttctagagataaagttctagaaatgaactctgacatagatattttaaaacccatttcagaaacaaaataatatgtgaacctagagtagttgtaatttatgtccttttgtctgtctttatcctgtagttaagtttcccttgggatctctttgggaaaatggagtactgcattttacaaggcaggacttgaattttcgttcttttccttctttctctctctctttctttctttccttttcttctttcttctttctctctttttctttctttcttcctttc

SEQ ID NO: 43911 - DNA, 1206 bp, Homo sapiens
cacaactggattgcagtgtaactaagaaagtttgtgtgtcaataaccatatttatcctatgtgaagaaataatagtttcataggagaaggttaattggcatggagtctgtaaaagagaagtttggatagatgattgagctatgtatttgtcaaataatatctaaaggtaaaaagagatctagttcacagaggcgaatctctgattttttaatttgcattaacagaaacaacattggaagggagtatattaagattttaatagtgactatttctgccaatggtttctgttttattgtttactatttttggtatatttccaatgtttcttaataagtgtttattatttaaaaaatgagaaaacagcaatgagtaattcagtaaaataamatttttcaaaattgtgactgctatgattatgagccaattatgaaagaaagagacacagatagaaatagggtgaccaatctttcaacttactcaggaatgaaggattttctggatgggggatttttgttgctaaaatcgggacagtaggggacatattgggactgtggaaaaaccctacagggatttatttcctaactatgaatttctatcttggtctagagacgactgttctcataaataggtagaatagatgtggtatttctggaatgagatttaacatctttacgtagcttgccctattaaaagtagacaaatgcttgtgagagaatatcatatacttttgaaagctaatgtcttaactaattcgctgtgagcaaagctcttgaagactgtgatgtaacagagattcctaggtatcagtgaagatacggagatgaaaaagggaagttgaaaaaagaagctgagagataagcatggaaatcattttccaaactcatttttccaatctccattttcctgtattgagaagtgaaaatatgttttctagagataaagttctagaaatgaactctgacatagatattttaaaacccatttcagaaacaaaataatatgtgaacctagagtagttgtaatttatgtccttttgtctgtctttatcctgtagttaagtttcccttgggatctctttgggaaaatggagtactgcattttacaaggcaggacttgaattttcgttcttttccttctttctctctctctttctttctttccttttcttctttcttctttctctctttttctttctttcttcctttc

SEQ ID NO: 43912 - DNA, 576 bp, Homo sapiens
atgcatgattttttagaccttatccttatgccaattttctcaaagtgtgtttagtggggtgttaatagttgtgataaaaaaaawaaggaaaagtcattctgtggtcaaaaatgctggggaaaaactgggtcacactaagctaaccagcttctttagtgtaagaacttttgggattatttaatatactaatattattatctgagaacccataaggtggaggtgtattcagtatttctcaaaaaacaaaacctgttttcaccaaattagaacattaaaccttaatgtaggaaatggtaatcaaaatagttcaaactctggcttagcttggttcttaaaggctagtaataaactccctgacatgggggtttattgcaaagaacatgaaggagtttatgagtcagcatctcttttttagtcacactgacattctaggtttcagtattgaaaaggctgggtagtatagctgccttatggagtcataatagtagttcaacataagttactttcactgtttgttgaccctccatttaattatccttcttaagagagagaccttgatttaattggtgttacaac

SEQ ID NO: 43913 - DNA, 576 bp, Homo sapiens
atgcatgattttttagaccttatccttatgccaattttctcaaagtgtgtttagtggggtgttaatagttgtgataaaaaaaataaggaaaagtcattctgtggtcaaaaatgctggggaaraactgggtcacactaagctaaccagcttctttagtgtaagaacttttgggattatttaatatactaatattattatctgagaacccataaggtggaggtgtattcagtatttctcaaaaaacaaaacctgttttcaccaaattagaacattaaaccttaatgtaggaaatggtaatcaaaatagttcaaactctggcttagcttggttcttaaaggctagtaataaactccctgacatgggggtttattgcaaagaacatgaaggagtttatgagtcagcatctcttttttagtcacactgacattctaggtttcagtattgaaaaggctgggtagtatagctgccttatggagtcataatagtagttcaacataagttactttcactgtttgttgaccctccatttaattatccttcttaagagagagaccttgatttaattggtgttacaac

SEQ ID NO: 43914 - DNA, 576 bp, Homo sapiens
atgcatgattttttagaccttatccttatgccaattttctcaaagtgtgtttagtggggtgttaatagttgtgataaaaaaaataaggaaaagtcattctgtggtcaaaaatgctggggaaaaactgggtcacactaagctaaccagcttctttagtgtaagaacttktgggattatttaatatactaatattattatctgagaacccataaggtggaggtgtattcagtatttctcaaaaaacaaaacctgttttcaccaaattagaacattaaaccttaatgtaggaaatggtaatcaaaatagttcaaactctggcttagcttggttcttaaaggctagtaataaactccctgacatgggggtttattgcaaagaacatgaaggagtttatgagtcagcatctcttttttagtcacactgacattctaggtttcagtattgaaaaggctgggtagtatagctgccttatggagtcataatagtagttcaacataagttactttcactgtttgttgaccctccatttaattatccttcttaagagagagaccttgatttaattggtgttacaac

SEQ ID NO: 43915 - DNA, 587 bp, Homo sapiens
aaaaatacaaaaaattagctgggtgtggtggcaggcgcctgtagtcccagctactcgggaggctgaggcaggagaatggcgtgaacccaggaggcggagcttgcagtgagcagagatcacaccactgcactccagcctgggsaacaaagcaagactccatctcaaaaaaaaaaaaatgagagaatggggtgcagtaggaaaactgaaagtagctcagataagcaaggtgtcaagcacaaagggtgatgaagtggacacacaaagctctagaggtagtaagacaccattaaagacattattaagcagattaaggagcttggactatatctggagataagcaggaagtcatttggaatttttagcagaagagggacttgatcagaataaaatttaggcacgatccttctgccagcaggatagagaataaatttgtgtactactaaggagtgcttgcatgtctaaattaagtatggaaggaaggcgtgatggttaatactgagtgtccacttgattggattgaaggatgcaaagtattgatcctgggtgcatctgtgagggtgttgccaaaggagattaacattgagtca

SEQ ID NO: 43916 - DNA, 587 bp, Homo sapiens
aaaaatacaaaaaattagctgggtgtggtggcaggcgcctgtagtcccagctactcgggaggctgaggcaggagaatggcgtgaacccaggaggcggagcttgcagtgagcagagatcacaccactgcactccagcctggggwacaaagcaagactccatctcaaaaaaaaaaaaatgagagaatggggtgcagtaggaaaactgaaagtagctcagataagcaaggtgtcaagcacaaagggtgatgaagtggacacacaaagctctagaggtagtaagacaccattaaagacattattaagcagattaaggagcttggactatatctggagataagcaggaagtcatttggaatttttagcagaagagggacttgatcagaataaaatttaggcacgatccttctgccagcaggatagagaataaatttgtgtactactaaggagtgcttgcatgtctaaattaagtatggaaggaaggcgtgatggttaatactgagtgtccacttgattggattgaaggatgcaaagtattgatcctgggtgcatctgtgagggtgttgccaaaggagattaacattgagtca

SEQ ID NO: 43917 - DNA, 587 bp, Homo sapiens
aaaaatacaaaaaattagctgggtgtggtggcaggcgcctgtagtcccagctactcgggaggctgaggcaggagaatggcgtgaacccaggaggcggagcttgcagtgagcagagatcacaccactgcactccagcctggggarcaaagcaagactccatctcaaaaaaaaaaaaatgagagaatggggtgcagtaggaaaactgaaagtagctcagataagcaaggtgtcaagcacaaagggtgatgaagtggacacacaaagctctagaggtagtaagacaccattaaagacattattaagcagattaaggagcttggactatatctggagataagcaggaagtcatttggaatttttagcagaagagggacttgatcagaataaaatttaggcacgatccttctgccagcaggatagagaataaatttgtgtactactaaggagtgcttgcatgtctaaattaagtatggaaggaaggcgtgatggttaatactgagtgtccacttgattggattgaaggatgcaaagtattgatcctgggtgcatctgtgagggtgttgccaaaggagattaacattgagtca

SEQ ID NO: 43918 - DNA, 587 bp, Homo sapiens
aaaaatacaaaaaattagctgggtgtggtggcaggcgcctgtagtcccagctactcgggaggctgaggcaggagaatggcgtgaacccaggaggcggagcttgcagtgagcagagatcacaccactgcactccagcctggggaacaaagcaagactccatctcaaaaaaaaaaaaatgagagaatggggtgcagtaggaaaactgaaagtagctcagataagcaaggtgtcaagcacaaagggtgatgaagtggacasacaaagctctagaggtagtaagacaccattaaagacattattaagcagattaaggagcttggactatatctggagataagcaggaagtcatttggaatttttagcagaagagggacttgatcagaataaaatttaggcacgatccttctgccagcaggatagagaataaatttgtgtactactaaggagtgcttgcatgtctaaattaagtatggaaggaaggcgtgatggttaatactgagtgtccacttgattggattgaaggatgcaaagtattgatcctgggtgcatctgtgagggtgttgccaaaggagattaacattgagtca

SEQ ID NO: 43919 - DNA, 597 bp, Homo sapiens
caatttatgaatataaaaaacaagaaggaaaagaatttcctcattgtcaggcagtaagtcaatggcagagcttcaaattgacttattttgctaagagggagctataaactccagacaaattactctacacccagagtgtagagtacaatattaccctacactcaatattactgttgagtgcctacaaaaattatgctaatgaaacaatatggatgttacaaggctgaaagtttctcttttaaaatcactgagggttgctttaccttctgccaaaggcaagaggaacgccagtgaggaagaggtccggggtggggcgcataggcctccactggtctgaaagctgagtcacaggaatgatatccctgtagctgaccaggcactccagggagggacaccgcgcctttgcgtgcgtatgtcctcagtaggtaaagccagtttctcagtaaaacaatgcctgttaccctaggtattactccgacccytaaataatatgcaccagtccgcaagagcaatttttacgctcctgttgtaaaaggggaaaatgcgttttgaaggaagtgttggaaggtgctttgctcattttatctttcgccatcg

SEQ ID NO: 43920 - DNA, 1805 bp, Homo sapiens
tgaataattaatttcatgatacccaataaaaactaggaacaataggtcaaacttccttggattataggcagaaaagttacatgttttttaaaaatggtcttcctgggcccgttgcgggggctcatgcctgtaatcccagcactctgggaggccgaggcggcaggcagatcacgaggtcaggagattgagaccatcctggcaaacacagtgaaaccctttctcttctaaaaatacaaaaaattagccyggcatggtggcgggcacctataatcccagctatgcgtgaggctgaggcaggagaatcgcttgaacccaggaggcagaggttgcagtgagccgagatcgtgccactgtactccagcctgggcaacagggcgagactccatctcaaaaaagtcttcctggcatttctattttcatgtcccaataaaaaccgttagaagcactgcaaataaattcaatgctcagctaatccactatgagctttttcctggaaaagatcaaaaggcagggatctatttacgcaagagaagagagaatactccagaagctcatctggaaaaatcagattatcaacataattactaatagggagaagtaataaataagtacaaatcctgcagatttaattttaaatgtacaaaactgttgttccttagaacaatttctgtactatccaaatgtttttgtatcaggtgctattaaatacaagtattcaaaagaatgactgtttaataagaatatcatattaatcaccatactaggcttattaattattttaaaaaattaagagattgaattaattctaaaagaaatctgcttgctaactaggccgtattttctgctaactgataattaagcacagtaatatatcaatgaaaccaaagcaagtatggcattaacggttattctaagagctgttatttttgttgccaacttgctgaaatttataggaatactgccccagtaaagctggatgacattttatatatcattgtggaaatgattaccaacattacggaatttggatagaacaaccatatgattgaagcagattttacaagtggtaagccaattatgtaaaaattaagcaaagtaaattaattaaattaagtaaagcattccaaattttaactagctcttttacttttgtgacaatttgtgctacaagtgaagatctacagcagtctgaggaaggcactgaaatgaaaaaaaaaatccaggtaattcttttcagaaaaggtaaagtgtatttacatacttatatatgattaaaatttctgtttctatactcattttattaaaataaatgtttgaacactaaagttaaaagcactttttaaagcaacaacaaaacaagaagtgatgaaggaaatactcaagtcatggaggaaaacttggctaagaaagaatcaacacattggattttaacatattgtcaataactacaagatcatgttccttggaagcaaaattatagtttacatctaaagtatatgctttttactgtttcatgtaaattgttttataacaagttgtgataagtcatgtataaccaacaataatatttttcataaaatacttgtcaaagtaagtttcacaaagacaaaatagagtggagctaagctaattcattggttatggacagtaaggtgcaagtgagtggtacaagagtgcagactcacagtttaaattactctcttaccattagacgcaggcatatagggtctgcacatgttacaatcaaaaccaatgtctgctacattttccacttcttcctcagtatttaagttctgacgaactgc

SEQ ID NO: 43921 - DNA, 1805 bp, Homo sapiens
tgaataattaatttcatgatacccaataaaaactaggaacaataggtcaaacttccttggattataggcagaaaagttacatgttttttaaaaatggtcttcctgggcccgttgcgggggctcatgcctgtaatcccagcactctgggaggccgaggcggcaggcagatcacgaggtcaggagattgagaccatcctggcaaacacagtgaaaccctttctcttctaaaaatacaaaaaattagcctggcatggtggcgggcacctataatcccagctatgcgkgaggctgaggcaggagaatcgcttgaacccaggaggcagaggttgcagtgagccgagatcgtgccactgtactccagcctgggcaacagggcgagactccatctcaaaaaagtcttcctggcatttctattttcatgtcccaataaaaaccgttagaagcactgcaaataaattcaatgctcagctaatccactatgagctttttcctggaaaagatcaaaaggcagggatctatttacgcaagagaagagagaatactccagaagctcatctggaaaaatcagattatcaacataattactaatagggagaagtaataaataagtacaaatcctgcagatttaattttaaatgtacaaaactgttgttccttagaacaatttctgtactatccaaatgtttttgtatcaggtgctattaaatacaagtattcaaaagaatgactgtttaataagaatatcatattaatcaccatactaggcttattaattattttaaaaaattaagagattgaattaattctaaaagaaatctgcttgctaactaggccgtattttctgctaactgataattaagcacagtaatatatcaatgaaaccaaagcaagtatggcattaacggttattctaagagctgttatttttgttgccaacttgctgaaatttataggaatactgccccagtaaagctggatgacattttatatatcattgtggaaatgattaccaacattacggaatttggatagaacaaccatatgattgaagcagattttacaagtggtaagccaattatgtaaaaattaagcaaagtaaattaattaaattaagtaaagcattccaaattttaactagctcttttacttttgtgacaatttgtgctacaagtgaagatctacagcagtctgaggaaggcactgaaatgaaaaaaaaaatccaggtaattcttttcagaaaaggtaaagtgtatttacatacttatatatgattaaaatttctgtttctatactcattttattaaaataaatgtttgaacactaaagttaaaagcactttttaaagcaacaacaaaacaagaagtgatgaaggaaatactcaagtcatggaggaaaacttggctaagaaagaatcaacacattggattttaacatattgtcaataactacaagatcatgttccttggaagcaaaattatagtttacatctaaagtatatgctttttactgtttcatgtaaattgttttataacaagttgtgataagtcatgtataaccaacaataatatttttcataaaatacttgtcaaagtaagtttcacaaagacaaaatagagtggagctaagctaattcattggttatggacagtaaggtgcaagtgagtggtacaagagtgcagactcacagtttaaattactctcttaccattagacgcaggcatatagggtctgcacatgttacaatcaaaaccaatgtctgctacattttccacttcttcctcagtatttaagttctgacgaactgc

SEQ ID NO: 43922 - DNA, 1805 bp, Homo sapiens
tgaataattaatttcatgatacccaataaaaactaggaacaataggtcaaacttccttggattataggcagaaaagttacatgttttttaaaaatggtcttcctgggcccgttgcgggggctcatgcctgtaatcccagcactctgggaggccgaggcggcaggcagatcacgaggtcaggagattgagaccatcctggcaaacacagtgaaaccctttctcttctaaaaatacaaaaaattagcctggcatggtggcgggcacctataatcccagctatgcgtgaggctgaggcaggagaatcgcttgaacccaggaggcagaggttgcagtgagccgagatcrtgccactgtactccagcctgggcaacagggcgagactccatctcaaaaaagtcttcctggcatttctattttcatgtcccaataaaaaccgttagaagcactgcaaataaattcaatgctcagctaatccactatgagctttttcctggaaaagatcaaaaggcagggatctatttacgcaagagaagagagaatactccagaagctcatctggaaaaatcagattatcaacataattactaatagggagaagtaataaataagtacaaatcctgcagatttaattttaaatgtacaaaactgttgttccttagaacaatttctgtactatccaaatgtttttgtatcaggtgctattaaatacaagtattcaaaagaatgactgtttaataagaatatcatattaatcaccatactaggcttattaattattttaaaaaattaagagattgaattaattctaaaagaaatctgcttgctaactaggccgtattttctgctaactgataattaagcacagtaatatatcaatgaaaccaaagcaagtatggcattaacggttattctaagagctgttatttttgttgccaacttgctgaaatttataggaatactgccccagtaaagctggatgacattttatatatcattgtggaaatgattaccaacattacggaatttggatagaacaaccatatgattgaagcagattttacaagtggtaagccaattatgtaaaaattaagcaaagtaaattaattaaattaagtaaagcattccaaattttaactagctcttttacttttgtgacaatttgtgctacaagtgaagatctacagcagtctgaggaaggcactgaaatgaaaaaaaaaatccaggtaattcttttcagaaaaggtaaagtgtatttacatacttatatatgattaaaatttctgtttctatactcattttattaaaataaatgtttgaacactaaagttaaaagcactttttaaagcaacaacaaaacaagaagtgatgaaggaaatactcaagtcatggaggaaaacttggctaagaaagaatcaacacattggattttaacatattgtcaataactacaagatcatgttccttggaagcaaaattatagtttacatctaaagtatatgctttttactgtttcatgtaaattgttttataacaagttgtgataagtcatgtataaccaacaataatatttttcataaaatacttgtcaaagtaagtttcacaaagacaaaatagagtggagctaagctaattcattggttatggacagtaaggtgcaagtgagtggtacaagagtgcagactcacagtttaaattactctcttaccattagacgcaggcatatagggtctgcacatgttacaatcaaaaccaatgtctgctacattttccacttcttcctcagtatttaagttctgacgaactgc

SEQ ID NO: 43923 - DNA, 1805 bp, Homo sapiens
tgaataattaatttcatgatacccaataaaaactaggaacaataggtcaaacttccttggattataggcagaaaagttacatgttttttaaaaatggtcttcctgggcccgttgcgggggctcatgcctgtaatcccagcactctgggaggccgaggcggcaggcagatcacgaggtcaggagattgagaccatcctggcaaacacagtgaaaccctttctcttctaaaaatacaaaaaattagcctggcatggtggcgggcacctataatcccagctatgcgtgaggctgaggcaggagaatcgcttgaacccaggaggcagaggttgcagtgagccgagatcgtgccactgtactccagcctgggcaacagggcgagactccatctcaaaaaagtcttcctggcatttctattttcatgtcccaataaaaaccgttagaagcactgcaaataaatkcaatgctcagctaatccactatgagctttttcctggaaaagatcaaaaggcagggatctatttacgcaagagaagagagaatactccagaagctcatctggaaaaatcagattatcaacataattactaatagggagaagtaataaataagtacaaatcctgcagatttaattttaaatgtacaaaactgttgttccttagaacaatttctgtactatccaaatgtttttgtatcaggtgctattaaatacaagtattcaaaagaatgactgtttaataagaatatcatattaatcaccatactaggcttattaattattttaaaaaattaagagattgaattaattctaaaagaaatctgcttgctaactaggccgtattttctgctaactgataattaagcacagtaatatatcaatgaaaccaaagcaagtatggcattaacggttattctaagagctgttatttttgttgccaacttgctgaaatttataggaatactgccccagtaaagctggatgacattttatatatcattgtggaaatgattaccaacattacggaatttggatagaacaaccatatgattgaagcagattttacaagtggtaagccaattatgtaaaaattaagcaaagtaaattaattaaattaagtaaagcattccaaattttaactagctcttttacttttgtgacaatttgtgctacaagtgaagatctacagcagtctgaggaaggcactgaaatgaaaaaaaaaatccaggtaattcttttcagaaaaggtaaagtgtatttacatacttatatatgattaaaatttctgtttctatactcattttattaaaataaatgtttgaacactaaagttaaaagcactttttaaagcaacaacaaaacaagaagtgatgaaggaaatactcaagtcatggaggaaaacttggctaagaaagaatcaacacattggattttaacatattgtcaataactacaagatcatgttccttggaagcaaaattatagtttacatctaaagtatatgctttttactgtttcatgtaaattgttttataacaagttgtgataagtcatgtataaccaacaataatatttttcataaaatacttgtcaaagtaagtttcacaaagacaaaatagagtggagctaagctaattcattggttatggacagtaaggtgcaagtgagtggtacaagagtgcagactcacagtttaaattactctcttaccattagacgcaggcatatagggtctgcacatgttacaatcaaaaccaatgtctgctacattttccacttcttcctcagtatttaagttctgacgaactgc

SEQ ID NO: 43924 - DNA, 1805 bp, Homo sapiens
tgaataattaatttcatgatacccaataaaaactaggaacaataggtcaaacttccttggattataggcagaaaagttacatgttttttaaaaatggtcttcctgggcccgttgcgggggctcatgcctgtaatcccagcactctgggaggccgaggcggcaggcagatcacgaggtcaggagattgagaccatcctggcaaacacagtgaaaccctttctcttctaaaaatacaaaaaattagcctggcatggtggcgggcacctataatcccagctatgcgtgaggctgaggcaggagaatcgcttgaacccaggaggcagaggttgcagtgagccgagatcgtgccactgtactccagcctgggcaacagggcgagactccatctcaaaaaagtcttcctggcatttctattttcatgtcccaataaaaaccgttagaagcactgcaaataaattcaatgctcagctaatccactatgagctttttcctggaaaagatcaaaaggcagggatctatttacgcaagagaagagagaatactccagaagctcatctggaaaaatcagattatcaacataattactaatagggagaagtaataaataagtacaaatcctgcagatttaattttaaatgtacaaaactgttgttccttagaacaatttctgtactatccaaatgtttttgtatcaggtgctattaaatacaagtattcaaaagaatgactgtttaataagaatatcatattaatcaccatactaggcttattaattattttaaaaaattaagagattgaattaattctaaaagaaatctgcttgctaactaggccgtattttctgctaactgataattaagcacagtaatatatcaatgaaaccaaagcaagtatggcattaacggttattctaagagctgttatttttgttgccaacttgctgaaatttataggaatactgccccagtaaagctggatgacattttatatatcattgtggaaatgattaccaacattacggaatttggatagaacaaccatatgattgaagcagattttacaagtggtaagccaattatgtaaaaattaagcaaagtaaattaattaaattaagtaaagcattccaaattttaactagctcttttacttttgtgacaatttgtgctacaagtgaagatctacagcagtctgaggaaggcactgaaatgaaaaaaaaaatccaggtaattcttttcagaaaaggtaaagtgtatttacatacttatatatgattaaaatttctgtttctatactcattttattaaaataaatgtttgaacactaaagttaaaagcactttttaaagcaacaacaaaacaagaagtgatgaaggaaatactcaagtcatggaggaaaacytggctaagaaagaatcaacacattggattttaacatattgtcaataactacaagatcatgttccttggaagcaaaattatagtttacatctaaagtatatgctttttactgtttcatgtaaattgttttataacaagttgtgataagtcatgtataaccaacaataatatttttcataaaatacttgtcaaagtaagtttcacaaagacaaaatagagtggagctaagctaattcattggttatggacagtaaggtgcaagtgagtggtacaagagtgcagactcacagtttaaattactctcttaccattagacgcaggcatatagggtctgcacatgttacaatcaaaaccaatgtctgctacattttccacttcttcctcagtatttaagttctgacgaactgc

SEQ ID NO: 43925 - DNA, 969 bp, Homo sapiens
ttaaatatagatgaagtatttctgatggaaatttagtttctgaatcaagataagtgtaacatacacaccagattttaaaaatttagtatgaaaaatgtaaagtagcaaattgataatttttatattgattacataacaaaatgacaatatttcaatattttagtttaactaaaacatataaaatgtatttcacctgtttctttttagtttttttccatgcaggtattagataattgaaaattacatatatggctcaccatgtattttaccagacagtgctgacatagactacaacatgttctgaacacaaagtaaaccacaaatatttgttaaattattgatgccccttcaaaaaaaataattattattttcatcgagtaagacaagtatctattttcttttgattaatactcagatgccacctgaactatctccaaatttatggytggggacactcaccagtgtgcttcagaccaacagtgccttgtgtcataatgatgtcaccatctcagagtctctaaaacgttcccttgtcaacttttcagatgttttaatcccacatgcaaatgaatctttagtggtggtatgtgcttagctcaatgcatgcttattaaatgcctggatacctcattttctgtagtttgagcagcctttcaacactgattttgacacttagtcttatcatttaggcctttccaggtcctgacctgtattattgtacattggaactatatgcaagggccatggctgaagggatcaatgttggtatcttggtccgtatttcacctctaatagaattgatcttagcctatttgttcagattgcttctttgacaagacaaagccaaatgtagatcagctttgttttattcatgccattttgcctaaaataaatagttcagatttacatgtagcagagtgttttttttttagctttttctttttttttgatataagatgtcatataata

SEQ ID NO: 43926 - DNA, 537 bp, Homo sapiens
gtggttatttgtttacagtattgttgatttaattttacagttctattttctggctggtatattaaaaagaagcttgtttctttcttaatttaaggctaaccctcaatttgccaagtctcatttactcctcataattcagaagcaaacacctctactgagtttctgtactttttaagttaatatagtcatttgcataggttaagtaaaaatctgttttccttttactaagatataattggaaatattaatcataaatccaagattatacctacagtgtcatattgagaatgcttctcatttagtcaaggtacaccaagctcacacttaggaaatacgtttgcatagagagccaatgctcggagaaaacgctcagcgaaactggccacgttacctgttacayatttctagcttcatcagtaaggaatacccgtcctgacagaccaaagatcttagcagattttacacatcacaagcaaagtagaattccccaatgttaagggaaaaactttcttgggcttggtttcctggtcttggtat

SEQ ID NO: 43927 - DNA, 642 bp, Homo sapiens
tttccttttctatttatcttgacttttcatttgtttacttgtttgtcatctgtctttcctacacttctctaggagtgcaggcacctactccagaagttagtctagtttctggcatatggttaactcaaaaaatattcttgaattattcaatgaataggcaaaattttatttaaaaccattattattcctctctagtcaataatttttgttgtaaggaacagaagattgaacttgttcaaacaattagggagattcttcaaaggatacagtagaatctcatgaaactagggacaggaaaagaaacagctaagcctcagggaaatgagaaccaaagctgctgtccatttcaggatgaacatagtctttcatctctgcttctttccgcatcatctccatctgcacaracattttatcccctggccagctcctattgctgtactcatcttgtacatagactgaaaatttcaagatggcatcattatttttctgcacagcaaccatcactaaatgattcagactgtttctcttaattccctaggacaggaatttgagggggccatctcttcctcttttgggccaaacaccacaagtgataaatccttagccagtcaaaaaattggttttgcattggtaatctaatca

SEQ ID NO: 43928 - DNA, 559 bp, Homo sapiens
taatcttttcctctcaggttctctgatagcaagattctctaaattgaaatgactgctttactgattgcctctagttttcccccttgttctccctgaactatattaactttgtgctatgttagtgactgtgtatgttgacagatttcctagagaactgctgatgaatactgcccacaagaaatctcacttttccttttcattgacgtatttgtgtaatttataattctaacccatgagttaattcaatgcagagattatttaaaagactacttgagacatagtgtatagctaatccaggtcctcataatctttaccagaagttatttgctcttgtgcataattgaaaacaaatgttctgtgttgkgtacaattattttgatcttaaaggctatgcttcgtagaaaaagagaaggttaggattctgtagtttcccttagtgctttcaaggtatcttctttatagtcatacttatctatatattaaattataatagtttatatataggcttgagtttatgtatgtatatgattgtacatggatatatgtatctagatttggg

SEQ ID NO: 43929 - DNA, 509 bp, Homo sapiens
agaacactgttttcaaaaaaattgtttttcaaagcagcttccctttcctcttcccaccatcctgatgtgagcaaagcagagaggaaatgaggcccagggaggggaaggaacttggccacggtggtgatttccctgggacattcagactttctgaaagaagtgttcagagggacttaaaaggaggttgcctgagacagatttgctggaagaagggacagtttggcatcagctgtgggacagaagtgagctcctttgctctctctgggcttgccaaacttcccccttagcctgtgccgtagaactcagagctggagaaggactgttggagtctccctgttgtgggcagaactctcctttcgggcagagttacccatcccaggaagttcatttctgactttcttggctaaagagaactggccttagatcttctaatgcaggaagcragggacacagattggaaaagtggaaggatctcttctcttggcctctgcctcccacagaggctgacc

SEQ ID NO: 43930 - DNA, 578 bp, Homo sapiens
tgaggaaatgagcaggcaggagcagcagtaggwggatgaaggcaggggcagctccctggagtgtctggggatagagcgcctctccctaagccagctgtttgaattagtatttgatcttgatggtcagaaagttactctccatatctgacttgaccttctccaccattttaatccaaggccatttaaccgggcccaggttcttagtctggtgagactgactatgggtctcacctgagactggcctcatgggctcatagacaaagccctggcccaggagtgagagcccagggctcttgtctctgtgcttgctgaccagttctggggtccttgagctatcattcttccaacaccttcaaacgacagcacagggcacagggattgcaaggaactaatttgcagcattcaagaaaatgctcctgcttttttggtgtggatttaaagaatatatagagaatagctaagtgcatacgctgtgccaagtactcgctctgcgtggtgttctgcattgctgtgtatgatagtatctggcccaaggagggcagattggggagatgatggtggacaaggatggcacaggt

SEQ ID NO: 43931 - DNA, 534 bp, Homo sapiens
gcctgggagacttgggaaaatgtttctggagaggctttcagagtggctggaaaaggctcttgttgctgtaatttagagaggagctctgtgtccttggccagtcaagtaagttcctggatctttggcaaagccagaggaagaaaggagctacctgccctttcctgggcatgcttggtgactcagattgatcttggagtgtgcagtggcccttctaccctgcacctgacctcatgatcccctccacctgcactggtgtgcattactgaagcaagggtcctgtggacatcttgcattttgggcactgctagggggtctgggctgcttggaaggagccatggcctagggttcagggaactagactctatcccagttgggttcagactgctgtgactgtggacacgatgctccttgttctgggctccagttttcccatttgtgagatgaggcaacttccaatgcttctctaggccctgcacktaagtgatttttccagttcaaagtcaagacaggtaaaagggcattcatcattgtgcc

SEQ ID NO: 43932 - DNA, 1105 bp, Homo sapiens
tagtggtgcagtcacagctcactgcagcctcaacctcccaggctcaagtgatcctcccacctcagcctcctgagtagctggactactagcatacccagctaatttttgtattttttgtagatatggggtttcaccatgttgcccaggctgatttcaaactcctgggctcaagtgatccacctgcctcagcctcccaaaatgctaggattataggcatgagccaccacgctcagcttatattcaaaatatgtttattatatttaaaagccctcccacagttcaggggtttaaaaaaagctagggcaaaaacttggactctctttttggcctgacctttaaagcacattatttcttactgcattagattttcattagttaatatctcatgaaaccamctgttattaacctaaaagttcattttgtggactattcagcccctttcttgctgtccatcttcaaggcgggttttttcttgggatcgtcaccagaagtgctagtaaaattacctgacttctcacacaatcaaaacaggaattggtggggagggggcaaaggggagaagaaacaaaagtataattcagcaaactgaaagccaacagtcaagttctcttttgtataaagaggtcctactaaaaaaaaatcacatatattaatggcaaaggagatgaataatcataattatagctaccatttattgagtgcttactttatgctagtcactggtcacatacatgttctcctttagttctgtggcaatctcgggtaaccattctacaaatggggaaactgaggctcggagaatttaagcaacttgcctatggtcacaattaaatagtgccagagctggggaattcaaatcagagaaaatactgctagtaaacaatgtgggaaaagatccaacataagaaagaaatccaagttaaaacattattatttgaggtatcatttattacctaccaaattgcacatttttttatggtaatgcccagtggttggcagggggtcagtgaaactggtccttatattgtagatagcattatagatgggtataatccttttgtgaagcaatgtgaaaattcgtaaacaagagccacaaaagtggtca

SEQ ID NO: 43933 - DNA, 597 bp, Homo sapiens
ccctatgccgccaacaggcactgagcccattcttctgcacaaagagacacttaggtggtttgctatttgattaggatcactgggctcaggggccatgttcttaccctttgttcacttttttccaaacagagccacattccaccagcacaggagataagtgcctcagaaggggaacagtatgatcatggcaggcagaggtggggycaaagattcagagtcttatccctaaggagagacattgtgagatacattccacccctccccagagagacctaaggatgattgggccactgtcttgtctacatgaccaagtgacaactaccctttcagtagcttctaacctttcagcagttcagcatcccactctgggccttcagagatcacgtccaaaaaagaccagatgtaggcaaattgacgtcttgatcctaatagactctgagcgtgttaagaaacatgccagtggcacatttagggaacatattgaaatatggttgaaatccaactgaatgtataatttagatatcatccaggaggactgtcatcaaaagagggacaaaagttcagatgagagtccaagacagacttaaatatacatgc

SEQ ID NO: 43934 - DNA, 597 bp, Homo sapiens
ccctatgccgccaacaggcactgagcccattcttctgcacaaagagacacttaggtggtttgctatttgattaggatcactgggctcaggggccatgttcttaccctttgttcacttttttccaaacagagccacattccaccagcacaggagataagtgcctcagaaggggaacagtatgatcatggcaggcagaggtggggccaaagattcagagtcttatccctaaggagagacattgtgagatacattccacccctccccagagagacctaaggatgattgggccactgtcttgtctacatgaccaagtgacaactaccctttcagtagcttctaacctttcagcagttcagcatcccactctgggccttcagagatcacgtccaaaaaagaccagatgtaggcaaattgacgtcttgatcctaatagactctgagcgtgttaagaaacatgccagtggcacatttagggaacatattgaaatatggttgaaatccaactgaatgtataatttagatatcatccaggaggactgtcatcaaaagagggacaaaagttcagatgagagtccaagasagacttaaatatacatgc

SEQ ID NO: 43935 - DNA, 553 bp, Homo sapiens
tagtgctaacttgtcattgtaggagtggtttaggccacaagaaagggctccttgaataatctgaaaatggagtgagaaatgaagtctcaagagcagctcatgctttaagaggtatagttggtacaccaccactttgggtgctcacctaccctagttgctcagcaacagccaaaggtaagagccagaaaatggacagtttagcctgagacctcaatgatgggtttatgggatgatccagaacagagcactttcattagtccccagatgctacatgaatggaggaaacaggaccagcaacgttctgaggccagcagcagtctgctcccacagtgaactccttgatggggataatggaccgtgtttttggaagagtgacttaatgctttatcctagaaaccttctctaggataagttagtacatgtgatcaggacatgttggctttagtgcaaggggaggaaaccttagtggagaaaataccatctgtytagcaatctctataatgggttctgcaaatggagtgctgtgattgaaaacgtttaggaagatcaaagg

SEQ ID NO: 43936 - DNA, 490 bp, Homo sapiens
agaaaatttcattttgatttttcttccgtagagtccatgccagttagaatctatctcctcttccctcgatctccttgacatgtctcaaagaaaccacaattttgcagaaaaccatcatcacttttgtttaaattttgtgcttgtctgcagtttgcaaatgatggggaaatgagcagaggatgtttgtctgtgcctagttrttggattatcctaagtggttgtgaaacactatccctggcatagaagccttgaactgagggaatgaatgctgcctcaaaaagaggcccacagtgtgaagtttaagtgtaggtggctcttcagacaggtcctttgcagtataacaatgaaacagtgtaaatgccaagattaggagagtgggggcagaggaacaatatccacacaacagagttgaatggattatttctaatctttcatatcctttggattaaaggcaaaactgcaaatattagcatctcctaagtgtattttt

SEQ ID NO: 43937 - DNA, 614 bp, Homo sapiens
gtggtttcccttgggccccacgctgacctcggtggcactcccgccctccctccacccactgccttgttgcctaaggaacctccaccctggctaggccccattgttcttttatcatttgtgtttctttttycttttttttttttttttaacaagcatagactcttcttccttggttttaaaaatggtgtgaaaggaaaataaatcttggggcttccaaatcactagctaaagggaaaagtcaagctgggaactgctttgggccaacctgcctctcattctgtacaaagtcacccctctgggcgcattggctcaaacctgtaatcctagcactttgggaggctgagggggtgtggagcacctgaggtctggagttcaagatcagcctggctaacatggtgaaactccatttctactaaaaatacaaaaattagccaggcatggtggtgcattcctgtaattccagctacccaggaagctgaggcaggagaatttctggaacccaggaggtggaggctgcagtgtgcagagatcgcatcactgcactccagcctgggcgacagagcaagactccatctcaaaaaaaaaaaagtctcccctctgctcacagagataca

SEQ ID NO: 43938 - DNA, 614 bp, Homo sapiens
gtggtttcccttgggccccacgctgacctcggtggcactcccgccctccctccacccactgccttgttgcctaaggaacctccaccctggctaggccccattgttcttttatcatttgtgtttctttttccttttttttttttttttaacaagcatagactcttcttccttggttttaaaaatggtgtgaaaggaaaataaatcttggggcttccaaatcactagctaaagggaaaagtcaagctgggaactgctttgggccaacctgcctctcattctgtacaaagtcacccctctgggcgcattggctcaaacctgtaatcctagcactttgggaggctgagggggtgtggagcacctgaggtctggagttcaagatcagcctggctaacatggtgaaactccatttctactaaaaatacaaaaattagccaggcatggtggtgcattcctgtaattccagctacccaggaagctgaggcaggagaatttctggaacccaggasgtggaggctgcagtgtgcagagatcgcatcactgcactccagcctgggcgacagagcaagactccatctcaaaaaaaaaaaagtctcccctctgctcacagagataca

SEQ ID NO: 43939 - DNA, 599 bp, Homo sapiens
tatcaggaaataataaacatcagctatgatctcaccacacacaaccacaacagaggtgacggaggagctgaaacagacactgtcagtgagtgagggtggggtcaaatcgagaagcaggactgcagcaggagcttaggcacttgtaggtgagtggacactctcagcaatccacttgccttttacaacagatgaaaacttaacatacccctaatataattcttgatttctacttcctaaaacctgctctccttcatactaatttgttatggctaccctaaaaaaatgccccacaagtggcttaaacaacagaaatttactttctcatagttctggagcttgaagtacaagattaaggtgtcaacaggtttggtgtcttctgaggccctgtctccttcacttctagatggccggttcttgctgtatcttcacatggggttttatctgtagacgtgcatccctggtacccctctgtggtctgtgctaaygttcttttcttatgaggacaggtgtcagatgggattagcaccaaccctatcagcttcattttaacctaatcacctctttaaaggccatgctgcaaatagagtcacattcagtgg

SEQ ID NO: 43940 - DNA, 598 bp, Homo sapiens
ctgtgaccagtgtcaaacaagaaagtagcagtttatgctaattgatagttcaataatgtatttatggaaaacattctaattttcaaacagctcaacttaattcattcattcaatgtctgttcttgttagagacttgttagatactgaagtagaagtgaaaccggaattttcatttgccagcatgcaaataaagacatattctctttcagtgttttgcaatgttttcctcatttcacctttccataatttgtgttcagtaactttagctgtttgttatggaaaatgtgccacatatttcacacagtaaatgcctaaatcttaaagggagattagtyataactaggatcatcaccatgaccaatttttatgctagatttaaatagacaaaatccaaactttttaatcaaagtcatcgaaaattttcttgggaaccatgggaatgccaatacaccttaaaatcttattcctgctaaccagtacttttgtatgacattagtgttaacaagctcataaaacatacacacatagacagacacacacacatacacatacccatccagaaaaaatgaacttttaaaataatttccaaaatggaaaa

SEQ ID NO: 43941 - DNA, 578 bp, Homo sapiens
gctttgacttgaacctggtcaactacttcctgttccctcaggctgacagcagagaaccgctgctccagcgaggtgggtgctgtcctgaagggtgttgaacaggcaggggcctgagccaggcgccacactacctcatccagagattgctgtgcttccccttcaatgcaggaactgcaagatcctgggtgacatcactgccccacttgctggtgccaggccaggactgtggactagcactgaaccagcactctctggagtgtcccaggagagccgtcccaaccactgctaagcccgcaagggtgctgccgccyaggccctatgggaactgcccacacaggtggccttctcctgctgtctatctgcaatgtcccctcccttttacccaaggaaggtctgtgtgctcttttaccagcagtggcctagggaggggcccaaggctgagccgggctctcccagagtctggaccatgtccaccctccatagggctgaacggaagccatttccaaggacagcagcatcctcacctgtggaagagcagacacaccaggatcctggatttgatctcctgggtggagatg

SEQ ID NO: 43942 - DNA, 578 bp, Homo sapiens
gctttgacttgaacctggtcaactacttcctgttccctcaggctgacagcagagaaccgctgctccagcgaggtgggtgctgtcctgaagggtgttgaacaggcaggggcctgagccaggcgccacactacctcatccagagattgctgtgcttccccttcaatgcaggaactgcaagatcctgggtgacatcactgccccacttgctggtgccaggccaggactgtggactagcactgaaccagcactctctggagtgtcccaggagagccgtcccaaccactgctaagcccgcaagggtgctgccgcctaggccctatgggaactgcccacacaggtggccttctcctgctgtctatctgcaatgtcccctcccttttacccaaggaaggtctgtgtgctcttttaccagcagtggcctagggaggggcccaaggctgagccgggctctcccagagtctggaccatgtccaccctccatagggctgaacrgaagccatttccaaggacagcagcatcctcacctgtggaagagcagacacaccaggatcctggatttgatctcctgggtggagatg

SEQ ID NO: 43943 - DNA, 563 bp, Homo sapiens
gctccagcctccagctgggccctgacttcaagcatccaggcctcacactgttaccagatcaagaactgatagggacagggatcattattccccctttacagatgagaaggccgtcacgcctcatgagacggagacaggatcagccatgtccacatcgacatgagcatccagttatcctgaccacaagccaatgaccatcccactcactcctccaccggcccggtcccaagctcctgtttccactgacagacactcacctggtcccagaccagggctctgtgacaggtggcttgaaggagagctcattgatgaccctgttgtttctcaggttgggcggtgttgggttkgctggagcaggaaaagaaccttgtcatcagccagtgatgacaccacacccatgtccactttgctacaaggcccaggtgtgcttagaaaggcccaccccgtccacccagtccacccagctgtgtgcgggggactgaggcttggcaaggctctatcggctgggtcatgctgaagggccttagagttctgttctcagattccagatcgtatgctcctcc

SEQ ID NO: 43944 - DNA, 542 bp, Homo sapiens
ggccagattgtctacaaattacaattaaaaataatagtaatgcctctcattaccatgattattatgattagtggtgctgtgctgggtgggcctggktcagggcccaggtctgctgggaataaggctgggaagaaatggctgtacatagagagagacttgggctgctggtggcagcggaaggggcggtgtggagtcaggaggtcttgggggatactagtcagcaggacccaagtctgttggctcacctgtaggtcggacttcaaactccagggtatgttgggaaagagagtgaagtcctactgaaaagggaaggaaagagacagggtttcagaactcttttccgaatagaggttaaggacactgacctaggcagacctaatgtgtgtctcagttctgctccttaccagctagggatcccatggcaggtaaatgtgaacctaactctgtgtcactaaagtcaatactcttgaccaaggtgccctgttaccttgggcagattacttaatctttgagcatcgttgtcctcatctgtaaattgagcg

SEQ ID NO: 43945 - DNA, 542 bp, Homo sapiens
ggccagattgtctacaaattacaattaaaaataatagtaatgcctctcattaccatgattattatgattagtggtgctgtgctgggtgggcctggttcagggcccaggtctgctgggaataaggctgggaagaaatggctgtacatagagagagacttgggctgctggtggcagcggaaggggcggtgtggagtcaggaggtcttgggggatactagtcagcaggacccaagtctgttggctcmcctgtaggtcggacttcaaactccagggtatgttgggaaagagagtgaagtcctactgaaaagggaaggaaagagacagggtttcagaactcttttccgaatagaggttaaggacactgacctaggcagacctaatgtgtgtctcagttctgctccttaccagctagggatcccatggcaggtaaatgtgaacctaactctgtgtcactaaagtcaatactcttgaccaaggtgccctgttaccttgggcagattacttaatctttgagcatcgttgtcctcatctgtaaattgagcg

SEQ ID NO: 43946 - DNA, 576 bp, Homo sapiens
tttagtcaggtgcacaaatccattttctatctgccaaattaatataggcaatacttttgccaattgattttactacacaccaaaagctactgtctttctagtctcccatagcaggttcytcactgtggcaaacagaacaataaacccttaaagatgaccatgtcataatctttaaaaaccgtgaatatgttaccttatatgaaaatgacaatagggaatttaacatatgaataaattaagaatcttgaagtggggaggttattccgtattattttatgtggccaatgtaattataaaggtacttttaagggaaagagaagagggaagtagaagagacagagagaggaaaggagatacaatgatggaaggagaaaaagagagagagaaatttgaaaatgatacactggtgaatttgaaaacagaagaagcgacaacaactcaaagaatgtaggccacctctagaagatgaaaaatgcagggaaatgttttcttctttagagcctccagaaggaatgtagctctgccaaaccttgattttagctaagacccattttggacttctgacctctagaactg

SEQ ID NO: 43947 - DNA, 600 bp, Homo sapiens
aaaggcattatttcctagtgtcttccagttctccatgtttaaagcaaccacctatgaggttataagctgctcaactggtttaaggggccaatcaagggatgtgatggacagtatcttactgctccctggaatcctaacatcaatcacccaaaacacttccccatcaaacaagatcaacacatatgaaccactgatatatataatttttcttctaggaaaataaatatgaaacatgcttttagttaaacaatcattttattgcttgagtacacagacaaatttatgcgaccagggcagaggctgtagatgattcactgaaaaagaaaaaaggggaaagaaagaaaatcaggattaatactagtccctccacattcattaacagaatctccccactaatggtgctattctcaaacagttaataaatccaaactatataaagtgcaccaaacttctgaatacctgaaccaactcattgtgttcaagcacaatgaatgaagatgctcactcagacrtccaaggaagaactggccaacataaggaaaaacatttctggtggaaactgcgaatgtctggcaaccaatcatcatagtgagcaattca

SEQ ID NO: 43948 - DNA, 585 bp, Homo sapiens
aggtgggactacaggcacacgtcaccacacccagctaatttttgtatttttagtagagatggggttttaccatattggtcaggctggtctcgaactcctgacctcaggtgatccacctgcctcggcctccsaaagtgttgagattaaaggcatgagccacctcgtctggccaaagcctgaggttttaaggcactacacttaacagcttataaacacataaagtaacaaagggtaacagagtgggacacgtgggtgccaggggccctctaaatgggaagcctatacaggctcagaaaccatgaagatctcctggttctttctaaagaaaccagaagagcaggttttagcagcataaaattttaaagaggcccatcaaatcaaatagtctggtatctatactccccgttgtctctctaaggttggtcaccccacacccacgtctcttcccttgaggccaagaacccaggagtgaggttgaatgacattatctggttcaagccactccttttactcacaggcacagtgacagaaaagggcctggccctaagtcacacagcgcaggcaagcagtcaaaccctgatattc

SEQ ID NO: 43949 - DNA, 614 bp, Homo sapiens
gaaaatctgcttaaacttttcagaaccggtcggggcagtggctcacacctgtaatccaggcactttgggaggccgaggcaggaggatcgcttgagcccaggagcttaaggccagcctgggctacagagtgagaccttatctttacaaaaaataaaaaattagctgggtatggttgcttgcacctgtagtcccagctactcaagaggctgaggcaggaggatcctttgagcccrgtaggtctaggctgaaatgagccatgactgcaccactacactccagcctgggtcacagagcgacacccctgtcccaaaacaaaaacaaaaaccaaacaaaaaaaactttttaaaaactatgagatgaaatagttgagtctattctggatttctagatgtgcaatgattccagtgggtccaattccggataatgttacctatttcacatggattttactatttgccttctaattaatatttttcttctaaaggacaaaagtactcagagtgcagtgcagatttaggggattccagccctatttcttggaatcctggcaccatctcctgcttctgagatactttgcctgctagcttgctctgaagacctgaaattggctctat

SEQ ID NO: 43950 - DNA, 614 bp, Homo sapiens
gaaaatctgcttaaacttttcagaaccggtcggggcagtggctcacacctgtaatccaggcactttgggaggccgaggcaggaggatcgcttgagcccaggagcttaaggccagcctgggctacagagtgagaccttatctttacaaaaaataaaaaattagctgggtatggttgcttgcacctgtagtcccagctactcaagaggctgaggcaggaggatcctttgagcccagtaggtctasgctgaaatgagccatgactgcaccactacactccagcctgggtcacagagcgacacccctgtcccaaaacaaaaacaaaaaccaaacaaaaaaaactttttaaaaactatgagatgaaatagttgagtctattctggatttctagatgtgcaatgattccagtgggtccaattccggataatgttacctatttcacatggattttactatttgccttctaattaatatttttcttctaaaggacaaaagtactcagagtgcagtgcagatttaggggattccagccctatttcttggaatcctggcaccatctcctgcttctgagatactttgcctgctagcttgctctgaagacctgaaattggctctat

SEQ ID NO: 43951 - DNA, 972 bp, Homo sapiens
ccattcactcaacctcaataattgtttggcttcccatgtattgagtatttattctaggtttgggtgcgtgttatattgctgcagacttgatactctgcattttgcactttgcattctatcagaaatgtattctgcattgctacagtcttcataattatcattttaatggtgccataatattccttcgtgttgatgcaccataatttatggaactgttcaccaatcattggacatttagctttcatatggtgtttgttgttatagataacatyataatgagcatcttcattacacgcagctcttggtctccagtaaattatatccccagaataaaagagaaattccgcgaagtaagtgtttggagtcaaagggcataaacctctttagaacatttatctattattttgtttttatccccaaaaggattgcaccaactcatgctgcaccagtggagtataccagtattattttcactatgaagccgtatcattttgtatgttctaactttgtttttctcaaccttttttctgtttgtaacagaaaaaaaaaaacacatgttcattataaaaaaaaatccagataaaaacaaagataaactaatcataacccctctgaccaaaaataatcagtgcaaaaagttaaacatttcttttcagtcttttttctatgcatatgggagaatttttcccccaaaacttagattatattctctattcagttatattttgttctgttttaattttactattacttttcttaagtcattggaaacattttgaaacaatcagctttaatgaatacataatatttcatcatatagccatctcacttaacctatttcgatatcagattccgtgatattgaatgtttatttccagtatcagtatataagaaacaaagttgccttgaacatccttctgtgtaaatctgtatcatagtttttgtttatttccacaccacaggaaacttgaa

SEQ ID NO: 43952 - DNA, 599 bp, Homo sapiens
tgttacaatgcaagaggaatcttaagggcattatgttaggtgaaataggcatgttataatatggcaaacactaaatgtttccacttatataaggtacctaaggtagtcaaactcatagaaacagaaagtaagatgctagttgccagtgggtagggagagggaggaatgyggagtgattgtttaacgtgtacagtttcagttcgggaaaatgaaaagcattctggagatggatggtggtaatggttgcacaatgtgaatgtacttaaagacactgaactgcacacttaaaaatgattaagatggtaagttttatgttatgtgtattttgccataattttttttaaactttaaatgtattttttaaaaaaggaatggacagtgaaagatgtggctccagccactacaaagtttacaagaaccactagtgaaataagttccttcttttttgtattttttaaaatattttaacttttattttaggttcaggggcacatgtgccagtttgttatacaggtaaactcatgacttggggatttggcatacagattattttgtcacctgggtattaagcatagtacccaacaggtttgtttttgttt

SEQ ID NO: 43953 - DNA, 600 bp, Homo sapiens
gacacaaaagagacatttttaaagggaaatacagctggaaaactgtcccaccttgccagtaatcttaacagagcacattaatatatgtttgtttctagtctataaaattataaacaaaagtaaataatcgaatttactttttctaattaaaaaccactgaggcatcctttgttcaaacaaagcattattgaggagctcaggaaattgggtttaattcatgatatttgaaagggtgggccttggaaattggcctgcttttactcttactcaccatgtttcaaggacttttgagggagcttaaaagagcttctaattttccaagaagcacaactggaaaaccactatttttaataacacccagtactgacagacactgtgcaacaggcatactcctacaatgtgcatgagcttctaaatcacttcaaccatgttgaacagcaatttagaaatattttctataaatcgcaaaagtatccayatactttggctatttacattcacttctgaaaacctacattagctcaattgcatgaagatactaaatgcagcattaagttggtaaattttagaaataagtaaattcatgtattcaaccattca

SEQ ID NO: 43954 - DNA, 532 bp, Homo sapiens
cctgctctggctttgagtccctccctagactcctgtattgtcagaacctgaaatagagccagttggcaacaccgaaacagggtctgcaaagtcccagcatcaccaagccaagttagagggrtgggcatggagcagagagacagtaacttcatgactggcacagtagagaggggggacatccccttcccttccagataagcccaggaattcagagaaagataggtatcagttagtgtattagcctgttttcatgctgccaataaagacatacctgagactgggtaatttataaaggaaaagagatttaatggactcacagttccacgtgactggggaggcctcacaatcatggtggaaggcaaggagaagcaagtcatgtcttatatggatggcggcaagcagagagagcttgtgcaggggaactcctctttataaaaccatcagatcgctgggtgcggtgtctcacgcctgtaatcccagcactttgggaggccgaggcaggtggatcacttgaggcctggattttgagacc

SEQ ID NO: 43955 - DNA, 532 bp, Homo sapiens
cctgctctggctttgagtccctccctagactcctgtattgtcagaacctgaaatagagccagttggcaacaccgaaacagggtctgcaaagtcccagcatcaccaagccaagttagagggatgggcatggagcagagagacagtaacttcatgactggcacagtagagaggggggacatccccttcccttccagataagcccaggaattcagagaaagataggtatcagttagtgtattagcctgttttcatgctgccaataaagacrtacctgagactgggtaatttataaaggaaaagagatttaatggactcacagttccacgtgactggggaggcctcacaatcatggtggaaggcaaggagaagcaagtcatgtcttatatggatggcggcaagcagagagagcttgtgcaggggaactcctctttataaaaccatcagatcgctgggtgcggtgtctcacgcctgtaatcccagcactttgggaggccgaggcaggtggatcacttgaggcctggattttgagacc

SEQ ID NO: 43956 - DNA, 578 bp, Homo sapiens
aaagcacagaacacagggctttctaaaggctacagttctctaaaagttgaattgaatggcatcccatatttaaatgctcactgctacattaagaaattaagaaataatcattttcattttagagaagtaagtgcaaccctaagacattaatttgctaattattcttcctcatggagataaaatcttataatttatcttatctcatatgctacatagacatttccaactttcatatattattaaccttaacctctgtgatattcaggtaacattgaaatagaaaaatgcaacaatgtcacacacaaacctttctacataatatggtgaaaggaatgaaatataatgagttacttttacttggaaaaacataatgttactctgctttgaatcaagggtgttaacatttttagtgttagcaataatttgttttctttcaatcatacaattattacatttattttccttagtaaaatggaaraacatcccaattgccaaatactaatgacgcattcttagggtctctatgtgtaatcttattaggtttctgttttcaactggaaagtttatgaagccagtat

SEQ ID NO: 43957 - DNA, 780 bp, Homo sapiens
cccagacagcctcatgatttacaccaatcttggtgttggctgattaacagtgacacggaagtgaggattagttatctaccttatgatgggyctcaggagggtctcggttcataggccctagccattgcacgtcaaaggatgcagaatggaggtgtctgctcctggtacaacacacaagatcaaaccaaaagatgagttgcagaagagagggaagtttgcatggatggaaggatactaactcaaatattggcaactgaaagggaaattacataagggacatccaaagtgcaaacagaggattgggtctcctgtgcaataaaaattcaaaagaaaaatgaggtgggggtgtaacacgatcatgatttacagtccactctggctatggcagatgggatgagagaattaggaactggatgttatatgagtaagagatttctgtggtcagacatgagatcaacacagtctagaaaagaaggggatacaagaaatgtcagatggggaggaggtgccctgtctttcccctaattaaagtgttttggtgtgtacatgggtgtcttggtggaaaggaagatgggtagtaggatttaatgaagaagcaccagaactggggaagttcttccatttccttccctttgacattttcagaagagttctaggaagaacatgctcatctctcattacatacagccataaaatggcaaaataactaggatagaactagcccagggagttccagggaaaacccttggtgacatggatcaactgtgctccttttgtgct

SEQ ID NO: 43958 - DNA, 780 bp, Homo sapiens
cccagacagcctcatgatttacaccaatcttggtgttggctgattaacagtgacacggaagtgaggattagttatctaccttatgatgggcctcaggagggtctcggttcataggccctagccattgcacgtcaaaggatgcagaatggaggtgtctgctcctggtacaacacacaagaycaaaccaaaagatgagttgcagaagagagggaagtttgcatggatggaaggatactaactcaaatattggcaactgaaagggaaattacataagggacatccaaagtgcaaacagaggattgggtctcctgtgcaataaaaattcaaaagaaaaatgaggtgggggtgtaacacgatcatgatttacagtccactctggctatggcagatgggatgagagaattaggaactggatgttatatgagtaagagatttctgtggtcagacatgagatcaacacagtctagaaaagaaggggatacaagaaatgtcagatggggaggaggtgccctgtctttcccctaattaaagtgttttggtgtgtacatgggtgtcttggtggaaaggaagatgggtagtaggatttaatgaagaagcaccagaactggggaagttcttccatttccttccctttgacattttcagaagagttctaggaagaacatgctcatctctcattacatacagccataaaatggcaaaataactaggatagaactagcccagggagttccagggaaaacccttggtgacatggatcaactgtgctccttttgtgct

SEQ ID NO: 43959 - DNA, 780 bp, Homo sapiens
cccagacagcctcatgatttacaccaatcttggtgttggctgattaacagtgacacggaagtgaggattagttatctaccttatgatgggcctcaggagggtctcggttcataggccctagccattgcacgtcaaaggatgcagaatggaggtgtctgctcctggtacaacacacaagatcaaaccaaaagatgagttgcagaagagagggaagtttgcatggatggaaggatactaactcaaatattggcaactgaaagggaaattacataagggacatccaaagtgcaaacagaggattgggtctcctgtgcaataaaaattcaaaagaaaaatgaggtgggggtgtaacacgatcatgatttacagtccactctggctatggcagatgggatgagagaattaggaactggatgttatatgagtaagagatttctgtggtcagacatgagatcaacacagtctagaaaagaaggggatacaagaaatgtcagatggggaggaggtgccctgtctttcccctaattaaagtgttttggtgtgtacatgggtgtcttggtggaaaggaagatgggtagtaggatttaatgaagaagcaccagaactggggaagttcttccatttccttccctttgacattttcagaagagttctaggaagaayatgctcatctctcattacatacagccataaaatggcaaaataactaggatagaactagcccagggagttccagggaaaacccttggtgacatggatcaactgtgctccttttgtgct

SEQ ID NO: 43960 - DNA, 537 bp, Homo sapiens
aggcctttaaataacaaaaagagatctcagtaagtttatgcatgaaagttcactcctgttcctttttttattttttattttatttttttttttttgagacaggatcttgctctgtcacctaggctggagtgcagtggcatggtcayggctcactgcagccctgacctcctgggaccaagcaatcctcccacctcagcgtcccaagcagctgagaccacatgcatcaacacatctggctcacttttttaatttttgtagacatggagtcttcctatgttgcccaagctggatttgaactgctggtgatcctcctgcatcagcctctcaaattattggaattaacaggcatgagccatcatgcctggccatcctcttgttgcttttaagagaggccttctctcttacagatttttttaaatatctcttattacagagacatctatgtcatctatcacattggttatctgattttctagtccagagtcaaattaggaagagaagcagaactgcaggagacagccacgaaagcaacaaata

SEQ ID NO: 43961 - DNA, 350 bp, Homo sapiens
tatggatgaaaattataaatgtgctaagtgtctacctaaattttgggaagcatgattatatttcctagttataatatatcttggtttatgacarttgataaataaaatagattcattgcttaactgttaagcaaacttcctttaaatttgaatacttggccataaaggaaatttttgcctgaatgggacccaaagtgcaagtcttcgcagcaaaaaattttaaaggcgagagtgagggacaaaaaaaaaaaaagacagtagaaatgggaaagcaaaaaggggaacagtcctgacattggggtcctggttgtaatagcacattttggtgccaggctggtaagtggaggaaa

SEQ ID NO: 43962 - DNA, 560 bp, Homo sapiens
tcatattcaataactgttaagtatcagtgatgggtagacsactaggcagggtgctgggaggtgaactggagagtcagacccaaactaacccctcctcatgtccctgtaacactgggagcactgacggttaggataaggtggaagaaaggggatgggattcccgcctagagcagcagaaacaaacacaaggattgctgcatttgagcaaagtcttgcatgcatatgaggaggtatttgccaggtggataggaaaagataagggtagccttctgaaagcacttgcaagacaccagcatgcaccaacaccacctccatgtttgaaaagttttgtttttgctgttacccctgcccccagacacttctagacctccatggtactttccatccttattgaaactcacatcacttcctcaaggaggaattctctaatcttcctaaataaaagaaaattgctgtactttatcccccactgtctactgtcttgccatatttcctctggctgaaattgcacaaaatatctatgctgtctcttcttccttattgcccaccttccctccaca

SEQ ID NO: 43963 - DNA, 607 bp, Homo sapiens
aataaccatcttctttctaggcagataccaatattctttctaaaagaaaaatcagggatgttaattcttcatacctggcatgatatttaaagatggctggagggcaggaagtccatccagtgtaagactcagaagggattctttctatctttagtttattattgtccatttcagacatccttacttgcagcaggcagtatgaaatgcatcagaatttcattacttagaagaaacaagatctgaatgatatgatctgtagaaaatattatcttacatgggaaattcaatattttttgggaattccaaaaatattacctattcgttataaaatctacaaacaataaagcaacttacaatgtagaaagrgaaagtttcacctaaactcacttacaaaagaaaaactctggttagtaattgctgtataaagcttccaaattattgcagtatctgaatctatcttcttttttctttttcctttttggagactgagtcacactctgtcgcccaggctggagtgcagtggcacaatctcagctcactgcaacctctgcctcccagattcaagtgattctcctccctcagcctcccaggtagctgggattacagg

SEQ ID NO: 43964 - DNA, 1256 bp, Homo sapiens
ctgctgatttttggccatgatctgaatagtaagattatagacttccctacattgaaattgggaagaagaaccattggagagcagttcaagacataacaggctgagaggacagcataattttcctttaattctacagcatgtttccatcaagaggggaaggagaacaagatgaagtactagaaattataggcgccagatcacactgctaaaaccagagggaggaagtgatcataataatccataaacactatagaacragaagtaaggagaccgctgatatagtaattattttcctcagggaagaaggattgtgaggcaggaagaaggaaaaagaagttatttatataatttttggggtttctgctgaggaaacctgagggaactcacttcagatgcttttagaatgtttgcatgaaggaagatttgattttggctgctccaggaactactggaagcaggatagagtgctagtgctagaattgtgataaaccacagtcacctgttacccctctttgtcattattgggcatcagagatatatgttttgttgttatcagttagtcaaatgagataaatgtaaatatgcatacactggctttgttgttcagagagcaaacttttggataaaatagcaatttaatgaaaatactttagagaataacatgatctttcaaaccagacttattttagaaacaaaaataatgttaaattctttaattgactcctaaaatatatttttttaatgaatattggagtgatttccaaatggacaacgttattcatatctaatgcttgtagcaactttattgtgtgtaagtatatcaaatttgataattttttatacattttgattaggtttgtatattataccttgttcccatgagtgactgacaaaactttctgaaggttaaaccagaaaataccaaagtgcaagctcattattataccacatgggtatgaaaaataatgaataccatataataggattcaccaaacatatatccaagctgaccaattcaggacacttccactgaggagctttgaagtgtgcattcatctaaagtgtaattgtcattgtgtacctgctcaattttcaggcaagtcaaagagcatgatgaatatttgtagtataatggtttaaatccttctgatgtcttgtatgaaagacatgcgtgatcctggctcacttcaactttcaccttctgggttcaagtgattctcctgtctgagtctcctgagtagctgagttaacaggtg

SEQ ID NO: 43965 - DNA, 1256 bp, Homo sapiens
ctgctgatttttggccatgatctgaatagtaagattatagacttccctacattgaaattgggaagaagaaccattggagagcagttcaagacataacaggctgagaggacagcataattttcctttaattctacagcatgtttccatcaagaggggaaggagaacaagatgaagtactagaaattataggcgccagatcacactgctaaaaccagagggaggaagtgatcataataatccataaacactatagaacaagaagtaaggagaccgctgatatagtaattattttcctcagggaagarggattgtgaggcaggaagaaggaaaaagaagttatttatataatttttggggtttctgctgaggaaacctgagggaactcacttcagatgcttttagaatgtttgcatgaaggaagatttgattttggctgctccaggaactactggaagcaggatagagtgctagtgctagaattgtgataaaccacagtcacctgttacccctctttgtcattattgggcatcagagatatatgttttgttgttatcagttagtcaaatgagataaatgtaaatatgcatacactggctttgttgttcagagagcaaacttttggataaaatagcaatttaatgaaaatactttagagaataacatgatctttcaaaccagacttattttagaaacaaaaataatgttaaattctttaattgactcctaaaatatatttttttaatgaatattggagtgatttccaaatggacaacgttattcatatctaatgcttgtagcaactttattgtgtgtaagtatatcaaatttgataattttttatacattttgattaggtttgtatattataccttgttcccatgagtgactgacaaaactttctgaaggttaaaccagaaaataccaaagtgcaagctcattattataccacatgggtatgaaaaataatgaataccatataataggattcaccaaacatatatccaagctgaccaattcaggacacttccactgaggagctttgaagtgtgcattcatctaaagtgtaattgtcattgtgtacctgctcaattttcaggcaagtcaaagagcatgatgaatatttgtagtataatggtttaaatccttctgatgtcttgtatgaaagacatgcgtgatcctggctcacttcaactttcaccttctgggttcaagtgattctcctgtctgagtctcctgagtagctgagttaacaggtg

SEQ ID NO: 43966 - DNA, 566 bp, Homo sapiens
caatgatagagattcagagatgcccgacactctgtcctcatcagctcctcagctctttcagtatctcttaccaccctctctgtactttcctaactgtatgaccattggagatttttttaacttatccaaatctctatttcttatccataaaatgggaataacagggcttaatttattgaatgatcacaagaataaaatttataaaatgtgcatgaaattgatgataggcatttagaaagcgttaggtattgacagtgtatattgatttagcattccctaggatctgccctgtgcattcttgcctctgtgtttttggtcattgtgtttgtgtttttacgctgttataataaaatactaaaaactgagttgcttgaacagcaraaatgtattgtttcacagttctggagtctagaagttcaagaccaagccatactccctctgaaagtgctaggcaagaatctgttcctggcttctctcttagcttctggaaggtccttggcttttggcaacataactccaatattcacctggcctccttcctgtgtgtctgtgtgcaaatttctcct

SEQ ID NO: 43967 - DNA, 543 bp, Homo sapiens
tacgcaggaggctgaggcaggagaatggcatgaaccccggggggcagagcctgcagtgagccgagatcgcaccactgcactccagcctgggtgacagcgagattccgtctaaaaacaaaaaaacaaaaaaaaacacagacttataagtaaaacagaacagtgttcaaattctagttctgccatttgttgactgggtgaccttgaaaagatactcagctttgatttcctcatctgagaaaaatggagytgcatttcttgttgcattgtataaatgtctctacttttatacttaatcatactttattgtagttattagtaggtgcagtccactctttattcagatcagttccactgggctcaaaccaaactagcagccagcaggttatccttgggttttgagaccccaaggcttaatggtgggctctaccatccaccctagactaggctcaccttcccaaggaagcttactcaaaaccacaacctaccctaggcatggagtcacggctgaggctcctaggagtctggtagccaggagtataaata

SEQ ID NO: 43968 - DNA, 595 bp, Homo sapiens
tttaaaaacatcagatctcatgagaactcagtcactaccatgagaacagcatgagggaaaccactcccatgattcaataacctcccactaggtctcgcccttgacatgtggggattacaatttgagatgaggtgggtgggggaacaaagccgaaccatatcaccactgaacatgcaaggaaaaatattcattacaattcaaaatgtgtgtgtgtgtgtgtgtgtgtgtatacacatgagaataataggatataaaaatattgatgctaatggatagcctttcctttgtcctttctctcttacatctgtttcagatatgtgaagaaacatgtatccataatttaatataaaagtcattaaacagcaaatgtttttctttaagacaaacacatagtaaaaggaataagacattgtattattgattatatttttgaaggtaacatacatgytctttggatatagttggtaatcatttatattattaacattactatatactattaaaaattacttccataaattccctcttctttaagtttttaaaattccttcttctctttcctgaagcatcacccatttttaattacatagatatg

SEQ ID NO: 43969 - DNA, 586 bp, Homo sapiens
tttataaaataaagatttctagacatatggtagactaacagtgatattttgaaatctacttctgccacagaactagataaccatttccagattggaatataaattaatcaatgtctcattgttagagcygctgtaattttttgaggggatcaagtgaggaaggacttatttttggcttagatttacatttacagcaaggttatcaacattttcctgtggtggcacattaatattaataatataatcataatgccgatttacacatttaccaaattcccatctattaccttcattcctgttaaaatacaacctatcatgttgttctttggggatgagtagtacatttatagacatataagtatatgtgtatatttatatatttgtatatataaaaatttaaaaaattcttttatttttaggagcaaaaatttggggaaaataatgtaatatttatcagaaggatactttaggatttagctctatcagccaggcagggtcatcagtaaatctaagaactgccaaacttctcacactcctaattccctcttttatccctccttttctggctgtgctagagatatcctat

SEQ ID NO: 43970 - DNA, 586 bp, Homo sapiens
tttataaaataaagatttctagacatatggtagactaacagtgatattttgaaatctacttctgccacagaactagataaccatttccagattggaatataaattaatcaatgtctcattgttagagctgctgtaatttttygaggggatcaagtgaggaaggacttatttttggcttagatttacatttacagcaaggttatcaacattttcctgtggtggcacattaatattaataatataatcataatgccgatttacacatttaccaaattcccatctattaccttcattcctgttaaaatacaacctatcatgttgttctttggggatgagtagtacatttatagacatataagtatatgtgtatatttatatatttgtatatataaaaatttaaaaaattcttttatttttaggagcaaaaatttggggaaaataatgtaatatttatcagaaggatactttaggatttagctctatcagccaggcagggtcatcagtaaatctaagaactgccaaacttctcacactcctaattccctcttttatccctccttttctggctgtgctagagatatcctat

SEQ ID NO: 43971 - DNA, 560 bp, Homo sapiens
aggcttccttcagaaaagtgagaaattatgtgaattcccctcttggcatgcttaggagggcaagtcatgaatctttactctcatatttttctaaaataaaactgggcgttgatatttgctgtgatctaatatgtagatatgatgaaaagatttataaaatagcatatattgagatttttgtatgttctcataaaaggtgctataaattgaaacatttattacacagaaaacgtctaagataagaktattattttccaggatagtttatctaagttctgtaaaacttttaataatgtaagtaactactaatgaaaggacgttatgtgtcacatttgcattcataaatatccatgaaggatctctttcaccaatgttattcagtctcagtccaagacaaggtcagacattgattatgtttgacatcttaacaaaagtgaatagggaagataaatattcttaattatactgctagaatggtgagaagcagtggtctataatgtaaggaggaatattagcaaaatagaattatggtcaattgcaattataataacttctatgca

SEQ ID NO: 43972 - DNA, 560 bp, Homo sapiens
aggcttccttcagaaaagtgagaaattatgtgaattcccctcttggcatgcttaggagggcaagtcatgaatctttactctcatatttttctaaaataaaactgggcgttgatatttgctgtgatctaatatgtagatatgatgaaaagatttataaaatagcatatattgagatttttgtatgttctcataaaaggtgctataaattgaaacatttattacacagaaaacgtctaagataagagtattrttttccaggatagtttatctaagttctgtaaaacttttaataatgtaagtaactactaatgaaaggacgttatgtgtcacatttgcattcataaatatccatgaaggatctctttcaccaatgttattcagtctcagtccaagacaaggtcagacattgattatgtttgacatcttaacaaaagtgaatagggaagataaatattcttaattatactgctagaatggtgagaagcagtggtctataatgtaaggaggaatattagcaaaatagaattatggtcaattgcaattataataacttctatgca

SEQ ID NO: 43973 - DNA, 601 bp, Homo sapiens
ataaaaatctgcttcagtcaacawcatttattgagaagctactatgggccaagtcaagttttaaagccaggcagccaaacccttataaaaagcatgaataccttcctggggtttttccaagtctttcttttccttccttgtctcaaaaaataaaaaccagagcatctatttgaataatgaagttgattcttctattgccgatggcaaaatcagagaaacaatctacctatctatagacgtctttctgaaataagttccccagaacactgagatgaccctcaaagatgttaaaggtatatggggaagggataatttaattcttcttcatagcttttgcactgaggctaaatgatggaaagggattaagagttactctgatgagggaatttcagatcttttaattcattgggtaaaggtctccagagaatacattccaacatatcaaaaccacaaagagacaaataaaaaactactgttttttttttcttttttttttcctggctgccctttgctgacatatctacaattcaaacatgggaacctgtctaagtttggtctttttctactgagaagccatgagaagtgaggggaaggggttgta

SEQ ID NO: 43974 - DNA, 601 bp, Homo sapiens
ataaaaatctgcttcagtcaacatcatttattgagaagctactatgggccaagtcaagttttaaagccaggcagccaaacccttataaaaagcatgaataccttcctggggtttttccaagtctttcttttccttccttgtctcaaaaaataaaaaccagagcatctatttgaataatgaagttgattcttctattgccgatggcaaaatcagagaaacaatctacctatctatagacgtctttctgaaataagttccccagaacactgagatgaccctcaaagatgttaaaggtatatggggaagggataatttaattcttcttcatagcttttgcactgaggctaaatgatggaaagggattaagagttactctgatgagggaatttcagatcttttaattcattgggtaaaggtctccagagaatacattccaacatatcraaaccacaaagagacaaataaaaaactactgttttttttttcttttttttttcctggctgccctttgctgacatatctacaattcaaacatgggaacctgtctaagtttggtctttttctactgagaagccatgagaagtgaggggaaggggttgta

SEQ ID NO: 43975 - DNA, 627 bp, Homo sapiens
atttgcctcaggcgggcaagaggtgagggaggtatgtagctttccatctttgtagccattacaccgaggaagaaaaacaggaggcaggtttgcatgaaccagttcccagcttgacttttccctttggcttagtgagtttgaggtcccaagatttattttccttttacaaagggaagaaagaaagtaaactaaggaagagatctagaaaagaaacaattccgtccctgcggcctccaccatctcatatcatctaaccccagcaagagaactcacggctctcagcaagaatgtcagagktgtttgaatcagagcaactccatcttgaatagcagcggagtaaaatgaggctgagacctactgggctgcattcccagatggttaaggaattctaattcacaggctgagataagaggttggcacaaaatacaggtcaagaagaccttgctgataaaacaggttgcagtggagaaggtggccaaaacccaccaaaaccaagatggcaatcagagtgaccactgctgtactcccagcagtgccatgacagtttacagatgccatggcaacatcagcaagttaccctatatggtctaaaaaggggaggcctgaataatacaccccttgtttggc

SEQ ID NO: 43976 - DNA, 627 bp, Homo sapiens
atttgcctcaggcgggcaagaggtgagggaggtatgtagctttccatctttgtagccattacaccgaggaagaaaaacaggaggcaggtttgcatgaaccagttcccagcttgacttttccctttggcttagtgagtttgaggtcccaagatttattttccttttacaaagggaagaaagaaagtaaactaaggaagagatctagaaaagaaacaattccgtccctgcggcctccaccatctcatatcatctaaccccagcaagagaactcacggctctcagcaagaatgtcagaggtgtttgaatcagagcaactccatcttgaatagcagyggagtaaaatgaggctgagacctactgggctgcattcccagatggttaaggaattctaattcacaggctgagataagaggttggcacaaaatacaggtcaagaagaccttgctgataaaacaggttgcagtggagaaggtggccaaaacccaccaaaaccaagatggcaatcagagtgaccactgctgtactcccagcagtgccatgacagtttacagatgccatggcaacatcagcaagttaccctatatggtctaaaaaggggaggcctgaataatacaccccttgtttggc

SEQ ID NO: 43977 - DNA, 627 bp, Homo sapiens
atttgcctcaggcgggcaagaggtgagggaggtatgtagctttccatctttgtagccattacaccgaggaagaaaaacaggaggcaggtttgcatgaaccagttcccagcttgacttttccctttggcttagtgagtttgaggtcccaagatttattttccttttacaaagggaagaaagaaagtaaactaaggaagagatctagaaaagaaacaattccgtccctgcggcctccaccatctcatatcatctaaccccagcaagagaactcacggctctcagcaagaatgtcagaggtgtttgaatcagagcaactccatcttgaatagcagcggagtaaaatgaggctgagacctactgggctgcattcccagatggttaaggaattctaattcacaggmtgagataagaggttggcacaaaatacaggtcaagaagaccttgctgataaaacaggttgcagtggagaaggtggccaaaacccaccaaaaccaagatggcaatcagagtgaccactgctgtactcccagcagtgccatgacagtttacagatgccatggcaacatcagcaagttaccctatatggtctaaaaaggggaggcctgaataatacaccccttgtttggc

SEQ ID NO: 43978 - DNA, 1911 bp, Homo sapiens
agagcttaacatataatattaggacttcacacatttctgttgaattgagttgaatttttgttgaactagtttcaattgaaattgcccaacttgagaaataggggcatggacccgctgactttctcaaaatctcatgtatcttgggaatgttcaactatacacaaggtggctccagatattgattctataaggataaaatgatttttccagcactttccatcttcagccctcaccaggacgtgtgagtctttccttccataaaggatcatggtggaaaatatgagagtgtgaagtatggttcacatctggataagcaaacagagctctgtgttgaaacagcttaattaatggtgatgccaagcccttggccttgtttcctcagtgccatatgcggtgcaaataacgcccaggtctccgctctgagtgggacacgtgaaactccggtctagaaagggcagcctagattggtgaaaaaaattaacagctgaagtggaacagaattaaaatttatcttgaacctggcgtttaatgaagggtgtttaatttcattaatagagcttagagaatctctcctgttgagaaggacttatataaggggcaaaatgaataactgtccaaccactatggaggcagaatggtaaaaattgaaaatgtcagtaattggaggtttggccagggtgtgagaaaatcggtgtttttatatactgctggaaggagggtgaaatgtgtaaatattttggagagctatttggtaataatgattaaaacaaacagaaaaagcatatagtctttgacccaagtgttccagtattgagatgttttcctacaaatgttctcattcctatgcacaatgaagatgttcattgtttataatagggtggactggagacaatctaagtgtccaagaatccaagaatagggaattggctaattaattaatccattcgctcaatggtacccattttggcatttgggaaggagaaaatagcttaatatgccctgataaggagtcatagccatgatatatgttttcagtggaaaaaaaagcatggggcttaaagaatatttctaatgataagaacagggatgtggaaatgcttggaatatctgtggaaggctgggcatatgcacacacacatactttataataatagatacttctaaagagaagttggggacggtatcagggatgggattaataattttagttaaatatactttgtactgtttggatttttactatatgcagatgttaattttttaaattaaaaatttttttaaatagaagaaatccattttaaaaacaagtaatcatttcttaggtttatttgttcatttattcacttaaatacttactgagcacatgcaaagagctgacatttgatgacccagtcttcaaaaatgtgacctgctatttgtgcgttgagggtattgaacaaagtgwtatgcctcttacagtgcttcccaaccataacctcatggcaagtttgtttcgggaaggagggagaaagagaaagggtgaaattctttgagcctctgacgttttccagccactgtgctgggcactgtctatatgcttatctaatctggtcttctctttgctgaattcctagcacctagatcagggtttgcatctgatgagcaaatggatgattgaattaataaataaataaaggaatgaattgtggtgcctgggccctctgtcaagagggagcaagtggcctgaggaagggcagactctcagctgagcccaagacccaggctccctgctgggtgctgctgagaggaggacttacacactgagctttcctggtgctccccctggggaagagtgtgtgcgtaataaccactcagcgtttttgcccaggaagcagcagacaagccaggaggcttgtttaatattttaatagt

SEQ ID NO: 43979 - DNA, 1911 bp, Homo sapiens
agagcttaacatataatattaggacttcacacatttctgttgaattgagttgaatttttgttgaactagtttcaattgaaattgcccaacttgagaaataggggcatggacccgctgactttctcaaaatctcatgtatcttgggaatgttcaactatacacaaggtggctccagatattgattctataaggataaaatgatttttccagcactttccatcttcagccctcaccaggacgtgtgagtctttccttccataaaggatcatggtggaaaatatgagagtgtgaagtatggttcacatctggataagcaaacagagctctgtgttgaaacagcttaattaatggtgatgccaagcccttggccttgtttcctcagtgccatatgcggtgcaaataacgcccaggtctccgctctgagtgggacacgtgaaactccggtctagaaagggcagcctagattggtgaaaaaaattaacagctgaagtggaacagaattaaaatttatcttgaacctggcgtttaatgaagggtgtttaatttcattaatagagcttagagaatctctcctgttgagaaggacttatataaggggcaaaatgaataactgtccaaccactatggaggcagaatggtaaaaattgaaaatgtcagtaattggaggtttggccagggtgtgagaaaatcggtgtttttatatactgctggaaggagggtgaaatgtgtaaatattttggagagctatttggtaataatgattaaaacaaacagaaaaagcatatagtctttgacccaagtgttccagtattgagatgttttcctacaaatgttctcattcctatgcacaatgaagatgttcattgtttataatagggtggactggagacaatctaagtgtccaagaatccaagaatagggaattggctaattaattaatccattcgctcaatggtacccattttggcatttgggaaggagaaaatagcttaatatgccctgataaggagtcatagccatgatatatgttttcagtggaaaaaaaagcatggggcttaaagaatatttctaatgataagaacagggatgtggaaatgcttggaatatctgtggaaggctgggcatatgcacacacacatactttataataatagatacttctaaagagaagttggggacggtatcagggatgggattaataattttagttaaatatactttgtactgtttggatttttactatatgcagatgttaattttttaaattaaaaatttttttaaatagaagaaatccattttaaaaacaagtaatcatttcttaggtttatttgttcatttattcacttaaatacttactgagcacatgcaaagagctgacatttgatgacccagtcttcaaaaatgtgacctgctatttgtgcgttgagggtattgaacaaagtgatatgcctcttacagtgcttcccaaccataacctcatggcaagtttgtttcgggaaggagggagaaagagaaagggtgaaattctttgagcctctgacgttttccagccactgtgctgggcactgtctatatgcttatctaatctggtcttctctttgctgaattcctagcacctagatcagggyttgcatctgatgagcaaatggatgattgaattaataaataaataaaggaatgaattgtggtgcctgggccctctgtcaagagggagcaagtggcctgaggaagggcagactctcagctgagcccaagacccaggctccctgctgggtgctgctgagaggaggacttacacactgagctttcctggtgctccccctggggaagagtgtgtgcgtaataaccactcagcgtttttgcccaggaagcagcagacaagccaggaggcttgtttaatattttaatagt

SEQ ID NO: 43980 - DNA, 1399 bp, Homo sapiens
cttcagagctcaccaagaaagagcatgaagctgatggtttgggtcctggagacagggacaaaaggaacagagccttcccccagcacccctttccactggaggttcctcagaggcaataaagcttgatggttagaacatggcacctggcatctgaactcaaaccagcccgaacactcacctctctgagcctcagaatcctggtctgtaaaatgcgcacactactagtacttacttctcaaagttggacttggtaatgtctgtcaagcacctaacatataacagggcaaggaagaaaagctcaagcaatggtagccatcaccaggcgtggtggctcacacctgtaaccccagcactttgggaggctgaagcgggtggatcacctgaggtcaggagttcgagaccagcctggccaacatggtgaaaccccgtctctactaaaaatacaaaaattagccgggcatgatggcaggcgcctataatcagctacttgggaggctgaggtaggagaatcacttgaacccgggaggcagaggttacagtgagccaagattgcaccactgcactccagcctgggtgacaagagcaaaactccgtctcaaaaaaaaaaaaaaaaaaaggtagccaagccatcatcatcatcatctccctattattattaatctctgttgcatttctattaactgtgtgtcttgggagaatggaaattccccaagtaggcgtcctgctcaacagttaatgatggtaaaacagtctcacttgcctaaccacttcgcctaagtgttacttgactgacagggtgggttattttggggagaaaaaaaatcagtcaagctctcgagtgcaccgtccctgaaaggtttctatgacaacacatacctggatgttccagtgggagggtcacctggggaagagttcagagctaaaatcaagagggggccccacccaggtgggggccccacctggaggctgggggaggtcctcccactcctcctatttttctgcctgtgttttcccagccctgactctgtatcccttttaaacctcttcacagccctgtggggtaagtactattattcttacatccattttacagatgaagcaactgaggcttggagaaattaaagcttgcccaaggtcagtctgctgatcacatcttggatcatcttagacctttctgggtttcatttgtcagactagaggagttacactagagtgaggtttctcagtctcagcactgccaacgtgttgggctcagtaatcccaygtcataggagactgtcctatgcattgtagagcattcagcagtcccctcggcctctacccaccggatgccaggagcacctccctgtctcccacccccgaccacagtcatgacaaccaaaactgtctccagctgtgg

SEQ ID NO: 43981 - DNA, 539 bp, Homo sapiens
cagagtaagtttcaggtgttgcaactcgcaataaatccatgcattaggcacaagccaggactcctgagccagatatctctcaaccccaacgctggctccaccagcaacttgctgtgtcctgggtaaaccacatggcttcttttaaaaaaaatagttttactttgtttactgtccaaagtactcattaattgtttatttatcaagagaaactatttctaattttttgtgtgtgagacggtgtctcactctatcacccagactggagtgcggtggtgtgatctyggctcactgccatctccgcctcccaggttcaagcgattcttgtgcctcagactcctgagtagctgggattacaggcgtgcaccaccacacccagctaatttttgtatttttagtagagacagggttttactgtgttggccatgctgatctcgaactcctgacctcaagtgatccacctgccttggcctcccaaaattccgggattacaggagtgagccaccctgccagcccaaagagaaactatttcttagccccca

SEQ ID NO: 43982 - DNA, 580 bp, Homo sapiens
ctctcaggtccctcctgtttcttttctctgcaacccaagctgatgtggagggcattgaggctcctctggggggatgctgtggtaccaggtgggtctcacatccctggtctcccgcctcctgggcaagctccccactcagggctccacgtttccccaagaggaaccctgaggyggctggaataatggccacattgacggagtcacttgtccaactctgagggggcgctctcatcacccccactctacagatggggaaacaggctcgcagaggttcaggcacctgcccaaggtcacacagctgctggattcaaacccattctgactccagaagctggactgcagtccacggcaccactccacccaccagttcctcagtcaggtacttactgaagccaaattaaatttacccccctgaaaatgtgggtttggcagggatcaagcaggtcaggaacctgctttttaacaagtcttctatcccatacatctgtccaaggcactatttggggttatgtgctggccttcgagttcaccctcactgggccctgtgtccctgtgtccctgtgtccccaggcctgaccca

SEQ ID NO: 43983 - DNA, 589 bp, Homo sapiens
gttttacttccttgtctctttccttacctcttgaattcagagaaatttctaagccattcagatatagtaacttattatatttacttactttcttgtaactttcaatttttattttgtggcccttcgttttccattatgtctcccaattagtctatgattccccaaaggaagggacccttatttatgtatcctcatattccctgcctcatctagtgtagttccatatgcacagttaggatcaataaatatctaygagaattaatattaatcactttctccagtgtttgcatcaaattttaattttcataaaagccccaaattctgaacaatgtattctacttttgcatcttctgctatactgtacatgactgaatttacatacagggtggtgagggaggcatcaaactgttttcaggtaatttcttatcacctgagctggacagccatgttaggtaacacgtggtactaacaaatccaagattatacatttgattctaatgtgagtgtgtttattttgcagaatgaaattttctatacctaagaacttcgtttttgtactgctgggaaagtgtcagaaaataaaaataaa

SEQ ID NO: 43984 - DNA, 1854 bp, Homo sapiens
ttttttagacaccactgtgtattccaaatatctggaagcccaatgttaaagagatcgttttcctagctacttgggaggctgaggaaggaaaatcctttgaacccaggaggtggagtttgcagtgagctgagatcatgccattacactccagccttggtgacagagcaagactctgtctcaaaaaaaaaaaaaaaaaaaaaaaaaagagtatttaaccactgtgccatctttaccaagtattgcctgaaaactgccagaaacttgaactaagaacccacctctcaacaaaggaagtaaatgcactgcaaaagcagttttattgggaatggggtggtggacatggaggtaaaggaaaccttatctttaagccaaattcaaaacaaagatcgttgtgcagctcccaaaagttgaaatgagtgaacaagtgagcagaccaaggttgggataacccagtgtattaaggattgaagtgaaaggatgaagagcaggaatgaagaattcactcaccgcctccacaattctgagcctaccttgaattctacccttacttggtcagatggagaccaaaggaaagataaaattaagaatcagtaagtctatttctctaaaacttggaatccctcaacttattagaagacccagttataggattgcaggctctctaactttattctctttccttgaaggaatttcatgcaagcaacatatagaacattggccagtaaagagcttttagaaggatattgacccatgatgattcagatgaaaatctcaaaggatttctgatcctaaggacttaataaggaatcaatttcttctaaagcctctgacaccttggggtattcaatagctctttgttctgtggatcctgtttttcatttttccaccctttgttctagctcctgaggctagtagaaaagacgaaaacatcactacactaaaaccaagaccggaattctggccacggctctgcctctaattagcctatggcttcagagaagtcgcttaacctatctaagtcttaattatgtctttttcaaaataacagttgagagctctgaagtcctttccagcaatatgagccttgattacaacccaggaccatgtagtgattataattctggattataactgctctaatatcatgctgagctcctgaagaaattttaaagagggtgtttgggaaggtggcaggatgtaacaaagcattaaggtttcgagccagatagacctaagctgattgagctaaaagaactgatctacataaatacaatgcatgtaacatctggttggttactcaacacctttcagcctcatttcattataaatatatggtaagaattccatgaaacaacatacataaagcatatggcatactaatactaggcacttaattaaggtcaattccataaactatactcaccgattaaagatgggaaagagtgaagagaaaggcaagggttgaaactactaaggcttgacaaaaagtaactgagtgtataataaatacataaaaattaaaaatttgcaggataaaatgatctgaaggtagagaagkttcagttttaggaatatcagtttgagaaaaaggctaaacaacctagtgaatatgtcaggtggacagttgagaatgtagaaaagtaaagcttatgagaaatgtaagggtaggagatatttgagaatacaattcatcagtgacactctagaacaaactttttcagatgctgactgactgcaagccattttaaaaaacacatttgccacttctaactcatctttgtatgtgtatatatatgagtataggcatagaataacatttttattaataagttagtactcttactatacaaggtg

SEQ ID NO: 43985 - DNA, 1854 bp, Homo sapiens
ttttttagacaccactgtgtattccaaatatctggaagcccaatgttaaagagatcgttttcctagctacttgggaggctgaggaaggaaaatcctttgaacccaggaggtggagtttgcagtgagctgagatcatgccattacactccagccttggtgacagagcaagactctgtctcaaaaaaaaaaaaaaaaaaaaaaaaaagagtatttaaccactgtgccatctttaccaagtattgcctgaaaactgccagaaacttgaactaagaacccacctctcaacaaaggaagtaaatgcactgcaaaagcagttttattgggaatggggtggtggacatggaggtaaaggaaaccttatctttaagccaaattcaaaacaaagatcgttgtgcagctcccaaaagttgaaatgagtgaacaagtgagcagaccaaggttgggataacccagtgtattaaggattgaagtgaaaggatgaagagcaggaatgaagaattcactcaccgcctccacaattctgagcctaccttgaattctacccttacttggtcagatggagaccaaaggaaagataaaattaagaatcagtaagtctatttctctaaaacttggaatccctcaacttattagaagacccagttataggattgcaggctctctaactttattctctttccttgaaggaatttcatgcaagcaacatatagaacattggccagtaaagagcttttagaaggatattgacccatgatgattcagatgaaaatctcaaaggatttctgatcctaaggacttaataaggaatcaatttcttctaaagcctctgacaccttggggtattcaatagctctttgttctgtggatcctgtttttcatttttccaccctttgttctagctcctgaggctagtagaaaagacgaaaacatcactacactaaaaccaagaccggaattctggccacggctctgcctctaattagcctatggcttcagagaagtcgcttaacctatctaagtcttaattatgtctttttcaaaataacagttgagagctctgaagtcctttccagcaatatgagccttgattacaacccaggaccatgtagtgattataattctggattataactgctctaatatcatgctgagctcctgaagaaattttaaagagggtgtttgggaaggtggcaggatgtaacaaagcattaaggtttcgagccagatagacctaagctgattgagctaaaagaactgatctacataaatacaatgcatgtaacatctggttggttactcaacacctttcagcctcatttcattataaatatatggtaagaattccatgaaacaacatacataaagcatatggcatactaatactaggcacttaattaaggtcaattccataaactatactcaccgattaaagatgggaaagagtgaagagaaaggcaagggttgaaactactaaggcttgacaaaaagtaactgagtgtataataaatacataaaaattaaaaatttgcaggataaaatgatctgaaggtagagaagtttcagttttaggaatatcagtttgagaaaaaggctaaacaacctagtgaatatgtcaggtggacagytgagaatgtagaaaagtaaagcttatgagaaatgtaagggtaggagatatttgagaatacaattcatcagtgacactctagaacaaactttttcagatgctgactgactgcaagccattttaaaaaacacatttgccacttctaactcatctttgtatgtgtatatatatgagtataggcatagaataacatttttattaataagttagtactcttactatacaaggtg

SEQ ID NO: 43986 - DNA, 574 bp, Homo sapiens
tgcatttccattgccattgagggatgaaaggattctgcctcctcacaggtgaggatattcagggaattgtatgaagtaaagaatacgctttggaggaactcagatacacacttagaatccagccctgccactggttaagggtcttagtccagtcactcaactctgtggttccttggttgcctctcttaggtcctacttatgacttctaaaccccaatgtttggtgccaatcctgttctttcccctacaaggtctctgcatagatcgactctagaaaatcctgtttctaagtgaaaaaatctcagaatctactttcaaccatgccagcagttcaaacttcagtcttaattagggggaaagtggaaacaaatctaggrttcatcaggccatagtgccacaccctcaaggagccattcatgtttataatcttcacttgaaaccacattgattaccttttatattgaagggggaaaccttctctaagataaaatgagctgcctataccccagctaggatggtgtcttctggagggaagcaggaagtttcatggcattttggtgcaagaggcagtcact

SEQ ID NO: 43987 - DNA, 574 bp, Homo sapiens
tgcatttccattgccattgagggatgaaaggattctgcctcctcacaggtgaggatattcagggaattgtatgaagtaaagaatacgctttggaggaactcagatacacacttagaatccagccctgccactggttaagggtcttagtccagtcactcaactctgtggttccttggttgcctctcttaggtcctacttatgacttctaaaccccaatgtttggtgccaatcctgttctttcccctacaaggtctctgcatagatcgactctagaaaatcctgtttctaagtgaaaaaatctcagaatctactttcaaccatgccagcagttcaaacttcagtcttaattagggggaaagtggaaacaaatctaggattsatcaggccatagtgccacaccctcaaggagccattcatgtttataatcttcacttgaaaccacattgattaccttttatattgaagggggaaaccttctctaagataaaatgagctgcctataccccagctaggatggtgtcttctggagggaagcaggaagtttcatggcattttggtgcaagaggcagtcact

SEQ ID NO: 43988 - DNA, 608 bp, Homo sapiens
aagtttaaaaagagaataaactacaattatatcctcctgggcacctactttaccttatatttgccttccccaatcttcccctgatcttttttttttttttcccccttaacagaaaatagttctgcctggtttgttgtgtttccttcccctttctggatacgattattaatcaattgcgcattgttgaggcacttatcacttgaaccagcttgttgtagaatttttgcaaacctatttcccatctccaacacattgcaggagacgtggatgatgagtttctgagcaggyacacgctgcagcttcttctgacaatgtaaccactgaaaatgtgtttaagaagcaatcacatggcctaggagcagctatggggtctctcatgatcatcagagaagcctggtggcataccggaaagaaatggatgacagaataatgttataggttactaaaatatttcatgttcagctgaattttttaaaaccattttcatgcctgttttttttttactaccagtggtgaaaatagaaatggcttcctctaagaaagttaaaatatttttgtaaagggattgttcacttgcagaactagtaagacttaaaattgcatccata

SEQ ID NO: 43989 - DNA, 588 bp, Homo sapiens
ttcctagcaaagatagtttggtcctgaacaagaagagcagaacaaatcccaagatggacatgcaagagtgaagacccagctcgaataagggcagaagcagtgagtgaagggtctagctagaagagcaatgagaaatggcaaatgggwaacatgagcaatagagggtaggggggcagtggggctggcaaagctgtacctgtccatggagctcatgatgggagcaggctaagagaggaggcatccatgtgggaataggcatgggactggcagcagaggacagaatgtgtaaaggagagaaaaacaaactgtgcctctgcagtcctaccttgtagcataaatatggctgcttgtgtgatagggcacaataaaactgtcttctttacttgacttagtgtgaaacatcacaaagagctgcagcttggctatattttatttaaaagaaaaaaaagttttggaggcacaagccttggttcggggtaagaaaacatgttctgaagatgcgagtggcttctgtcagccaaagggtaacagatgtagaatttattcctacatgccagctttctaactgtcttcatcaataatcctaca

SEQ ID NO: 43990 - DNA, 588 bp, Homo sapiens
ttcctagcaaagatagtttggtcctgaacaagaagagcagaacaaatcccaagatggacatgcaagagtgaagacccagctcgaataagggcagaagcagtgagtgaagggtctagctagaagagcaatgagaaatggcaaatgggtaacatragcaatagagggtaggggggcagtggggctggcaaagctgtacctgtccatggagctcatgatgggagcaggctaagagaggaggcatccatgtgggaataggcatgggactggcagcagaggacagaatgtgtaaaggagagaaaaacaaactgtgcctctgcagtcctaccttgtagcataaatatggctgcttgtgtgatagggcacaataaaactgtcttctttacttgacttagtgtgaaacatcacaaagagctgcagcttggctatattttatttaaaagaaaaaaaagttttggaggcacaagccttggttcggggtaagaaaacatgttctgaagatgcgagtggcttctgtcagccaaagggtaacagatgtagaatttattcctacatgccagctttctaactgtcttcatcaataatcctaca

SEQ ID NO: 43991 - DNA, 588 bp, Homo sapiens
ttcctagcaaagatagtttggtcctgaacaagaagagcagaacaaatcccaagatggacatgcaagagtgaagacccagctcgaataagggcagaagcagtgagtgaagggtctagctagaagagcaatgagaaatggcaaatgggtaacatgagcaatagagggtaggggggcagtggggctggcaaagctgtacctgtccatggagctcatratgggagcaggctaagagaggaggcatccatgtgggaataggcatgggactggcagcagaggacagaatgtgtaaaggagagaaaaacaaactgtgcctctgcagtcctaccttgtagcataaatatggctgcttgtgtgatagggcacaataaaactgtcttctttacttgacttagtgtgaaacatcacaaagagctgcagcttggctatattttatttaaaagaaaaaaaagttttggaggcacaagccttggttcggggtaagaaaacatgttctgaagatgcgagtggcttctgtcagccaaagggtaacagatgtagaatttattcctacatgccagctttctaactgtcttcatcaataatcctaca

SEQ ID NO: 43992 - DNA, 588 bp, Homo sapiens
ttcctagcaaagatagtttggtcctgaacaagaagagcagaacaaatcccaagatggacatgcaagagtgaagacccagctcgaataagggcagaagcagtgagtgaagggtctagctagaagagcaatgagaaatggcaaatgggtaacatgagcaatagagggtaggggggcagtggggctggcaaagctgtacctgtccatggagctcatgatgggagcaggctaagagaggaggcatccatgtgggaataggcatgggactggcagcagaggacagaatgtgtaaaggagagaaaaacaaactgtgcctctgcagtcctascttgtagcataaatatggctgcttgtgtgatagggcacaataaaactgtcttctttacttgacttagtgtgaaacatcacaaagagctgcagcttggctatattttatttaaaagaaaaaaaagttttggaggcacaagccttggttcggggtaagaaaacatgttctgaagatgcgagtggcttctgtcagccaaagggtaacagatgtagaatttattcctacatgccagctttctaactgtcttcatcaataatcctaca

SEQ ID NO: 43993 - DNA, 598 bp, Homo sapiens
tgcattcccatgaggctcagggatacagaaaaggggctgccatgagacttcccggactcctgcaggcacagtgtgttgccaatcactttgttagaagaccatgcagatttggaacatgggatgaatagtgttcatggtgagagaatatgaccactaagcggataggatgtaaggaaactaaatagaccttgccttagaagaagacagttgaccatttatttagaaatggcaatagccgtcaaccatgataaataagatggacagtggaataaaagcagtccttctgggaattcaaagcaaggaaatcagctgtgctttcaaacaaaattgtactacagatgatgaaatgatagactcataattatgtcaaagttgttggcataatcttctacaataatgagatccatgaatggagtgtctttatttctgaggtgtggaacaagactgtttacacaggaaataaaaatttttggccctaaaatcaggaagattcagtttaargaaactgaagatccctaaccctaagaagaaccagacactgattcacctgctggttaagtagggattatgggaccaatgctggacctccctgtgacat

SEQ ID NO: 43994 - DNA, 610 bp, Homo sapiens
tggcagactggggcccagccaagaaagggaactcaactccaggggcttacattcacacacactgggtttccctagaacaacaatttacaatcaggacatcagttccagactaaagtaaaggtctgcctctacttccaatccaaagcattttttaccttcctatgagcctaggttctatagatatatgtcatatttccttaccaacttaaaataaatttcaactggagaaaaaaagaagcttagagttctgatcttgyggttacataaatcccagagtttgaggttgatgataaagattcaagcacagtgagtgataccgagtgtaatttcccacattatcacaatagcaaaaatgtaacctccccttctccctgtgagtcagcccagaaacccactacgttaatctcgagaaatgcttaaaccttgagggaaacttattcaaagaggttgtcatggcaggttcacatgagactttttaaatcaattaagttccagtacacattccttcactgttgacaataatcacatattttccctacaggaaagaacccctgtgaaccttcgcatgtggttttacagattctttagcagacagctgatactatttgtg

SEQ ID NO: 43995 - DNA, 579 bp, Homo sapiens
ttcagagagagtgaggtgggttgttaggttagagtgtcacattttttctttagtgagacaatctctccctgttagagctcagaaacagggttgaaatattcagcagtggaaggaagtctcaaagtgcaaaaatttaaagatcaaaaaatactaacagaatctcattgccaaaaattttcaataatctatgagatcagcactatggtttaaatatgttctccaaaaagcatgtgttggaaacttaacccttatgcaacatttttaggagttgaagcctaatgagggcttattaggccatgagggctctgccctcatggatggattaatgctgttatcatggaagtgggtttgttattgaaggagtaggcttgttacaaaagaaagarttcagttctcttctctctctcgacctcttgacctctcgacccctcttgccctctcaccttcctctatgtgatgaaggccctcactagatgtcagcccctcaatcttggagtttccaacctccacaactgtaagccaatacatttcctttctttgtaaattacccagtcttaggtattctgttgcagcaggatg

SEQ ID NO: 43996 - DNA, 2022 bp, Homo sapiens
atagaatgttatctggagagagaaaagaatgaagtactggtacatgctacaacaggggtgaaacttaaaaacatagcaagcaaaagaggcaaatcacaaagaacaacacattgtatgattccatttatatgaaatgtctagaataggctaaagctatacagttagaaagttgactaattgctgcctagggctagtggaggggatggaaaaattgggaggtattggctaaagggtatggggttgcttttgcaggtgataaaaacgttctaaaattgactgtggtgatggatacacaactcagtgaagatactaaatgccactgagttctatactttaaatgggtcatttgtatggtatatgaatgatatccttataaattatcagtaactattaaaccctataaattatcaataaatattcattgaatggcacattatcaaaacaggtaagtacctgaaccatgaaaaatattttatatatcaaggacaaaaaatttgatcatcacttttaattatcataatcccattcttaataaaaagtattaaaagctatatataggagaatgtattatgtcaattacctcagaatccttatgttccaattttggcattagaatgctttctaaatagttagctttatctatccatgtattcagatttctatattcttttttcatcttttccagcctaaagaaagaaataagttatgaatgaaaaaagcaagtgatagaagaatacatatggtatgattcacagaagaatacttgcaatgtgatccatttataaaatgttctaaaagagacaaaccaacaatatattgtctagggatacagtcaaaggacagggaatgattacaacaaaaatcaaggtactagttacctggggatggttaaggagagggatgtaacctcagaagggtacacaaaatgtatttctgatattactggtggtgtatttcttaacctgaatcataaatatgtacacaatggcgttattatcattatttaggctatacatacttgttatagaaattattcaatatatattactcttagtatttaaactatacgtcttagtcagtttgagctgctgtaacagaatacaatagactgggtgacttaaacaacagactttttttttaatgtactttaagttctagggtacttgtgcacaacgtgcaggtttgatacataggtatacatgtgccacgttggtttgctgcacccatcaactcatcatttacattaagtatttctcctaatgctatccctcccccaaacaatatacatttatttctcacagttctagaggccaggaattccaagatcaaggtgctggcagatccagtgtctggtgagagtagtcttcactgtttgcagatggctttcttatatcctcacatagtggaaagagatgaatcttgtgtctctttctctttttatgagggcattaatcccatcattgtaacagtcctaccctcatgacctaatctaaccctaattatcttccaaaggcaatgcctccaaataacatcacactggggactaggattttaacatatgaatttgaagggagacacaaacattcagtccataacactatatatatataattattcaatacatatacaatatcttccacaataaaacaagtgaaaaaaaggatgtatcttctaatmcaagaaacttcaaaaagcttgaataccttaaagatataattaacaaggattaaatggaagacagggaatgtttcccagttcatttcatgaggacataatggccttgacaataaaacctgacaaagacattacaaaaaagaaaaattacagtttaatctcattcatgaatatagatgtgaacattacaaataaaatatagttttagtacaaaaatccagtagtgtgcagacacaatttgagaatagcagttgaaactgggagggcttttctcgtttcaggattcatggtaagatctaaagggcctggagcagtctaatgactatgaatgctcaaaactgaccagcc

SEQ ID NO: 43997 - DNA, 599 bp, Homo sapiens
taggccagtctgcctccaaggcccatctctccagcacactacaactacacaaatagctattagccggtctgataggaaagattttaagttagtgaatgtgattttctatctttcctttcagtttatatactgagctgtgtaactgcacatctccacactttgacctccctgagcaacctcatgttctgaacctttctcttctttttcctccttcccatcaaaatgtgccttttctggattccactttctgaggaagccaatacactttataaggttaaaactagatgattaagggaattattttaatgggatcctaggtggagaagggaattattttaatgggatcctaggtagagaatgccttcaatgtaagttctcaatactctagtgggccagaagaggagatggtccwttcctatcacagggtcagatacttcctcatgcacaaaggtctggttcttccataaaagctagctgagatttggagcatgactagaattcatttattacttaagcaggtgcttattaagtgcctcacttactataccagcaatattctagatgctagggatatagcactaaataaagcacacaaattt

SEQ ID NO: 43998 - DNA, 568 bp, Homo sapiens
ttaatctatgatagcaaaatgatgtctgcattcaaatccaagttgtcggggccaggtgtggtaagctcatgcctgtaaccccagcactttggtaggccaaggcaggcggctcacttgaagtcaggagtttgagaccagcctggtcaacatggtgaaacccgtctctattaaagatacaaaaattagctgggcaaggtggtacacgcctgtaatcccagctactggggaggctgaggcacgggaattgtttgaacccgagaggaggaggttgcagtgagctgagatcacgccactgcaattaaaaaaaaaacaaaaaaaaaaccttagcctrgcatcccaggctctaaacaatctaactcccacagacctgctcccactacttactttaatcttcaccctattccatctgctccacttacatctctgcaagacacctcgatcatcactattcctaaatctttacagacacgtgctccatccagccttgcttgaaggttaagaattcgttcaaatgcttaaccttcaaaagactgtcatcaattcccacctccttcattcactcacccac

SEQ ID NO: 43999 - DNA, 571 bp, Homo sapiens
tcctcatcagagtgtaacatacttgggctcctgaaatccaagcacagttgtccttggctcgcggggtgaatccaaatgaacagcagaacttggctgtgtctgtctttcttttttattttacttagttattccgttatttttttgagacaagktctcaccatgttgcccaagctggatttgaactgggctcaagtgattctccactcctgagtagttgggattacaggtgggtaccaccgcaaaaggctctaattttaaatttcttatctaataaagcttatgtaatatataattgatatattaattatatattaatgtatcataacattggtattaattatatattgatatattattaatatacagcccataagttattccccacttatggtaacagtggctggggatttggtttaacagcccataagttattccccatttatggtggcagtggctgaggatttggtttaacagtctgactatttggtgatctttgtaaatagattaatgcttaatagagatctattctctgttgagtgagaagaaaacagaatctgattctttagtctct

SEQ ID NO: 44000 - DNA, 571 bp, Homo sapiens
tcctcatcagagtgtaacatacttgggctcctgaaatccaagcacagttgtccttggctcgcggggtgaatccaaatgaacagcagaacttggctgtgtctgtctttcttttttattttacttagttattccgttatttttttgagacaagttctcaccatgttgcccaagctggatttgaactgggctcaagtgattctccactcctgagtagttgggattacaggtgggtaccaccgcaaaaggctctaattttaaatttcttatctaataawgcttatgtaatatataattgatatattaattatatattaatgtatcataacattggtattaattatatattgatatattattaatatacagcccataagttattccccacttatggtaacagtggctggggatttggtttaacagcccataagttattccccatttatggtggcagtggctgaggatttggtttaacagtctgactatttggtgatctttgtaaatagattaatgcttaatagagatctattctctgttgagtgagaagaaaacagaatctgattctttagtctct

SEQ ID NO: 44001 - DNA, 411 bp, Homo sapiens
aaatgaaaacctaaacacccaggatgcaaaggattaacttttttgttttttggcacttgtgtcaaaacctctaactcacaccttctccagatagtaattaccatgtcaaagaaaatgcataaaacaggcagcaaaacaacaacatatcaatcaaaggtgttgatacagacagagcacataaacaacaaaaaagaaaagaaatagaaagtcatggtttccaggcattgtacctcagacaatgcaggactgtaactcttgaaagaagaaaatccatagcacagggatagaagtatatggccgaacctggcaatstctctgagttgaagggaccaactgggtgtctagggagatcaatgtgtgtagagtttgcaagacagaataacagagtctggaaatctaccaggagtctcc

SEQ ID NO: 44002 - DNA, 828 bp, Homo sapiens
ccaatgtttctgtgacatcgcacaagaagactgggcaaaggtctaatgaaaccagaggggttagccagctgcggtggctcatgcctgtaatcccagcactttgggaggccaaggcgggtggatcacctgaggtcaggagttcgagaccagcctggccagcatgacgaaaccctgtctctactaaaaatacaaatattagccgggcgtggtggtgggcgccagtaattccaactactggggaggatgaggcaggagaatcgcttgaacctgggaggcggaggttttagtgagccgagatttgtgccgctgcactccagcctgggtgacagagtgagactccatctcaaaaaaaaaaaaaaagaaactggagggtagaacccagcccagccacccttacagccaagctttaccgtgcgcctgactgcaatcctctgccacactctgccaactctctttgtggacagcactttgccctgatgacaccgcactgatgtggcttccctaggagatctcaatacagccagcctgtgttccttctccttctactcatccagtcagcattgtctgcagataagcttccyctttcccttcctctactgacagatgttacagctgtggcaggaaactagggagagtataagcacagctgataaaggtgcaggaaactaagacagcctttgtgcttaacaaaaataaatttttgaaaaaagaaagaaaaaagcctgctgtgtgagatgcactctgaccctagcccatcccttcctcacatgaacaacaattctgacactgcgggagtgaatcttcccttagactgctttcgggtcattt

SEQ ID NO: 44003 - DNA, 594 bp, Homo sapiens
taatgtaaatgacgagttaatgggtgcggcacaccagcatggcacatgtatacatatgtaacaaacctgcacattgtgtacatgtaccctaaaacttaaagtataatttaaaaaataaaagaaaaaacaaaaaagaatggtygtgtagtagagacagtggtgaagagcaggactctggagccaggtgttctgagttcagagcccactctgccacttactagatctgagacctggaggaagttatttgccctttccctgtttggctcttttgtaaaatggaaatataagagtacccacctcctaaggtgggcttatgaattaatagatataaaggtatgtaaaattattgctatcattagttactgttattaatagatcagaagtcacaagctccaatgcctgcagtgcccatgcataccaaaacagggatcactggcaacagagacatggccccagtggcgtggagataaaagaaagtggtagggacagtggcagacagccatcaccctactccccattgattgtgaccctaagggaatgctggtcctgtgtcgccagagcttctggtattgccaaagaagcttgaaatctgga

SEQ ID NO: 44004 - DNA, 594 bp, Homo sapiens
taatgtaaatgacgagttaatgggtgcggcacaccagcatggcacatgtatacatatgtaacaaacctgcacattgtgtacatgtaccctaaaacttaaagtataatttaaaaaataaaagaaaaaacaaaaaagaatggtcgtgtagtagagacagtggtgaagagcaggactctggagccaggtgttctgagttcagagcccactctkccacttactagatctgagacctggaggaagttatttgccctttccctgtttggctcttttgtaaaatggaaatataagagtacccacctcctaaggtgggcttatgaattaatagatataaaggtatgtaaaattattgctatcattagttactgttattaatagatcagaagtcacaagctccaatgcctgcagtgcccatgcataccaaaacagggatcactggcaacagagacatggccccagtggcgtggagataaaagaaagtggtagggacagtggcagacagccatcaccctactccccattgattgtgaccctaagggaatgctggtcctgtgtcgccagagcttctggtattgccaaagaagcttgaaatctgga

SEQ ID NO: 44005 - DNA, 536 bp, Homo sapiens
gccakgcacggtggctcacgcctgtaatcccagcactctgggaggctgaggtgggaggatggcttgagcccaagagtttgagaccactctgggtgacatggcgaaaccccatctctataataaaataataataatgataaaattttaaaataacaataagaataataagcagtatttgtttaaaatgagtagacatcccaaaccaatcttcatctctacacatcgtcagccaaatgcaggtttttagctacaatataaatgtatatttttcaagccaaattcccatttttcaaacccaaagccagcatactactcctgacattttgaagaatttggcagaaagtgttttcgttttgtgaatggcataagctccttcctgcctaaccacattccaaaatactcggccattgtttggttgggggaaagcgtctactttctaaaagtatattacagagtttttaaggggctgactgtttttactgatgatttatggtcccttttaaagcctcttaattctctctggcactattaaacca

SEQ ID NO: 44006 - DNA, 536 bp, Homo sapiens
gccaggcacrgtggctcacgcctgtaatcccagcactctgggaggctgaggtgggaggatggcttgagcccaagagtttgagaccactctgggtgacatggcgaaaccccatctctataataaaataataataatgataaaattttaaaataacaataagaataataagcagtatttgtttaaaatgagtagacatcccaaaccaatcttcatctctacacatcgtcagccaaatgcaggtttttagctacaatataaatgtatatttttcaagccaaattcccatttttcaaacccaaagccagcatactactcctgacattttgaagaatttggcagaaagtgttttcgttttgtgaatggcataagctccttcctgcctaaccacattccaaaatactcggccattgtttggttgggggaaagcgtctactttctaaaagtatattacagagtttttaaggggctgactgtttttactgatgatttatggtcccttttaaagcctcttaattctctctggcactattaaacca

SEQ ID NO: 44007 - DNA, 591 bp, Homo sapiens
actatgccttcattcaatcatttgttttccctttataaagcatatggcttattaatatttattaaggtgaataatgtgcacattatatgtgagtacatgtatgatttattcattctgtactttgtttcaaaaaatataaagcacctttcaaaaatttgtagagcaagataaaaaaataagaaataaaaagaggcaaagggaaatgtcagtgtagaaaaataaaatgacgtacctgggacttgcctggctttagctctgaaaattccayttctggggaaactccttagtcccgggcacactgagatggttggtaattctaaattaccagtaagccattatggggctcttttaatatgctgaaccatgttctaagcacttaacatctactatcttcacttgtcctcacaataaccctttgaagtgtgctactactactgcagccattttacaagaaaaaaatactgaagcacaaaaaggctaagcaacctgactcaaatcagacatctagtaaattggtagaactgggtatcaaaggaccaccagctccagaactgaagttctttaccacagccgtaaagtgcatgtgagttt

SEQ ID NO: 44008 - DNA, 591 bp, Homo sapiens
actatgccttcattcaatcatttgttttccctttataaagcatatggcttattaatatttattaaggtgaataatgtgcacattatatgtgagtacatgtatgatttattcattctgtactttgtttcaaaaaatataaagcacctttcaaaaatttgtagagcaagataaaaaaataagaaataaaaagaggcaaagggaaatgtcagtgtagaaaaataaaatgacgtacctgggacttgcctggctttagctctgaaaattccacttctggggaaactccttagtcccgggcacactgagatggttggtaattctaaattaccagtaagccattatggggctcttttaatatgctgarccatgttctaagcacttaacatctactatcttcacttgtcctcacaataaccctttgaagtgtgctactactactgcagccattttacaagaaaaaaatactgaagcacaaaaaggctaagcaacctgactcaaatcagacatctagtaaattggtagaactgggtatcaaaggaccaccagctccagaactgaagttctttaccacagccgtaaagtgcatgtgagttt

SEQ ID NO: 44009 - DNA, 554 bp, Homo sapiens
gaatgtcagtgagaatctgtggggacttctgtcccatttcagaatggaaggctcttctgtgtttagttttgacttctctccctttccaaattttccatagtgtgactctattaattagtagtctaaaacatagtcagttactgttcacttctcctccagatgccatgtggttcccaatacacctaragactacattagcttcaagtcatcttgagttcccctaaacattcctcttcttcccatctaccctcatttatttcaggttacggaaagagggccatccccattagctcaggtgaactggaaaacccaatcactctatttataacaagagcacaggtgtattgggccagcactgttctaacagctttagaacccagaagagctttagagctcttagacacaacccagctaaccctcagaacaatcctgcgaggtgggtaccatcatgattcccataataaagatgaggaaaccaaggaatggaaaagttatggacatgtcccacaaccagtaagcattgttagggaccaagaagttccacaatgactagt

SEQ ID NO: 44010 - DNA, 541 bp, Homo sapiens
gctcttcaagtaatgaatccccactgtcctcattttatgagcgagacaccaagttgtggtgagattggtttttcaaaggaaatcacaagaaaagccttcagttttgagccagggaaagaatgaggaacttacagaatggtgaaaatctgtcctgcgttgagctctaygttgttgagttgcgcaatgaacaccgcggccacacactggaagatggctgctccgtccatgttcacggtggccccgatggggagaataaacctgctgatcctcttgtccacaccattgttctcttcaatgcacttcatcatagagggaagggtcgctgagctagaaatgggaaaaacaaaccgccagacatgacaacagtccgaggcaggctaacatgtgtcttgtctcagaccccagaacagagcaattagcaccatcttcgtttctggctttcttctcttgaaataagggaaaaaacagaatcactttaaaacttctgtcacaacatgaggctttggcaactcccaagatacttaaaatatgactgccttca

SEQ ID NO: 44011 - DNA, 594 bp, Homo sapiens
gcgaagcccgtctcctttcctgtgtcggcactgcaaggccttcaaatcggtgctctgccccttcaacacccagggtggccttacagagcgttggccttctccctgctggctgattctcttctcagcagaaggcagcatgtactttggctgaacaataattagctttttaacatatatgtgaagatacaaataaaagagcattacaagggaccaggacacctgggttctcatccataacctgccactcccttgctttacctccatgggctcccattccatraggagatggaatgctctcttgttctttgggagaagactcctggcctcccaggtcctgatctgccctttgcctgtggctggccagtcctggctccctccggccttgctccagcagtcctgttggccccagcctacccttgattctggtcagaagctcattacaaaggaggctttgctgatgtccagtagagcatattcttgttgtccctgagctgcctgtaacctcttcttccacattctaccagaactccacacactacctttgcagtctctctgggtggggtgaggggagaatgatgccatagataagcttgg

SEQ ID NO: 44012 - DNA, 594 bp, Homo sapiens
gcgaagcccgtctcctttcctgtgtcggcactgcaaggccttcaaatcggtgctctgccccttcaacacccagggtggccttacagagcgttggccttctccctgctggctgattctcttctcagcagaaggcagcatgtactttggctgaacaataattagctttttaacatatatgtgaagatacaaataaaagagcattacaagggaccaggacacctgggttctcatccataacctgccactcccttgctttacctccatgggctcccattccatgaggagatggaatgctctcttgttctttgggagaagactcctggcctcccaggtcctgatctgccctttgcctgtggctggccagtcctggctccctccggccttgctccagcagtcctgttggccccagcctacccttgattctggtcagaagctcattacaaaggaggctttgctgatgtccagtagagcatattcttgttgtccctgagctgcctgtaacctcttcttccacattctaccagaactccacacwctacctttgcagtctctctgggtggggtgaggggagaatgatgccatagataagcttgg

SEQ ID NO: 44013 - DNA, 544 bp, Homo sapiens
caagccaggggcaaaatcttactttctaaatggagacttcactggggaaaatgatggactgttaagccaaacagtatttactgcagagagtccacatgggactggggtaagaagacatgaacagtacaaaggcatctgttgcctgctyattggtagacaggaagatccattctttttccttggcatttggtgctgctttcatctttctaaaaatgtattcaaaattaatttttagttccttgcttttaaaaattccttttgggtactcagttctaactcagaaacatattctagccatcacctcttttcaggctttttgtaaagatcaagtcttcatcttttctgggcatagcatgagatcactgatttaatactttgtatttcttttatcttttccttttatgatctatcatttatcctagatatttctttaaaagaccaatggtaataaccaagcaagtatggagaagatatccttgtaaaatgtttgtaaaaaacaaacctggctaattaaacattattcaaaggaatattttttacctga

SEQ ID NO: 44014 - DNA, 1331 bp, Homo sapiens
tacatacttttaagattttacatattcattaagcgatcattaagctttttaaaagctcacgtattattaacactgatacatgcagattattttaactaacttcttgcatttcaattacatctatgttaaatgggggttctgaactaaaattaatatagaaaaaaataatttcataccagccttagttacagaattttaaatggggaataatggctaagaacaaaaccaaaaaactgcctactaaagaacctcaaatagcagcatatatgtgagagaaaaaaaaaatcagagcaaaaaactagtttagatataccattctgtgaaacccagaacagtggaccatgtcacaaaggacattacccaaaaaaaggatgtaatactccacctttacttgccgagcttggctgatgacacacggaagactaaaaagttgttggacaaaggccttcaattcttccactgtcagtttggtccgagtcctcccactatctgggctctgtctgatgtgaaataatattgagatataagtaagaaaaattcagtcattctgatatcaaaagggctcctagtctcttcagaattcaaacctaagcaatcctagaatcccagtgtttgaaggataacaccacaatggtgaccacttcaaaacagttgagttattcagttaatgactcaaagattcaactctccaagttacagttccttcgatctacaagtattaaacatttcaaacattacataaattcctcatagttggaatattaagttcattgataaaacttaatcctgtatctcaagaaggttaaaatgtgaaagagcctttaacctgccttaggtgacaatgaaccctctgaaagtgcttcaaaattttgtgtgyacatgatttttctaagagggttcctaaacttttactagtttctccaagtggggtcactgacccaatgacaagttaagagctgctgatcaatgtctctaagaaaagttatctaacaaaatggtaaataaaaaatttacaaagtaatttaaaaacccaatgtgaactgctagagaaaagccattcagacagaagaaatgtgttggaattactacaacacatttaaataccacagaaaatttaatacttatgaattctattatatcaagggtcctctgcatccatcaaggttaccctttgctgccacctgccttcagcctagagtttctatttgttcatttacaaatatttattgcacaactgtgtgccaggcattgttctaagcacaagaaatatggcaatgaaaaaaaaatccctgatattctagtcttgtgtacattctagtaggggatggggg

SEQ ID NO: 44015 - DNA, 1331 bp, Homo sapiens
tacatacttttaagattttacatattcattaagcgatcattaagctttttaaaagctcacgtattattaacactgatacatgcagattattttaactaacttcttgcatttcaattacatctatgttaaatgggggttctgaactaaaattaatatagaaaaaaataatttcataccagccttagttacagaattttaaatggggaataatggctaagaacaaaaccaaaaaactgcctactaaagaacctcaaatagcagcatatatgtgagagaaaaaaaaaatcagagcaaaaaactagtttagatataccattctgtgaaacccagaacagtggaccatgtcacaaaggacattacccaaaaaaaggatgtaatactccacctttacttgccgagcttggctgatgacacacggaagactaaaaagttgttggacaaaggccttcaattcttccactgtcagtttggtccgagtcctcccactatctgggctctgtctgatgtgaaataatattgagatataagtaagaaaaattcagtcattctgatatcaaaagggctcctagtctcttcagaattcaaacctaagcaatcctagaatcccagtgtttgaaggataacaccacaatggtgaccacttcaaaacagttgagttattcagttaatgactcaaagattcaactctccaagttacagttccttcgatctacaagtattaaacatttcaaacattacataaattcctcatagttggaatattaagttcattgataaaacttaatcctgtatctcaagaaggttaaaatgtgaaagagcctttaacctgccttaggtgacaatgaaccctctgaaagtgcttcaaaattttgtgtgcacatgatttttctaagagggttcctaaacttttactagtttctccaagtggggtcactgacccaatgacaagttaagagctgctgatcaatgtctctaagaaaagttatctaacaaaatggtaaataaaaaatttacaaagtaatttaaaaacccaatgtgaactgctagagaaaagccattcagacagaagaaatgtgttggaattactacaacacatttawataccacagaaaatttaatacttatgaattctattatatcaagggtcctctgcatccatcaaggttaccctttgctgccacctgccttcagcctagagtttctatttgttcatttacaaatatttattgcacaactgtgtgccaggcattgttctaagcacaagaaatatggcaatgaaaaaaaaatccctgatattctagtcttgtgtacattctagtaggggatggggg

SEQ ID NO: 44016 - DNA, 574 bp, Homo sapiens
tggtcatatctaacagatatgactaaaacggtcactctacacactctccagcaaaactggtgtaagtctgcttcttcacttagcttgyaccacttctaatataacacataactgacttgttgattgcatttcccaacatcctcccaccatctttagaacgtggcctccacaaaggcagagatttttgcttttggccattgtgttacttcaagtgcttagagcaacctctggcacctagtagcactcaaatgttcactgacaaaacaatgtggcagatgaggtcagagacacaatgggatgggatatggaataaatcatctctgggctttgtgggccgtcttcaagttctgagtgaaacaggggagccactccaggattctaggcagagcagtgctgtaacctgacaaaagttttaaaagcatcgctctggctgctgtattgaggatgggctgtggtgggcaggggtgaaagtgaaaagacatttatgaagcaagtacagtaactggatgaggaatcataaaggcacagattaggatgaaagtggtataaatggtgatatgtggttgaattctgg

SEQ ID NO: 44017 - DNA, 686 bp, Homo sapiens
tgcatatgtgtttacaatagctgaaggatgagatgtgaattattctttttgtcctttggggtgagccttcatgatttcacatcctgagaacacagtgtccttctatgcagaagagaaaaatgactatttattgcctaatggaaaagactttttactttctgtcttacttaggttcctgtaataagttcagccatgtcagctggggtccatgggggtagatgtgaacttaagctgtaggatataatttaggggactgaggaagttggcgtgcytactggaagaatgaaaagccacactcttgacctgagatgttacgtgttcaaaccaaaaacatcctgtaggttcaggaaattcaaagatgtctgagatacagttcttacccttgagaaactcaggctaataaatgacatgaatatgtatacaggtaattgtttttctgatacagcacttcttttgagagtttctttttgtcactatatttaaaaatgctcatatatgcaaagagtggttgcaaagataatctttgtatcattgtttattggacatagagtagaaacaaccaatagtcccttatcatggactggcaaatgcgttaatattatggcatatcatgtacttagaagactataattcacttaaaaaaatgaggttacctgtatataccaggtacagacttccatccccag

SEQ ID NO: 44018 - DNA, 594 bp, Homo sapiens
aacctaaaggtttctccttatgaccaaaatttgacttcaccaagacaaagtgaactagactgtggggtttcttcatttatatgtagtttgtctcattgttctatcattatcataaactggggaacttgtttgaaggaaactgtgagtaatgtaagaatggcttagatttatataatatgaactttcttggtcaaatccaactgtgatcttgggatcttgagttcccttattgtgggtgtcagaatataaacattagacatttcccactttcttatgtctagttttaaccccaagattttggtggtctgtactgttttccctccatttaytaactcaactgattttatttctattagtcttcatactgttctttactctgatacaatagattctccatggatcaatactgtcaacccaacacttttcatcaaagacagtaaaagttttcttaacaaatccacagatgatacagagctgtaaggcagagctttccaattcaagtatggggtgacagagtcaagatttataaagatttatcaaggtttggaaatatatatccaaaccagcatattgaaacaaacagaaatatagaat

SEQ ID NO: 44019 - DNA, 923 bp, Homo sapiens
tttcttatacccttaagagaggagtggagtagatagcaattcagctgcatagaaatatggttggctgggctcatgttggttaaggagactgttggaagtagcaattctggaatgattagtggctcttagtgacatcagtcaccttggctcttacttcargtattttagaagtgtccctgttgcactcccttcccaggtggctgatgaattaatgattatttactgagcatctactatgtgcctgattcattgttaagtacctagagagccacaaagaaaatgatacagtgaaatagaaaacccgtgcttaactagcaaacactaccttctggctgacagttcaggaaagagttagcgtctgaaaagaaaaaaaaaaaatacatgatcttgactagaaagaggaagtagattagcttcctcagtttccattttcctacctaccaccacaagcccctactctcatattcctagtctagacccagtgaggacttggtaataggtaagcaactgctgaaggacaataaaaaaagtggaaaggagaataaccatagggaatgcagccaaagactaagaaaggtggatgtagtgagagtgcagataagactcctcacatctttaacatcataagctagctgacatcaaacactaagcaggaaaaataaggagacagcagtggttgtgaggtagttgccagctttatttaccaccaactaaatcaacattgtgctctgttatttaaacttacattactacaagtatataatcataattcttggtgtatatgctacttattcccatgaatattgagcaagaacaatatatcaatatagtaatatactgcaaccttctctcagcaagcattcatcttcactgtctactatttcaggcccttcgtaggtgctggataaacaaagatgaccaag

SEQ ID NO: 44020 - DNA, 923 bp, Homo sapiens
tttcttatacccttaagagaggagtggagtagatagcaattcagctgcatagaaatatggttggctgggctcatgttggttaaggagactgttggaagtagcaattctggaatgattagtggctcttagtgacatcagtcaccttggctcttacttcaggtattttagaagtgtccctgttgcactcccttcccaggtggctgatgaattaatgattatttactgagcatctactatgtgcctgaytcattgttaagtacctagagagccacaaagaaaatgatacagtgaaatagaaaacccgtgcttaactagcaaacactaccttctggctgacagttcaggaaagagttagcgtctgaaaagaaaaaaaaaaaatacatgatcttgactagaaagaggaagtagattagcttcctcagtttccattttcctacctaccaccacaagcccctactctcatattcctagtctagacccagtgaggacttggtaataggtaagcaactgctgaaggacaataaaaaaagtggaaaggagaataaccatagggaatgcagccaaagactaagaaaggtggatgtagtgagagtgcagataagactcctcacatctttaacatcataagctagctgacatcaaacactaagcaggaaaaataaggagacagcagtggttgtgaggtagttgccagctttatttaccaccaactaaatcaacattgtgctctgttatttaaacttacattactacaagtatataatcataattcttggtgtatatgctacttattcccatgaatattgagcaagaacaatatatcaatatagtaatatactgcaaccttctctcagcaagcattcatcttcactgtctactatttcaggcccttcgtaggtgctggataaacaaagatgaccaag

SEQ ID NO: 44021 - DNA, 1764 bp, Homo sapiens
taaaacctgtaagtgtttctggaattttgcccaaaacatttgaaaaccacaaataaagaaaatgtgatgttgyttggtttgtgaaagattctcttttcctttatgtttcagaaagataaaaactttgagttaagtgataaaaatagtttaaatgtaagacttaaagtcagtttagtaaagtttagaactggcaggagacttggccattctatgttttcattttttgttgttcaagatttccttgtagtacctggaaaacgtgtgtatatgctaagaaacatgcagtttatagtactcatttcagaacagcctgcatttgaaaacaatgtttggcagaagaaatcagcaaagacataggaaaaatattaaaatcactgtgggaatgacagcaaaaaatggagggagacaggttcctccactctgatcctttatgattcttttctagttattgagtatataaatttcaatcccctagtacaactgaagggggaaaacatgattatcatatcactcaaagctgcccaactttgaattcagctctgagataaattcactctgtataaaacgacttttaatattttgttccttaacataagtattaaattttgtatgattaaaaatttatttattctctcttccttaatttaggttttcatttgctagtattgcctttcctaagccatcttggcaaaaaatatttttctgtacataaacaggggaagttttaaagtaaaaggtatctttagacttgcacatagactttcaaagtaatttttggtaaaataaatatgtgaagggaaagtgtggtgaccacttcagcatcttagctccacagataggcatcatgatgtttcacaagaaaaaagaattaggaagaaataaatagacattattggaattgtttcttttaaaattttacttaataggtattagctaggtagaagctataggaccaaaatgagggattccgggtacatcagcctcctacaaagaaaatatctttctccctgctggtataaacagattctgaaaattgtttctaaaacagaaaaacagaaggcagcactagcaagtttctcaatacaaaagagaacctgcagaactgagacagatccatgcacaagttggtggagagcaatgtggtactcacgttcatttatttttctagcgctataaagtcttcaatgactacaagtagttggcagtgtttgcagaagagctttgggtacaaccaaatgatagcattttcagaagagcttccctctttgtcattcaggagcaattgttctcactgctgggttagagaaaaggggtgccttccattgattgaattgctaacacctttcagtattctgcttatgatgatcttgaagaaagtgctatcaaagtctagacattttaaatatcttatctgtttaatatatttaatgtttcttagttcttaaagagtctattctgcctctgatacatgtgctcagctctcatcagtgctaatggaaattaataacaaaatggacccttaatcatttatcttacattatagaaaggcatgatttgcagacttgattagggctgtaactgaacaagatattataaaaatttgattctcttcaaacatgtccattgcaataattcaactggaaatttagtataaaattttcttctcctaggtattttaccattgtgacccttatttaagcatatgaccgagatgcaaaaacattaaaggtgttagaatactatttacaaaaacaaagacatgca

SEQ ID NO: 44022 - DNA, 1465 bp, Homo sapiens
tttctcccattctataggttgtctttttactctgttgatagtttaggttttttgttttttgggtttgtttatttgtttcttggctatgcagaagctctttaatttcattagattcaacttgtcaatttttatttttgtttcacttgcttttgaggacttagtcataaattcttttcctagggacatgtcccaaagagtatttcctaggttttgttctaggattttttaggttgaggtcttacatttatgtctttaatccatcttcagttcttttttatatatggtaagaggtaggggtccagtttcattcttctgcatatggttagccagttttcccagcaccatttattgaatagagagtcctttttcccatgctcatttttctcaactttgtcaaagatcatttttttatgggtgtgcagctttatttctgggctctctattctgttccattggcatgcctgtctattttttaccagtaccaggcattttcagccctctttaaaggtcactctttcatttatgttctccagaagaaactaagaatctgtaacctatccctgcccaaatgttgacatttggcttatgtaaaagcaactgtctttgatattgtagtgtcaccatttgacacttctgagtgtcttattctaacaattactaccacatatttagctcttatgtgccaagaactatgcaaagggaagtagacgagaatatgggctctcgacgcaggctgcctgagtttgtattctgattctgcctcttactaaatctgtgttcatgggcaaggtacttaacctcttatacttccatttctccttctgttaaatggaggtcataatataggataataacacaatttgagttgttatgaagattaaaggagataatacatgtataaaactcataactgttttgcacatagtaaacactcagtgactgcttattagtgtgatcattgtcatcatcatcatttaatctttacaagaaaacattgggatagtatgcattttacagataaagaaactgaggcttagaaatcataaataactttcccaaggcaacactrctagcaagtgatagctgagatttgacctcaagtccttgtgatgaacttaagcccatgctcctaaagtagactgtggccttagtggaagtggactgctggtagcattttagaatgtcatacatggaatctagccttctcattttgtggatagaaaaactgaattgactaagcaccctagtaacagacagtcctgaaagcagtatctttcccattgtcctttctgctgcccccaagcatgacttcttttcttaagaattctttagaatagctttaatcatttgcattttgattctcgtcttctgcccaaatataaaatcctagattgttaggattaaatgaaagcttttgtgtgtaaagatttcattttacaatgatattactttaccatcattttat

SEQ ID NO: 44023 - DNA, 580 bp, Homo sapiens
cataaacttagttgataaagcagtagtagggtttgagaggattgcctccaattttgaaggaagttctgttgtgggtaaaatgctatcaaataatgtagcatgctacagagaaatctttcatgaaaggaagagtcaattgttgtggcaaacttcaktgttgttttattttaagaaatcgccatagtcaccccattcttcagcaactactaccctgatcagtcagcagccatcaacgtggaggcgagatcctcctccagcaaaaagatcacaactcactggaggctcagatgatccttagcattttctagcaacgaagtatttttaaattaaggtatatgaattgtgattttagacataatgctattgtacacttaacagactacagtatagtataaatataacttttatatgcacttggaaacaaaaatttgtgtgacttttttatcataatacttgctttattgtggtggtctagaaccaaacctgtaatatctcctaggtacacctggtactaagaatttgacttcttcaaaattattcttttccagactcagattcaagtatcctttagaaaatagcc

SEQ ID NO: 44024 - DNA, 586 bp, Homo sapiens
tgagatcaaaaagcccaagaatgtgactctcatcttggttggaaacaaagctgacttggaccactccaggcaggttagcacagaagaaggagagaagctggccacagaattggcttgtgctttttacgagtgctctgcctgcactggagaagggaayatcacagagatattctatgaattgtgtcgagaggtgcgtcgccggaggatggtgcagggcaagacgaggcgacgcagctccaccacgcatgtcaagcaagccattaacaagatgctcaccaaaatcagtagttaggcagcccagctgaggtggaccaactaattggaaacactcttccccttctgttcccctttcaaaaataaaacaaaatattgcattctttgtttggattctgagaaatgtctgggcttcccattgtttctggcctctaataggttgggaagttttagcgtgttttatgcaatttcagtgctaacaatttcttcctttcctgcttgaataagatacactctaatggcatttgaacatgtaatcaccagagattctgaaatgactggtttatgttaagctatttttaggcatcttcac

SEQ ID NO: 44025 - DNA, 646 bp, Homo sapiens
cccacaatccagaaatcctctattaacattttagcatactgcttttcagctttccttttctctccgtacccattgttgaaaaatagttttgcagtgtgaatttctcactgcaaattatattatcagcagtttctrtgtcattaaaagtttttgtaaatgtcatttcaagggctaaaaaataaataatattcactaatatccatttagttattatgtgtcaggtactgtgctacacgctttgtatatattatctcatttaatcctcctaacagccaaagaggtattataatcatttccattttacagttgggagaactgagacctaggaaggttaactatcttgcctaaacactgtcatattttgacggaggtgggattccaacctatgtcttcctgccttcagagtccacagtcttaatccactgtgtcatgctgctgtatgctgctcatattccaaacacgtattataattaatttgccaccctcaatattacactttacaaagaggtgacaaatgtccagagctactgagagctaggagagatgtgcaaagaaagctatttctgggggagtggagtccatcgtagacactaggaactttaaaatcatttagaaaaactgtcatttgttctaagtatttcctgct

SEQ ID NO: 44026 - DNA, 646 bp, Homo sapiens
cccacaatccagaaatcctctattaacattttagcatactgcttttcagctttccttttctctccgtacccattgttgaaaaatagttttgcagtgtgaatttctcactgcaaattatattatcagcagtttctgtgtcattaaaagtttttgtaaatgtcatttcaagggctaaaaaataaataatattcactaatatccatttagttattatgtgtcaggtactgtgctacacgctttgtatatattatctcatttaatcctcctaacagccaaagaggtattataatcatttccattttacagttgggagaactgagacctaggaaggttaactatcttgcctaaacactgtcatattttgacggaggtgggattccaacctatgtcttcctgccttcagagtccacagtcttaatccactgtgtcatgctgctgtatgctgctcatattccaaacacgtattataattaatttgccaccctcaatattacactttacaaagaggtgacaaatgtccagagctactgagagctaggagagatgtgcaaagaaagctatttctgggggagtggagtccatcgtagacactaggaactttaaaatcatttagaamaactgtcatttgttctaagtatttcctgct

SEQ ID NO: 44027 - DNA, 629 bp, Homo sapiens
ccctagagctaaatttaagctttttctgttaaaaataagtgtaccattttcatagaacttttctatataattttaactaacgtttggttcctttttcaaagaaattaagaactgacyccgattctcctctcattgagtgcctttggacatttaggctataatttttggaggccacattgtaaatggtaatgtgttctgatattagatatgaaacaggcttctcaaacccaagaaatgaatgatttgcctcagcactggtcctatcaaacattaacttaaaatgccttggaaaaattatttgcctaaatgtctgaaaatattgctaaaaaaataccatgttgctttctgttcaaatcaattttgtttggatattattccttttgtataactacaatatgactatttaagaaaccaaaaatatcttatgtgtgttaccagctgatgattaaataagtcctgttgttctttatagtgtcagggttctcccacatttcttctgatgtatgagacctctctcactcactgtcccttgtattcacagaaggatgctgctgacatcacgggtgttcatattctttagcatggggataaagatggacgggggatcagcagctcattgcatctatgca

SEQ ID NO: 44028 - DNA, 629 bp, Homo sapiens
ccctagagctaaatttaagctttttctgttaaaaataagtgtaccattttcatagaacttttctatataattttaactaacgtttggttcctttttcaaagaaattaagaactgactccrattctcctctcattgagtgcctttggacatttaggctataatttttggaggccacattgtaaatggtaatgtgttctgatattagatatgaaacaggcttctcaaacccaagaaatgaatgatttgcctcagcactggtcctatcaaacattaacttaaaatgccttggaaaaattatttgcctaaatgtctgaaaatattgctaaaaaaataccatgttgctttctgttcaaatcaattttgtttggatattattccttttgtataactacaatatgactatttaagaaaccaaaaatatcttatgtgtgttaccagctgatgattaaataagtcctgttgttctttatagtgtcagggttctcccacatttcttctgatgtatgagacctctctcactcactgtcccttgtattcacagaaggatgctgctgacatcacgggtgttcatattctttagcatggggataaagatggacgggggatcagcagctcattgcatctatgca

SEQ ID NO: 44029 - DNA, 1146 bp, Homo sapiens
tcgcctgctttggcctcccaaartcctgggattacagggattagaggcatgtgccaccatgcccggttaattttttttgtatttttagtagagatggggtttctccgtgttggtcaggctggtctcgaactcctgacctcaggtgatccgcccaccttggcctcctaaagtgctgggattacaggtgtgagccaccgccaccagcctcacatatggctaatttttaagtttcttctagcgatgcggtctcactattttgcccaggctggtcttgaactcctgggctcaagcagtcctcctgccttggcctcccaaagtgctaggattacagacgtgagccactgcgcccggccaataaatatttatgtccatgttactgacagcagtgttcgttggtgtggcatgggaatgagctagcttttctaggaggagccccctatgctccagggctgccccgctgtcttggctcaccggccatgggagggagtcctgggccatgatctgtacctaacataggaggcccaggagaggcacgtggggaggacttccagccctgttccttgacgtctgcaccctccaggggaaggatgacagctgcagaagggcctgtctctgtcactctgtagtgaacagttacttcttgccatctgaagtcaccctggcctacgtccatgagattggccaaatggcaactaccaacaccaggccattttccctgtgcagagggggaggccctttggcgtgggcttcctgggcttgaggaagctttggcatggcctctggagttcctgggcataggctgccctcccttggaaaggaggcagtttctcagggaggggtgccgggaaagagaacagaacaaactctcacttccccagccctgtggcgctctttctggaaatgactgtgtcacttttctttcttggtcagcacgagtcagtgtggccagtgctttagactctcccatccccttggctcagaagcttacacagcagcatgggctccgtcaggggctaaacttcagtttgtgaggggcatgccatggggtggaaagttcagagaaaaaccctttgtccaaagaaggtgaagaatggcctgctgtcaccgaaccaggggcccttgtgacttcctttggttacactcctg

SEQ ID NO: 44030 - DNA, 1146 bp, Homo sapiens
tcgcctgctttggcctcccaaagtcctgggattacagggattagaggcatgtgccaccatgcccggttaattttttttgtatttttagtagagatggggtttctccgtgttggtcaggctggtctcgaactcctgacctcaggtgatccgcccaccttggcctcctaaagtgctgggattacaggtgtgagccaccgccamcagcctcacatatggctaatttttaagtttcttctagcgatgcggtctcactattttgcccaggctggtcttgaactcctgggctcaagcagtcctcctgccttggcctcccaaagtgctaggattacagacgtgagccactgcgcccggccaataaatatttatgtccatgttactgacagcagtgttcgttggtgtggcatgggaatgagctagcttttctaggaggagccccctatgctccagggctgccccgctgtcttggctcaccggccatgggagggagtcctgggccatgatctgtacctaacataggaggcccaggagaggcacgtggggaggacttccagccctgttccttgacgtctgcaccctccaggggaaggatgacagctgcagaagggcctgtctctgtcactctgtagtgaacagttacttcttgccatctgaagtcaccctggcctacgtccatgagattggccaaatggcaactaccaacaccaggccattttccctgtgcagagggggaggccctttggcgtgggcttcctgggcttgaggaagctttggcatggcctctggagttcctgggcataggctgccctcccttggaaaggaggcagtttctcagggaggggtgccgggaaagagaacagaacaaactctcacttccccagccctgtggcgctctttctggaaatgactgtgtcacttttctttcttggtcagcacgagtcagtgtggccagtgctttagactctcccatccccttggctcagaagcttacacagcagcatgggctccgtcaggggctaaacttcagtttgtgaggggcatgccatggggtggaaagttcagagaaaaaccctttgtccaaagaaggtgaagaatggcctgctgtcaccgaaccaggggcccttgtgacttcctttggttacactcctg

SEQ ID NO: 44031 - DNA, 1146 bp, Homo sapiens
tcgcctgctttggcctcccaaagtcctgggattacagggattagaggcatgtgccaccatgcccggttaattttttttgtatttttagtagagatggggtttctccgtgttggtcaggctggtctcgaactcctgacctcaggtgatccgcccaccttggcctcctaaagtgctgggattacaggtgtgagccaccgccaccagcctcacatatggctaatttttaagtttcttctagcgatgcggtctcactattttgcycaggctggtcttgaactcctgggctcaagcagtcctcctgccttggcctcccaaagtgctaggattacagacgtgagccactgcgcccggccaataaatatttatgtccatgttactgacagcagtgttcgttggtgtggcatgggaatgagctagcttttctaggaggagccccctatgctccagggctgccccgctgtcttggctcaccggccatgggagggagtcctgggccatgatctgtacctaacataggaggcccaggagaggcacgtggggaggacttccagccctgttccttgacgtctgcaccctccaggggaaggatgacagctgcagaagggcctgtctctgtcactctgtagtgaacagttacttcttgccatctgaagtcaccctggcctacgtccatgagattggccaaatggcaactaccaacaccaggccattttccctgtgcagagggggaggccctttggcgtgggcttcctgggcttgaggaagctttggcatggcctctggagttcctgggcataggctgccctcccttggaaaggaggcagtttctcagggaggggtgccgggaaagagaacagaacaaactctcacttccccagccctgtggcgctctttctggaaatgactgtgtcacttttctttcttggtcagcacgagtcagtgtggccagtgctttagactctcccatccccttggctcagaagcttacacagcagcatgggctccgtcaggggctaaacttcagtttgtgaggggcatgccatggggtggaaagttcagagaaaaaccctttgtccaaagaaggtgaagaatggcctgctgtcaccgaaccaggggcccttgtgacttcctttggttacactcctg

SEQ ID NO: 44032 - DNA, 1146 bp, Homo sapiens
tcgcctgctttggcctcccaaagtcctgggattacagggattagaggcatgtgccaccatgcccggttaattttttttgtatttttagtagagatggggtttctccgtgttggtcaggctggtctcgaactcctgacctcaggtgatccgcccaccttggcctcctaaagtgctgggattacaggtgtgagccaccgccaccagcctcacatatggctaatttttaagtttcttctagcgatgcggtctcactattttgcccaggctggtcttgaactcctgggctcaagcagtcctcctgccttggcctcccaaagtgctaggattacagacgtgagccactgcgcccggccaataaatatttrtgtccatgttactgacagcagtgttcgttggtgtggcatgggaatgagctagcttttctaggaggagccccctatgctccagggctgccccgctgtcttggctcaccggccatgggagggagtcctgggccatgatctgtacctaacataggaggcccaggagaggcacgtggggaggacttccagccctgttccttgacgtctgcaccctccaggggaaggatgacagctgcagaagggcctgtctctgtcactctgtagtgaacagttacttcttgccatctgaagtcaccctggcctacgtccatgagattggccaaatggcaactaccaacaccaggccattttccctgtgcagagggggaggccctttggcgtgggcttcctgggcttgaggaagctttggcatggcctctggagttcctgggcataggctgccctcccttggaaaggaggcagtttctcagggaggggtgccgggaaagagaacagaacaaactctcacttccccagccctgtggcgctctttctggaaatgactgtgtcacttttctttcttggtcagcacgagtcagtgtggccagtgctttagactctcccatccccttggctcagaagcttacacagcagcatgggctccgtcaggggctaaacttcagtttgtgaggggcatgccatggggtggaaagttcagagaaaaaccctttgtccaaagaaggtgaagaatggcctgctgtcaccgaaccaggggcccttgtgacttcctttggttacactcctg

SEQ ID NO: 44033 - DNA, 572 bp, Homo sapiens
cctgcttctaagcagtccatctcccacttcctcgtgccaataagctccaatccagataaacctgaagccttccctttttgtcactgtaaattctctcactcctctgcctgctttgaccttctgccaaagtgatggaagctgactcccatagcatagcaagctctgagtaaatagcccctgtactcatttatttccacaccactgaatgaataatgaaagatgttataaagccaaattatgaaaagggcatcagttattaaacatttgtaaaatgttttacaaccatcttagtatgcctcataaacacctcgtgaagtgctgccatccccgtttcagagctgagaaaattgagaaggaaccatgagattaagtgacttgcccagagctaygatgagaacatgagccccccagggtttgaggtctgttgtttatccactgagcttgagctgcgctttggaatcattaccatcttaaagcattttaccctgtgttgggtgaatattaagaagtagatcacatttcagcctggcaggcgcgaaagtattgtttttagtttgtttttctaaatttta

SEQ ID NO: 44034 - DNA, 604 bp, Homo sapiens
tgccctgcccctgcctcctcgctttatccccacaaccacctgatgagccggttcctcgtctccatttttcacataaagaaactgaggctgagaggcaatgttgctcacccaaggtcacacagccagcaagtggcagagctgagattcgaacccagttctatctgggctcttctgctcmattgcccaggccctcaggcccctggatcaggaagtggtggggttgggatggagggggagcacagagcagggcccccagccccctgcttccaaaggaagcaggtccgagagggaaggtatggccagccagctccataaataacccgggtcccagggccctgccagcagtttggcagccggagagagagtgtgtgtgtaatacaaacagcactaatcccctgtcagttaaactggatatcagaggagacaagcttccgagcggggcggcctaattgaatcgaattgaaaaggcggaatgggcggccgggcagccaaggagggctgccggggagcagagcgggcggctcggcgcagctgtctgggcctctccgctgccctgggccgggcggcattccagcccccaccacagggagccaggcttagggag

SEQ ID NO: 44035 - DNA, 728 bp, Homo sapiens
aagtcaggagaccagtgtttgaaagctggtttcaccactaaccagctgtgttaccttgaggaagctatgtttcttacagctcatttccttatctataaaatatgaataatagcccagcttctagggttgctgccctcaatcttttttcacagaaaccagtgaccttttcaaaatgcaaaattgaccatgttgcccaacttcaacttagaattccacaatggaatcccattgttcttaaaatataaaccaatcccttgaaacatgactttcaaagcctctcaaggactgctccttacttacttcctaggactcagacatgcttcatctggcctcacaaacactgttcttgtcctgtgaccacaggactcctgctattatgttttctttgtccagaaaattactccttcccttactccttccactacctcccttactccttccactatccctccatctgatgtaacctaattaactcttcttatctttaaaatattacttcaaatgtcatttcccttgtgcgacataaccccctaggctaagttaggtccccttaacatatgattttagtatatcatgtgcctttccttcatctcacacatcccagttgtaattttacattcatgaatctttggttaatgcctgtcttccccagaagactttaagctccaccagagaagagaccatgygtggatttatgcatcttttatccctaggacttcgtttaaggc

SEQ ID NO: 44036 - DNA, 597 bp, Homo sapiens
cagagttgtaagcaagggtgctattccatattatttgaaattgcctccatttccctccttgttagtccctcttctcttctattttagtttcctctcttattaccttcccactctttgctttccatgctaaggccaatgtcagaatgtttaagttgttcattgcaatagctattttctggtataatgaatacttttttcagtcatcgtttgcatacattaactcataacacaaattttactaaacagatggggaaactgagggaaatcaacctcattgtttttctaaaacttgaaatattttctccaaggtaagattttgaccacacatctcccatactgtaaaactaccgttaccaaaaggtgcctcactatcaaggaaagtgaaaaagtgaaagraaaaaaacaaaactaggcatatgctcttgatttctatcgttggcaatttgtgggccctggataagtgtttgctatttgcatgtgtctggggaagcaccctaggatactaaggtaagacctaaaatggcgatttgaagaatgatgtgagattgaggtggatacttgtgtaagtggtgatgagtaatgtctttgtctgcaaat

SEQ ID NO: 44037 - DNA, 597 bp, Homo sapiens
cagagttgtaagcaagggtgctattccatattatttgaaattgcctccatttccctccttgttagtccctcttctcttctattttagtttcctctcttattaccttcccactctttgctttccatgctaaggccaatgtcagaatgtttaagttgttcattgcaatagctattttctggtataatgaatacttttttcagtcatcgtttgcatacattaactcataacacaaattttactaaacagatggggaaactgagggaaatcaacctcattgtttttctaaaacttgaaatattttctccaaggtaagattttgaccacacatctcccatactgtaaaactaccgttaccaaaaggtgcctcactatcaaggaaagtgaaaaagtgaaagaaaaaaaacaaaactaggcatatgcycttgatttctatcgttggcaatttgtgggccctggataagtgtttgctatttgcatgtgtctggggaagcaccctaggatactaaggtaagacctaaaatggcgatttgaagaatgatgtgagattgaggtggatacttgtgtaagtggtgatgagtaatgtctttgtctgcaaat

SEQ ID NO: 44038 - DNA, 597 bp, Homo sapiens
cagagttgtaagcaagggtgctattccatattatttgaaattgcctccatttccctccttgttagtccctcttctcttctattttagtttcctctcttattaccttcccactctttgctttccatgctaaggccaatgtcagaatgtttaagttgttcattgcaatagctattttctggtataatgaatacttttttcagtcatcgtttgcatacattaactcataacacaaattttactaaacagatggggaaactgagggaaatcaacctcattgtttttctaaaacttgaaatattttctccaaggtaagattttgaccacacatctcccatactgtaaaactaccgttaccaaaaggtgcctcactatcaaggaaagtgaaaaagtgaaagaaaaaaaacaaaactaggcatatgctcttgatttctatcgttggcaatttgtgggccctggataagtgyttgctatttgcatgtgtctggggaagcaccctaggatactaaggtaagacctaaaatggcgatttgaagaatgatgtgagattgaggtggatacttgtgtaagtggtgatgagtaatgtctttgtctgcaaat

SEQ ID NO: 44039 - DNA, 566 bp, Homo sapiens
ccccttgtgtctccctcatcttctcccctgcctttcctctggccttgctgagacccaggccccacccaggtgttctgttggccactgctcaggcccacctgaggcctggtgttcccagctggggttccttcccctgggtttgcargtggggagggagtgctgagcaggacagggagcagaagacagacacaggagggaggcaagccgggagcaggtccccaggggaccactgtgcccacagcaggtacgtgctgggggacagtattgccagctgggtatggacatccagctctgtcggccctcagctccccaccctagccttactgggcttctcccatagctctcctcccctgcttcctgcctcacaggaacctggacctctctgaagcatagacctgcgtttcgagtcacctcgtagacagtcctctaaatgtcccaaagacacgtgggaatgtgagagtccaacctgaacgcatacccccctctaagggccacctcctggtggggggctccttcttccttcttcccaagtcaccagctggggcccagagcctgcctgcccctcc

SEQ ID NO: 44040 - DNA, 624 bp, Homo sapiens
atgccatccactgtcacatgcctgaggcaagagagttgaagtatagcttgagcccccccacacccgccctagactaggaagtagctgtgctaggcccccagttttaatgagaatgtctcaactttcactgttaaatttaccccatagcaacaaggccaacattgtattatggatgtacatgtgttaccgaaatgccaagggtttgatctaggtcctcgccacacagaaagccaatcactgagatgacaagtatcaccaagaaaggctttgatcaggtgctacagccaaggggatgggagatcagtctcaactccatctccctaactaactaaaattagaggtttatgcagcagggaagaaatgtgactatgtgtgagaagagaggaagtagagaatggttaggaagcaatcatgatgaatgaagggcctggaacctcatttggctggaagtgatgatctagtaagtttcaatcctttgatacttttggagaggcctgggcatcctttcctgaggaagaaactcagataaaacaaacttaagtttcaagctttaaaaccagaagggtcaatttctakgtatatcctagaaacttgtctctaagactattgggtcagttttgcatg

SEQ ID NO: 44041 - DNA, 1768 bp, Homo sapiens
ttatacctcaatttcctaatgaataacatttaatctaacatttaatccatatgtcccaagcatatgagctgttgtttggaaaataaactaagtattgagaaggaaagatgatttccaaaagatactgaggtcatctgatattttatcagcaccatgctctaaccaactgagctaaccggccgactggtcatctgacattttagcccaaccctggtattagaacaacttgaaagagattacacaacataatgagatgcttattaatatttataatgaagaaaatatgtgttggaaagccagaatcagcatcctgactcagtactatcttatatcttgtactactagagaaaacacacttttacataaaataataaatgacagaaaaccttaatacatttctgacagtattgcaataactaagaaaaaaactagttgtgcaacatgtacagtaagtatgtgaaatggctaatagctgctagtaaatgtagcttgtggcagtacctagtagcttagacaatgtatatcttgcagctatctaaagtaaactatgctcaaaatgtgtaatattgaaaataatacttaacacatggggaaagcacagtggaaagagagtagaaaagtcactgctttctgaaatactgaatagaaagtgtcatcgtttttttaattaatatggctcagagcaatatgaaaactattctggactgagattgagaaaatagacttgataactttaaataggcctaataatagactatgagaattaaatcaatcacttgaaagtttgtaaacatgtatgaaaacgtgggtagtgtgataatttttaaaaaatgaataaattgtcaggaacaaaaaatacactaagaaactacgaatcattggagaatctaggcatttcttaccaatacttcaatgttttatctattcatcttgaagaagaaattggagagagcaaggtgcctctcgttacgagacttctagggtctgttatcacaaataagataaatctaatatactttttctaatatttaaaaatgtttctcaatgctaaatatttaacttgctccacagagcctggcacacagcaaaagaatgtaagaccccttattcaataatgccagattataaagcatcttatttatggctaatacgtatttaatgatgttagccattatattattataattaatgcttccttatacaaatcacaggctgcttaagagcaatgccttttccattccccttcttttgttcagcttctagcacagtatgtatatgtagaatttgcttaataaatatgtgttataaagaataattagtttcctacctcaatttcctgcttggcttctatgaaactatcagtagyatgggaatgagtatgtttcttttagttggcaggatttacttgccgcagtgagctttcttaagttgtattctcacaccagatgtaaggaactcaatcaactggacatgtcatttggggcaaaataaactgaaggagtttagtattagttgccatccaaatttcaggcagtcccagatttattagttaggcatttccaaactttctccatcgattgttgtttatgaagtagatgatgatgatgatgaagatgatgacaatgatgatgatgcagaatacaactgtctcttaaactcaaaaattatttccacttgtgtaatctcattcaattattataaagacatggccatgattagttgagagaaaattaactattaaagatccaattgggtgctaataaagtca

SEQ ID NO: 44042 - DNA, 591 bp, Homo sapiens
tgccaagatctgtgctcagtattagaactgctaaaatgaataagacattatatcagttttttgtttttttgtgcgtgaggatgttttttcttttttttgagaccacgtcttgagtctgtcaccccagctagagtgcagtggtgcggcgctggcgaactacaacctctgcctcctgggttcaagtgattactctgcctcagcctcccaagtagctgggattacaggcatgcagtaccacgcctgactagtgttttttgtatttttagtaaacatgggggtttgccatgtcggccaggctgatctagaaaaacattgtaaagatgctctcattgtgttaagatcattatgaaaaatattgaagattaacgtattacatgtacattgcataatrcataccacatgcatatcacatacaagcatattacatgtacattacatgcatacacatcacacatgtatcacatgcatgtgtaatgcatgcatattacacacaggtatactgtatttgcattacttgcatgtatattgcatgtatgttacttaaatgaatattgtgtgcatgtatattacacacaagtatacacatatatt

SEQ ID NO: 44043 - DNA, 591 bp, Homo sapiens
tgccaagatctgtgctcagtattagaactgctaaaatgaataagacattatatcagttttttgtttttttgtgcgtgaggatgttttttcttttttttgagaccacgtcttgagtctgtcaccccagctagagtgcagtggtgcggcgctggcgaactacaacctctgcctcctgggttcaagtgattactctgcctcagcctcccaagtagctgggattacaggcatgcagtaccacgcctgactagtgttttttgtatttttagtaaacatgggggtttgccatgtcggccaggctgatctagaaaaacattgtaaagatgctctcattgtgttaagatcattatgaaaaatattgaagattaacgtattacatgtacattgcataatacataccacatgcatatcacatacaagcatattacatgtacattacatgcatacacatcacacatgtatcacatgcatgtgtaatgcatgcatattacacacaggtatactgtatttgcattacttgcatgtatattgcatgtatgttayttaaatgaatattgtgtgcatgtatattacacacaagtatacacatatatt

SEQ ID NO: 44044 - DNA, 610 bp, Homo sapiens
aaggactgaagatgaaaattgaagttttcaaagaaggaattctgcctcaaggctgtaatgtaagaaatccttcctgatcttctggcttactagcctgtcccacagatttcagacttgccagcagtcctccccaacaactgtttgagctactgccttaaaacacacacacatrtacaaacacacacacacacacacacacacactcttcatcctattggctctgtctctctgtagaaccctaagtgataactgatacactatacttatattttgccctggaagctcttttaaaaatcagacttacctcattgtttctcacctatcaggatttctatccttgctgccttttgcccagtgtcttaaaacccattgtttcatagacactgccatattttgtttgtttcaggagagaaggtaaatctggtttctattactccttctcctggaactgggaagtttttagtaacgttcttaggtatcagtttctctaagatggcttcactctctttgggccaagcagctacttaaatctggctgacctctttccctttgacacccttttatgcatcctctggatacttcttgctcagtgctattgacttcactttca

SEQ ID NO: 44045 - DNA, 221 bp, Homo sapiens
ctggctgcttcttcacaccccaaattctgacatggtaggtaggagatgggacccaggaacctgcatttagaaaagcttccctcaagtgtttctgatttagcagggcagaagacacactttgagaacactggcatggaatttcttcatttgaatcacagytaggcataagcctgtatatgatatactttaaaaagcattttaaagttcttttttaaaaaaaa

SEQ ID NO: 44046 - DNA, 1767 bp, Homo sapiens
atacacatatctacataacatagttacatatatacacacatatacacatatgtgtgtatatatgtttgtgtgtgtatataaatatatatattacatatatatatatatatttttttttttttttwaattcccttcctctgtgaaccatgacccctagtggccactctcggttcacagatccaggggacaacaaagtatgaatgctacctcaggaaagagggactagcaggtggctatctcagacagaaagaaagaggaactaggaagaaagtctgttctttctgccctagtggattgtaggggaaaacggagtcatggaatcgggcaacgttacctgatgtcctgatcacccccacgtggggagacatgttggacaggaggaggtagaatcctgcagcgcacactcctctcttgccaacttttactataaaggtctcccttctgggcaatgagacagaaacagaattgatgggcagaaatgacatctgattggcctccaggacacagttaacctcatcacaactctgtgtgtcgaaacaaaggcccagcatttcccacaaggtcaaagccaaaccccattgcatggcatacaaaaacactttcttcaactaaccctagcctgtttattgctttagcctcctttctgaggtttaccaacgcatgctggtttgcctgagacgttcctggttttagcacctgggaatccctcccagttctgggcaacctggagcagttggtcactcatctcaacccttgccaccctccaccactggcatgtaaactaagcctgtgcacttaataaaatggagcaggtcactgtcttagtaatttttaccttctccaaacctgcataggagctggcatggaacgggcactatttcatctattaatctctgatcatttattatgtcaatgagtcgtattttcttcacgatttcttggctcctttctattactggtcttcagaataattttttttaaaagaaactccattgtgatgctctttccttttgtaaatgatacaggcttaacatgcaatgttagtttcatttcatgtgtcttctctaccacttcccaactgagaaacagtcagcaatattcatttgcctagaattactaaatagaatcaatattatcacaagcaggaaagtggacacagcccctatattccacgacgtccaggcacctgtggaagctgtctacttctgaatatttgagtgtcattccccttgtaaatggccttgcctttatcctccttccttaaacacaccagagaggtgaaagctgtaagactctggaagcatgctttacaaattctgtggctgttaattcccaaggaccattttatcattataagtagtaggcttaatgaaaaacccatcaaacacaagaggaaaagcagtatttttcttttgttcttttcactcatttttacattttaacaaatgttattttatgaaatggatatttagatacatttgccaccaaaatactccattactactatgaattctattagagtgcttattatattaatgttcagagcagggatcactggaaatgacatttatttgagaaaattaggagagaactcttcaaaattaaacaacttaatccttgtttctgattgtgattcactcaagtctgcacagctcccaacgcccttggtaatctgcatttaattctgtcttgcaaagcttgtttctctacgcagggcattccagaaggcagactggctctgcccgcttggctttgctgtggagttcc

SEQ ID NO: 44047 - DNA, 567 bp, Homo sapiens
ttacactgacatggagaagagaacgactaattgggtgtaagataaaagcgagatcagattcaccagtctaggtgtagccacaatttttttttagatgagattaacatttaaaccagcagacatttagtaaaacatgtcaccttccataatgtgggtggacctcatccaaacagttgaatgcyttaattgaatgtgttaattttcagaaatatttatcagaaatgacttgagaatatttctctacagaatgtgggatataaaaacataaaacatggcctttagctgaactgcgggtcacagggattcagagtcaactgaatcaaaatggagttgtgccagcagtgggtttgatcatattccaaaaggcacaatcccaaacaccataaaccccaatgttgaaatcccaaaagatcaaaatcctcaaaatataattccagaaaaggtattttaaaaatttctttaatatacatctatttacattttcaaaggaaatttatttgagaaaagtataaaagcaggacaacacatcataggctactttacacaataaaataggcataacatgca

SEQ ID NO: 44048 - DNA, 567 bp, Homo sapiens
ttacactgacatggagaagagaacgactaattgggtgtaagataaaagcgagatcagattcaccagtctaggtgtagccacaatttttttttagatgagattaacatttaaaccagcagacatttagtaaaacatgtcaccttccataatgtgggtggacctcatccaaacagttgaatgccytaattgaatgtgttaattttcagaaatatttatcagaaatgacttgagaatatttctctacagaatgtgggatataaaaacataaaacatggcctttagctgaactgcgggtcacagggattcagagtcaactgaatcaaaatggagttgtgccagcagtgggtttgatcatattccaaaaggcacaatcccaaacaccataaaccccaatgttgaaatcccaaaagatcaaaatcctcaaaatataattccagaaaaggtattttaaaaatttctttaatatacatctatttacattttcaaaggaaatttatttgagaaaagtataaaagcaggacaacacatcataggctactttacacaataaaataggcataacatgca

SEQ ID NO: 44049 - DNA, 245 bp, Homo sapiens
tatacagtgtctggcaaaaatgttgatttctcttaactgtcagatgaatcagaggaacaagaaataataatctttgctactgtcaacactttcaaatcttgggccagtcactcgtactgtatcagaagagggtcacagaaaacctgtcttcttctccttccaatacccctaatacatctctacagataaccatctaccacctggtctgaaagtctcactctctgaattgaattaaggtgycaatg

SEQ ID NO: 44050 - DNA, 545 bp, Homo sapiens
ctgtagaacatcagcgtcactgaatgaatggagttggttacctgaccagctttcctactcaacatggagctctgtctgtctcatctctctcgattcttcagtgcataacccagttcctagcttgtgatggatccttcctaaggatgtattgggtaaattaatgaatagtgattcgacctaaccaattaaatccctgggagttttaaactcttgtccaacatcagttttatttcacgtcttattataaaacagtacatacctcttccagaaaaagtgaaaaacccttatatcacttagatgtaactaattaaacaaactgatgcatgtgtgtgtgtgtgtgtgtgtgtgtgtgtgtgtatagttgtatggtggtatatatattagtttgtaaatagctcttctactaaatacatgataaatatactttgacatcatcatgtgtacttctactacatcaccatttgaytgcttggacaccagacttcaccgttgttcagacctaagtggcaaaaccctttgtatttttctaagtgtctaggcagaca

SEQ ID NO: 44051 - DNA, 542 bp, Homo sapiens
atgcctaggctttaatgcaagcttggaccacaaagttgaggactgcaccacagggatggcatagggtaagccagactgtgacctgaatgtgagagaaataaactctcttgtttaagccactatttagatttggagttttctgtgactcactggtgattctaatcataatgaatacacccctggtttattggccatatttcctgaccttctgttctgatttgccacctgctgacttgccrcttccatctaagctgtccccctgagaacataacaatttcacatctcaacagttctaagtactttgagggtaggagctgtgctatagtcatttatcatcccactacccacaccctacacaccaaggccagtgatcaataagcaggtgcttatcgtagtactcaatatgtgtctagtggttgaagttctcctccccttcatgaatattcttaatctggagctatagctaggctttaagagtccatagaccactccctaaagttttattcaaaccttttattttagtttattatattttattcata

SEQ ID NO: 44052 - DNA, 542 bp, Homo sapiens
atgcctaggctttaatgcaagcttggaccacaaagttgaggactgcaccacagggatggcatagggtaagccagactgtgacctgaatgtgagagaaataaactctcttgtttaagccactatttagatttggagttttctgtgactcactggtgattctaatcataatgaatacacccctggtttattggccatatttcctgaccttctgttctgatttgccacctgctgacttgccgcttccatctaagctgtccccctgagaacataacaatttcacatctcaacagttctaagtactttgagggtaggagctgtgctatagtcatttatcatcccactacccacaccctacacaccaaggccagtgatcaataagcaggtgcttatcgtagtactcaatatgtgtctagtggttgaagttctcctccccttcatgaatattcttaatctggagctatagctaggctttaagagtccatagaccactccctaaagttttattcaaacyttttattttagtttattatattttattcata

SEQ ID NO: 44053 - DNA, 533 bp, Homo sapiens
acaccttggaattcacacagtccagcctggttgaggcttccaggctgagctggctttttctcccaaggcagaaagggcattggctctagcttacaggccragcagccaccctctcctgcttcatgactttgggtggacgggagttctgtcttcctactccttgctccacaggggctatggtcctgccaggacaggtgaaaggtgatgtcaactggcatctggcattcagctggtctctggaggtgggtggagggaacagggtgtccgtgggagagaccctggcctgccgtgggaatcatgcagagatctcaagttatgattttctctggcgcaggggctctttggcacacagaagatggggtaagtctcttcaatgccaaacatgtggaggaagaacatgtgtgagcatggtttactttctctcctaaatatgtattcaaataagtactttctggtttatggagggtgagttctaaccagaaatgagaagtaagtagcactgtcagtcattgttaacctcttggctagctctg

SEQ ID NO: 44054 - DNA, 799 bp, Homo sapiens
agctataatttaagaggtgtacttgtgaaatatgaatattgttttatagtaatagaatgtttctcacggaaaaatagagtatgattttgtygaagttcaagggaatatccattttcatttaggtagcttccagatttttgtctttacatgttctgtgtagtgatttaaataccgtacctccaaaatttatgtccactagtaactttagaatgcgactttatttggaagtagggtctttgcagatataattaacccaatgattgagatgaggtcatcctggatgaaggtgggccctaaatccaatgtaaatgtccttataagatacaagaaaagacacacgcagagaaggtcatgtgaagatggagacagaaattggagttatgcagtcataaatcaaagaaggccaaggattgccaggagccactggaagccaggaagaagcgagggagaattcctccctagggtcttcagagggagtatggccccaccaacatcttagtttcagaggtccaggcttcagaactatgagagaatatatttctgtcctcttaacccaccaagtgtgtgataattaggtatgatggtcctaggcaactactacactctaattcagaagttcttctggattttattatatcatgtgttggtaggaagtacctgggtgtttcatttgcatgatatgttggtaatcttagaattatcatatcttgcaagtcatttttaagtatgttgtaatgtagtcagaagctttttaaatatgaaatttaattcttgctggtgtcaattacatttaaaaaaa

SEQ ID NO: 44055 - DNA, 799 bp, Homo sapiens
agctataatttaagaggtgtacttgtgaaatatgaatattgttttatagtaatagaatgtttctcacggaaaaatagagtatgattttgttgaagttcaagggaatatccattttcatttaggtagcttccagatttttgtctttacatgttctgtgtagtgatttaaataccgtacctccaaaatttatgtccactagtaactttagaatgcgactttatttggaagtagggtctttgcagatataattaacccaatgattgagatgaggtcatcctggatgaaggtgggccctaaatccaatgtaaatgtccttataagatacaagaaaagacacacgcagagaaggtcatgtgaagatggagacagaaattggagttatgcagtcataaatcaaagaaggccaaggattgccaggagccactggaagccaggaagaagcgagggagaattcctccctagggtcttcagagggagtatggccccaccaacatcttagtttcagaggtccaggcttcagaactatgagagaatatatttctgtcctcttaacccaccaagtgtgtgataattaggtatgatggtcctaggcaactactacactctaattcagaagttcttctggattttattatatcatgtgttggtaggaagtacctgggtgtttcatttgcatgatatgttggtaatcttagaattatcatatcttgcaagtcatttttaagtatgttgtaatgtagtcagaagctttttaaatatgaaatttaattcttgctggtgtcaattacatttraaaaaa

SEQ ID NO: 44056 - DNA, 573 bp, Homo sapiens
cacattttaaaaatgaggcttaggtacattcagtgtctcaaccaaaacttcattgctgaaaactgrtaagagagaagattccaggtcttttagagtgaatttagcttggaacccaataaacagagatttacctaacaggtgctagaagcagtaaagtcttcagcaggaggcactgtttcttcttccttaatatgctgatttcctctcagctcatgcagctgggcaggtgtgctgagaaatgctttgcaaagaacagaagactcagtcctacttctcatttgaggaaggaatagattcaggctggatcataggagagagagtcagagaggaggaaaactgcgttaaagtttgcaaaaggtcttcccacacagcatctcatttattttgatgcacagaacaggcagggccaatattaatgtcctcactttacggttgagggaacttaggttgacaggttcagtgaccagaggaagggcacagctgtaaggaacttagggaaacagtgaagtctatttaggttcttccttttttttttcttcttttttttttttgccaatctggtaaaaagttgga

SEQ ID NO: 44057 - DNA, 1876 bp, Homo sapiens
gctctgtgcttctcgtgagctttgtggtcgagacagaaataaactgagctcctcacaaaatggcagttactgcaccagcttcttctcttgccctgccctgtccctcttcccactgggcttaattttgagttcggctcttaatgacacatctctggttgtctccttttgatattttctccctttgctattttctaggagatggattgcattgtcaaccaaatgctgcatattgcccagtacctggagtgggatcccacagagctgaggcctgtgagtttctataaggatggggtggctttggagtgagcttctaagacgggagggggacacactcaagacatgaatgagtgttaaccctgcaggtgctcccagactcatcttcttataggcagcttctttggagtcctgcactttacctcctacctctctgataggaaaaatgyaggcagcaggaaaacgtgcagacataactgaaataaccatgctaatcttttcaccagaactaaaatgttatagcagaaattcatcagtcaaagaatttagagagaactgtagagatttctattagaaagaattgtagagatcttcctcaatcaccagataatatgaattataagaataattacatttgggggctcctatgtgtcaggtattttgttattcactttacattcattttctctaatccctgctacagtgccacaaacacaacaatattatttccatttttacagataagcaaaccagagcccacagagtcagggtgactggcccaaggcccaagggcagagccagacctggaagcctggcctcctcactcccagtctgctctattcacacttaacaggaggggaaaggggtaaaacacaaaccagataatgcaagatgaacaagacagcagaggcagaaggcaggtagacatgtcgatgatgaaaatggacaatgattgctctttggattccacagatattgaaggagatgctgcaagggatggactacgaccgggacggctttgtgtctctacaggaatgggtccatggagggatgaccaccatcccattgctggtcctcctggggatggatgactctgtaagtcaacaagctggagttcagagatctcttgccattcaggaacattgggcttcatgttaatatcaacatatcactttggcttctgctccagactgcccaacagacgtgccatgaccagccccaaagtcctctctatttacattattttgtatccattagtgcctgaagtatattcatttgacagacatttactacattattactactttaaaaatactgttctgcatgctgtgagggaatacagacacattatctgcctgcaagaaccttatactcaaccaggcaaagggccacaaacttcaaagaagaattctgtcttttcaacaaattaggtttaaaaatgctaagagaattggggaaggaagggtgagaggaaagaacgaagggagagaggaaaaaatacggatctgttgtgggggtggcttccattagtggtatcttatttaataatcaaaacaaccagataaggtaaatatttttatcccaatttatacagatggaaaactgaggttctgaccctaaggagcaaaaggaggagtgaggatttgtctctgacaccaaagatgttgcactttgtaatatcccacacatgagagttaggccagtgggaagaaaccttggaaggtgttgacttgtccctgaagaatgcatgagattttgatgtcccattcttgagaataaagagcaggtggccttaaagacctagagagagtttatggcttggagaacagcttgattaaaaacacaaatgaaagaaagttctgggtgtgttaggcaaatctcc

SEQ ID NO: 44058 - DNA, 1825 bp, Homo sapiens
gaggtagggaagactaaaactagtaggagcacaaatggtgacattaagcgtttactagtcacaccagttgtgtgacaacactactttgagattacagatctcaaagattacacctctttgagactattccatagagaggaacagggcagcaagtgcagctgggtgagcctctagctgaccaagttgcctataatatcttcatttcatagctctgcaattcaggactaaagctgagcccccatttctgaagctcaagaactatgaatcttgcaatcatttcatagcatgtccagtgctttccaagctctaaggagaaatcaaggaaccaggatctacatgacccccttcttattccttagaaccctagaaagtcaagctggaaaagatctttgtggtccctggttgatcccctttcttttacaaactgagacccagagaaatgaaggarcttgcccaaggacatccaccgaactagcaccagagatcatcccccttactcgctcacatcacgcctctcacccaatgatcccttgccaagaagctttatgtacaagaacccatgtgatccaggaactggaagggctcagataagttagatatgctttctgctgactttactcacttaagattatactcaagacaaaatggaagttctgttccaaaacaccattttttttttctcatttagggaataaagatgggacattttagttacagggaatcaatttccattttctgttctactttggacttgctgaggttcaaaataccaccaactctttgcatggaaaagacccgctgtcttgtggcaggaggaaggagagcccatctacttcctcagcattctcccaaatgtctcccctaaatgccagatcagccttgtagaaaactctcatttatatcaggaaagtggccaatgcaagtttagttttattaatcaagagttttatgcacttatttttaaatatgtactttaaaagtttttaacacttactatttggggttttggagaaagcccccatcaatgtcttaaaagtccattgcttcttgggctttttcaaaacccacatacaaccactgaaaagtctggggaatcactgaatgagatatttgcaaaacagactctctcccaggaaaatcgtagcagcagcataaaacctggtgagcacgaggaaggctacgcccacgttctgcagccaccatcatgtggaaaggaaagagccacatgatggtgctataacccaagcagaaacgttactttatcccaagtcacggtccatgcacttcttatatccataaaaatagtagctgagaaagggggatgagctaactgacttagctactagaggtgttttcagatacactgacaatcctttgggctccacgaagaagtctgctgaagagtgctatcattttccttctacccatacaggaaaaccctggcttgtgaggtagaggagcaggatggaaagagcatgggctctggccagcaaaagacccaagtctgactactcattcagtccctcattatctatgtgggcttgggctagttaccgaacttctccaaatctctgtttctcatttctagaatgggaacaaatctacctccttccacgtcaacaaacactttttagtttattttgtgtcttccggcatctggaatggaataagaatttaatgaaagtttgaatttacaatatgtcaggcattgaactagaagctttacttacatgatgtcatttaattcttacaaaaagcccttgaggtagatgttggtcaaacgaataaatgaatgaatcaatcttttgatgaatcattatcagtt

SEQ ID NO: 44059 - DNA, 1825 bp, Homo sapiens
gaggtagggaagactaaaactagtaggagcacaaatggtgacattaagcgtttactagtcacaccagttgtgtgacaacactactttgagattacagatctcaaagattacacctctttgagactattccatagagaggaacagggcagcaagtgcagctgggtgagcctctagctgaccaagttgcctataatatcttcatttcatagctctgcaattcaggactaaagctgagcccccatttctgaagctcaagaactatgaatcttgcaatcatttcatagcatgtccagtgctttccaagctctaaggagaaatcaaggaaccaggatctacatgacccccttcttattccttagaaccctagaaagtcaagctggaaaagatctttgtggtccctggttgatcccctttcttttacaaactgagacccagagaaatgaaggaacttgcccaaggacatccaccgaactagcaccagagatcatcccccttactcgctcacatcacgcctctcacccaatgatcccttgccaagaagctttatgtacaagaacccatgtgatccaggaactggaagggctcagataagttagatatgctttctgctgactttactcacttaagattatactcaagacaaaatggaagttctgttccaaaacaccattttttttttctcatttagggaataaagatgggacattttagttacagggaatcaatttccattttctgttctactttggacttgctgaggttcaaaataccaccaactctttgcatggaaaagacccgctgtcttgtggcaggaggaaggagagcccatctacttcctcagcattctcccaaatgtctcccctaaatgccagatcagccttgtagaaaactctcatttatatcaggaaagtggccaatgcaagtttagttttattaatcaagagttttatgcacttatttttaaatatgtactttaaaagtttttaacacttactatttggggttttggagaaagcccccatcaatgtcttaaaagtccattgcttcttgggctttttcaaaacccacatacaaccactgaaaagtctggggaatcactgaatgagatatttgcaaaacagactctctcccaggaaaatcgtagcagcagcataaaacctggtgagcacgaggaaggctacgcccacgttctgcagccaccatcatgtggaaaggaaagagccacatgatggtgctataacccaagcagaaacgttactttatcccaagtcacggtccatgcacttcttatatccataaaaatagtagctgagaaagggggatgagctaactgacttagctactagaggtgttttcagatacactgacaatcctttgggctccacgaagaagtctgctgaagagtgctatcattttccttctacccatacaggaaaaccctggcttgtgaggtagaggagcaggatggaaagagcatgggctctggccagcaaaagacccaagtctgactactcattcagtccctcattatctrtgtgggcttgggctagttaccgaacttctccaaatctctgtttctcatttctagaatgggaacaaatctacctccttccacgtcaacaaacactttttagtttattttgtgtcttccggcatctggaatggaataagaatttaatgaaagtttgaatttacaatatgtcaggcattgaactagaagctttacttacatgatgtcatttaattcttacaaaaagcccttgaggtagatgttggtcaaacgaataaatgaatgaatcaatcttttgatgaatcattatcagtt

SEQ ID NO: 44060 - DNA, 589 bp, Homo sapiens
ccccctactttctagagttttgatttagtgatggaagaaattgaaactaagaaaggctattaacgtttttagttaacatcatgtttttatatttctgtattgaaatccttagctgtttcctgatgtttcaggattaaattttagtctgtgctcacaaatacaaatatattaactgaaagtgcagccctggaaattaaagctagtaaaatgcctttaagagkttttttttgagagacaaggtctcgctgtgttgcccaagttgaccttgaactcctgggctcaagtgatccttctacctcagcctccgagtagctgggactacaagcatgcaccattgtgcccagcttgagttcagtttttgtttgtttgtttgtttttttgagatagagtcttgctctgttgcccgggctggagtgcagtggcacgatctcagttcaatgcaaccttgcctcccaagttcagtgattctcctgcctcagcctcctacgtatctgggattactggcacatgccaccatgcctgtctaatttttgtatttttagtagagattgggtttcgccatgttggccaggctgacctcaaatgacct

SEQ ID NO: 44061 - DNA, 589 bp, Homo sapiens
ccccctactttctagagttttgatttagtgatggaagaaattgaaactaagaaaggctattaacgtttttagttaacatcatgtttttatatttctgtattgaaatccttagctgtttcctgatgtttcaggattaaattttagtctgtgctcacaaatacaaatatattaactgaaagtgcagccctggaaattaaagctagtaaaatgcctttaagaggttttttttgagagacaaggtctcgctgtgttgcccaagttgaccttgaactcctgggctcaagtgatccttctacctcagcctccgagtagctgggactacaagcatgcaccattgtgcccagcttgagttcagtttttgtttgtttgtttgtttttttgagatagagtcttgctctgttgcccgggctggagtgcagtggcacgatctcagttcaatgcaaccttgcctcccaagttcagtgattctcctgcctcagcctcctacgtakctgggattactggcacatgccaccatgcctgtctaatttttgtatttttagtagagattgggtttcgccatgttggccaggctgacctcaaatgacct

SEQ ID NO: 44062 - DNA, 562 bp, Homo sapiens
gaaaggtttctcaagtgtggtgtagggtttttcaagagaaattcacaggggccttgctctggaccacgaccctgtgtagtgggatggcatttggtacagtgcaggtctgtcttgggctctgtccactggggttagtgactgcatgtacccgaaggtcttcattacaatgcttacttgccactggcacagatggaatgacattatacgatatggccttaagttaatggagagygattttttttaaaaaaacaaacgtaatagaagttgtacctctaaatgagggttgtgcccttcaaaagtgatagcatggaaagcaatgcatttaatccattggcgctttcctgagccaagcattgttataacttctgatttcaagttgccttcagggtctgtggcacattgaaaatatatttataaaatatttattgtgtttttttcctgatgacaaaagttatacaggtttgttgcaaaaagtttggaaagtataggaaaacacaattaaaaaataaattatccataattttggtttcctgagaagacctccatcaaaatgcatgtatac

SEQ ID NO: 44063 - DNA, 590 bp, Homo sapiens
ccatgacacccacgaagctggagacgaaaatgccctcctctcacagactggcttcctgccttgtttacagaatattttaatctcactttcaattttacttttttcctttatcctccatttctgaaatttaaatatttgatgtcagttcagttatttttatgacaatcctctttcycttccagaaacagaaagcaaaagagatgcaaaacccactggggcatctgtctcccacttttaattagtcctttttcctcttgcatgacactagcagtagtgactgcagcgtgctctattctaaccccgctgccagaccctcatcatttttctcctccctggacccccaggggtctccagtgttcccagtcacccccatatggtcttgctgagctacaacaggacaaggcttcaaggaagatcctgagctcttctcttaacctggaacaaaaggcagatcttgcagcatgaattttacttcatgtcttttcattgattgtagacagccccatctgattaatagttttccttaaatgagagctacctctaaatattcctcttcaagacctgggtcctaaggaaaggagtctggatta

SEQ ID NO: 44064 - DNA, 547 bp, Homo sapiens
gcaaacatgtgaaaggattcagtatccaatcttcctcttaagtattttcgttctttctcatgtttaaaaaaactaaaactggaaatcataggagatataagaatggaaagatgtttaaaaaaacttcaatcaacaagaccactgtaagacaatgtcttggctctataactaaagatgagtgaacaaatgtgcagttayatgttttgggtgaaaataaaatgtttaaaagtatagtttaatttttttaggtttccctggtttagccaactttttcaattgatgggccgaaaatgatcctactcacataggacgagagagtaagcattaaccaccagcagcaactcaagtcaggaagctactgtgctttgggtaagagatgctgtgttgggtgaagtcaggggaatgcaaaagaaataaaaagaagtgggctgggtgcggtggctcacacctgtaatcccggcactttgggaggctgagacaggcggatcacaacgtcaggagttcaagaccagcctggccaacatagcgaaaccccgtctctactaaa

SEQ ID NO: 44065 - DNA, 547 bp, Homo sapiens
gcaaacatgtgaaaggattcagtatccaatcttcctcttaagtattttcgttctttctcatgtttaaaaaaactaaaactggaaatcataggagatataagaatggaaagatgtttaaaaaaacttcaatcaacaagaccactgtaagacaatgtcttggctctataactaaagatgagtgaacaaatgtgcagttatatgttttgggtgaaaataaaatgtttaaaagtatagtttaawttttttaggtttccctggtttagccaactttttcaattgatgggccgaaaatgatcctactcacataggacgagagagtaagcattaaccaccagcagcaactcaagtcaggaagctactgtgctttgggtaagagatgctgtgttgggtgaagtcaggggaatgcaaaagaaataaaaagaagtgggctgggtgcggtggctcacacctgtaatcccggcactttgggaggctgagacaggcggatcacaacgtcaggagttcaagaccagcctggccaacatagcgaaaccccgtctctactaaa

SEQ ID NO: 44066 - DNA, 556 bp, Homo sapiens
gtctcactctgtcacccaggctgcagtgcagtggcatgatctcggctcactgcaacctctgcctcccgggttcaagcgattcttctgcctcagcctcccgagtagctgggattacaggcgcatgccaccaggcccagctaatttttgtatttttagtagagacagggtttcaccatgttggccaggctggtctccaactccagacttcatgatccacccacctcggcctcccatagtgctgggattacaggtgtgagccactgtacccagcccaagttctgctttcttgtagaatcaaagaagcttagagctggggaagggtggggaatccacaaygaaacattctaatcctcaacttccttttttttaacatgaggatctgaatgcatgttagactagttaagtgaccgatccaggttcacagagctgtctggggctagcatccattcattgactaacttaagaaatgtctttttcttgtaaatttgtttaagttctttgtagattctggatattagccctttgtcagatggatagattgcaaaaattttcctcc

SEQ ID NO: 44067 - DNA, 556 bp, Homo sapiens
gtctcactctgtcacccaggctgcagtgcagtggcatgatctcggctcactgcaacctctgcctcccgggttcaagcgattcttctgcctcagcctcccgagtagctgggattacaggcgcatgccaccaggcccagctaatttttgtatttttagtagagacagggtttcaccatgttggccaggctggtctccaactccagacttcatgatccacccacctcggcctcccatagtgctgggattacaggtgtgagccactgtacccagcccaagttctgctttcttgtagaatcaaagaagcttagagctggggaagggtggggaatccacaatgaaacattctaatcctcaacttcctttttwttaacatgaggatctgaatgcatgttagactagttaagtgaccgatccaggttcacagagctgtctggggctagcatccattcattgactaacttaagaaatgtctttttcttgtaaatttgtttaagttctttgtagattctggatattagccctttgtcagatggatagattgcaaaaattttcctcc

SEQ ID NO: 44068 - DNA, 540 bp, Homo sapiens
tgagyaacatagtctaggattatgattgatttattttaagaaacaacacaataactttttgaaatattcgatcacgttaaagaaggatatatattttttaggtttagcaaatgagataataaatactaacaaacttggtaatagcattgtttgaaatgtttgttcttccgtgccgtaaagaaatagcactcgaggctgggcgcagtggctcacgccactttggaaggccaaggcactttggaaggccaaggcaggcggatcacctgaggtcaggagtttgagaccagcctcatcatggagaaaccccatctctactaaaaatacaaaattagccgagcgtggtggcgcatgcctgtaatcccagctactcgggaggctgaggcaggagaattgcttgaacctgggaggtggaggttgcagtgagccgagatcgcgccattgcactccaggctgggcaacaaaagtgaaattccatctcgaaaaaaaaaaaaaaaagaaatagcacttgaacataaatttaatttatttagtaaggccatt

SEQ ID NO: 44069 - DNA, 567 bp, Homo sapiens
gccattcttgaacgcctggcctcagctccttctgtgccaggacaacaggactgagccacagcacctctcgagccattctcaattatccacttcccctgtttgattgctctggctaggacttaaagtactatgttgagtaagagtggtgagagttggcgtgcttgtcttgttccagttcttagacgaaakcattcaactgttcaccattcagtatgatgttagctataggtttcctttttttttttttttttttttttgagatggagtctcgctgtcgcccaggctggagtgcagtggcgcgatctcagctcactgcaggctccgccccccggggttcacgccattctcctgcctcagcctcccgagtagctgggactacaggcaccagccacctcgcccggctaattttttgtatttttagtagagacggggtttcactgtgttagccaggatggtctcgatctcctgacctcgcgatctgcccgcctcggcctcctagagtgctgggattacaggcttgagccaccgcgcccggccagctataggtttcttacatatggcctttat

SEQ ID NO: 44070 - DNA, 567 bp, Homo sapiens
gccattcttgaacgcctggcctcagctccttctgtgccaggacaacaggactgagccacagcacctctcgagccattctcaattatccacttcccctgtttgattgctctggctaggacttaaagtactatgttgagtaagagtggtgagagttggcgtgcttgtcttgttccagttcttagacgaaagcattcaactgttcaccattcagtatgatgttagctataggtttcctttttttttttttttttttttttgagatggagtctcgctgtcgcccaggctggagtgcagtggcgcgatctcagctcactgcaggctccgccccccggggttcackccattctcctgcctcagcctcccgagtagctgggactacaggcaccagccacctcgcccggctaattttttgtatttttagtagagacggggtttcactgtgttagccaggatggtctcgatctcctgacctcgcgatctgcccgcctcggcctcctagagtgctgggattacaggcttgagccaccgcgcccggccagctataggtttcttacatatggcctttat

SEQ ID NO: 44071 - DNA, 1782 bp, Homo sapiens
tatctgatgctaccttgaatgtatggaaaatagagttgccagatttagccaagaaacaaaaccacacactcagaaatgacaacaacaaaaacaggatgtccaggtaaatttgaatttctaataatggataataatttctaataatgaataacttacaacatatgtctcaagtattgccttatggcattgctagcatcctacaattaaatgggacatacactagaaaactatttattgtttacgtgaaatwcaaatttaagtgggggtctgcattttatcttataaccttaactacaaagccactcatttaaaaagtgaatactttttcttgccaccctctctgtgtgtttgtgattggctttctgtctagaaatgggtacccaaaggtctactgttctagatgttgtgaactaggatggagggttaagtatatgctatagtttggatatggtttgtttgtccccactaaaagtcatgttaaaatttgatccccagtgtagtggcgttggaagctgggcctcatgggaagtatttgggtcataggggtggatccctcgtgaatggcttggtgccagtctcaaaatggtgagtgagctttcattctcctaaggctagattagttctcatgggtgtgaactaattaccaggacaatgggtcatcataaagccaggatgcccatcaggttttcccctctttgtacatgtctacttcctttttgaccttctctgtcatgttgtgacactgcaaaaaaaaaaaaaaacaaagccctcaccagaagccagagccacgtccttgaacttctcagtatgtggaattgtgagctaaataaacctcttttctttataaataacccagtctcagatattcttttatagcaacacaaaacagactaagacagtataactcatacgtggtcctatcctttgctgctgggctaaggtgtatattaaagaatcaagaagcaccataaaaagaaatcattatttggctgcccagaagggaatggtcttgttggtggcactgcctagaaggcagttctttagaacccaaaggatgactttccagtcagtggtgaagagccctggccctcctccaggctgaagggactggaacaggcagaggggatgccccatgctttgtaagaagtgtagcagcatccagaagcacccctttcctcactcgctacaaccaaaagtgtctctaatcattgccaaacgtttcctgttgggtcatattgcctcagttaagaattcccatccaaagggagagaaaccaaggaatctagagcaagaacagaatggaaacacatacctgagaaacaaatggggtgggcaaggatttgcagaaatgggagcaaaacctcataatcatagtaaaatctcaccattgagttgtttacccaggaagccagccctagaggacagggatctagtctgtcatcttcactccttttcccttagtatcaagaacagtgtctgagcaaagataaatacttgttgaatgaattattatgtaagcacagtcattctattatataaacttgccttcatactccctagaaagtgaatgatgacaaagtattccttgtgtaataaacagagaaggtgattatgttgagggacacatggctgaccaccccatcacacacacacacacacacacacacacacacacacacacacggctgaccaccccaccacatacacacacaccttcaattatcacccaaaccccctccatccccaagggctacagggcctgaaattctcccatgtgtgatg

SEQ ID NO: 44072 - DNA, 1782 bp, Homo sapiens
tatctgatgctaccttgaatgtatggaaaatagagttgccagatttagccaagaaacaaaaccacacactcagaaatgacaacaacaaaaacaggatgtccaggtaaatttgaatttctaataatggataataatttctaataatgaataacttacaacatatgtctcaagtattgccttatggcattgctagcatcctacaattaaatgggacatacactagaaaactatttattgtttacgtgaaattcaaatttaagtgggggtctgcattttatcttataaccttaactacaaagccactcatttaaaaagtgaatactttttcttgccaccctctctgtgtgtttgtgattggctttctgtctagaaatgggtacccaaaggtctactgttctagatgttgtgaactaggatggagggttaagtatatgctatagtttggatatggtttgtttgtccccactaaaagtcatgttaaaatttgatccccagtgtagtggcrttggaagctgggcctcatgggaagtatttgggtcataggggtggatccctcgtgaatggcttggtgccagtctcaaaatggtgagtgagctttcattctcctaaggctagattagttctcatgggtgtgaactaattaccaggacaatgggtcatcataaagccaggatgcccatcaggttttcccctctttgtacatgtctacttcctttttgaccttctctgtcatgttgtgacactgcaaaaaaaaaaaaaaacaaagccctcaccagaagccagagccacgtccttgaacttctcagtatgtggaattgtgagctaaataaacctcttttctttataaataacccagtctcagatattcttttatagcaacacaaaacagactaagacagtataactcatacgtggtcctatcctttgctgctgggctaaggtgtatattaaagaatcaagaagcaccataaaaagaaatcattatttggctgcccagaagggaatggtcttgttggtggcactgcctagaaggcagttctttagaacccaaaggatgactttccagtcagtggtgaagagccctggccctcctccaggctgaagggactggaacaggcagaggggatgccccatgctttgtaagaagtgtagcagcatccagaagcacccctttcctcactcgctacaaccaaaagtgtctctaatcattgccaaacgtttcctgttgggtcatattgcctcagttaagaattcccatccaaagggagagaaaccaaggaatctagagcaagaacagaatggaaacacatacctgagaaacaaatggggtgggcaaggatttgcagaaatgggagcaaaacctcataatcatagtaaaatctcaccattgagttgtttacccaggaagccagccctagaggacagggatctagtctgtcatcttcactccttttcccttagtatcaagaacagtgtctgagcaaagataaatacttgttgaatgaattattatgtaagcacagtcattctattatataaacttgccttcatactccctagaaagtgaatgatgacaaagtattccttgtgtaataaacagagaaggtgattatgttgagggacacatggctgaccaccccatcacacacacacacacacacacacacacacacacacacacacggctgaccaccccaccacatacacacacaccttcaattatcacccaaaccccctccatccccaagggctacagggcctgaaattctcccatgtgtgatg

SEQ ID NO: 44073 - DNA, 555 bp, Homo sapiens
caacaagaaacggaatggttacttttgagtctggcgttaggtggtacagctggagttacacctgcctgatcatccagcaattcaccttttaggagcatacctatgagcaatgtctgcaaatgtgcaccagatgtatgtgggattaaacacagcagtatcattggtaataaaccaaactgaaacctacatatttgtcaactttagaatgtatacattttttgtagtcatataatattatacagcagtgaaaataaatgaactacagcaacgtccaacttcataaacaaatctcacgaacatgttgagggaagccagatgcaaactgtatgattccatttctgtaagcttcaaaacaagatagagtgaagctatgatgcttaagaatgcacacctaggtagtaagatacaagaaaaagatttaccgcctaagcctggatggtgatcatttccgcttgggagggtagactgtgyttaggaagggccctccaagccacagtggagggactactgagctgcagttctattttgcagcctgatttatttttagagaggtat

SEQ ID NO: 44074 - DNA, 604 bp, Homo sapiens
aggattaacctcccaagattttggtgggaattgagaattctcaaatagaaattgtatttgagaatgcaaagactacaaaagagcctgacacatagaaactgctcaatatttattatgttgcagagttttcaagaaaattgatagaatgatgtggacgataaaaagatgaatatttcatcatcaatataaattctagacagtttaaatattgtatggcaaaatataagtgactgttaaatctctagagatggtgatgatatttctacacaaaacaacaaaagtcggggaaaaattaccatttaatcagagaaaagaataaaatttacatatgttgaaaaaacaaaatagacttgtacaaaggaaaaactgggaaaaactcttaacggcaaatctgacaaaaaattaatgttattaacatacaaagagatattgaaagagaagaatcaatgtttcaggaagttttcattcatgggaaaagatattatataacsattcaaagttgtgttcttgacaatgataatgtgaaaatagtcaccatattgcgtatagtaaaaaaaaattaggattcagaattagttatgtagtatgtcctatctatgatgca

SEQ ID NO: 44075 - DNA, 608 bp, Homo sapiens
actttatttttgccagaaactgggtgttgctatgttgcccaggctggtttcaaactcctggaggcactcaatcccccgaccttggcctcccaaagctttgggattaccggcatgagccaccacacctggccaaagtatcaaatttttaagtaaaattggcatcagtattgtgtcactgattcttccacttacttcagacttcagtgtagctcagcaaagcacttttattgatcctgtctttatttgattcttttacaactttggccattctaaagccttttgtgaaaatggcctgtggttcagctgggcatggtggcgtgcacctgtaatcccagctactcgggaggctgtggcaggagaatcgcctgaaaccaggaggtggaggctgcagtgggctgagatcgtgccacttttgacactctgtctcaaaaaaaaaaaaaaaaaaaaaaaaggaagcctgtcggcttgactccagtagcctctgatggggtggagtsgacaaggggaagtgaaagctcccaggcctcagtcagggcaggtcccaagaagccctgagcatggaggaggggaacaatccagtagaggcagctctgaagttttctcccatg

SEQ ID NO: 44076 - DNA, 1271 bp, Homo sapiens
aggggttgccatgttgtctaggctggtctcaaactcctgggctcaagtgacccttccgcctcagcctcccaaagtgctgggatgataggcatgagccaccacgcccagccttggaatgttttaataaactattttctagaagttttctagatgtgtttcattggttagctgtctgttctactgcgattcccaaggtcaagaggcagggtgcaggtctgcctaagtggcgatccctgagttgtgaccaaagccattctctggtttttaatgagataacggggaacacaggtccagctgactgccctgtgaacatctataaggggtaacactctagagctggtgcatatcttggtctctaaaacctttggaagctggttattcctctatctaggtccacaaagaagaccctgtcagtgcttgccaacctaagagactgcccaccttgcttgatggccctctgaaagaagttctaagtccaactccaaactctgactttcctcaagagccctcaatatcacctcaagccctgtgctggaagaagaccaacgttggcaaatcattcccacagctacgctagattcccacggaatttccggaatgtgacaacatgggtgcaagccaggccaacaccaaatttcagaggacccaccatgtagatgcatgctggcatctacatcaacaccttcaagtccaggccagtccaggcacagtggctcacatctgtaatcccagcactttgggaggccgaggccgccggatcacttgaggtcagaagttcgaaaccagcctggccaacatggggaaaccccgtctctactaaaaatacaaaaatgtgctgggtgtggtggcgtgcgcctatagtcccagctacctgggaggctgaggctcaagaatcctgggaggcggaggttgcagtgagccgagatcgcaccattgcactccagcctgggcaacagaacaagaccctgtctcaaaaaaaaaaaaagtccaagtccaaactggacaagcctcctgaactgaggtagtgaaaagacgcagctctaacattttctgaggcgtacccgccctcattccagcacctacwacaacagtgacaacttactggcttagctaagaaattggaaaactagtttagaaagaaatcacataaccgctaaggtgtccaaaagatctgtaaatcaatacatgtaaaatggactctgtgaaagtcattatctttctaactcatgtaatctgagcttccacagggacgatggatactattaccctga

SEQ ID NO: 44077 - DNA, 493 bp, Homo sapiens
cccttaggtgtaacttgaatatagcctaagttacatatcctcacacttgtttgggcattgctctgacccaaactctgataaagcataatttttcatgttcattaccatggggctgttgttgcatgtttcacaacctgtacaagagaagtgcttcattttttttttcctgccttctgttctattcctacttggaaaagaatgaatatttaagcaacattaaataaataaataaaagcatgaatgaggtattattactgggaaccatacaattccatgkgtagggatggtttttagcagcaaaaaggcataggtgggtcaacatgctaagcacttttcatgagtattgatgttctttgacccctggctaatgattcccaagacaattactgtatatattttacattgcatgacttttcaccaacggttttggcataaaacagcattatatttatacacagggcattttctaatggcaattcagtgatgatgacag

SEQ ID NO: 44078 - DNA, 615 bp, Homo sapiens
ttaaatgtagagcacacaaatgtacacaaatcaaaaacattagtcagtgaatyttcacaaagtgaacaaacttagcatctgctgaaccagatgatgaaagagaacgttaccagcaagccagatgtccacctgacacttccatagttacaacttatcttaaggggaataactatctcaaatattcacttctacccatccttttcactcaacatcatgtttttggtaatctacgtacatctatgatgtaacatgtaacagtggtaggttcattttcattgctgcgtaatatcctattacatgaatacatcaaaaatacttgtaggtggtttggtttcagatttggctactgtgaaataatgctactatgaaaagttataaacacacatacatacaaacaccatgcacacattctttaattcatatatatataatcacttaattatgggggagcatatacctaggagtagaattgctggttcaagagtatatgaatgctcagctttaataatagctaccaagaactttccaaagtaattgtatcaactttgattcctacctacacagtgtaagaattttagttattctacattcttgtccacaacagggtttgtcaga

SEQ ID NO: 44079 - DNA, 639 bp, Homo sapiens
ggctgtctacatgagataaatgatgcaaagcaatgaggaggcggcattagcttcagggcccttatcttgacagctctgcctcaaggggtttcctctctgaaaaygtccatggataatttaagaagctattccaaaggcactagtagcctcaacagtttgaaataggtaagaaagaagaaggaggagaagaagcaaaaaaaaaaaaaaaagaaaaacattgtgtctttcattgtaccactctagaaatgaaagctgaaatgccaatgactcctgagaaaggggtccaccacggaaggatcccagcaagtgatctgaaatttgggctgcttcctacactcgaggccacatcaatccaaatgcccaaaggcactaatcaaacacacctgccaaagggctgaaaattccaacacacctgaggactgaataactctaccagagaacttaaacaccagtaaggtcaaaactcaagagagtgatcccaggcagaatgcaaaaacagcttcaataaaaggcatatccatggagttatctcccctatggagcttaacaagcaggcaagttactcacccatacaagaatatctataaagtgaggtgttctcacttctccaaatcctacagagactataccaaattacat

SEQ ID NO: 44080 - DNA, 617 bp, Homo sapiens
tgcatgacacaaggtggaaagaatgtgttcctctttggcttcttctccaaggaggaagtctaccatctagtctccatacagtctacaactgtagtatccttgacctttgattcgtcctgcacatagagaactggcttcaccattctgcacaggtagacaatgcagagtgatggcagtatttcagtagtgacatcccaggaccttaccccattctagcattggcaatatatcacaaagktctgttcaaaaatacctgcctccgcaggctatcaatacaaattcaagagcatcttttaagcgccagttaggatgaccacaatgatgagttattcctacctgaatatagaatattttaactagcatgagctttccttatagcttagacaatgggaacagagtagtagaagtttccacagtcggggagaaggctgattttggaacatggagtatcacagaggtcaggcctccctgggcagctaaaagacagtcctgggctcctggggaatagagaacaggagggctgggccaggcacagtggctcacacctgtaatcccagcactctgggaggctgaagcaagtggattgcttgagcccaagagttggagaccaacctggg

SEQ ID NO: 44081 - DNA, 617 bp, Homo sapiens
tgcatgacacaaggtggaaagaatgtgttcctctttggcttcttctccaaggaggaagtctaccatctagtctccatacagtctacaactgtagtatccttgacctttgattcgtcctgcacatagagaactggcttcaccattctgcacaggtagacaatgcagagtgatggcagtatttcagtagtgacatcccaggaccttaccccattctagcattggcaatatatcacaaaggtctgttcaaaaatacctgcctccgcaggctatcaatacaaattcaagagcatcttttaagcgccagttaggatgaccacaatgatgagttattcctacctgaatatagaatattttaactagcaygagctttccttatagcttagacaatgggaacagagtagtagaagtttccacagtcggggagaaggctgattttggaacatggagtatcacagaggtcaggcctccctgggcagctaaaagacagtcctgggctcctggggaatagagaacaggagggctgggccaggcacagtggctcacacctgtaatcccagcactctgggaggctgaagcaagtggattgcttgagcccaagagttggagaccaacctggg

SEQ ID NO: 44082 - DNA, 523 bp, Homo sapiens
aaaccacttctgctcattcagaatttatcagtatccctgtaattctttttagtcttgttctaagaattacctgacagtattaataaaggctgactagctttagttatgactccagagttggatttagctaaaccaacccaattaggccatcagtgctaagggcagcatcggcctttcatagtgacaaccggcctatccccttcctttccaccaggcaggaaggaaacacttttgtcatttctaaccaacaaggaaacattttctggttgctccttaacagaaaacaggaaattctgttggtcattttcccatggtaatcatctaaatacctatctcttgatagatcccagataattctaggactggaagagaagcctcagatcatatggtccgtttccatgacagccctttatacccatattaaaaagtctaagtcggctctcagccatctcctcaccatattacatggtattttctctacgggagttsatagtattcacctcctctcttggaaacaaaaaag

SEQ ID NO: 44083 - DNA, 592 bp, Homo sapiens
tagtgtgcacacgtaaggattgtgaaaagagccttaaattgtttcctttaccaaagatgatcaactttgctttattgccaagaaacacagggatctgtctttctagaccttttctttctggattgattaattactgctcagggtaaataattttaagaggaagttttatagatacccactctctcttcataactaaaatctctgctgtgtacatagtaaatccagtggtccattaaaagatattcgcaggtcacgaattttccctttgcccacttaggagcttctcactattattttgcattttttccttctaaaatatcagcccgctcctctatccctaatggggcattagagaaaaaatctgtrtgcttgagagagtctttgagtttttcttagttggggtcaacaaagtcttccaaatcaaatagaaggaatgttcccattaagccccaagtagtctttggtgtttgctctgctgtcagcttggacacactccaccaaaggagcaaatctctgtttttacttaggcttgtgctgatctgttgttaagtcgtaactcgatgaaagcattataaggcaataagaggatgca

SEQ ID NO: 44084 - DNA, 549 bp, Homo sapiens
ctccaagcaggacggttaatgacatggtcaaggcctgatccctgaattcaaacttatttttttgctaccaagaagaagattgtgtattttagctcccatgcatcttaccctagctgggatggtgacatttgaagaaacctttatttgcctatttcctttggctctaaacagctcactgcacatgtctcatttgctggctttagccacacagggaatgagtcctttttttccccagggtggagagctcccagcagagaacagaggctgggggtgctacacaggctgaaggtgacctcaaaaggtaacagtatgccaggcagtgttgtagtcaggctacctggatcagtcaccatgtgcagggtggcaggacaggttgaaaccattatagtgggagaccaagaagtctgcagggcatttgtgggtatcatcccaggtctgartgacagaaaaataacaacagctaatgccctactgaattgagcataggactagtttatgtgagtcaactgattgacccatgcaacaattttatgatgttaggtttgtttt

SEQ ID NO: 44085 - DNA, 1766 bp, Homo sapiens
tgcatgtatgttagatggaacaaatgcacggcggccttcagcagcaccgaccgcgtcgacccctctctgtgctcacaccaggagtgatcagtgcacacgccctcccacaggatgggagaaggtgataacacagctgagctgggtgtccagaagccagccccaccccacagccactactgagaggttatgagatcatggccttatcccgagtaatgctgctgcagcgaactgggtcttttttcctctgaattcgaaggtggggcagtctaggcacctggatgcacggtctgctctgtcccggcctggtggctgctcactgtgggatgctgtgcgattagacagttactatctttccctggttgacggattagagtttcccttttctgagcatcttgttttgaagtgatccgaggtgttcaggattaaagagcgtgattttcccaaactgtccaaaaaatagaagcaggtctgcaagaggggggtgcccaggaccttgagatggaagcgagatggggtgagacctggggagctctccaggccgccgggaagctgcacgtcatcctctggacctctttgctgactgtgtgctgtcaccacagcagccgccttctctcatcagtaaacaggattttacgtaactttccatacacttggttgttgacaattaagtagattgtttttaaagatacttgaaatgatatcagaatttcctaaatatatcattaaaacaggaaacttagttacctacgcactcgaatcactagagaataccaaataggaataggaaaataacacactggtaagaaaaatgtccaaggccaatcacaggagtcaaagctcgtgatcaaatcagctctgcctggggaggccatgctcatggcaccatttagtgacaagtgggtgactctggggcgagttccaggggtgtcacccccaaggcagcagctcaggtgcagccaccatggaggcagtttcactgaggggccctctgaggcccctactctgagattctaagacagggtttgaagaatgttccagcatttgaacaaatgaaccctatgatggcctgctgtgggagagaacaatgtcccaattttgcccaggtgatttgaacatctcggtatggatctgttatgggttggattttctcctgcccaaattcttatgttgaagtccttacccctgatgggactagatttggagacagggcctttagggaggtgattagcataaagtgaggtcaccaggttggccctgatgcaatctggcatcctcctaagaggacatgaggacacagacacatacagagggatgatcgtgtgaagacacagggagaggatggcatctgcatgccaaggagagaggcctcaggaggaaccagccctgcccacaccttgatctgggacttccagcctccagggttgtgagagagaaatgtctgttgtttaagccatgcagtctatggtgctttgttatggcagctccagcaagctaacctgggatctaaaatgrtacttaaactggttcagtctgagtctaggatccttccaccaagaaagtaccctaaaaactgtcctaacatccaggagttgaaatcccactggcggttggtccagccctacatagataaatatgtcacaaagtgttaacttctctgcttttcagcctctggtgtttatctacttatagtctatgtatatttatggttgtataaatacaggatgcagcacctatgtttatattttcagatattgtctgcatgatag

SEQ ID NO: 44086 - DNA, 1024 bp, Homo sapiens
cccagctactcgggaggctgaggcaggagaatcgcttgaacccaggaggcrgaggttgcagtgagccaagaatgcactactgcactccagcctggcaacagagcaagattctgtctcaaaaaaaaaaaaaaaatttgccaggtgtggtggtacacacctgtagtcctagctacttggaaggctaaggcaggaggactgcttgaacccagaaggtagaagttgcagtaagccaagatcatgccactaatccccagcctgggcaacagagtgagactatctcaaaaaaataaaaaagaaatcaccagtgattatttctcataaaaaaaaatccatgtggctccaaagaagtcagaaaactagactcccaaatgagtgctctagctgggcctggtggttcatacctgtaatcccagcactttgggaggctacagtgggaggattgattgagcccagttcaagatcagcctgggcaacatggcaagacatcatctctaaaaaacgtttttctcatgcctgtaatcccagcactttgggaggctgagacgggcagctcacgaggtcaggagatcgagaccatcctggctaacatggtcaaaccccgtctctaataaaaatacaaaaaattagtcaggcgtggtggcaggcgcctatagccccagctactcgggaggctgaggcagaaaaatggcgtaaacctggaaggcggagcttgcagtgagccgagttcgtgcccctgcactccagcctgggcgacagagcaagattccgtatcaaaatttttttaaaattagccgggcatgctggcatgcacctgtactcccagctactgcagaggctgagatgggaggactgcttgagactaggacgtcaaagcactacaacgagccatgatcatgtcactgcgctccagtctgggtaacagagcaagacactgtctcaaaacaaaacaaaacaaaacaaaaaaactgctctaccatccctagagcaggtatggttcaagatggccaggtctgtatttcagcca

SEQ ID NO: 44087 - DNA, 1824 bp, Homo sapiens
tttctcacagtttgggaagctgtgaagttcaaaattaacatgccagcaaattcagtttctggtgaggacccttttctggttatggcctcatatgatggagagatagagaagtaacaagttatcttatgtctctttttataacccgattacctctcaaaagtcctatcactagataccatcacattgggaattaggcttcccctatgaatttggggagagatataaacattcagtccatagcatgtaggtacttttctaatcccccttttaaatatgcaaaagctaagttttttccaggttctcacaggtagaaagtgacagagtggtacttcaaactcaggccctttaaccactgtagtgtatcctcatccacatttctagctggtggtagtgccatcaactgaatggtgatgaagtgggtggggtagagcatggtggggttggtgatgaacttagcctgggctgattaattttgatgtgtttatgggacatttaagtagaggtgatgaacccaaagaatgaagcaaaagtccgggttagagataaaacaaaaagatgatttttaaaactgtggcctagagagaattcttatgtagaataagttttagaagtccccttaaatggagaaaaacgtaaataatggagaaataagaaacatcagcgcttattgtaaagaaacacattcctatgagatattcccaaaggagaatgtcaattatcaccagttatcttcaggtcacataatgtttcggaacttaactactaaaaccttcacaagacaaagtctcatcaaataatcttctaaaaattcaaactttgatggtttttctgaaactctaatttaaaaaatgatcatgtcaacatttcataataaacttttataccaacttgaagcttattctgaactgtatacatactaatcattccaacttttccctctggacaaaaatgagcttctagatttgccaaattatatttgaatcttattggcaaccctaatactaactcataggcataattgcaaaacaggcctaacttccacctcacctcctcacttagaatcgttcgtgtcatatttattaaaagctcaccttttataaattttgtagcattttatttttatttatatctatttgtttttatatataaatatgtaataaatatatacgtgtgtgtatgtgtgcatgcatgtacagatgaactagatagaaacagtctgccctcatagagtttacattctaggatgtttctaagatgctaacctggcaaagcagagagtgctatggagcacctggcaaatgtgtattgagttccttttatccccatascacagaattaaatcaaatttatctttaaagaactcatttaaaggctactttttttaatgaatcttttcctaagttctgatccagtggaaagagacattttcctcctcttaaattccataatagtttattattgatttatctacctgtttattcagtatacatttaatgaatatttactctctgcacaggatacccattcagagtcgctcaatgaaagaaccatagtacatggatgttagacaacaaagtgcatatcacccacttagtaagaacaagaattgattaagtgccctacgtgtagttctttattccacaatagtccaatgtgatggggttgtttaaaagactgaggatacagcagtgaataaaacaaagagagctcctttgaaggttatattccagtaggagaatgagacaataaacacaaaataaacatacaatatttcaaggacacataataacagtgttaaattctatgaagaaaagtgtggtagtg

SEQ ID NO: 44088 - DNA, 1824 bp, Homo sapiens
tttctcacagtttgggaagctgtgaagttcaaaattaacatgccagcaaattcagtttctggtgaggacccttttctggttatggcctcatatgatggagagatagagaagtaacaagttatcttatgtctctttttataacccgattacctctcaaaagtcctatcactagataccatcacattgggaattaggcttcccctatgaatttggggagagatataaacattcagtccatagcatgtaggtacttttctaatcccccttttaaatatgcaaaagctaagttttttccaggttctcacaggtagaaagtgacagagtggtacttcaaactcaggccctttaaccactgtagtgtatcctcatccacatttctagctggtggtagtgccatcaactgaatggtgatgaagtgggtggggtagagcatggtggggttggtgatgaacttagcctgggctgattaattttgatgtgtttatgggacatttaagtagaggtgatgaacccaaagaatgaagcaaaagtccgggttagagataaaacaaaaagatgatttttaaaactgtggcctagagagaattcttatgtagaataagttttagaagtccccttaaatggagaaaaacgtaaataatggagaaataagaaacatcagcgcttattgtaaagaaacacattcctatgagatattcccaaaggagaatgtcaattatcaccagttatcttcaggtcacataatgtttcggaacttaactactaaaaccttcacaagacaaagtctcatcaaataatcttctaaaaattcaaactttgatggtttttctgaaactctaatttaaaaaatgatcatgtcaacatttcataataaacttttataccaacttgaagcttattctgaactgtatacatactaatcattccaacttttccctctggacaaaaatgagcttctagatttgccaaattatatttgaatcttattggcaaccctaatactaactcataggcataattgcaaaacaggcctaacttccacctcacctcctcacttagaatcgttcgtgtcatatttattaaaagctcaccttttataaattttgtagcattttatttttatttatatctatttgtttttatatataaatatgtaataaatatatacgtgtgtgtatgtgtgcatgcatgtacagatgaactagatagaaacagtctgccctcatagagtttacattctaggatgtttctaagatgctaacctggcaaagcagagagtgctatggagcacctggcaaatgtgtattgagttccttttatccccatagcacagaattaaatcaaatttatctttaaagaactcatttaaaggctactttttttwatgaatcttttcctaagttctgatccagtggaaagagacattttcctcctcttaaattccataatagtttattattgatttatctacctgtttattcagtatacatttaatgaatatttactctctgcacaggatacccattcagagtcgctcaatgaaagaaccatagtacatggatgttagacaacaaagtgcatatcacccacttagtaagaacaagaattgattaagtgccctacgtgtagttctttattccacaatagtccaatgtgatggggttgtttaaaagactgaggatacagcagtgaataaaacaaagagagctcctttgaaggttatattccagtaggagaatgagacaataaacacaaaataaacatacaatatttcaaggacacataataacagtgttaaattctatgaagaaaagtgtggtagtg

SEQ ID NO: 44089 - DNA, 1824 bp, Homo sapiens
tttctcacagtttgggaagctgtgaagttcaaaattaacatgccagcaaattcagtttctggtgaggacccttttctggttatggcctcatatgatggagagatagagaagtaacaagttatcttatgtctctttttataacccgattacctctcaaaagtcctatcactagataccatcacattgggaattaggcttcccctatgaatttggggagagatataaacattcagtccatagcatgtaggtacttttctaatcccccttttaaatatgcaaaagctaagttttttccaggttctcacaggtagaaagtgacagagtggtacttcaaactcaggccctttaaccactgtagtgtatcctcatccacatttctagctggtggtagtgccatcaactgaatggtgatgaagtgggtggggtagagcatggtggggttggtgatgaacttagcctgggctgattaattttgatgtgtttatgggacatttaagtagaggtgatgaacccaaagaatgaagcaaaagtccgggttagagataaaacaaaaagatgatttttaaaactgtggcctagagagaattcttatgtagaataagttttagaagtccccttaaatggagaaaaacgtaaataatggagaaataagaaacatcagcgcttattgtaaagaaacacattcctatgagatattcccaaaggagaatgtcaattatcaccagttatcttcaggtcacataatgtttcggaacttaactactaaaaccttcacaagacaaagtctcatcaaataatcttctaaaaattcaaactttgatggtttttctgaaactctaatttaaaaaatgatcatgtcaacatttcataataaacttttataccaacttgaagcttattctgaactgtatacatactaatcattccaacttttccctctggacaaaaatgagcttctagatttgccaaattatatttgaatcttattggcaaccctaatactaactcataggcataattgcaaaacaggcctaacttccacctcacctcctcacttagaatcgttcgtgtcatatttattaaaagctcaccttttataaattttgtagcattttatttttatttatatctatttgtttttatatataaatatgtaataaatatatacgtgtgtgtatgtgtgcatgcatgtacagatgaactagatagaaacagtctgccctcatagagtttacattctaggatgtttctaagatgctaacctggcaaagcagagagtgctatggagcacctggcaaatgtgtattgagttccttttatccccatagcacagaattaaatcaaatttatctttaaagaactcatttaaaggctactttttttaatgaatcttttcctaagttctgatccagtggaaagagacattttcctcctcttaaattccataatagtttattattgatttatctacctgtttattcagtatacatttaatgaatatttactctstgcacaggatacccattcagagtcgctcaatgaaagaaccatagtacatggatgttagacaacaaagtgcatatcacccacttagtaagaacaagaattgattaagtgccctacgtgtagttctttattccacaatagtccaatgtgatggggttgtttaaaagactgaggatacagcagtgaataaaacaaagagagctcctttgaaggttatattccagtaggagaatgagacaataaacacaaaataaacatacaatatttcaaggacacataataacagtgttaaattctatgaagaaaagtgtggtagtg

SEQ ID NO: 44090 - DNA, 612 bp, Homo sapiens
attgaacatgagcacctgggacacttttaaacacaggtggatgatgaaaagggaggaatacaagagctaaactggcaatatggcaatagcccctggaaagtgaaggggacaaagtaaaacagtcactgtttgagaagaattagctgcctcctgagttggctgaattgtcctggggacaagcaaaaggctgagctctgtagaaaagatgaaaaataaggatatttttgtttccgtttatatgatgtcaaattctcagttgctgcatgaacattgaacgtgtccygtgaatgctatctgaaaaagcaataaataaaaggatttaactagtcatgacaccaaatgacagtactaatggcacaaaacttccctccatattaacttacaactggtttgcatttaactcctttcagaatttcatctaccccaggtttttaacttcctaacaggctgtgaacacagacggcagtttatctttacttgctggtttccgattgtgcttttcagagcctggacagtatttacatagccattagctgagatacttgggtatttctttgttaatgagaatctcttgtggtaaggtacagaattatacattttatcatacctcag

SEQ ID NO: 44091 - DNA, 612 bp, Homo sapiens
attgaacatgagcacctgggacacttttaaacacaggtggatgatgaaaagggaggaatacaagagctaaactggcaatatggcaatagcccctggaaagtgaaggggacaaagtaaaacagtcactgtttgagaagaattagctgcctcctgagttggctgaattgtcctggggacaagcaaaaggctgagctctgtagaaaagatgaaaaataaggatatttttgtttccgtttatatgatgtcaaattctcagttgctgcatgaacattgaacgtgtcctgtgaatgctatctgaaaaagcaataaataaaaggatttaactagtcatgacaccaaatgacagtactaatggcacaaaacttccctccatattaacttacaactggtttgcatttaactcctttcagaatttcatctaccccaggtttttaacttcctaacaggctgtgaacacagacggcagtttatctttacttrctggtttccgattgtgcttttcagagcctggacagtatttacatagccattagctgagatacttgggtatttctttgttaatgagaatctcttgtggtaaggtacagaattatacattttatcatacctcag

SEQ ID NO: 44092 - DNA, 567 bp, Homo sapiens
gaatcttaaatttagccatctgtcttttcaaacctcaatccttcaatcaagtaaaaaacaaacaaacaaaaaacagtatttctcttcaaatcacaagaaataatgctcattcccattttcttgctcaattgagtgcaaagttgttatgcttctgctcttttcttcttgtgtgagggcgactaaaatgccacagctttgtctgctgaggtacttacacagttacttctctaacagccactgtattgttttaccttctgactgaccatgccacaattctttagggtataaaaacaacacgtctgacatttttgcttgagtgactrgagccctgactttcaagtaacagagatatttattatttttgtcttgactttatatttacatattctggaataataaaaataacaactaagtcttgtaataaatctaaattaaaccttgttataccctagagcttgcacaagctcttggataagtcaatagatattcccttgaaacaataccactaggctatgattttaatatttgaaaggatttcctcaggtcaggcatcagagaaaaggccca

SEQ ID NO: 44093 - DNA, 591 bp, Homo sapiens
ttttaatctaggcaaccgtcaggtatttttaactgaatgttgaataaagggaacccctcaaaattcacagttaccatctcttgttcaccaaatttaccaaagggagaattttagggctcagcattgcatcacttttccattaaamttctaacagcacctgtagtatcaaatcccctttattctctctccgccacgagtgattagtgttttcctgcattcaacaaattccttgtgacctttaccccatatttcagtgtcattcctctctcaaatgcaactaggatattctcttctagcacattttgatggacaaggcaatccattctgttgtctaacctctatatcaaagtgacaaaagattcagtggtttaacagctggagaaattttcattacatgaatgagatttagataacacttccattaacagtacttaagatcaatgtccctaaactaccattcccaaatcaagagtttattgtgtgttttaacactttagagccacaaagtgttttcttactcaaactgcctgtaatacaatttgggatgaaagttatttaaataatgttgagatcatatattgtgaacctcca

SEQ ID NO: 44094 - DNA, 591 bp, Homo sapiens
ttttaatctaggcaaccgtcaggtatttttaactgaatgttgaataaagggaacccctcaaaattcacagttaccatctcttgttcaccaaatttaccaaagggagaattttagggctcagcattgcatcacttttccattaaacttctaacagcacctgtagtatcaaatcccctttattctctctccgccacgagtgattagtgttttcctgcattcawcaaattccttgtgacctttaccccatatttcagtgtcattcctctctcaaatgcaactaggatattctcttctagcacattttgatggacaaggcaatccattctgttgtctaacctctatatcaaagtgacaaaagattcagtggtttaacagctggagaaattttcattacatgaatgagatttagataacacttccattaacagtacttaagatcaatgtccctaaactaccattcccaaatcaagagtttattgtgtgttttaacactttagagccacaaagtgttttcttactcaaactgcctgtaatacaatttgggatgaaagttatttaaataatgttgagatcatatattgtgaacctcca

SEQ ID NO: 44095 - DNA, 574 bp, Homo sapiens
tggaattggagactgatggtgtgactgaattcctgcaatctcatgataaaagttgaagggatgaggagttgtcccttatggatgaataaagaaagtggtttcttgagatggaatctattcctggtgaagatgctatgaacactgataaagaaagaaaggatttaggatatcacatcaactttgttgataaaactgtggcagggtttgaagagggttgactcctatttttgagagaagctctgttgggtgaagtatgaaccaacagcattgcatgctacagagaaatctttcatgaaaggaagagtccattgatgcagcaaactgtatcgttgtcttattttaagtaattgccaccagttacttaaactgtgactggacaagccatttaatatttctgaataatctgagtatttgccactagtcagttaagccaccacagccttcaacagccatcaccctgataagtcagcagccatctacggtgaagaccsttcaccagcgaaaagattagaactggctgaaggctcagattacggttagcgttttatagcaataaattattttaaattaagat

SEQ ID NO: 44096 - DNA, 620 bp, Homo sapiens
tgaggccctcaactcttagaggctgcctgccataggaccctctccattagcagcttgcatcaagaagcttgcttcttgaaggccagcaggagagtctggcactcctttctcctaagatggagtctttataacatagcctaacatttgccattttatactggccagaagcctgtcacaggtcatgtccacgcttaaagggagaaaattccaataagatgtagatataggaggcagaaattacttatcagtctaaggtctgtttacaacagtatgtgtgtgctctaaaacatatatatgtaaatacgtagaagttggtatgtgccaatctcttatttatgtttattaacccatttcgtttttaccttatttaaaaattaaatgttattattctcattttacatatgagaaaactgaggcagagagcatttaagttactcatccaaagcacgcagctgggcagcagcagaataggtatgtgaatgcgataatttggccccagagtctatcttcttaacacattctgtggctcactgtgataatagcttactcttttatataccccctaartgctttacatactttaatatttaagcccctggtgattaaagaattttagtatg

SEQ ID NO: 44097 - DNA, 515 bp, Homo sapiens
ttaccatactttttaaagtaaaggataaaatattttacttgggaaatatgtcacatagtaaatttaccatttatttatttatttatttagagacggagtttcgctctttttgcccaggctggagcacaatgctrtgatctcagctccctgcaacctccgcctcctggttcaagtgattctcctctgcctctcaagtagctgggattagaggtctgtgccacgtgcctggctgattttttatgtttttagtagagatggggtttcaccatgttggccaggctggtctcaaactcctgacctcaggtgatctgcccacctcggcctccaaaagtgctgggattacaggcatgagtcgctgtgcctggcctaccttttatttgataaaagagtaagagacaaggagaaatagagacaaaggaggaaaaagaatggatgaaagaatggcacaaaaggaacacaaactcagagaaaaaagagatgagtgcaaggggacccgggggcagagagaagactca

SEQ ID NO: 44098 - DNA, 515 bp, Homo sapiens
ttaccatactttttaaagtaaaggataaaatattttacttgggaaatatgtcacatagtaaatttaccatttatttatttatttatttagagacggagtttcgctctttttgcccaggctggagcacaatgctatgatctcagctccctgcaacctccgcctcctggttcaagtgattctcctctgcctctcaagtagctgggattagaggtctgtgccacgtgcctggctgattttttatgtttttagtagagatggggtttcaccatgttggccaggctggtctcaaactcctgacctcaggtgmtctgcccacctcggcctccaaaagtgctgggattacaggcatgagtcgctgtgcctggcctaccttttatttgataaaagagtaagagacaaggagaaatagagacaaaggaggaaaaagaatggatgaaagaatggcacaaaaggaacacaaactcagagaaaaaagagatgagtgcaaggggacccgggggcagagagaagactca

SEQ ID NO: 44099 - DNA, 515 bp, Homo sapiens
ttaccatactttttaaagtaaaggataaaatattttacttgggaaatatgtcacatagtaaatttaccatttatttatttatttatttagagacggagtttcgctctttttgcccaggctggagcacaatgctatgatctcagctccctgcaacctccgcctcctggttcaagtgattctcctctgcctctcaagtagctgggattagaggtctgtgccacgtgcctggctgattttttatgtttttagtagagatggggtttcaccatgttggccaggctggtctcaaactcctgacctcaggtgatctgcccaccycggcctccaaaagtgctgggattacaggcatgagtcgctgtgcctggcctaccttttatttgataaaagagtaagagacaaggagaaatagagacaaaggaggaaaaagaatggatgaaagaatggcacaaaaggaacacaaactcagagaaaaaagagatgagtgcaaggggacccgggggcagagagaagactca

SEQ ID NO: 44100 - DNA, 571 bp, Homo sapiens
tcttccagaggtgatcagaagggtataaacggggaccctctcacatcctttgttctgaacacttgtgtctttatagatgtgacctatcacaaagacataaatgagggatcaagagcaccactagactccactggaatgcaggcttcatgcagcagagactctcgtgtcttgtttgcttctatattcccaggggctacaaatgcacagggtagataggtgctcaataaatatttctcaaatgaatcatggccagaggttctggtgggagatgaaaggtaaagaaatcatctaatgactctgaggaagcaaatatcaaagaataaaagcattgctcttaaaaacaaataccaccctggcaaagatagtttggctgaagaccatgtttttttgtagaagctctagaacccagaggattccaaaggggagagtccagtctctgggttggaaccactgaagatcagaagtcatgacagaggcagcaagggtctcgccttctttagacatrgaagccacttaccaggcctggagataagaaaagattcactccaaggaaatggaattatatatttgg

SEQ ID NO: 44101 - DNA, 571 bp, Homo sapiens
tcttccagaggtgatcagaagggtataaacggggaccctctcacatcctttgttctgaacacttgtgtctttatagatgtgacctatcacaaagacataaatgagggatcaagagcaccactagactccactggaatgcaggcttcatgcagcagagactctcgtgtcttgtttgcttctatattcccaggggctacaaatgcacagggtagataggtgctcaataaatatttctcaaatgaatcatggccagaggttctggtgggagatgaaaggtaaagaaatcatctaatgactctgaggaagcaaatatcaaagaataaaagcattgctcttaaaaacaaataccaccctggcaaagatagtttggctgaagaccatgtttttttgtagaagctctagaacccagaggattccaaaggggagagtccagtctctgggttggaaccactgaagatcagaagtcatgacagaggcagcaagggtctcgccttctttagacatagragccacttaccaggcctggagataagaaaagattcactccaaggaaatggaattatatatttgg

SEQ ID NO: 44102 - DNA, 500 bp, Homo sapiens
aagccatgtcacactgcaggactttcttctctaggatgggtgacacatttacattccgattcccaacccagggcctctagtgagcagcagatcaaggacagcaattgagtttcatcttctagagcaacccgggcttcgaggaggactgtgatgaattcctatgtccacccggggacagcgaggcrttcaggacaggcagcgccgtgcaaaggtgccctgtgtgtgccctcctggcaggagatgagtcatgaaaacgtcttgagtgtgtgaaggcaggaggggccgaatgccctgtggtgcactgctaggcgacacggcaggatggggccatctcagactttcactagtgggagttcccactggggtgaggctgaccccacaggagaatgacacagaagagactgcagccccttctcacatgacctcagctccgcggggccactggctcccgcccctctctgcagcagagggtctcacccagacggaacctcctggaacca

SEQ ID NO: 44103 - DNA, 500 bp, Homo sapiens
aagccatgtcacactgcaggactttcttctctaggatgggtgacacatttacattccgattcccaacccagggcctctagtgagcagcagatcaaggacagcaattgagtttcatcttctagagcaacccgggcttcgaggaggactgtgatgaattcctatgtccacccggggacagcgaggcattcaggacaggcagcgccgtgcaaaggtgccctgtgtgtgccctcctggcaggagaygagtcatgaaaacgtcttgagtgtgtgaaggcaggaggggccgaatgccctgtggtgcactgctaggcgacacggcaggatggggccatctcagactttcactagtgggagttcccactggggtgaggctgaccccacaggagaatgacacagaagagactgcagccccttctcacatgacctcagctccgcggggccactggctcccgcccctctctgcagcagagggtctcacccagacggaacctcctggaacca

SEQ ID NO: 44104 - DNA, 605 bp, Homo sapiens
acaaccggcacgacccccagagtccaccttctctctctcaaagagcttcttgtatggctgcttatctgttccaaggagtaccatgcataaggacagcagtatgattttaaaaacaacaaataaagagaagccagttctgtccaaaaacccattgttaataacggggataaagtgtcagtaaagcgctacactcagaagggtttggggcaaaatcaaagcagaaccagggcacacaaataaaataaaggacactgcactttgggaggccgaagcgggcggatcacctgaggtcaggagttcaagaccagcctggccaacgtggcgaaaccctgtctctactaaaaatacaaaaattagccaggcattgtggcgcgcatctgtaatcccagctactctcgaggctgaggcacaagaattgcttggacccaggaggcggaggttgcrgtgagccgagatcttaccactgccctccagcccgggcgacaggccgggagcaagactccatctcaaaaagaaaaagaaaaaaaagaaagaaaggacactgaatgtgaaggtctcaaatgacaagaaaataccgtaatacaataattaaacccattgaggca

SEQ ID NO: 44105 - DNA, 577 bp, Homo sapiens
ttttttgtttttaaaccagaactcagtgtaatttttaaatctggggaactgtgccttccttcatttccaaaaatttgcccaccatttttacttcaaaaatagctgctctcccattctctcttctttttctctggaaagcacattagattttatcgaagattcccttctctactccatgtctcttaaatgtccttccatatttttcatstcttcatttctgtggattctcacaattttccccacatcatctaccaatttactaagtctcttgtcggctatgtctattctatggttttacacatatgtatttccattattatagttgtttacattcttacttgattctttttcatgaccaagtctttttgccttctttttatctcatgtggttccttacctagacaatgctatttatcaacctccagttttgtgcgtactggaatgacttcctccttgtacccctttcttcctaacctgcctaacttcttagtacttcaagactcagctcaggtaatatctcctctagtaaaccttccttgaaccccagtctcacctctgcgctcccagatcaccctac

SEQ ID NO: 44106 - DNA, 576 bp, Homo sapiens
ttgcccccaagacacctgtattccagtgaaagaaggcaggcaatacacaaggaggcagagaagataataatcagattggcaaaagtgttaagaaagaaatagggaggatgatctggtacagtgcaatgaggggagctagaggacttctttagacagccatgtgtaccttagaatttgtacagtatacaaatggatagcactgtaagccctcacagcatcacccaggtacacttatttttatttccaagcatctgtggactttccccagcgctcacgctatgctatcatttgcccagaagattcactctccctatcccatcccccagccactctgtgatcattatctagaaatatgagycgtaccagctgactatgttctcagtagatcaagcttcctgaaatttcaaaaacattgattcatgtcattgtagcagatccttgaaactgttgtttctgtaatatctgtctctccctttctgactctaaaaaaataggtccatggaacaagaggctcatgcctggtgacaataaaggcgaatagagggggaaggatggagaagcagaaagaataagaca

SEQ ID NO: 44107 - DNA, 576 bp, Homo sapiens
ttgcccccaagacacctgtattccagtgaaagaaggcaggcaatacacaaggaggcagagaagataataatcagattggcaaaagtgttaagaaagaaatagggaggatgatctggtacagtgcaatgaggggagctagaggacttctttagacagccatgtgtaccttagaatttgtacagtatacaaatggatagcactgtaagccctcacagcatcacccaggtacacttatttttatttccaagcatctgtggactttccccagcgctcacgctatgctatcatttgcccagaagattcactctccctatcccatcccccagccactctgtgatcattatctagaaatatgagccgtaccagctgactatgttctcagtagatcaagcttcctgaaatttcaaaaacattgattcatgtcattgtagcagatccttgaaactgttgtttctgtaatatctgtctctccctttctgactctaaaaaaataggtccatggaacaagaggctcatgcctggtgwcaataaaggcgaatagagggggaaggatggagaagcagaaagaataagaca

SEQ ID NO: 44108 - DNA, 1739 bp, Homo sapiens
attgcttgattccctctgattgggaaaaacacccttcaagttggaatccactattatctccatggtttattcacttaacacaggctttcgagtgttaacagatatattcaatgaccagtgaaagcaagggtgtgccacttgcrtaaatttgcactaagaacttcaagaccagacggcatggaacataaatagcatggtcattgtggaaaccattggaagccagacagagatgtgtctgttttttgtttttttaatatattcttctatcttcactgatgtaattgttactgggtaatatactcttatttgctaacatttggaaaagtcaatgaaaaagagttttttgtttttttttttttaagaaaccaaaagagaattattcaaaaaaaaaataatagctctgatggctggactttttccccttcttctctcccatcttaaccagggagagaattttctctttctcatcaaatcatggtgactgtaatggcaaagagaattcctaagagacggtaaaatttttagttaaaaactcaaaggtggtggaagatcttctgcagattgattagctggcaaatattaaatcattctgtttaaaaactgtaatattgatgaatgtggccaaaagtgatgggagtcatagactgatgtagagacaaaggaagtgaggagagtgacggcggggaagacaatgaaaacctgaagacaaagaaatgcaattacaaatactagtgccataataatgattaagagagcaaatgtgagacagtaaaggaagcaaagaaggagttagcaatggaagagaaaagataaaggaaaaaaaggtaaaattaaaaaatgccagggtaggccatgacaacggaatcaaatcccaagcagaatctggaaaacaaatgatgaaacaccagaatagtattataagaaaacaaagtataattcttaagactgcaaaactagggcacccagtgtgactttggagagcggggaagttctggcagtctttctggaggaagcagcatctggctttagacaaaagtgataattaaataaaggtgagtcaagggaaaaaagacccataaatattgtatgagacattcaaaatagtgtgttccgtagccgggggtgaaagaaaacatactgcctttggggagttaagagtagttcacgggtggctaaagagtgagtgtgagggtggcaaaggtgagacataagtaaagccagatcacatggagtcttgtctctctgttaaagaggacatgaggagccacagcagagcgaccagatcattactgtgtctagaaagagtggagattgaattgctataaggacggactgaggagtcagggaccagttaggagattgctaaaatagtccaggtgagaggaaacaatagccaagggtactggtactgaaaatggaaagaagaagccagattccacagcactcaggaggtagaagttacagatatcagtgagaagacgagagaagtgttcagagtggtcccagagatgtctagcttgggcagctggtgggtacacggtgctttcattctctgaggtaggcgacctgggaagggaaagaggctgggaagtgggggtatgggaagatgataaagaaaggtgatgagtccaattctggaattgttgtgggcctgtagaacatccaagtccatcagtcttttccatgcttttcctgtaattccataaagatccctttgttcaataattctttgtgacatg

SEQ ID NO: 44109 - DNA, 590 bp, Homo sapiens
ggtataaatttctactaggcagtcacttgccaaattacatttccttaagaggacttccaatgtatcctttgacttggaaatgtgtgtgtgtgtgtgttttaagtgcttcaaggatattttattcaaggttttaaataatttcctgtttccataacttgttgttctgactctttttgcaatgtgtttgtcatgtctgaaactattgtttttctcagattttggcagggttgggggtggaatcggcagtggtgaatcttggctttaacttggcaaaattggcaatatttctggaaaacaaaatgaaaggtctagaggagcattttttkttttaaattgttgttgctgttttgcagggtgggctaacggaagagtagaaatgtagcaattctactttacagaaaaacagagtctgccttctgtattaagtgtaatctaatgtattaaattgatagaaatacacatggtgctaggtttctgttgaggaatgcagagttcggcacgtattctcagtcatctcattcacacattgcctgaagtttgagattagtaatcaaggggtggtttatttatttttgtttttctatacatgg

SEQ ID NO: 44110 - DNA, 512 bp, Homo sapiens
ttggyctgtgttcctagcttatggcttatttggacatacatttcttctgttaccacttcaaagcttttgtctagaaatcagactggtaaaataatatagaagggttttcccctatgatatccttttcctttgatacaaataattgaaaattgggtatgatagcataaaaggacttaaagtttgaaagttttaagaaagatttggagaatcaggagtaaaagagaacaaatgcacgtgagtatgaaatattattttgcccaaaatgctacttaaaatggatttgaatttaggtttattacagaagatggttacacattaggtctttgaagttctaacatccagatgttctttaaaaatctattttaaagttctaactggagattttagaataaaattgccagaatgtgaagaggtaaaagaaaagtcagattggaaggatgctacaaaaaataaacttcaccatcaatgaccaggcagtgtgaatggaagtcagatgggaaaggaaacagatg

SEQ ID NO: 44111 - DNA, 576 bp, Homo sapiens
atctgtgctatttcctctataccactgcaatcacctcttctccagcaggggataatagtaagtattgtgatgatatgtgattatatgctcagkgcagtctctatttatgcttatttttcactgtaattattcatcacacccccattcacagccaaaaatgacacaggcttgacaataaattttatggcatctacactattgaactccctaagccctcccatctctttataataattaaagaatctatcatataatgagcagttgtctcatgctttaaacagcctaactcctctttccaacaataccataaattagatattatttccacttcacaaactaggaaaggtttggcgagataaagaaatacagccaaagtaatataattagcaaatagaagagtcagcatgaaactagaatgtattagactatgaaatacatcttcttagagagtgtgttattctgcctccctctgaagaggagcaggtcctgctgttgctacagggaggtgatgggattttgactactcttcattgtatgtggctgagactgtgcttttaggcacatgacttcacataa

SEQ ID NO: 44112 - DNA, 1282 bp, Homo sapiens
cagctagctgggagaggaaaaaagccctgatttgtggtgtttgccaatttctgcaatacaaatattttcaccgtgactgatttcaagctatcaatcatttgacaacaggcctgcaaaagtcctaaatatttaacaataagcttttataagccagtccaagccagtaccagcacactactgaaccactgatacttttacatactgaattcttatgttggaataatgttacttctttagctgtcccacaaatatgttcattcaattaaaattcatccattaggagagtatctttatgtaagacttaagtgcactttacaatagaggttataataatttgagtcacagactactttgaggagctaagcaaggctatatacattttctctccaaggggggaaaagtactaagaattttgaatataatttcaggagattcttggatctccttacatttgttcatgggtgtcagctttaaaacgcctgctatttctttgagctagagaaactaatgtgacaggcaacattctgaatgtcattgcttcagttcactaagcttatagattactggagtgctaaaaagtcactatctcattgcaaaagagttaagttaccaatacagtcatgtgtcacttagtgatgaggatattttctgagaaacgcatcattaggcaattttgttattgtgcaaacatcatacacaaaatagctggtatagcctactacacacttaggttatatggtaaagcctatgtctcatagggctacaaatttttacaggaatgttcttgtattgaatactgtaaataactgtacacgatagtaagtatttttgtatctcagacatatctcaacatagaaaagttacagttacatatgtgatattataatcttatgggaccaccttctacatattagtctgtggtctactaatgackgaaacattgttatgcagcacatgactatattttattaatcatgtttactgtgtggactcttctatcattattctaaaactcagagatcacaaggaattcataaaaagatcatgaggtcaatttaattaacctcattagaagcattaaacaatttaattttgttttctccctttgttctatgaattttatatgaaccattacataagctaactctagaacttgtgatattttaattttcattttgaaatacatacttcctatatgtatatatgtacatgtgtagatgtatgtataaacaaaaactcagccaacattattttattctttttttttctttttgaatcttat

SEQ ID NO: 44113 - DNA, 1282 bp, Homo sapiens
cagctagctgggagaggaaaaaagccctgatttgtggtgtttgccaatttctgcaatacaaatattttcaccgtgactgatttcaagctatcaatcatttgacaacaggcctgcaaaagtcctaaatatttaacaataagcttttataagccagtccaagccagtaccagcacactactgaaccactgatacttttacatactgaattcttatgttggaataatgttacttctttagctgtcccacaaatatgttcattcaattaaaattcatccattaggagagtatctttatgtaagacttaagtgcactttacaatagaggttataataatttgagtcacagactactttgaggagctaagcaaggctatatacattttctctccaaggggggaaaagtactaagaattttgaatataatttcaggagattcttggatctccttacatttgttcatgggtgtcagctttaaaacgcctgctatttctttgagctagagaaactaatgtgacaggcaacattctgaatgtcattgcttcagttcactaagcttatagattactggagtgctaaaaagtcactatctcattgcaaaagagttaagttaccaatacagtcatgtgtcacttagtgatgaggatattttctgagaaacgcatcattaggcaattttgttattgtgcaaacatcatacacaaaatagctggtatagcctactacacacttaggttatatggtaaagcctatgtctcatagggctacaaatttttacaggaatgttcttgtattgaatactgtaaataactgtacacgatagtaagtatttttgtatctcagacatatctcaacatagaaaagttacagttacatatgtgatattataatcttatgggaccaccttctacatattagtctgtggtctactaatgactgaaacattgttatgcagcacatgactatattttattaatcatgtttactgtgtggactcttctatcrttattctaaaactcagagatcacaaggaattcataaaaagatcatgaggtcaatttaattaacctcattagaagcattaaacaatttaattttgttttctccctttgttctatgaattttatatgaaccattacataagctaactctagaacttgtgatattttaattttcattttgaaatacatacttcctatatgtatatatgtacatgtgtagatgtatgtataaacaaaaactcagccaacattattttattctttttttttctttttgaatcttat

SEQ ID NO: 44114 - DNA, 1282 bp, Homo sapiens
cagctagctgggagaggaaaaaagccctgatttgtggtgtttgccaatttctgcaatacaaatattttcaccgtgactgatttcaagctatcaatcatttgacaacaggcctgcaaaagtcctaaatatttaacaataagcttttataagccagtccaagccagtaccagcacactactgaaccactgatacttttacatactgaattcttatgttggaataatgttacttctttagctgtcccacaaatatgttcattcaattaaaattcatccattaggagagtatctttatgtaagacttaagtgcactttacaatagaggttataataatttgagtcacagactactttgaggagctaagcaaggctatatacattttctctccaaggggggaaaagtactaagaattttgaatataatttcaggagattcttggatctccttacatttgttcatgggtgtcagctttaaaacgcctgctatttctttgagctagagaaactaatgtgacaggcaacattctgaatgtcattgcttcagttcactaagcttatagattactggagtgctaaaaagtcactatctcattgcaaaagagttaagttaccaatacagtcatgtgtcacttagtgatgaggatattttctgagaaacgcatcattaggcaattttgttattgtgcaaacatcatacacaaaatagctggtatagcctactacacacttaggttatatggtaaagcctatgtctcatagggctacaaatttttacaggaatgttcttgtattgaatactgtaaataactgtacacgatagtaagtatttttgtatctcagacatatctcaacatagaaaagttacagttacatatgtgatattataatcttatgggaccaccttctacatattagtctgtggtctactaatgactgaaacattgttatgcagcacatgactatattttattaatcatgtttactgtgtggactcttctatcattattctaaaactcagagatcacaaggaattcataaaaagatcatgaggtcaatttaattaacctcattagaagcattaaacaayttaattttgttttctccctttgttctatgaattttatatgaaccattacataagctaactctagaacttgtgatattttaattttcattttgaaatacatacttcctatatgtatatatgtacatgtgtagatgtatgtataaacaaaaactcagccaacattattttattctttttttttctttttgaatcttat

SEQ ID NO: 44115 - DNA, 583 bp, Homo sapiens
attaaagtaaatttcagataaatcacttgttagtgatgattttttctcctataacagttcatcgatcattgtaatagtgtctcttgtttacttgtttcttttgtcttctccgaaagaatgtaacctctgtgagaacagaaaccttgatgaggaggatgataatagtcagtgttaattaagtactttcttttctggaaaacaggtagagttgtctctcttggaggattgtgaatatcaaatggcttattagcaaaaagagctgggaggtaggaactagttgagttagtggaaaaggaaagtgagggcagagctgaggtgaagagcaattgggtttctcagagtctgagytggtaatggagacagggtgggttagaaccatattaatcatgtgaaagtatttagtgttaccattctctgcacttgttccttgcttgctaacttttgcttttgctggttaatgttttcttccttgaaatgtaatttttctgagtttattactgaaataactcttgaaatcttgtctttggtacagtgtctttcctgacactgcattacacacagacacaggtgtttttccctatat

SEQ ID NO: 44116 - DNA, 643 bp, Homo sapiens
actttgaaaatagaagccaaaagcccagaatatcatcttgcagccccaaatggcttggcttggtgccmattcaagccacagaagcatggaggacagttggtgaggaggaaacagggatagccaatatcaagaaactcattctaggggcactggtgaggggatccatagaaaactcagaggctgcagtcaggagtgaaacactgggtagttggggagaagacccctgcactcacaaagaggggtacagttcctttacaaatactttggcctgcagatggctagtagctggacacatggtggtatggggaaggaagggacagcctctttttctgtgctagtctgttaagagcagcaagaagctacaaggctcaccggtcacccttggacaagtgggaagacagctatggaacttagataggaacagcatatagaggctgtccgccacagaggctggaaggcagattcgttcaatgttgctggctctagtaaaacaaaagctctccaaaagttacgaggcaccatggttcagccctactctaactctttcctgagccacatctggacagtgctttcactattcataactaggactggactgagctttggaactgggagtcaagcagctgcctgaaagctgcatgca

SEQ ID NO: 44117 - DNA, 643 bp, Homo sapiens
actttgaaaatagaagccaaaagcccagaatatcatcttgcagccccaaatggcttggcttggtgcccattcaagccacagaagcatggaggacagttggtgaggaggaaacagggatagccaatatcaagaaactcattctaggggcactggtgaggggatccatagaaaactcagaggctgcagtcaggagtgaaacactgggtagttggggagaagacccctgcactcacaaagaggggtacagttcctttacaaatactttggcctgcagatggctagtagctggacacatggtggtatggggaaggaagggacagcctctttttctgtgctagtctgttaagagcagcaagaagctacaaggctcaccggtcacccttggacaagtgggaagacagctatggaacttagayaggaacagcatatagaggctgtccgccacagaggctggaaggcagattcgttcaatgttgctggctctagtaaaacaaaagctctccaaaagttacgaggcaccatggttcagccctactctaactctttcctgagccacatctggacagtgctttcactattcataactaggactggactgagctttggaactgggagtcaagcagctgcctgaaagctgcatgca

SEQ ID NO: 44118 - DNA, 583 bp, Homo sapiens
ctttaaaatttggtaaaatgctacattatccttaaagtatattttcaatgcccatttcatccaaaggagtttttcttttgtaaatcccaattcctctttatctgtatctctcaaaagaaaaacctsagatctattttgtactatttacttgtgtgcagtgttgttaatagtatacatttttattatcattatatttcccacattacctaaaaagttacttcgaatatcacactgttggcattcattttgttgaaaaaacaaatgaatgaataaatggatgatcactcaaaggataataatgatgtaaaaccagtgtaatgtattagaatactaactgaaccaggagttaagatatttagctcaagcctcttttctgctgttaagtcaagtatgacctcgaatgaatttctcctttataccaactatttttgtatgattattgggtgagatattttaagactttttctatacatatgaaatttgaaacacaataattagctgttttttgactaaattatcttatagcttcaaacagtatttttctgtgtcttaggatctatttctacctaatcaagtcttgatg

SEQ ID NO: 44119 - DNA, 583 bp, Homo sapiens
ctttaaaatttggtaaaatgctacattatccttaaagtatattttcaatgcccatttcatccaaaggagtttttcttttgtaaatcccaattcctctttatctgtatctctcaaaagaaaaacctcagatctattttgtactatttacttgtgtgcagtgttgttaatagtatacatttttattatcattatatttcccacattacctaaaaagttacttcgaatatcacactgttggcattcattttgttgaaaaaacaaatgaatgaataaatggatgatcactcaaaggataataatgatgtaaaaccagtgtaatgtattagaatactaactgaaccaggagttaagatatttagctcaagcctcttttctgctgttaagtcaagtatgacctcgaatkaatttctcctttataccaactatttttgtatgattattgggtgagatattttaagactttttctatacatatgaaatttgaaacacaataattagctgttttttgactaaattatcttatagcttcaaacagtatttttctgtgtcttaggatctatttctacctaatcaagtcttgatg

SEQ ID NO: 44120 - DNA, 583 bp, Homo sapiens
ctttaaaatttggtaaaatgctacattatccttaaagtatattttcaatgcccatttcatccaaaggagtttttcttttgtaaatcccaattcctctttatctgtatctctcaaaagaaaaacctcagatctattttgtactatttacttgtgtgcagtgttgttaatagtatacatttttattatcattatatttcccacattacctaaaaagttacttcgaatatcacactgttggcattcattttgttgaaaaaacaaatgaatgaataaatggatgatcactcaaaggataataatgatgtaaaaccagtgtaatgtattagaatactaactgaaccaggagttaagatatttagctcaagcctcttttctgctgttaagtcaagtatgacctcgaatgaatttctcctttataccaactatttttgtatgattattgggtgagatattttaagactttttctatacatatgaaatttgaaacamaataattagctgttttttgactaaattatcttatagcttcaaacagtatttttctgtgtcttaggatctatttctacctaatcaagtcttgatg

SEQ ID NO: 44121 - DNA, 596 bp, Homo sapiens
agtgcagtggcgcaatctcagctcactgcggcctctgcctcctgggttcaagcgattctcctgcctcagccacctgagtagctggaattacaggtgcgtgccaccatgcctggctaatttttgtatttttagtagagacagggtttcaccatgtaggccaggctggtctcgaactcctgacctcaaatgatccaccagcctcggcctcccaaagtgctggattataggtatgagccaccatgcccaccagaaagggtctttaagagtataaatgagagacgcagaggctggtgctcagttgagagcagtgaggttggacggaaaggaagagacaggaaggtaacagcaggaagactcggtgactggttggatgtgcactgtgasggggcaggaggagtccagaatgactcctaactttctgtgctgggcaagtgggtggtggatggaaccaccagctgaaacagggcctttagggaaatgaagagggagtgggagaatgatgaaactggactattgaggtggaggtgccaggaggcagggatcggcaggcagaggagaactccagggagaggctcttccctgctccctaggaaatg

SEQ ID NO: 44122 - DNA, 611 bp, Homo sapiens
ggtcatgatctggtttgtccaaatccaccttaactctkaaagcaataataaatataaattttaaattctaaatgaaagagaggaaggggtctcttcataagtgaaaacattccttaaacaaatgaaagcaaacagaatttttttcatggacctgtattttcatttttctgaccattatacgattttcctagcaatataaaagaattctgcagtccctccctatttagttgttggaagagaaaaatacattaaatcttaattagtatactacctatagtagcatctggtgttactgaatttttaccatcttctgaaagcagtaatcattctttacctggaggaaaagattccagtaatctgttttattaggaaacttttctagccttcctttcagttacgggatttattgaaaactacctcatatacatatgcacatatacccatatatgcatatgtatatatacatgtgtgaatacatatatggctatagatctgtgtgtatgtacacatatagacacgtgtgtatgtttttgtgtgtatatgtttttatgtgtatctgtatgttcctttctaaatagcattctatttcataccttggaaaaatataaaat

SEQ ID NO: 44123 - DNA, 611 bp, Homo sapiens
ggtcatgatctggtttgtccaaatccaccttaactcttaaagcaataataaatataaattttaaattctaaatgaaagagaggaaggggtctcttcataagtgaaaacattccttaaacaaatgaaagcaaacagaatttttttcatggacctgtattttcatttttctgaccattatacgattttcctagcaatataaaagaattctgcagtccctccctatttagttgttggaagagaaaaatacattaaatcttaattagtatactacctatagtagcatctggtgttactgaatttttaccatcttctgaaagcagtaatcattctttacctggaggaaaagattccagtaatctgttttattaggaaacttttctagccttcctttcagttacgggatttattgaaaactacctcatatacatatgcacatatacccatatatgcatatgtatatatacatgtgtgaatacatrtatggctatagatctgtgtgtatgtacacatatagacacgtgtgtatgtttttgtgtgtatatgtttttatgtgtatctgtatgttcctttctaaatagcattctatttcataccttggaaaaatataaaat

SEQ ID NO: 44124 - DNA, 550 bp, Homo sapiens
gaaaaataagttctttacctatgacgaatgattgtgaaaagaaaaatcctaacactataaacacttggacaagatcgtatagtaaataagtaaaacctggttttgaaataaggtggcagtgataaaggtagtaagaagtggttgcatttagcatatattctgaaagtagaaatgacaggatttgttgatagactgtatgtggaatataaacacacagatcaccacagactattcataaatgctgactagataaacaatgtctaatagtaagtttgtaatgtgatctattacttgtcaacaaatatacccttattgagcagttttcaaaatactgaacgtatgctctataatattacttagattgtatttcacaacttcctctgctatcatccctaccatcaatgacttttaaaatataattatcttcctargaaaaagatctataaacacacatataaacacataagtatgcctgtatatgtgtgcttgcgtgtatatatatgtatatatatatataaatacatacataatttaacagaataaaatgctt

SEQ ID NO: 44125 - DNA, 1306 bp, Homo sapiens
agtactgcagtgttgaggtagaatttccttcctcaaggaaacatcagtttttctccagggactttcaactaattagataaagcccactcagattattgaggaaaatctcctttacttaaagtcaactgactgtacgtggtaactacatctacaaaatactgtcccagcaacacctagattagtgtttaattagataactagatactatatagcctaaccaagctgaaacaaaacattaatcgtcataattgccaagctccatttattaaggtttgcaaaatggtaatattttataatcatactctaattccctcatttattagttgagatactgtgagaaactttcctatcatcatttatttgaataaatgcttggttatttcctgatatgtattgggtttcaaattaagttgatcctttagtatcctccaaagatgagtaaggttttcatttgtttttgctgttgttttgtttttaagtgctgtacagcagttccccctcattttcagtttctggtttcagttatccatcatcaactgaggtcagaaaatattacatacaataaaatattttgagagaaagggcacattcacataacttttattatagtacattgttataattgttctattttattattagctgttgtggttaatctcttactgtgcctaatttataaattatcataggtatgtatatataggaaaaaacatagcatatatagggttcagtactatccacagtttcaggcacacactggaagtcttgagctgtattccccagggataaggggggattaccgtatatttacacatttgtgtattctacatgcttaacatattttaatccattaaagttaatattcttattaaggtttatagtcctatctttggtcagttggcacctcattaaatcggtgactgccatgattgcagttgtctttgatagattcctagacttctgaaatgacaaattattacaggttcattttgtatatttcctaccacagacctggaatcagctacttcttccaggggccctagttttttttttcttttttcaggaatgagatcacagcctggttgttaggggtttttaatgctcttggtttgatgattgtttctgggcgcctgcwgttcagtggacagtgctaggaaacattttttcatggttattttaaataaaagcctgtataatgatacttccaattcatgtttaggactttgggagttttcacttaatcttattgatcttaaatctttatgtttttctccaacactggaaaccttggttgccatcagcacca

SEQ ID NO: 44126 - DNA, 626 bp, Homo sapiens
gcttctgaggaatacaaattgtgaattagatggatcctatttctctggctgtaatgctatttgaaatattttaaatattaacaacagtgtgtttctctcctagagtgcatgctactgcatctctcaaaaatgacttgtgtaactgagctgctgatgaaagcaatggtggccttctataatggttgtcattgattgagcttctacaatggactagtctctggatttaatgcttcatgtaacttatatctaatcttcaaaactctttaaggtaaatattatcttcacttcaccatgaggaacagttgggtgactaacttaattaaggtcatgatccaatgaaggtcacggctaagamgaattcaaactcagatctttcagactaatacatcatgccataggttctctagcttgatcttacatcagaatagtctggtggactttttaagacccagatcgttatgccccaccctcagagctcttgattcagtaagccttggggaggttctgacttcgtacatttctctgaagttcacaggtgacgttgatatttgcatttcctgaaccacattttgaatcctatcattttcctgtactatatgctctgagttagaaggtaggacctggga

SEQ ID NO: 44127 - DNA, 626 bp, Homo sapiens
gcttctgaggaatacaaattgtgaattagatggatcctatttctctggctgtaatgctatttgaaatattttaaatattaacaacagtgtgtttctctcctagagtgcatgctactgcatctctcaaaaatgacttgtgtaactgagctgctgatgaaagcaatggtggccttctataatggttgtcattgattgagcttctacaatggactagtctctggatttaatgcttcatgtaacttatatctaatcttcaaaactctttaaggtaaatattatcttcacttcaccatgaggaacagttgggtgactaacttaattaaggtcatgatccaatgaaggtcacggctaagacgaattcaaactcagatctttcagactaatacatcatgccataggttctctagcttgatcttacatcagaatagtctggtggactttttaagacccagatcgttatgccccaccctcagagctcttgattcagtaagccttggggaggttctgacttcgtacatttctctgaagttcacaggtgacgttgatatttgcatttcctgaaccacattttgaatcctatcatttycctgtactatatgctctgagttagaaggtaggacctggga

SEQ ID NO: 44128 - DNA, 550 bp, Homo sapiens
catctgaaaatctgatcatatccccagtaccctattgccacaccaaccatcatccaatggttccccattgcatttggtataaagatcaacatcctcaaaagagccgacaaggcccaatgtggtctcacctgaccctactcttatcttgaaccttgtattctctgttcaaccctcactggccttctcccaggagataatacttcccatgcttcttttcaccacagcaccactatgaatgcacttcctcagtctctaacactcctgtctccctatatgcctaggtaactcctcctactcatcctctggacctcatctccagcattttttcttttttcagggaagccttttctcatctctctgacaaggcccaatayctctagtgtaaattgtcatgacaccgtgtgacttaactttttagcacttaccacgattgcaactttaaagttgtgtgataatctaatcatctaataattacccattaggctacccagtgtctgttttgttcaccagtatgtccccaacacccagcacactacctgatacatagtga

SEQ ID NO: 44129 - DNA, 597 bp, Homo sapiens
tgctaacttgagtttmtctcttaacacagcgtatgatatttaccttaattagcacatgtgaccttcccaagtttccatgttcgtttagtgagtggtagagtcaggactggttcctaggtggtctgacttcagagtgcatgatcttcactaacccataggctgtaccgcctttccagaattcttttttttttttttttttttcgagatggagtctcgctgtgtcgcccaggctggagtgcagtggcgcgaactcggctgactgcaagctctgcctcctgggttcacgccattctgccacctcagcctcccgagtagctgggactacaggcctccgccaccacgcccggctaattttttgtatttttagtagagatgaggtttcaccatgttagccaggatggtctcgatctcctgaccttgttatctgcccgcctcggcctcccaaagtgctggaattacaggcatgagccactgcgcccggcccgcctttccagaattctgtatcagtctgtcctggtcatgcaaggactggcccatggaaaggcgggaaaggatttctgccccgagcctgtttccttctcccttaatatgtgtttg

SEQ ID NO: 44130 - DNA, 595 bp, Homo sapiens
tgtgtgacacatggtcatgcagcaatcttggttaatggcagttgagagaaaatcaaagatgcttcttccttggcaaccttattgaaaatgggactgcttccttccttcatcacaagcctactccatatcctgctttgttttcttcataatactcacctgtctctayttgaatgcaaattgtgggaggccagggacttactgttcagtgctgtatcctaggtgcccaggatcatgcttgcccagcactctgtagaggttgtgtattgttgggatgtagcagtcaggcagtcgggtgtgttaccactaaaagtaccacatttgtcattgcttaaaaaagggatttcagtgcttttgattactgacccggattccctagaaagttgatcctgaaactacttctgtgcttctgtgtattggggaaaggggtaaacgggacagcaagggtgaggggataaagtgagacaggaaaagaagttaggtgacttcagctgctcacagctttaccagaaaaaaacacaactgtttatcgtggcaggcaaaatgaaacactattaaaacactttgtgaaggggggtagatcaaatcttccattcta

SEQ ID NO: 44131 - DNA, 595 bp, Homo sapiens
tgtgtgacacatggtcatgcagcaatcttggttaatggcagttgagagaaaatcaaagatgcttcttccttggcaaccttattgaaaatgggactgcttccttccttcatcacaagcctactccatatcctgctttgttttcttcataatactcacctgtctctatttgaatgcaaattgtgggaggccagggacttactgttcagtgcygtatcctaggtgcccaggatcatgcttgcccagcactctgtagaggttgtgtattgttgggatgtagcagtcaggcagtcgggtgtgttaccactaaaagtaccacatttgtcattgcttaaaaaagggatttcagtgcttttgattactgacccggattccctagaaagttgatcctgaaactacttctgtgcttctgtgtattggggaaaggggtaaacgggacagcaagggtgaggggataaagtgagacaggaaaagaagttaggtgacttcagctgctcacagctttaccagaaaaaaacacaactgtttatcgtggcaggcaaaatgaaacactattaaaacactttgtgaaggggggtagatcaaatcttccattcta

SEQ ID NO: 44132 - DNA, 643 bp, Homo sapiens
gcttggttttaatttttagttgacacaataattatatgtatttatggagtacaatgtgatgttttgatacatgtaaaaaaaaaaaccttgttaacacaaacctctctattatctccttaaaaatatataaattgcatgctaaaaatgtgaacagatatatgcaatgcaactatggttatctctggatggtcacaattactgggaaatttcttttgtttgcacttatctgcatttcgtgaactttctataatgagattatgttgctgttgtcctctataccccacccctctctgcccctttccacatttcagtgactctgaactggctaatcccacagctctgcccctcagctggggcccagaattctaaggaactgccaaacaccaaacccatactccttaggaatgggctggggtagggcctctccagaaggcctcgtctaactggcaatagcacattctttccatggacatttccagaaaaacctcagtcaaaagcgagaatgacaggaatctgaaatagaccatctatcaggcagracaccgtggggctccaaatctgagcaagaggccccctcaaagcaacacctccagccatttactgagcatttaagctctactcctcactggaaagctgtactaaa

SEQ ID NO: 44133 - DNA, 1450 bp, Homo sapiens
  misc_feature (1)...(1450): n = A,T,C or G
tgcatttaaaaactctataacttgtttaatttttctctgaagttttattatgaaaaatgtcaaacattccaaaaagttccatgtaaaatcttttaaatgtttttaaatgcccatgctatatttccaagtgaaaaaaaataggttacaaaaccaagaatacactatgacctcatttgtatataaatatacatagggatttttaaaatctacataaaatattaagttcatggtaaatgctcactccctcaatgccagctattgttgttatctgaaggtaagcagcctgatgataaaggggtccccaaacccaagcatcctgacttcttccaagtccacagcttcccttagttcggataagggtccatctaaggccaacagggcagttgacagcttcctcccattcattttaccccgtgctcctgctgaagagcagccaggagaaatnnnnnnnnnnnnnnnnnnnnnnnnnnnnnnnnnnnnnnnnnnnnnnnnnnnnnnnnnnnnnnnnnnnnnnnnnnnnnnnnnnnnnnnnnnnnnnnnnnnnattgttgcttctactggctctaagacaattgttgcaaatctcaaaaaagttttccaataattttttttttttaaatccatatgtggctgggcatggtggctcatgcctgtaatcccagcacttgggaagctaaggagggtggatcccttgagtccacgagttcataaaccatcctaggcaacgtggcaaaaccctgtctctacagaaaatacaaaaaaattagccagacatgatggcacatgcctgtggtcccagctacttgggaggctgaggtaagaggatcacctgggcctgggaggttgaggctgcagtgagctatgattgtgccactgcaatccagtctgggtgacacagtgagaccctgtctcaaaaaaaaaaaaaaaaagtaaaaatccacatataagtggacccatgttgttcaagggttaactgtactagcttttggactagtaataatttttagtctcttaaatcatgcaggaaacaaagaatgtggttacagataattcttacaagaatattagctttaaaaattgcccatgttttacctttgctgagatctttatttcttcatatagcttcatgttattgtctagtgtcctttcatttcaacctgtaggactccctctagtttttttttttgcaggrcaggtctagtggtcacaaactccctcaacttctatttatctgggaatctctttttttcagttgttaaattttaatcaaagcttgtgtataagattactttattcctgcatcttctcaattgtttcttccttgtgtttgaccttttcctttcccatttggtgagatttggctttccattcaaggatctttttgtggtctttgtctgtttttagcctagtgataaccaccttgctggggtgaatgcatatgtggacagtg

SEQ ID NO: 44134 - DNA, 606 bp, Homo sapiens
gcaactatataatgcattatcaagtatgtgaacaaaaactacacaagtaaagacagtacaagatgacatacctctcagagaataattgtcaggttttggtagtaggtggtggtcttcctcctttttccccctcaatcatctgttgctgttactttaaatatgaaatgaaaacatcactcagccacaggatcagactagcatgtaagaatggggtcctactgaccaaacatgacaacttttcagtagaatgattagaaggcaggactgggtgaggaggttgatgatgttgtgcacacctgaagaaagacacttcttatccattctcaatttttccattgcacaatgaatattgtagaaataatgcaagttgtaaaaatgaaactatgtggaagatatgactcrgtgcagtgaataagatcccagctttggaatcagagaggttggattgaatatcctatccacgacctctagagtctaatggagcaccaggcttacatttttacaatgtaagtcaggccatgtcactcttctgcccagaatcttcttttggctcaccatctttaaaaaataaaatttaaaatccttgcaaggtctgatagtacccta

SEQ ID NO: 44135 - DNA, 563 bp, Homo sapiens
gactttgaacaaacctcagaaggaactgtcaaggaggctccccacgggttcaygctcttctctcctcctgcacacagggaacagggccattctccttcctttactgggactacctgggcttcatccagggaatccccaggtggcaacaggagggtggtgaaaaccgctgcccgtcacctgtaaagtttcctgtgaatgtgtctacagcggccagcaccacaaggcatacaaagaaagggaagggagagctgatgtgagagcggcagcgtgggcactcctgtgaggttgccacagctgtagacaagttaaatcagtgcagttcaatcaaaagtcatgacccatgagcgtcacaaccagcacgagtctacaaaggaatacattaaaactaagaccagagcacagctcacattagtgagggatgggatcatttcatggagtttttgtttcaaaatatttcattaacatttcacttatatacatgtgtgtatactgggttgtgatttaaattacaattcttactataaaatacagcaaaagaaagaagaaacaaagagagggccact

SEQ ID NO: 44136 - DNA, 556 bp, Homo sapiens
cataaactactctgtttcaggtagtttttttgtttgtttgtttgttttttggggttttttttgacagagtctcactcttgtcgcccaggctggagtgcagtgrcgcgatctgtgctcactgcaacctccgcctcccatgttcaagcaattcttctgcctcagcctcccgagtaactgggattacaggtgcctgccactacaaccagctaattttttgtgtttttagtagagacggggtttcaccgtgttagccaggacagtctcgatctcctgaccttgtgatccacctgcctcagcctcccaaagtgctgggattacaggcatgagccaccgtgcctggcctcaggtatgtctttatagcagtgtgaaaataaattaatacaaaggtcaactccttattttgctatttggcctcggacctaattgtctggctgtagctgtatgtttttctcctgtggtatggggcactgtgtgagtttaagcaccaattatatacatctacttgctcttctgtataattcaataccacctaacagaaatctaactttaaataaat

SEQ ID NO: 44137 - DNA, 556 bp, Homo sapiens
cataaactactctgtttcaggtagtttttttgtttgtttgtttgttttttggggttttttttgacagagtctcactcttgtcgcccaggctggagtgcagtgacgcgatctgtgctcactgcaacctcygcctcccatgttcaagcaattcttctgcctcagcctcccgagtaactgggattacaggtgcctgccactacaaccagctaattttttgtgtttttagtagagacggggtttcaccgtgttagccaggacagtctcgatctcctgaccttgtgatccacctgcctcagcctcccaaagtgctgggattacaggcatgagccaccgtgcctggcctcaggtatgtctttatagcagtgtgaaaataaattaatacaaaggtcaactccttattttgctatttggcctcggacctaattgtctggctgtagctgtatgtttttctcctgtggtatggggcactgtgtgagtttaagcaccaattatatacatctacttgctcttctgtataattcaataccacctaacagaaatctaactttaaataaat

SEQ ID NO: 44138 - DNA, 556 bp, Homo sapiens
cataaactactctgtttcaggtagtttttttgtttgtttgtttgttttttggggttttttttgacagagtctcactcttgtcgcccaggctggagtgcagtgacgcgatctgtgctcactgcaacctccgcctcccatgttcaagcaattcttctgcctcagcctcccgagtarctgggattacaggtgcctgccactacaaccagctaattttttgtgtttttagtagagacggggtttcaccgtgttagccaggacagtctcgatctcctgaccttgtgatccacctgcctcagcctcccaaagtgctgggattacaggcatgagccaccgtgcctggcctcaggtatgtctttatagcagtgtgaaaataaattaatacaaaggtcaactccttattttgctatttggcctcggacctaattgtctggctgtagctgtatgtttttctcctgtggtatggggcactgtgtgagtttaagcaccaattatatacatctacttgctcttctgtataattcaataccacctaacagaaatctaactttaaataaat

SEQ ID NO: 44139 - DNA, 1609 bp, Homo sapiens
cttctcaataccaacatccaatgtgaactcaaccccagaatttggcccaatctcaacccaactatgtcttcccctcaatgccaacacccaatgtgaactcaaccccagaatttggctcaatcccagtcgaaccatgtcttcccctcaatgctgacacccaatgtgaactcaaccccagaatctgattcaatcccaacccaaccatgtcttcccctcaataccgacacccaatatgaactcacccccagaatctgattcaatcccgacccaacygtgtcttcccctcaatgccaacacccaatgggaactcaaccccagaatctggcccaatcccaacccaaccatgtatttccctcaataccgacacccaatatgaactcaaccctagaatttgtctcaatcccaatccaaccatgtcttcccctcaatgctgacacccaatgtgaactcaaccccagaatctgattcaatcccaacccaaccatgtgttccccctcaataccagcacccaatgtgaactcaactccagaatcctgcccagtcccaacccaaccatgtctttccctcaataccaaaatccaatatgaactcacccccagaatttggctcaatctcaactccaaccatgtcttcccctcaatgccaacatccaatatggactcaaccccagaatctggttcaatctcaacctcatgctcaactttgatctgcccctctatatcgatgtccaatatacactcaaccttaaaatcagactaaattccaacctaaacccagctctgaacccccacttcagccccagtctcaactctactcatgaccttaacctcagttctactcaaaccttatctccagccaggtgcggtggctcatgcctgtaatcctagtactttgggaggccaaggcgggtggatcacctgaggtcaggagttcaatatcagcctggccaaaatggtgaaaccccatctctactaaaaatacaaaaaaaaaatttgctgggcatggtggcgggcccctgtaatcccagctacttgggaggctgtgccaggagaattgcttgaacccaggaggcagaggttgcagtgagccaagatagcaccactgcactccagcctgtgcgatagagggagactccgtctcaaaagagggaaaagaaaaaaaaaaaaaaaaagccaggcacagtggcacacacttgtaatcccagctattcaggagactgaagcaggagaattgcttgaaccagggaggcagaggttgcagtgagcagagattgcgccactgcactccagcctgggtgacagagtgagactccttctcaaaacaaaacaaaaaacaaaaacaaacaaacaaaaacaaacaaacaaacaaaagccttatcttcaaatctcttaaccaagccctgacccagacctgtccttttttgtttattaccatacaataggaacatacggccctatccttaaccccaactctgacccaactcttccaatgctgaccccagacctgaactcaaactttgaatatgaccctgggcccaacctcaaacccaaccctaaattccatctcaaccccagttgaaccctgcccaagaactgaacctcaactgcaa

SEQ ID NO: 44140 - DNA, 603 bp, Homo sapiens
cctctggatggggaaagtgaggcacacgcaggaggcaaaggccacacgtttctgccctttccctcccccaatctccttgaccacaggtgaaaggggcgtttgtaggactaaggaggcctggccttcttgtgaatctgcctacctctgtgaggagtggttgcagggccagctaggagggcagctgggacagctgggtatgcaggagacagcgcctgtgcccacggtgtctgcaccaatcctctcaggcactgtcaactgtgagcattcctgaccatcagccckcatgtcagagatggtgtgagagggaccgcatggccgtctccaggcatctctgtgttttcctgatggtcaggctgagtacatggctgtctttgtgctgcctgaatattgtttatttcagcaaatatttactgagcacctaccatgttccaggccctgggaagacagcaatgaatgagccaagtctctgccttgcagaggctgaggaactgagggaagttgtggtgtagagagacaaaaaaaaaaaaaaaaaaaaaaaatcaagacacattaaaaacaatgtaaaatagtataatacgtaggggtgggtacgatggagaaaat

SEQ ID NO: 44141 - DNA, 603 bp, Homo sapiens
cctctggatggggaaagtgaggcacacgcaggaggcaaaggccacacgtttctgccctttccctcccccaatctccttgaccacaggtgaaaggggcgtttgtaggactaaggaggcctggccttcttgtgaatctgcctacctctgtgaggagtggttgcagggccagctaggagggcagctgggacagctgggtatgcaggagacagcgcctgtgcccacggtgtctgcaccaatcctctcaggcactgtcaactgtgagcattcctgaccatcagcccgcatgtcagagayggtgtgagagggaccgcatggccgtctccaggcatctctgtgttttcctgatggtcaggctgagtacatggctgtctttgtgctgcctgaatattgtttatttcagcaaatatttactgagcacctaccatgttccaggccctgggaagacagcaatgaatgagccaagtctctgccttgcagaggctgaggaactgagggaagttgtggtgtagagagacaaaaaaaaaaaaaaaaaaaaaaaatcaagacacattaaaaacaatgtaaaatagtataatacgtaggggtgggtacgatggagaaaat

SEQ ID NO: 44142 - DNA, 603 bp, Homo sapiens
cctctggatggggaaagtgaggcacacgcaggaggcaaaggccacacgtttctgccctttccctcccccaatctccttgaccacaggtgaaaggggcgtttgtaggactaaggaggcctggccttcttgtgaatctgcctacctctgtgaggagtggttgcagggccagctaggagggcagctgggacagctgggtatgcaggagacagcgcctgtgcccacggtgtctgcaccaatcctctcaggcactgtcaactgtgagcattcctgaccatcagcccgcatgtcagagatggtgtgagagggaccgcatggccgtctccaggcatctctgtgttttcctgatggtcaggctgagtacatggctgtctttgtgctgcctgaatattgtttatttcagcaaatatttactgagcacctaccatgttccaggccctgggaagacagcaatgaatgagccaagtctctgccttgcagaggctgaggaactgagggaagttgtggtgtagagagacaaaaaaaaaaaaaaaaaaaaaaaatcaagacacattaaaaacaatgtaraatagtataatacgtaggggtgggtacgatggagaaaat

SEQ ID NO: 44143 - DNA, 637 bp, Homo sapiens
agataatccacgtgtaattgtcacagaaagtcttacgtgtacatttggacaatgtctctatctctgtttctttctctctgtttctctctctctctctctcwcacacacacacacagtcctttacaattactttggaaaaaaatcacaaaaaggaaaaaatcattaatctgagattataacataaaacccacaatttgtcggtaaaccatctttaaatctatgtttatacttgaaatctactaggcttatgagagtcaaagacttccaagctttgaatattctttttgcttcaaaaggaactgaaaatctaaatgtaatttggtacaccttttaaaatattcactgctgcctgccagctagctgcaggttattttagctactagaagcagcactaatttgcaatatctttctaagactatctataggtaaaaatttgacattggctgactctaaccaatgtcaagctttaggatagcaacatcatccctaaaagaaaaatgagaaataacctaactatctaaacatcaaaaacaaattaaccttgcctgaccatttttaggacaacataatggtttcttgagatttttcaacatttatgaaaagataaaaattaagatgagtcatttaatagcatgca

SEQ ID NO: 44144 - DNA, 637 bp, Homo sapiens
agataatccacgtgtaattgtcacagaaagtcttacgtgtacatttggacaatgtctctatctctgtttctttctctctgtttctctctctctctctctcacacacacacacacagtcctttacaattactttggaaaaaaatcacaaaaaggaaaaaatcattaatctgagattataacataaaayccacaatttgtcggtaaaccatctttaaatctatgtttatacttgaaatctactaggcttatgagagtcaaagacttccaagctttgaatattctttttgcttcaaaaggaactgaaaatctaaatgtaatttggtacaccttttaaaatattcactgctgcctgccagctagctgcaggttattttagctactagaagcagcactaatttgcaatatctttctaagactatctataggtaaaaatttgacattggctgactctaaccaatgtcaagctttaggatagcaacatcatccctaaaagaaaaatgagaaataacctaactatctaaacatcaaaaacaaattaaccttgcctgaccatttttaggacaacataatggtttcttgagatttttcaacatttatgaaaagataaaaattaagatgagtcatttaatagcatgca

SEQ ID NO: 44145 - DNA, 682 bp, Homo sapiens
gggagctcatttaacaactcttcagggttgtgttactacccaaaccctttatgatgctgagcacgcactgcagacactgattcctgcctgcccctccactctgtttcctggttaccttctgcctgattcattttgatctagacacactggcttccattcttttccatgaacaagccaagctccttcccacctctgggcctttgcacaygcagtttcctccacctggaatgctgctcccagatctttttacaacacatttcctctcatctgttgagcctcaccttacacgttaccctttcagaaagattttcccgttcatgtcctctccgctacattattctccctcccatcaccctctctaacatcatagtcctcaccattcctgaaatgatctttgttacttactgggtggcatgtttagaggctgctttccccactggctctgtgacagtgactttgtcatggtaactcaacattctgtttcctgtggcctgaagattgccgggtatatactaagtgctccatgaatatttgttggaagattcaatgaatcatatcttaccaatgcaatattggaagcctagagaaatgaaataacgttttcacaattgcacagagtaacagatgctttcagtgcttcccttgtatcttctaaccctttacctcttaagcatccactgac

SEQ ID NO: 44146 - DNA, 682 bp, Homo sapiens
gggagctcatttaacaactcttcagggttgtgttactacccaaaccctttatgatgctgagcacgcactgcagacactgattcctgcctgcccctccactctgtttcctggttaccttctgcctgattcattttgatctagacacactggcttccattcttttccatgaacaagccaagctccttcccacctctgggcctttgcacacgcagtttcctccacctggaatgctgctcccagatctttttacaacacatttcctctcatctsttgagcctcaccttacacgttaccctttcagaaagattttcccgttcatgtcctctccgctacattattctccctcccatcaccctctctaacatcatagtcctcaccattcctgaaatgatctttgttacttactgggtggcatgtttagaggctgctttccccactggctctgtgacagtgactttgtcatggtaactcaacattctgtttcctgtggcctgaagattgccgggtatatactaagtgctccatgaatatttgttggaagattcaatgaatcatatcttaccaatgcaatattggaagcctagagaaatgaaataacgttttcacaattgcacagagtaacagatgctttcagtgcttcccttgtatcttctaaccctttacctcttaagcatccactgac

SEQ ID NO: 44147 - DNA, 682 bp, Homo sapiens
gggagctcatttaacaactcttcagggttgtgttactacccaaaccctttatgatgctgagcacgcactgcagacactgattcctgcctgcccctccactctgtttcctggttaccttctgcctgattcattttgatctagacacactggcttccattcttttccatgaacaagccaagctccttcccacctctgggcctttgcacacgcagtttcctccacctggaatgctgctcccagatctttttacaacacatttcctctcatctgttgarcctcaccttacacgttaccctttcagaaagattttcccgttcatgtcctctccgctacattattctccctcccatcaccctctctaacatcatagtcctcaccattcctgaaatgatctttgttacttactgggtggcatgtttagaggctgctttccccactggctctgtgacagtgactttgtcatggtaactcaacattctgtttcctgtggcctgaagattgccgggtatatactaagtgctccatgaatatttgttggaagattcaatgaatcatatcttaccaatgcaatattggaagcctagagaaatgaaataacgttttcacaattgcacagagtaacagatgctttcagtgcttcccttgtatcttctaaccctttacctcttaagcatccactgac

SEQ ID NO: 44148 - DNA, 682 bp, Homo sapiens
gggagctcatttaacaactcttcagggttgtgttactacccaaaccctttatgatgctgagcacgcactgcagacactgattcctgcctgcccctccactctgtttcctggttaccttctgcctgattcattttgatctagacacactggcttccattcttttccatgaacaagccaagctccttcccacctctgggcctttgcacacgcagtttcctccacctggaatgctgctcccagatctttttacaacacatttcctctcatctgttgagcctcaccttacacgttaccctttcagaaagattttcccgttcatgtcctctccgctacattattctccctcccatcaccctctctaacatcatagtcctcaccattccygaaatgatctttgttacttactgggtggcatgtttagaggctgctttccccactggctctgtgacagtgactttgtcatggtaactcaacattctgtttcctgtggcctgaagattgccgggtatatactaagtgctccatgaatatttgttggaagattcaatgaatcatatcttaccaatgcaatattggaagcctagagaaatgaaataacgttttcacaattgcacagagtaacagatgctttcagtgcttcccttgtatcttctaaccctttacctcttaagcatccactgac

SEQ ID NO: 44149 - DNA, 682 bp, Homo sapiens
gggagctcatttaacaactcttcagggttgtgttactacccaaaccctttatgatgctgagcacgcactgcagacactgattcctgcctgcccctccactctgtttcctggttaccttctgcctgattcattttgatctagacacactggcttccattcttttccatgaacaagccaagctccttcccacctctgggcctttgcacacgcagtttcctccacctggaatgctgctcccagatctttttacaacacatttcctctcatctgttgagcctcaccttacacgttaccctttcagaaagattttcccgttcatgtcctctccgctacattattctccctcccatcaccctctctaacatcatagtcctcaccattcctgaaatgatctttgttacttactgggtggcatgtttagaggctgctttccccactggctctgtgacagtgactttgtcatggtaactcaacattctgtttcctrtggcctgaagattgccgggtatatactaagtgctccatgaatatttgttggaagattcaatgaatcatatcttaccaatgcaatattggaagcctagagaaatgaaataacgttttcacaattgcacagagtaacagatgctttcagtgcttcccttgtatcttctaaccctttacctcttaagcatccactgac

SEQ ID NO: 44150 - DNA, 682 bp, Homo sapiens
gggagctcatttaacaactcttcagggttgtgttactacccaaaccctttatgatgctgagcacgcactgcagacactgattcctgcctgcccctccactctgtttcctggttaccttctgcctgattcattttgatctagacacactggcttccattcttttccatgaacaagccaagctccttcccacctctgggcctttgcacacgcagtttcctccacctggaatgctgctcccagatctttttacaacacatttcctctcatctgttgagcctcaccttacacgttaccctttcagaaagattttcccgttcatgtcctctccgctacattattctccctcccatcaccctctctaacatcatagtcctcaccattcctgaaatgatctttgttacttactgggtggcatgtttagaggctgctttccccactggctctgtgacagtgactttgtcatggtaactcaacattctgtttcctgtggcctgaagattgcygggtatatactaagtgctccatgaatatttgttggaagattcaatgaatcatatcttaccaatgcaatattggaagcctagagaaatgaaataacgttttcacaattgcacagagtaacagatgctttcagtgcttcccttgtatcttctaaccctttacctcttaagcatccactgac

SEQ ID NO: 44151 - DNA, 564 bp, Homo sapiens
ctcctttcagcaggccagatcaaaaattgttcttacagtatttgggaagatagctttcagatgatgacttttaacctcataaggagatcagagttaatgactctgcttatgggaaatcttgccagtctcagtaacactgcatgtttattttcaaaactgtgtagtttaatcattgctatatttctggtgacttctcataaaagcaaaaataccttttatactcatttctaatatagcctattaagaggactttttgtttttgmtttctagcaattcatgactgtaacctctaacatgccaatttatgatttggaagtactttaaggatttttgtctatcatgcttgtcctttatttccttctctaccaaatttagaacaaagtatatgcctaaaaatatccatccagtcagtttttatgatatggaaatacaactattttttaattaaaaagctctcatgttatttggttatttctatctatagcctatttcaacaataaaatgtacttacaaagcacctcagaatcaagtctatttaaacacaaaatgggatatgtgttagcc

SEQ ID NO: 44152 - DNA, 575 bp, Homo sapiens
ttttacggtatgtttaacaacatcacatggaccgtgttccccatagtcctgttagttcactatggagtcttcactgtgatatattttctgactactcagggaaatggactgcaccctttttttatttcatcaaatacaatacatgcttccatcttagcatctctaacccttaggcacctgcaagttgaatgtctgccttgctctgttaggtaataggctcccagaggatagagacaatgcctgattcattactagatcttctatgattagcatactgtttgggccattatagatattcattaagaattatttgatcagcgccgggtgtggtggctcatgcctgtaatcccagcactttgggaggccaaggcrggtggatcacttgaggtcaggagtttgagaccagcctggccaacatggtgaaaccccgtctctactaaaaatacaaaaattagccaggcgtggtggcacgcacctgtaatcctacctactcaggaagctgaggcaggagaatcacttgaacctgggaggcagaggttgcagtgagctgagattgtgccattgcactccagcct

SEQ ID NO: 44153 - DNA, 575 bp, Homo sapiens
ttttacggtatgtttaacaacatcacatggaccgtgttccccatagtcctgttagttcactatggagtcttcactgtgatatattttctgactactcagggaaatggactgcaccctttttttatttcatcaaatacaatacatgcttccatcttagcatctctaacccttaggcacctgcaagttgaatgtctgccttgctctgttaggtaataggctcccagaggatagagacaatgcctgattcattactagatcttctatgattagcatactgtttgggccattatagatattcattaagaattatttgatcagcgccgggtgtggtggctcatgcctgtaatcccagcactttgggaggccaaggcgggtggatcacttgaggtcaggagtttgagaccagcctggccaacatggtgaaaccccrtctctactaaaaatacaaaaattagccaggcgtggtggcacgcacctgtaatcctacctactcaggaagctgaggcaggagaatcacttgaacctgggaggcagaggttgcagtgagctgagattgtgccattgcactccagcct

SEQ ID NO: 44154 - DNA, 542 bp, Homo sapiens
ccttggcctcccaaagtgctgggattacaggtgtgagccattgtgcccagcaacatctcccttttcatctctgattttatttattagcatcttctttcattgttttaaattctaactctyttttgttcttacttgataattttgtatagtatccttttgtttcattaatgtgataacttgtcatctgtctagggctacgaagtttattttttctgaaacgtctatttgtttcttaaactctttttatatcaacctaatcatcatcattattttcatttgtttgcattaggctttttgttgaagaatttcctcagagttttgtggagacttggctatctattcatattcaacagggagacactaaaatactgactgggagccttgaatgatttaactggacttgtagagtcttggggttcattatagggtggtgttccttgaatgtcccctccaattctcatgttgagatgtaatcctcagtgttggaggtggggcctggtgggaggtgtctgagtcatgggagtggttcccttatagctttg

SEQ ID NO: 44155 - DNA, 542 bp, Homo sapiens
ccttggcctcccaaagtgctgggattacaggtgtgagccattgtgcccagcaacatctcccttttcatctctgattttatttattagcatcttctttcattgttttaaattctaactctcttttgttcttacttgataattttgtatagtatccttttgtttcattaatgtgataacttgtcatctgtctagggctacgaagtttattttttctgaaacgtctatttgtttmttaaactctttttatatcaacctaatcatcatcattattttcatttgtttgcattaggctttttgttgaagaatttcctcagagttttgtggagacttggctatctattcatattcaacagggagacactaaaatactgactgggagccttgaatgatttaactggacttgtagagtcttggggttcattatagggtggtgttccttgaatgtcccctccaattctcatgttgagatgtaatcctcagtgttggaggtggggcctggtgggaggtgtctgagtcatgggagtggttcccttatagctttg

SEQ ID NO: 44156 - DNA, 542 bp, Homo sapiens
ccttggcctcccaaagtgctgggattacaggtgtgagccattgtgcccagcaacatctcccttttcatctctgattttatttattagcatcttctttcattgttttaaattctaactctcttttgttcttacttgataattttgtatagtatccttttgtttcattaatgtgataacttgtcatctgtctagggctacgaagtttattttttctgaaacgtctatttgtttcttaaactctttttatatcaacctaatcatcatcattattttcatttgtttgcattaggctttttgttgaagaatttcctcagagttttgtggagacttggctatstattcatattcaacagggagacactaaaatactgactgggagccttgaatgatttaactggacttgtagagtcttggggttcattatagggtggtgttccttgaatgtcccctccaattctcatgttgagatgtaatcctcagtgttggaggtggggcctggtgggaggtgtctgagtcatgggagtggttcccttatagctttg

SEQ ID NO: 44157 - DNA, 591 bp, Homo sapiens
gaaatgaaataaatgaatgaatatggaaggatcactgcaaatccaagacaactagtggtttgaaaatccaaaggtatgtctacctggaaatggaaccagtatcactctatttgactgttagacagcataaagttaaacatataaggaaaaaaaattttttgaaccaccttcgcaataccaacttaaatatatgatatcaagatagtatatcttgacatagcaaaaaagcaataaagttgctttggaatagtttctagcatttacatgtcaaaaatatttatcctaaggtaattcaagaaaacaaatgtttacgatgtttatattacraatctctaatacagcatagctaattctaactagaaatgattttttgctacttctgaattcaagacctagataagttctcacatcaatttcctgtccaaataataattactacttctggcattggtaggtctctggggaagttaataagacagtaagttagaacataactttgtacaatttagaagtctgtttactagttacataaaacagtcttaccagtgaatagaaggaaatgagagattaaaatgtactctcttaattttt

SEQ ID NO: 44158 - DNA, 580 bp, Homo sapiens
cccaaataatggggggaaataaagatttgctgattagtctacacttatttgttataatatcttactcctttagtagtgaattctaaaaacctgccgtacacagtgacagaggtggttgaagacagtagcagcacttcagaggatgacgacagtgagagtgaaagagaaggtgaatgacgtcctcaagagcggctggaagatgttgaacaaaaatggatattgccatgtgaccgacagttaagaaaacagtcagtcataaccaaatctttttcttttcttttcttttyttttttttttttttttttttgagacagagtcttgctctgtcggccaggctggagtgcagtggcatgatcttggctcactgcaacctctgcctcacaggctcaagcaattctcctgcctcagcctcccgagtagctgggattacaggcatgtgccaccatgcctgaccaatttttgtatttttagtagagacagggtttcaccatgttggacaggctggtctcgaactcctgacctcaggtaatcctcccacctcagcctcccaaagtgctgggattacaggtgtgagccacca

SEQ ID NO: 44159 - DNA, 559 bp, Homo sapiens
aagaaaagaaagaaaaagaaaacaatgttaatacaatatttttctgaatacctgtcataaaattacctataaccacacagaacasgcacttattgaaattaacaagtgcagtgtatcagttatattacatatcacatactgaaaagccatatgtgaaatcttaaatattagtcagtaaactattgtaacccatgataaaaccagcaagcaaataagtacatttatataggctgcagaattctaaacaattccctcttaagaaaaaagccacaacttttgcttatcaccagcacacaatataagaattgaaatacgtgttaagatcactatcttctgatgtatgagttcaagtaaatacacagcattataaggaataagaactgactaaccatgtcggagggtgcaattatgatgtcacaggtacagctgcatatcaccaggcaatacagcaattttgtatatatgcattgtccttcgttatctagtcaactgtgcaaaaaatatagaaagtgtactgggaaaatttatcaactgagatcacagaaaacattgtataaaa

SEQ ID NO: 44160 - DNA, 559 bp, Homo sapiens
aagaaaagaaagaaaaagaaaacaatgttaatacaatatttttctgaatacctgtcataaaattacctataaccacacagaacaggcacttattgaaattaacaagtgcagtgtatcagttatattacatatcacatactgaaaagccatatgtgaaatcttaaatattagtcagtaaactattgtaacccatgataaaaccagcaagcaaataagtacatttatataggctgcagaattctaaacaattccctcttaagaaaaaagccacaacttttgcttatcaccagcacacaatataagaattgaaatacgtgttaagatcactatcttctgatgtatgagttcaagtaaatacacagcattataaggaataagaactgactaaccatgtcggagggtgcaattatgatgtcacaggtacagytgcatatcaccaggcaatacagcaattttgtatatatgcattgtccttcgttatctagtcaactgtgcaaaaaatatagaaagtgtactgggaaaatttatcaactgagatcacagaaaacattgtataaaa

SEQ ID NO: 44161 - DNA, 615 bp, Homo sapiens
  misc_feature (1)...(615): n = A,T,C or G
tttaaattaaatgtatcttataaaggacaattacttacatatatcgacaaactatgttccagggaatattctttgtgatcttaaaaggcactctaaagcaaaataatgtgtcagtgtgtataagtttggaaaaacttttgcactctatttctctcttggagattcataaygcaaatttaggatatggaagttctagaaaaatcttgacttaaagaaatctgttcattttattgaagccaccaattcccaaaagaatttgccagttaatatgtttttcaggaaacattttataatatcaaagatatttggaattcctgaaaatacagttggggaaattttttaaagatagttcggaggaagggaccaagtaatannagaaaaggcaacataaaaggagtcaaaatgtaggaaatgtttatatgacttacctttgattttgtcagtcataagagagtaaaactggctgggtgtggtggctcatgcctgtaatcccagcactttgggaggctgaggcggttggatcacctgaggtcaggagttccacgccagcctagccaacatggcgaaaccctgtctctactaaaaatacaaaatttagctggttgtggtgacatg

SEQ ID NO: 44162 - DNA, 621 bp, Homo sapiens
atatgaaaatcaagtgaacagttgaatatgagactctagagttcctgggagaggccagggatagagatatacatgtggcagttgccagtatatagatggtatttgaagccatgagatcagatgcaatggccaatggagttaggatatatgaaaaagagaggacaaataacttacttttgygaaaattcaacaataataagatgtgaaagaaatgagaagaagtaattagtgtaagtttttatacaatctgttttctactcttggctaaatatgccaagatttactaatcattttaatgggacatgtttgcccaatcccagtaccatgtttcacttatttgtgagaagtaaatgaacctctaataatttagcaatcagaatggaatacagcaagtcagccatgacaggaactgtacaaaggaaaaagggaccagtgtcccatgatctgaatcccaaaatttaatcggatcattagactatgttccattattgtctttaaaaagcaaataactttgtcacttaaaaatccctctatttctgtcttaatcatttcaggttccgttctcctaaaaatatacttacgaggctgaattattgaacctaaatgtagtaatttttattt

SEQ ID NO: 44163 - DNA, 536 bp, Homo sapiens
gatttataagatactttgtaaaaaaaaatcattgatattcaatctatttttttattccaggttgttaaagctggaatatttayaattacatttttgtatagatataaataaatagttatcgaattgtgctttgacaacataatggcaaccatttgtggtgaaatgatacccatttgtacccattgattgtgattctgctggtgaggatgactgtgcacaaaggagaaatgataagctaaaatattctatcagtttacttaattgtaaattaatattacataaacagaaaatatagaaattaaaaatgtatctttatttaggttacaaaaattcctcatatatgtttactattgggtacttgattaaaagaacagtctgatgcatttcaaagttaaatcagaatgtattacctcatgatgcctattgaacacaattacttatgaattcctactctccccaaaccctgcttatatgacaggataaatatgaaaatgggaagaaaactacatatttctggaaaggcaaaagaaaggtca

SEQ ID NO: 44164 - DNA, 620 bp, Homo sapiens
tacattgaatcattcagtctctgtaagagtcttcacaaggatacagggtcagcattattatcctttgtttttgccctggaaaattagggaaatttttcacagaaaaggaggaaaccaagttgtgtctggaagcatgaataagaaatctcttaatcccggaagaaatagcattctaggctggggaacaggacttctgaagacctgtagagtcagagagctcggcatgttcagggaaagctttagatatggctagrgcagtcgctgtcaacgggaaacagctgacccccaggagacatttggcaatgtctagagacatttttgtcacaattaggggtgtgtactactggcatctagtacatagaggccagtaacactgcaattcacaggacagtccccacaacaaaaaaattacctggtgaaaaatttcagtagtgccaaggttgaaaaacgctttagagagggcagggatggtgaacatgtaaactgggactagattatgaagggccaaggttagaggtttattatctcctgtggcctgcaggacttcagagcctagatttggtaagaaaattgaagcataatttagagcgagctgagtctgggatctgggagatcattta

SEQ ID NO: 44165 - DNA, 584 bp, Homo sapiens
ctggaatacattatttttgaatattttgaatattttttgaatatttttaaataaagtcttaaaagcataaataggtaactacttttaaaaaaaaagtcatgagaaatcacactcaagcattatcaagtgaagaaaattcatartagcaaataaaactgcaaacattttaccttattatctttccttttctctcttgggtgaagggtcagagattaatgtgaaatcaatttagctttttaaaacttgaactgttaaactaattagactataagagaaaccttgtgaacaagtagatacaaacaaagacaattgtatagaaagaagatgtaaaaatttgatgagggaatggcaatggaagtggaaatcaggagcttcaaatgtcgaagtctatgcgaagtatagctgtgaaaaaatgtaaggcctctagaatttctgatgtgactaaatcataagtcaggtaaaacaaagaagtaacgatgtcaaggcataatcaaaattgttgcaatgtaaggatttcaacaatcgcaatagggaattttaaaaggtgataatactggaggaaaatagagtctaaatgacttctt

SEQ ID NO: 44166 - DNA, 531 bp, Homo sapiens
gggaaaagtaggcaacatgcaagaaacagatggataatgtaagcacagagatggaaattctggtaatctaatgctagaaaccaaaaaacagtgtaacagaaacaaatctaaaacaaacaaacaaacaaactacacctaggcatatcagatttacactgtagaactgcagtccccaacctttttggcatcagggactggtttcgtggaagacaatatttccatggtggcggggagatggttttgggatgaaactgttccacctcagataatcagttagattcgcataaggagtatgcaacctagatcccttgcatgcacagttcacaatagggttcaagctcctgtgaaaatctaatgctgctgctgatctgacaggaggckgaactcaggcagtaatgatcgctgcttacctcctgacatgtggcctgattcctaatgggccactgaccagtacaggtctgcagcctgggcattggggacccctgctgtaggaaaccaaaaattaagagagacaaagaaggcagaggcaga

SEQ ID NO: 44167 - DNA, 1367 bp, Homo sapiens
catgacctcataaaaaacccatcaattttcatttaaaatgcactcaaaaataaagtcatccacctccctgcaaatttcaatccttacaactcttaatttttaagggctttttttgtttttcagaatcttctgaaaatctgcaccaaattaaagattctattatccttaccactaactgaaaattgaaattccttagacaataaattattttacactcctggcaccatctgtctgaacgtactctctcgctctgtgaatcgctggcacaccagactgcctctccctgctccagggaatttcagggaattccagatgcccctgattctggtctaatttaccatacaaggcctgtcctctactcaaaccaattctgcaatcccttaagttaaccatatgggcaatacaataacacctctacttaaatcattccgaatttctgctatgatatcatttgatcttcatgcccagggcagcaaataattaatttcaaatactcactgagcaacaaagccaacactaggggattgtccagtaaaggaaaatgctgcccggatgcctcacacccccagtgaggcagggacaaaagaaatcagcacagtgtattcagctgatgaaggagccatttctccacaactccactctcaacgaagaagcacccagaacacagccacaaatgcatctaaacagccaaagacccaggctcagctctacacagctcacccgaaggagctacccatgcctggagccatgaccagaaccagccactgcattttaatttcaactccaacagcagtggctgtttggcttccctggaaggcagcagattaggtgcatgatgaggacgcggtggagggcaggaggcgaggagggcagcacacgtccacacacacacaggggctcagctctacaaagcccgagactgagactctcacttaggcacctcccacagtgaactgaatgcttgttcttatgtaaagttgttattcaggaggaaagataatacacaacctttgaaaccagccaaagtggttccaaataattttttaagtattttaattttttgaaaaaccattgaattgtacacttcatttattttgagacaggtcttgctctgttgcccaggctggaatgcagtggcacaatcatggctcaccgcagcctgggyctcctgggctcaagcaatcctcctgcctcagcctcatgagtagcttgggactacaagtgcatgccaccagatgtggctaattttttttttttctgtagagacagggtcttgctatgttgcccaggctggcatcaaactcctgggctcaagcgatcctcccacctctgcctccccaaagtactgggattacagatgtgagcca

SEQ ID NO: 44168 - DNA, 570 bp, Homo sapiens
gaacagataaagactgtacctatctgttggctgggcgcagtggctcacgtctgtaatcccagcacttcgggaggcttagacaagtggatcacgaggtcaggagatcgagaccatcctggctaacatggtgaaaccccgtctctactaaaaatacaaaaaatttagctgggcgcggtggcgggcgcctgtagtcccagctactcaggaggctgaggcatgagaatggcatgaacctaggaggcggagcttgcagtgagccgagatcgtgccactgcagtccgtcctgggcsaaagagcgagactccgtctcaaaaaacaaacaaacaaacaagaggtccagagtgtgacaacatggccttgcaaccttgtgctcagggaccctggagccagtccttcataggactgctggaactccccaccctgggactgcaggctctgcctggctgcaatcaagaatcccctgaggccaggtgtggtggctcacgcctgtgatcccagcacttcgggaggcttaggtgggcagatcacctgagaccaggagttcgagactagcctagccaacgtgctaaa

SEQ ID NO: 44169 - DNA, 570 bp, Homo sapiens
gaacagataaagactgtacctatctgttggctgggcgcagtggctcacgtctgtaatcccagcacttcgggaggcttagacaagtggatcacgaggtcaggagatcgagaccatcctggctaacatggtgaaaccccgtctctactaaaaatacaaaaaatttagctgggcgcggtggcgggcgcctgtagtcccagctactcaggaggctgaggcatgagaatggcatgaacctaggaggcggagcttgcagtgagccgagatcgtgccactgcagtccgtcctgggcgaaagagcgagactccgtctcaaaaaacaaacaaacaaacaagaggtccagagtgtgacaacatggccttgcaaccttgtgctcagggaccctggagccagtccttcataggwctgctggaactccccaccctgggactgcaggctctgcctggctgcaatcaagaatcccctgaggccaggtgtggtggctcacgcctgtgatcccagcacttcgggaggcttaggtgggcagatcacctgagaccaggagttcgagactagcctagccaacgtgctaaa

SEQ ID NO: 44170 - DNA, 568 bp, Homo sapiens
atcaataccagtcttcattgttgtagcgctgcctgttctcattattcttatgagaatgtgtctatctattcttgcaggtctccatgactttattaagttatctagtaacctccccctcaaaaattaatgatgcagacttgagttatatgtatatattaatttagatagaatttataatattagttctttcaaaccgagaacagagttgtctttctagtcaacatcactatatccctcagtagtacttttaagttttcttcacatagacctgtcatatttccttttaagtttatttttacttactttatctttttgtgctgttgtaagtagagtcttttcttacactaaatttataacttatttgtgtatggaaatactgtgcagctacatatatgtgtgttatttatatatattagttttgtatccagctgtttattgtgttttcttatatatattttaaataatttttattcacttagcttggggtgtataggtataaaattatatgcaastagtaagtgtacctcctcctttccaatttttatacctactatttctttttatctga

SEQ ID NO: 44171 - DNA, 676 bp, Homo sapiens
tggatgaagaaaaggtcatgacccagactggattaatcatgtggccaaacatgcatggccacagtgactgatccaagaggacatggaactcacaacaaaccattgagaactttgggagtttccaaattcgaactggaagggaagaaacctttcattcagagcccccaagctaggaggatgcaggtctggagctatsagctgtcatggctccaaatgcacggcgaaggctcatgtgcagcaggaggaaaggaagccaacaaagaggcctggttgagtctgcttgttgtctcccaatggccattcttcccccactcctttttactagcagaatctccttcctcagagttttggctgcccaagtagaaactaaatttacagcctcctttgttgctaactgtggccacatggcaagacagtaggaacctgggtgcctgatgacatcatggaccagccccttgcctggcctggaccagctgactatcactgcactgttatgggagagagaaataaacttccatcttgtcgaagctatgtattttggtggttttatgtataaacattttaaaaataacaaactagaaaggagttctagatggaactagtggcaatgattacatacagctgttttgttttgcaaaccccacaactggatattaagtcaggatagctcctgcta

SEQ ID NO: 44172 - DNA, 583 bp, Homo sapiens
tcccttccttccttccctccttccttccttccttccatccatctttcccttcttcccttctttctttccataaaagaaaacataagccctttgcctgggtaattataaacaggtttctcagcaacatgaatgctcttagagcattacagttcccacacagttattctctgttgtgtggaaccatccctttcagcacaggcagactagcatctctggcccttggctcacaaagactccccataatttccaaaatgccttccagaagacagtgaaaaccatcttccccacacaccttgaaaaccattattctagaacctagatggattttatcttcctttttctcaaaccaggcttgcagctagcagccaaaatagaaacacctgaaactcatttaacacaaatrtctttgactgacaactttatctctttcttccagggataatttacctcttgctagaataagtgcctaatataaggtagaaaattatagaattctaaaatttagcagcaattttgataagaagaattttgcctgcagaaccttccaagtcgcctcttgccatttgttctacctacaaagcac

SEQ ID NO: 44173 - DNA, 563 bp, Homo sapiens
tgtcagccacygtgcctggccagggccaagatactatttatggtagaactaaaagtatgctttctgattttatttgcctattaatatatgcatttgataatgaagaatgtgctaagtagtcaaagcaaataattactttctagtgtctaaccctgtctataagctaaatgagagggaaaccacttattgcatattaaaaaatggtaactagttttaaaatgctctgtttaatctcaaaccacaatattcaaaacagttacattcctttcactggttcaattaaaaccccagaaaacagtccaagtctccagaacaaattatacattctgcttgagttgcactgcatgtaaaattcacgttcaaaagtttgccaagtcacatttatgaagtcttgaccaactggcggggctgatcataaaaactatatcttttaatttatagtgtttaatgtatattcagtgtatcttatttaaaaagcaacataattgcatgaaaaacttttattttaaatctgattttgaaatatgactgaatacatcaacagaattcagaacaagttggta

SEQ ID NO: 44174 - DNA, 599 bp, Homo sapiens
agtgtctagttctgtaatcttacattaaaatagtttcttggacctccaatcagccacaatactgaaatgayaatgccagaatagataacagagatgcaaaatgatttccagttaatgacattttatcttattaacgtaagtattaacattttaatctaccagaggaaagaagactcaaatattaaaagaagaattctctggagcagtttacaaacattttgggaaaacaaggatgaagcacagggactgggaaaagatttcagtgtttctcttgttcacatgacagagtagcagtcaaaatacacccctgtgatttgtcgcatctgttagaaatgctgcagtagctaaagggacgttccctggctttggtgaagaaataagtaaacaagccagtgtaaagagaaaaccctggttagtgatcagaggccacattctccaacccctgcaagttctagcttcgtgtaatgccagaaagagagaggtcaaaagtctgagagaacttttgttatgaaaagtgtttgtttgtatttttaaaattttggataacataatccagtgctttgggtacaaaggtttgagcaatcggcaccattttaata

SEQ ID NO: 44175 - DNA, 599 bp, Homo sapiens
agtgtctagttctgtaatcttacattaaaatagtttcttggacctccaatcagccacaatactgaaatgacaatgccagaatagataacagagatgcaaaatgatttccagttaatgacattttatcttattaacgtaagtattaacattttaatctaccagaggaaagaagactmaaatattaaaagaagaattctctggagcagtttacaaacattttgggaaaacaaggatgaagcacagggactgggaaaagatttcagtgtttctcttgttcacatgacagagtagcagtcaaaatacacccctgtgatttgtcgcatctgttagaaatgctgcagtagctaaagggacgttccctggctttggtgaagaaataagtaaacaagccagtgtaaagagaaaaccctggttagtgatcagaggccacattctccaacccctgcaagttctagcttcgtgtaatgccagaaagagagaggtcaaaagtctgagagaacttttgttatgaaaagtgtttgtttgtatttttaaaattttggataacataatccagtgctttgggtacaaaggtttgagcaatcggcaccattttaata

SEQ ID NO: 44176 - DNA, 599 bp, Homo sapiens
agtgtctagttctgtaatcttacattaaaatagtttcttggacctccaatcagccacaatactgaaatgacaatgccagaatagataacagagatgcaaaatgatttccagttaatgacattttatcttattaacgtaagtattaacattttaatctaccagaggaaagaagactcaaatattaaaagaagaattctctggagcagtttacaaacattttgggaaaacaaggatgaagcacagggactgggaaaagatttcagtgtttctcttgttcacatgacagagtagcagtcaaaatacacccctgtgatttgtcgcatctgttagaaatgctgcagtagctaaagggacgttccctggctttggtgaagaaataagtaaacaagccagtrtaaagagaaaaccctggttagtgatcagaggccacattctccaacccctgcaagttctagcttcgtgtaatgccagaaagagagaggtcaaaagtctgagagaacttttgttatgaaaagtgtttgtttgtatttttaaaattttggataacataatccagtgctttgggtacaaaggtttgagcaatcggcaccattttaata

SEQ ID NO: 44177 - DNA, 599 bp, Homo sapiens
agtgtctagttctgtaatcttacattaaaatagtttcttggacctccaatcagccacaatactgaaatgacaatgccagaatagataacagagatgcaaaatgatttccagttaatgacattttatcttattaacgtaagtattaacattttaatctaccagaggaaagaagactcaaatattaaaagaagaattctctggagcagtttacaaacattttgggaaaacaaggatgaagcacagggactgggaaaagatttcagtgtttctcttgttcacatgacagagtagcagtcaaaatacacccctgtgatttgtcgcatctgttagaaatgctgcagtagctaaagggacgttccctggctttggtgaagaaataagtaaacaagccagtgtaaagagaaaaccctggttagtgatcagaggccacattctccaacccctrcaagttctagcttcgtgtaatgccagaaagagagaggtcaaaagtctgagagaacttttgttatgaaaagtgtttgtttgtatttttaaaattttggataacataatccagtgctttgggtacaaaggtttgagcaatcggcaccattttaata

SEQ ID NO: 44178 - DNA, 584 bp, Homo sapiens
tttttttttttcttactaatttacctctgtggagctattcatttgaatcaacattctttttttccccccaaccaagcataaatattactcattttaaatgaatggctttaaagttgatattctgttatgtgctctttagcaggtaatatgttaacaattatgtttggtaatcacagaaaatgacactggttctaaaataaacaaatagatataactgtacatacaaatccactcacacacctgctagtgctgtcaaatgcctcctttatcactgcgaacccttcagatgtttcgagccaggctttcacttctgcagagtcacaagcacgtggaagacgcacaactgggccacgagtcatcccatctgcaaggactcggctgctggcacctccaccaagctacacagtatatgttagagaagcaagcacatgttacccaaaaatgctcatgcttgacccaaaaggtatcactaattgtccttaaaactcttctcattgccttacytatgatgtatttttaaactggcaaatatataaatgccaacttacacctattgctctgcagcctctattggtgctggccac

SEQ ID NO: 44179 - DNA, 516 bp, Homo sapiens
caaattcacttaaatctctgagtgacaaaagaccatacagacatttgttagaatagggtaatcacacaatttattatccataccaggatacttttgagggtgtagagggtgttattaataaatatgctgtaacaacaagtgtatatctgcattgtctcaggcaaaatgggacaaatggctgccccacgtatatcacttaatagtttttcattatattgcacaatggcttgaatgcagttttaggaaatacctatttgcaatgagtatttacaaataatcttgaatatacacacttaaatattcaacctaagctcaagctcacccatgatgtattttccagtttccccctactctttgctytccttctttttgaccatagaccaagccgttctagattgacttctctttctctttgatcccatggacccattccatgtctgaattctcaattacaggcctaggctatatcatacattagttttgtcagtattcttcactaaaccttattactcatgg

SEQ ID NO: 44180 - DNA, 539 bp, Homo sapiens
aacatctacatttgcatgaaattttatttgtatggttttattcccatgctcatattgccattttgcagtaggttagacagttattagttgtcttccagtttaacaggggaagaaaatgagacaaagagaagataaatggaaatgtgtactgtgcatttagtcagcagtggactcagggctgtatgcacactcactcctttgaatctatggcctttactcttcacttaactaaatggaagcttctggttaatttttatgctgagattattaatatagttacaaatacacggtgacccacctattttatatgtagattatattcctttttagtttcctggagcgaaagcatgtccaagagctcacctctatgtttctatttttacctaactcccacccttaatcctattaagaggtcatcccagtttctagctgagaagaattagagaaagggartgaatcctgagctatagaaacaagagacactcttttaaaaaattggtctctgaatttgttttacaagaaactggataagacaggca

SEQ ID NO: 44181 - DNA, 530 bp, Homo sapiens
ttgtgattctaccataaggaatgttgctttctagtatagtgagcaatgacatatatacattccggagtaaggcctatacatttctataaatgaggcacattggaccccagaaatatcaacctggtatcattttagattaaaaatgaagagttttcacaggattatgaaatttcagaattggaaagtgccattgaagtttaccagtccaaaccatcattacagaaatgaagataaactcaaagcaagccactttcacataatcacttagatcaaaaagacaggattctaactaaaattcaaattacctaattttcctggcttttgctctttctataaataaaaacacaggatcacatatgtttgctgtgtgtgaagaaaactgaattcttataaagaataaagcttgaaagaaaaacaaattaagkcattcatttaattattattatctaagtacattttactaaacctttagccaagaccaaataatccttattgatccacgcttccaacaacatgggcttcattttcaa

SEQ ID NO: 44182 - DNA, 1199 bp, Homo sapiens
tctgtcaccaggctggagtgtagtggtgccatctcggctcacggcgccatctcggctcactgtaacctccacctcccgggttcaagcaattctcttgcctcagcctgccgagtagctggaactacaggcatgtgccaccacgcccagctaatttttgtatttttagtacagatggggtttcaccatgttggccaggatggtctcgatctcttgacctcgtgatccgccctggcacatgtttttaagagcaaggttccagagcccatgaggctggtgtactaacactcaataaatgtcaaatgcctctgtatcttattctyttttttttttttttttttgacagcgtcttgcctccaggctgcagtgcagtggagggatctcagctcactgcaacctccgcttcccaagttcaagtgattctcctgcctcggcctcccaggtagcctgggattacaaatttgagccaccatgcctggcctctatatatcttagtcttaaattcacccactgatatggtatagcaagaggggcaataaagataataataacctagctatgcataaacagaaacccagctagatttattccctacttggagggtcttttggataccactggccctccccttaaatccattctcttctttctaggtatggaggtgaactacaattcccagcatcccttgcagttaggtgtttagtgatttagttcttgccaaagggattcaagtggaagtggtgtgtgtctaggcctatgcagtgggcgtgactcctccatgttctttctctttcccactggttggaaccctcaccatgcagatgatgttaatgcactggtatagagcaaagcaacacgatgaaagaacctgggtccctgaaagactatgtggattagagccacctcaatgatctcaactgctaacctcagcactgttacatgagagggaaaaaaccactttgttctttaagccatgtattgttggatacttttgttatggccgcttagcagttttacactaagacaaggatctagaggtcttggaaaagaattagtcatgttacgggtgagctcaagaaaagtaactaaacacagctccctatctcaggttaaaagccacaggatctcatgcctctttgttattctctcagcatgaaagctcactgcagtgaatgaataaagccagcactgggtcaggggct

SEQ ID NO: 44183 - DNA, 606 bp, Homo sapiens
cgtatttttttggaatgaaaaaattaagggaaggaagaagtaggcagggctatagataaccagcagatcagaatgggggaaagtcagtggttctgcgaatgcctttgtaaaaatatttaaagtattatattttcttttttgcctcaaatcacatagttcatcaattctaagataactcttttttctattttaatatcttaaataagaatgtatcacacatttgatggcatgcatagattttcaaatggcagctttcttggtggtaggaaaataatgatatgtcttaccatcaagagagtcttgagtcaattaactmtagtacataaaaatatagctataacatgtctgtgaagaaatagaacagaattggaattctgagttggacttacatagggtgtgaggagcaagaattgtaagaactgaaagatatcaaagtttcttggcttggagagaaagttgggaacagagctgtgtggaaagagaacaagagcagtctaggcaactcatggtttcttttcccagttagtaagataggctgcagagtgataaagctccttacccacatactcctgcccacgtttatgacaaagtaagtggcaaaggcaa

SEQ ID NO: 44184 - DNA, 571 bp, Homo sapiens
tgacctcatgttccacccaccttggcctcccaaagtgctgggattagaggcctgagccaccgcgccctgccagtttgtttatttttgttacaagtattaattacatatatatatataaattacatatgtatattttagaagtttgcatttttcttaaagatttacataagtggtattattgaggaaatgctggtataaacagaattattcaataattcaattgaagagggcactttatgtgtagggatgagatatacttagctcaaagatattataaaggaaagaagtcaaattatttttaagaaaaacacatgcatatatgtgcatatataaaattactataaataaaagtgtaagaatttggaaaaagtgagaaacaattgaacaattgatttatgcatctaaagatcccctgtatgcttttaaacctctataaagygaggtagcaaggtggtaaagcacgtgctaaagggtagaatttatgccacaattagctttggttgtaatgaatttcaagtctcatattatatgtgaatcctagtgctttgaaattgttaaactgatgttgttc

SEQ ID NO: 44185 - DNA, 1127 bp, Homo sapiens
aactcccatcttcccatggggttcatgagaaagtcgttctgattcttttctacatgttgaaaaaaatagcaatgaaagtgtcagattaggtgcatgcttcctacttattcccaccaggtacatactaaatcctggacagttaacataagtaccagctactctctctctctctctctctctgtgtgtgtgtgtgtgtgtgtgtgtgtgtgtgtgtgtgtggtgtccttgacccatttgtttatcaatagaaattgttagagcacctatcttcaccaggaactgtgctaaacacttgagatacatcaatgagcaagacagacatgacctctgccctcttggaggctgagtacagaaaaagcagtcaaaatgatacatgtgttgtgttcccaatgaaaaraaaaaaaaaattttaaattaaaataaaaaaaaaatgatacatatgctctggtcaaagaccagcttgaccagacaagctgatctgatatttctttaggtttacaaagcaacttttctcttcaaagatgctgagataatatatttaaaatattgctcactgtttccatccacctacctctaatcctggcatccctttctctcattgggcccttctttcacatttaagctgggccaggatgcctcgttgctttgaggacagtatgtaacagtagagagcagagaaataagaatggtttgtcttgcttcagagttccaaaagcccttaggctgcgaaggcatcgagagtagattcattagaaaatgtgctttaagaaccaggcttcccaggctagacagagcattcatgatgggtgcacacatattggtaaatcccttaggcggcgatggtcttgctgcctgcttgatgggcctagctagagttggagggtgggaagagaggagcagagcctcccctggaaggcttgagggatccaagagcaagaagataggtgcctcatttcctggtcagaccccatggaggcagtaagaatcccaggaagaaaaggctgtgcaggaggtcaggcattaattggcctcgttctggagccatttatggctgtcttgagctttcttaaagtttacagaactaatatttccagttctaagttgtaatggctcagcacaccgtgaag

SEQ ID NO: 44186 - DNA, 578 bp, Homo sapiens
ctaagtctcctcacattagttaacactcatctccagcctcttcatcctcactacttaaaacccagctcacgatttacatcctccaagatgcctgctgagaaatgctgccctctcaggggatgatttcattttgtttcctcatcaaatagacaggcatgccccaacatgtgatcctgaacctttctttgaattcaattgtttagagtatcaaatggaagttcacacagaaaaaaaggcttatgaattacagttacggttttttcctcttttttttttgagacaggatcttactcagtcactcaggctggagtgcagcggtgccaacataggtcactgcagcctcaaactcctgggctcaagccaacctcccagctcggcttcctgagtagctgggactgcaggcatgcacctccatatccagctgattttyaggtttttaatagagatgaggtctcactgtgttgcccaggtggtctctaactcttaggctcaagtgatcctcccacctcagcctcccaaagtgctgggattacaagcgtgagccactgcacttggccatacattacggttcttatttg

SEQ ID NO: 44187 - DNA, 569 bp, Homo sapiens
aagtgcccattcaatgaccaggacacagaggtcttagagagatgctccatgaggccccaggtgcgagcctgtaccctgccggagcatgaggcaagggacagggcatcgtctgtggggatagtgggggtagtgggggtagtggtcagccagacttggtgactctacttgctcaccagacgatcctacacctgccacctccgatggatccactgcctctgtgcctgcctgtactgccgatgctccagtggataactcagcatcccagccaaggcccaatgccactgaagatggacctgccccctggggacccaggagtcctaccactcagctgtccccaggagtgcccagaccctcattcttatccaggacctaggagccytacccctggccttccctcatcagccgtaaatgatgatttactgctgttaccatcatcactgccttcagtgaccaagggccttccaaggtgccagctctggaacgaaggatgcccttgggaggtgatgacactcaggtacacgggtgctcaacagattgcttcctcctatcctcagacggtctttgcatgc

SEQ ID NO: 44188 - DNA, 574 bp, Homo sapiens
aatggaagcaagcaacaaaacattagtaacattagaagtatcccatacacatggactgagaacacatttggggacatggtgggcagactagcaatttgctgtggaattacacagcaaaaaaagaaaagatggaaaagccacaaacactcatcttcactcatctttcatagcaagagattaatagatactatttgaggttgaatgcaatttctcattcatggaaaaatatgtaaacttaaccatgtaaaaagcctcccaacctcattcataataagagaaatgcgaattaagkccgggcgcagtggctcatgactgtaatcccaacactttgggaggccgaggtggtggatcatgaggtcaggagatcgagaccatcctggctaacacagtgaaaccccatctctactaaaaatacaaaatattagccaggcatggtggtgggtgcctgtagtcccagctattcgagaggctgagacaggagaatggcttgaacccgggaggcagagcttgcagtgagccaagatcgcgccactgcactccagcctgggcgacagagcaagactccgtctcaaaa

SEQ ID NO: 44189 - DNA, 574 bp, Homo sapiens
aatggaagcaagcaacaaaacattagtaacattagaagtatcccatacacatggactgagaacacatttggggacatggtgggcagactagcaatttgctgtggaattacacagcaaaaaaagaaaagatggaaaagccacaaacactcatcttcactcatctttcatagcaagagattaatagatactatttgaggttgaatgcaatttctcattcatggaaaaatatgtaaacttaaccatgtaaaaagcctcccaacctcattcataataagagaaatgcgaattaaggccgggcgcagtggctcatgactgtaatcccaacactttgggaggccgaggyggtggatcatgaggtcaggagatcgagaccatcctggctaacacagtgaaaccccatctctactaaaaatacaaaatattagccaggcatggtggtgggtgcctgtagtcccagctattcgagaggctgagacaggagaatggcttgaacccgggaggcagagcttgcagtgagccaagatcgcgccactgcactccagcctgggcgacagagcaagactccgtctcaaaa

SEQ ID NO: 44190 - DNA, 606 bp, Homo sapiens
aggcctaatgtctttcagcttgggttagatttggggacaatgcaaatgtggggactgtttttgtattaacagactactatctttaaggatgagtttctcctatatcctcctaaaagtaggaagaccatactttccaaactaatctgattaatgtaaatgaaattacagtgacatgacattgacgatgatcttgaaatccaactcccccacaggcatttccagatgaagttctaagawgtacaccacgcctatatgctcaatgccacatctgcaatgactagctaatccatacctctgtttctgtagttactttgattacctgaatgatcacatttgcctcccaggccatttcaattacatagttctgagttccaaagagttagagatcgtgcttactaaacacgatccacagctgccaaatcttaagaacttacaaaactacacaggtctctctagagaaaaataagtcatagccagccctgctttttaaaagtatgtgttatatacagcaagcaacaaatccctacagagcttcctaaatagccctaataacataaatacatctcaaatatattaatcaaaaaacataccaactcaagaagtggg

SEQ ID NO: 44191 - DNA, 606 bp, Homo sapiens
aggcctaatgtctttcagcttgggttagatttggggacaatgcaaatgtggggactgtttttgtattaacagactactatctttaaggatgagtttctcctatatcctcctaaaagtaggaagaccatactttccaaactaatctgattaatgtaaatgaaattacagtgacatgacattgacgatgatcttgaaatccaactcccccacaggcatttccagatgaagttctaagaagtacaccacgcytatatgctcaatgccacatctgcaatgactagctaatccatacctctgtttctgtagttactttgattacctgaatgatcacatttgcctcccaggccatttcaattacatagttctgagttccaaagagttagagatcgtgcttactaaacacgatccacagctgccaaatcttaagaacttacaaaactacacaggtctctctagagaaaaataagtcatagccagccctgctttttaaaagtatgtgttatatacagcaagcaacaaatccctacagagcttcctaaatagccctaataacataaatacatctcaaatatattaatcaaaaaacataccaactcaagaagtggg

SEQ ID NO: 44192 - DNA, 606 bp, Homo sapiens
aggcctaatgtctttcagcttgggttagatttggggacaatgcaaatgtggggactgtttttgtattaacagactactatctttaaggatgagtttctcctatatcctcctaaaagtaggaagaccatactttccaaactaatctgattaatgtaaatgaaattacagtgacatgacattgacgatgatcttgaaatccaactcccccacaggcatttccagatgaagttctaagaagtacaccacgcctatatgctcaatgccacatctgcaatgactagctaatccatacctctgtttctgtagttactttgattacctgaatgatcacayttgcctcccaggccatttcaattacatagttctgagttccaaagagttagagatcgtgcttactaaacacgatccacagctgccaaatcttaagaacttacaaaactacacaggtctctctagagaaaaataagtcatagccagccctgctttttaaaagtatgtgttatatacagcaagcaacaaatccctacagagcttcctaaatagccctaataacataaatacatctcaaatatattaatcaaaaaacataccaactcaagaagtggg

SEQ ID NO: 44193 - DNA, 969 bp, Homo sapiens
ggaaaacattatcctctgaatggttacattattatttgggtagaccaataatcctctttgttgatgttccatttccggggtattgacagattttacacattttcatatcaaaatgccatcaaatttatatatagaataatttactgtttctgatacaagatttgtcataatggagtgtcatccatgagtgtaacataatgacattttaattgagagaagatgctttggcaaataaaaaagaaagctatttttctttggatatttctgagtttgtagacaattttcagctgagtatattttcaattcaaaagattgttctaacatatggccacatgcatttaatcttcatgagtgaaaataacctttactatatgacattttaaatcaaatagagcaatcagcctaatttcattatagtattttataacaattattgattgcattttgcataaaaatgcaacatctgtatcacaaaatgtcacagataataaaggtgtgatcattttttaacaayaatatgttatctaatagtgagaatcatctgtgttatgtagccaattctagccaaccagtaacacccaattaaaatattttcaaatcaaacttttattgaattcagagtatctaatcagtgagtgatttgagagattcaatgaattaactaatgtgacccccttttccacattgcatgctcatttaaccgagagacacgcatgctaattttcttctcattttactagtgtttctccagcattcaattctccaattgtgacttctctaaaaaaaagtccatatatttacatgcacatatatagcaggcactatgttaaacactttgaaacactcagttaagacgattcctctagggatgttgttttcaaaaagtacacatatcagaatatgtgatcattcttataatagtaaaaacatcattctaagtgattgttcctaataataggaaaatgaata

SEQ ID NO: 44194 - DNA, 2962 bp, Homo sapiens
cccatgtttgaaaaattccccgccctttcttcccccatatcttctggaaagcattgatcaaacaggaccagcatttatgtttttaactgtcttaatcaataataaatcttgaaagcaagaatgcgttttatttgtttctatatcctcagcaccatgttcattttctactgtataggtaatacacaatagatatttgttcaatgaaatcttaaaataattaaagcttaataactttgacaacaaaccagtcagagaaaaaaagacgaactttctaatatatgtccaaagaagaacattaagtaatagcactagtgcagactacatttaacaggctgtccaggaaaggaaacttagtctgcaaaagtgacaaggaaatgtcaggctaggggtcttttgaaaacctagaacaaagttaagagaataacttctaattttgacagattgcaaagatgtcatcttggtcatttcacaaacttttaccaggctcttatctcccgttcgtttgcctgtttgtgtacctaattgcttattcaggtataccctgccgcattctggaaaggatctgagacagctactatgtgctactcaccgatacagggctgtgttggacacaaaaataaatgaggcgtgaacttcacgctcacagagtttagcgtccaagaggagatgagaaatttaaaacgtaattgtcttacaaggcagagtgaagagtgcctttggagcaggcccacttttgtgtggtttaatactatgctttagaggagaatcaatgagtctgacagtgtgcgatcaagtatcttggttaattccagccagcaccattttccctcagtcctgtttctactttagccccaatcacacagtaaataagtgtctgatgatgacaaataaataaatattttattggtatctgcagaagtctgtgcaaataatttgggaatacctccatccttgtgacttgataactaaatacattattctcttttctctgcagaatgtttttaaaaacaccatcaacaccattaaaatgagccattctaacacctcaaaatcgtctatgcayctctcttagttcaagtgctggctctgggatgaactgatcacttcactgatttcgtgagacccatggaagacctctgaccatagctccattgacccattttccaaaagagaagagtgagactcagcagggcaatcgggggaatgtgacctacccaggtcacatggctgctttagtggctaagtctggcttcaaactgaggcttctagacaccaacttcaactcactttccctgggcaccttacctgactgccttgggcttgcttataaagaatagcattgatgttaatgaagaactaggaagggcagatgaagcaggggaaatgcaaagcaactgttcatccctttccattttaaactggacctcagacatgctgagttgtaaaactcagagtaaaatatgggaaattcaccagcagcttcttccctttctgggtttcagtagataactgtgtccctggggttcttctactaggagttctcaatcctaattgtacatcagaatcactgggaatttttttttttttttttaatactgatgtctgagccccaacggccactaaaggttcttgattcatgtggtctgaggcacggcatcaatgtttttaaagtcccacaaaccagtctttagattcagagacccgtttatgccccaatcctactcactcctctcttctaaaggggtgcacatgaatctcagtacaagtttccctctcccctattgtgaagtggtcattgcccaagccttacccaatgccatgaccccattatcagaaaagcaggcagctgaccatgaaggcccacccttggctactgctgattgaacaagagatatacacctgactaagaggagacagtcagctatcttttctgacaattcctataaccccattttcagaaaatctaatgaagcaggcaaggggccatgaggactcactcttagctactgctgactggacaagagatgaacacctgaccaagaggagccaatcagctatcttttctgagaattggagcttagagactctagccaacctctgctgagggtttcaaaggaactggcatgtttagggtgggacccaggggtgatggtgggaataatttgtactgcacagtagagaaggcctgcctgctttctggaggtagaacaaagcagatgtgcaaaaagagaaaagggaggaacgtgggacaaagagaatgtaccttcatccccaatttttcccgctagccagcttctattttatatccttaatagataccttcatacctataacaaaggaacagaaacctgaaagcatagtttttatatccaaagaatccctggccaagaccctaggaaattaacacattcttatactacctctgctttccttggaaggctcattccatcacaaatgtctgggtcaatttaatcagtgatcctggattttctacaagaacagagagtcctaaaccggggtcctgaaatcccacagggagcctatgaacacagtaaaggtactcatgagccactcccactattaatgggaataatgacctttaccccactgtaaaaacctatagggttaccctcataaggttttcttatcttctgagtatacatcaatggaattgtatcactgctcttgcttttctgattaataaaatgaatacaaagaatgacaaatgaatttttcagataatggtttcatggggagagattaataaaagagtcctgtggtactaaaaaaaaaaaaaaaaaaaaaaaaaaaaggaccagtactttaggcaaccatttttcaaaagtgccccatacaatgtgaattccatcaggcgattgattaaaaaactggttccatgttcttggaagtttgaaagataccatataccacctgagctggtccttccccacggagggtcgtc

SEQ ID NO: 44195 - DNA, 2962 bp, Homo sapiens
cccatgtttgaaaaattccccgccctttcttcccccatatcttctggaaagcattgatcaaacaggaccagcatttatgtttttaactgtcttaatcaataataaatcttgaaagcaagaatgcgttttatttgtttctatatcctcagcaccatgttcattttctactgtataggtaatacacaatagatatttgttcaatgaaatcttaaaataattaaagcttaataactttgacaacaaaccagtcagagaaaaaaagacgaactttctaatatatgtccaaagaagaacattaagtaatagcactagtgcagactacatttaacaggctgtccaggaaaggaaacttagtctgcaaaagtgacaaggaaatgtcaggctaggggtcttttgaaaacctagaacaaagttaagagaataacttctaattttgacagattgcaaagatgtcatcttggtcatttcacaaacttttaccaggctcttatctcccgttcgtttgcctgtttgtgtacctaattgcttattcaggtataccctgccgcattctggaaaggatctgagacagctactatgtgctactcaccgatacagggctgtgttggacacaaaaataaatgaggcgtgaacttcacgctcacagagtttagcgtccaagaggagatgagaaatttaaaacgtaattgtcttacaaggcagagtgaagagtgcctttggagcaggcccacttttgtgtggtttaatactatgctttagaggagaatcaatgagtctgacagtgtgcgatcaagtatcttggttaattccagccagcaccattttccctcagtcctgtttctactttagccccaatcacacagtaaataagtgtctgatgatgacaaataaataaatattttattggtatctgcagaagtctgtgcaaataatttgggaatacctccatccttgtgacttgataactaaatacattattctcttttctctgcagaatgtttttaaaaacaccatcaacaccattaaaatgagccattctaacacctcaaaatcgtctatgcacctctcttagttcaagtgctggctctgggatgaactgatcacttcactgatttcgtgagacccatggaagacctctgaccatagctcmattgacccattttccaaaagagaagagtgagactcagcagggcaatcgggggaatgtgacctacccaggtcacatggctgctttagtggctaagtctggcttcaaactgaggcttctagacaccaacttcaactcactttccctgggcaccttacctgactgccttgggcttgcttataaagaatagcattgatgttaatgaagaactaggaagggcagatgaagcaggggaaatgcaaagcaactgttcatccctttccattttaaactggacctcagacatgctgagttgtaaaactcagagtaaaatatgggaaattcaccagcagcttcttccctttctgggtttcagtagataactgtgtccctggggttcttctactaggagttctcaatcctaattgtacatcagaatcactgggaatttttttttttttttttaatactgatgtctgagccccaacggccactaaaggttcttgattcatgtggtctgaggcacggcatcaatgtttttaaagtcccacaaaccagtctttagattcagagacccgtttatgccccaatcctactcactcctctcttctaaaggggtgcacatgaatctcagtacaagtttccctctcccctattgtgaagtggtcattgcccaagccttacccaatgccatgaccccattatcagaaaagcaggcagctgaccatgaaggcccacccttggctactgctgattgaacaagagatatacacctgactaagaggagacagtcagctatcttttctgacaattcctataaccccattttcagaaaatctaatgaagcaggcaaggggccatgaggactcactcttagctactgctgactggacaagagatgaacacctgaccaagaggagccaatcagctatcttttctgagaattggagcttagagactctagccaacctctgctgagggtttcaaaggaactggcatgtttagggtgggacccaggggtgatggtgggaataatttgtactgcacagtagagaaggcctgcctgctttctggaggtagaacaaagcagatgtgcaaaaagagaaaagggaggaacgtgggacaaagagaatgtaccttcatccccaatttttcccgctagccagcttctattttatatccttaatagataccttcatacctataacaaaggaacagaaacctgaaagcatagtttttatatccaaagaatccctggccaagaccctaggaaattaacacattcttatactacctctgctttccttggaaggctcattccatcacaaatgtctgggtcaatttaatcagtgatcctggattttctacaagaacagagagtcctaaaccggggtcctgaaatcccacagggagcctatgaacacagtaaaggtactcatgagccactcccactattaatgggaataatgacctttaccccactgtaaaaacctatagggttaccctcataaggttttcttatcttctgagtatacatcaatggaattgtatcactgctcttgcttttctgattaataaaatgaatacaaagaatgacaaatgaatttttcagataatggtttcatggggagagattaataaaagagtcctgtggtactaaaaaaaaaaaaaaaaaaaaaaaaaaaaggaccagtactttaggcaaccatttttcaaaagtgccccatacaatgtgaattccatcaggcgattgattaaaaaactggttccatgttcttggaagtttgaaagataccatataccacctgagctggtccttccccacggagggtcgtc

SEQ ID NO: 44196 - DNA, 2962 bp, Homo sapiens
cccatgtttgaaaaattccccgccctttcttcccccatatcttctggaaagcattgatcaaacaggaccagcatttatgtttttaactgtcttaatcaataataaatcttgaaagcaagaatgcgttttatttgtttctatatcctcagcaccatgttcattttctactgtataggtaatacacaatagatatttgttcaatgaaatcttaaaataattaaagcttaataactttgacaacaaaccagtcagagaaaaaaagacgaactttctaatatatgtccaaagaagaacattaagtaatagcactagtgcagactacatttaacaggctgtccaggaaaggaaacttagtctgcaaaagtgacaaggaaatgtcaggctaggggtcttttgaaaacctagaacaaagttaagagaataacttctaattttgacagattgcaaagatgtcatcttggtcatttcacaaacttttaccaggctcttatctcccgttcgtttgcctgtttgtgtacctaattgcttattcaggtataccctgccgcattctggaaaggatctgagacagctactatgtgctactcaccgatacagggctgtgttggacacaaaaataaatgaggcgtgaacttcacgctcacagagtttagcgtccaagaggagatgagaaatttaaaacgtaattgtcttacaaggcagagtgaagagtgcctttggagcaggcccacttttgtgtggtttaatactatgctttagaggagaatcaatgagtctgacagtgtgcgatcaagtatcttggttaattccagccagcaccattttccctcagtcctgtttctactttagccccaatcacacagtaaataagtgtctgatgatgacaaataaataaatattttattggtatctgcagaagtctgtgcaaataatttgggaatacctccatccttgtgacttgataactaaatacattattctcttttctctgcagaatgtttttaaaaacaccatcaacaccattaaaatgagccattctaacacctcaaaatcgtctatgcacctctcttagttcaagtgctggctctgggatgaactgatcacttcactgatttcgtgagacccatggaagacctctgaccatagctccattgacccattttccaaaagagaagagtgagactcagcagggcaatcgggggaatgtgacctacccaggtcacatggctgctttagtggctaagtctggcttcaaactgaggcttctagacaccaacttcaactcactttccctgggcaccttacctgactgccttgggcttgcttataaagaatagcattgatgtyaatgaagaactaggaagggcagatgaagcaggggaaatgcaaagcaactgttcatccctttccattttaaactggacctcagacatgctgagttgtaaaactcagagtaaaatatgggaaattcaccagcagcttcttccctttctgggtttcagtagataactgtgtccctggggttcttctactaggagttctcaatcctaattgtacatcagaatcactgggaatttttttttttttttttaatactgatgtctgagccccaacggccactaaaggttcttgattcatgtggtctgaggcacggcatcaatgtttttaaagtcccacaaaccagtctttagattcagagacccgtttatgccccaatcctactcactcctctcttctaaaggggtgcacatgaatctcagtacaagtttccctctcccctattgtgaagtggtcattgcccaagccttacccaatgccatgaccccattatcagaaaagcaggcagctgaccatgaaggcccacccttggctactgctgattgaacaagagatatacacctgactaagaggagacagtcagctatcttttctgacaattcctataaccccattttcagaaaatctaatgaagcaggcaaggggccatgaggactcactcttagctactgctgactggacaagagatgaacacctgaccaagaggagccaatcagctatcttttctgagaattggagcttagagactctagccaacctctgctgagggtttcaaaggaactggcatgtttagggtgggacccaggggtgatggtgggaataatttgtactgcacagtagagaaggcctgcctgctttctggaggtagaacaaagcagatgtgcaaaaagagaaaagggaggaacgtgggacaaagagaatgtaccttcatccccaatttttcccgctagccagcttctattttatatccttaatagataccttcatacctataacaaaggaacagaaacctgaaagcatagtttttatatccaaagaatccctggccaagaccctaggaaattaacacattcttatactacctctgctttccttggaaggctcattccatcacaaatgtctgggtcaatttaatcagtgatcctggattttctacaagaacagagagtcctaaaccggggtcctgaaatcccacagggagcctatgaacacagtaaaggtactcatgagccactcccactattaatgggaataatgacctttaccccactgtaaaaacctatagggttaccctcataaggttttcttatcttctgagtatacatcaatggaattgtatcactgctcttgcttttctgattaataaaatgaatacaaagaatgacaaatgaatttttcagataatggtttcatggggagagattaataaaagagtcctgtggtactaaaaaaaaaaaaaaaaaaaaaaaaaaaaggaccagtactttaggcaaccatttttcaaaagtgccccatacaatgtgaattccatcaggcgattgattaaaaaactggttccatgttcttggaagtttgaaagataccatataccacctgagctggtccttccccacggagggtcgtc

SEQ ID NO: 44197 - DNA, 2962 bp, Homo sapiens
cccatgtttgaaaaattccccgccctttcttcccccatatcttctggaaagcattgatcaaacaggaccagcatttatgtttttaactgtcttaatcaataataaatcttgaaagcaagaatgcgttttatttgtttctatatcctcagcaccatgttcattttctactgtataggtaatacacaatagatatttgttcaatgaaatcttaaaataattaaagcttaataactttgacaacaaaccagtcagagaaaaaaagacgaactttctaatatatgtccaaagaagaacattaagtaatagcactagtgcagactacatttaacaggctgtccaggaaaggaaacttagtctgcaaaagtgacaaggaaatgtcaggctaggggtcttttgaaaacctagaacaaagttaagagaataacttctaattttgacagattgcaaagatgtcatcttggtcatttcacaaacttttaccaggctcttatctcccgttcgtttgcctgtttgtgtacctaattgcttattcaggtataccctgccgcattctggaaaggatctgagacagctactatgtgctactcaccgatacagggctgtgttggacacaaaaataaatgaggcgtgaacttcacgctcacagagtttagcgtccaagaggagatgagaaatttaaaacgtaattgtcttacaaggcagagtgaagagtgcctttggagcaggcccacttttgtgtggtttaatactatgctttagaggagaatcaatgagtctgacagtgtgcgatcaagtatcttggttaattccagccagcaccattttccctcagtcctgtttctactttagccccaatcacacagtaaataagtgtctgatgatgacaaataaataaatattttattggtatctgcagaagtctgtgcaaataatttgggaatacctccatccttgtgacttgataactaaatacattattctcttttctctgcagaatgtttttaaaaacaccatcaacaccattaaaatgagccattctaacacctcaaaatcgtctatgcacctctcttagttcaagtgctggctctgggatgaactgatcacttcactgatttcgtgagacccatggaagacctctgaccatagctccattgacccattttccaaaagagaagagtgagactcagcagggcaatcgggggaatgtgacctacccaggtcacatggctgctttagtggctaagtctggcttcaaactgaggcttctagacaccaacttcaactcactttccctgggcaccttacctgactgccttgggcttgcttataaagaatagcattgatgttaatgaagaactaggaagggcagatgaagcaggggaaatgcaaagcaactgttcatccctttccattttaaactggacctcagacatgctgagttgtaaaactcagagtaaaatatgggaaattcaccagcagcttcttscctttctgggtttcagtagataactgtgtccctggggttcttctactaggagttctcaatcctaattgtacatcagaatcactgggaatttttttttttttttttaatactgatgtctgagccccaacggccactaaaggttcttgattcatgtggtctgaggcacggcatcaatgtttttaaagtcccacaaaccagtctttagattcagagacccgtttatgccccaatcctactcactcctctcttctaaaggggtgcacatgaatctcagtacaagtttccctctcccctattgtgaagtggtcattgcccaagccttacccaatgccatgaccccattatcagaaaagcaggcagctgaccatgaaggcccacccttggctactgctgattgaacaagagatatacacctgactaagaggagacagtcagctatcttttctgacaattcctataaccccattttcagaaaatctaatgaagcaggcaaggggccatgaggactcactcttagctactgctgactggacaagagatgaacacctgaccaagaggagccaatcagctatcttttctgagaattggagcttagagactctagccaacctctgctgagggtttcaaaggaactggcatgtttagggtgggacccaggggtgatggtgggaataatttgtactgcacagtagagaaggcctgcctgctttctggaggtagaacaaagcagatgtgcaaaaagagaaaagggaggaacgtgggacaaagagaatgtaccttcatccccaatttttcccgctagccagcttctattttatatccttaatagataccttcatacctataacaaaggaacagaaacctgaaagcatagtttttatatccaaagaatccctggccaagaccctaggaaattaacacattcttatactacctctgctttccttggaaggctcattccatcacaaatgtctgggtcaatttaatcagtgatcctggattttctacaagaacagagagtcctaaaccggggtcctgaaatcccacagggagcctatgaacacagtaaaggtactcatgagccactcccactattaatgggaataatgacctttaccccactgtaaaaacctatagggttaccctcataaggttttcttatcttctgagtatacatcaatggaattgtatcactgctcttgcttttctgattaataaaatgaatacaaagaatgacaaatgaatttttcagataatggtttcatggggagagattaataaaagagtcctgtggtactaaaaaaaaaaaaaaaaaaaaaaaaaaaaggaccagtactttaggcaaccatttttcaaaagtgccccatacaatgtgaattccatcaggcgattgattaaaaaactggttccatgttcttggaagtttgaaagataccatataccacctgagctggtccttccccacggagggtcgtc

SEQ ID NO: 44198 - DNA, 560 bp, Homo sapiens
tgaaacagagtctcactctgtcgcccaggctggagtgtagtggcgcaatcttggctcactgtaacctccgcctcctgggttcaagccattctcctgcctcagcctcctgggattacaggcatgtgccaccacacctaggtaatttttgtatttttgtagagactaggtttctccatgttggccaggctggtctcaaactcctgacctcaggtgatccacycacctcagcctcccaaagtgctgggattataggtgtgagccactgcgcctggcccagtgtgtattttgcttaatcacacatgcccatttggactagctacattgcaagtgtgacttttaagtttgtctgctctttttcttttcctcctagcatttaaaaccagtttgtaattgggtgaacatctaaatccttaatttaaaaacataatgaatagccacatgtggccagtggctgccatattagactgtgtggctgtagattgccattccctggattaatgcttgtcattagcaagggaggatttcagctggatttgaaggatgaaggcaagggactgaat

SEQ ID NO: 44199 - DNA, 560 bp, Homo sapiens
tgaaacagagtctcactctgtcgcccaggctggagtgtagtggcgcaatcttggctcactgtaacctccgcctcctgggttcaagccattctcctgcctcagcctcctgggattacaggcatgtgccaccacacctaggtaatttttgtatttttgtagagactaggtttctccatgttggccaggctggtctcaaactcctgacctcaggtgatccactcacctcagcctcccaaagtgctgggattataggtgtgagccactgcgcctggcccagtgtgtattttgcttaatcacacatgcccatttggactagctacattgcaagtgtgacttttaagtttgtytgctctttttcttttcctcctagcatttaaaaccagtttgtaattgggtgaacatctaaatccttaatttaaaaacataatgaatagccacatgtggccagtggctgccatattagactgtgtggctgtagattgccattccctggattaatgcttgtcattagcaagggaggatttcagctggatttgaaggatgaaggcaagggactgaat

SEQ ID NO: 44200 - DNA, 542 bp, Homo sapiens
caaactttgcakttatctacataacagtctaattgattctctactaggttaatcagtctatttctcattataggtgcaaagttttatttacttcaggagatagaaattggttcattttctaaaattatttataaaatttgttgaactacgagagttatgccaatgtatccttcccttgtgctaccgtaagaatttgtacatacctctgctaagctttgatttattttattgcactcatatgtgaatatgactgtcctcaacgctaaactttgacctctttggagaaagagacttgttttttgatcactgtatctctagtatccaacacgacatttagacaagaagttcattaactgccaattaaatagatgcataaactagttaaagaaagaattagaccaggtgcagtggctcatgcctataatcacagcactttgggaggccaaggtgggcaaattgcttgagctaaggagttcaggaccagcctgggcaacatggagagaccctgtctctacaaaattacaaaaattagctgggtgtgg

SEQ ID NO: 44201 - DNA, 542 bp, Homo sapiens
caaactttgcagttatctacataacagtctaattgattctctactaggttaatcagtctatttctcattataggtgcaaagttttatttacttcaggagatagaaattggttcattttctaaaattatttataaaatttgttgaactacgagagttatgccaatgtatccttcccttgtgctaccgtaagaatttgtacataccyctgctaagctttgatttattttattgcactcatatgtgaatatgactgtcctcaacgctaaactttgacctctttggagaaagagacttgttttttgatcactgtatctctagtatccaacacgacatttagacaagaagttcattaactgccaattaaatagatgcataaactagttaaagaaagaattagaccaggtgcagtggctcatgcctataatcacagcactttgggaggccaaggtgggcaaattgcttgagctaaggagttcaggaccagcctgggcaacatggagagaccctgtctctacaaaattacaaaaattagctgggtgtgg

SEQ ID NO: 44202 - DNA, 633 bp, Homo sapiens
ttgggaggctgaggtgggaggatttcttttgcccaggagtttgacaccaggctgggcaacatagggagaccctgtctctataaaataaatacaaaaattagccagtcaggagttcgagaccagcctgaccaacatggtgaaaccccatctctactaaagatacaaaaattagccaggcgtggtggtgcrcacctgtaatcctagctgctcaggaggctgaggcaggagaatcgcttgaacccaggagtgagccaagatcgcgccacagcactccagcctgggcgacagagtgagactctgtctcaaaaaacaaacaaacaaagaacatggagtgtggtcttggaggagggtgaggatttggagatttggatgggcaagtcccccaggcctggcagatttcttgcccagggtggggggcatggtggaggtggccagatggagcttctcaagcatgggcccagggccaggagaccaccaggcctaagtctaagggcagtactggtgtgggatttacaaaagatcattacaggatattcagagctgagaatcctttatcccaaagtattacaagacctagacatctcttctgtttttatctctcaggctctgtgggctgagccaacacaaattgtc

SEQ ID NO: 44203 - DNA, 521 bp, Homo sapiens
cccaggacccaagagagggctgtgaggctgcttaatgagagggtgcaggccctgcctgagcagaccatcccaggggcagcttggagaaggccagcattcttctatctatagttcaacttctctgccattatggtccatctctaattcaggaagcctcttattatgttttctttatgttctcttcatgytgatcagtgggaaaacaaatgaaagggaaaatcatgggtgttgtggttaggaaaaactactgaggggaatagcgggctttgtgttctctgcctcgatggcatgtctagggtgtcccagggcatcagaaacagaaacagcttttcctggacatgttatgagggtctcatggggcagggcacccactgctacaggaacagactgaagcctgaatcctggctttgccattggctctctgggtgcccttgagctggtcctacctctccagacctcaccagccttgtctttaaagtgagaataatggggctggatggggtcactcatgtctgtaatcc

SEQ ID NO: 44204 - DNA, 569 bp, Homo sapiens
ttaaactaagtcatgcaatggtaacagacaataaaacatcagtgattcgaaccagaaacagctatttcttgttcatatcatgatatgtaggtggggggctcagctcctcattatgtttgatctgcctttgagtgggagccctctcttaaatactttcacctgaaggaggcccatagactgtccactyatgtcctgtggataagaggatgcccatgatcatgtctgaattgaagacgcatagtcttctcctggggctggaaacaggagaactggagaagtgcgaatgtgtctgagtagcataaatacttagcatgagttctttggaaattgtcttcaaatcttttttttttttttttttttttttttttttttttttttttttttttgagactgagtctcgctctgtcgcccaggctggagggcagtggcgtgatctcggcttactgcaaactctgcctcccggattcacgccatcctcctgtctcagcctcccgagtagctgggactacaggcgcctgccaccacacccagctaattttttttgtattttttagtagagacgggatttc

SEQ ID NO: 44205 - DNA, 608 bp, Homo sapiens
cacctgacctatgtatcttgttggtctgtttctgcccctgggggcaggcagcctgcttctttgtccaccacccgatccccagcatctagtacagcgcctgtctggcacagagtggaggcttgatgagtacgtgtgttgagagtgaacgcagagttcattcagaactatcgtgctccagcgggaaagtgagttctaatcggtcttgatttaaggctgtgggcaggtccttgagagagtggcccaggcctcagccaacaggtagcaacgatggggtctgtgcgggtcctccctccgccctcccctgwccccacgaagacgccctgtccggtatccactgcctctctgttccctttgggtgaggtaacagaaatctctgccgatggttttgtggaagtccagggcttccctggttaacctctccactcacacatttgcattgtagtggagcctttggggacacaattctgaaccctatacagagactctggtggtggttgttttagagttgttaaaaaatatggccaggcgcggtggctcacgcctgtaatcccagcatttcgggaggccgaggcaggcggatcacttgaggtcaggagtttaagaccagc

SEQ ID NO: 44206 - DNA, 1303 bp, Homo sapiens
gaggggttcctgagcacccactttattttgcctccacctgtgctaggygggcccctctgggttctaaggcatctctgtatctttgtgcttctcttgttgactattcattaactcattccctcactgagggcagagggcgcacttcattccatttctgcatccctaacaccatgttcccattacttgggaagtgcaaattccaagccaataccaaaagctgcattataagcatttaaaaagcttaagaccctatgctacccctggtggtatcctgcaacgatgccctcgacattcactcttcttcaaagcaatgaagcttcaagtaaacttgacttaaatggcattttctcaactatttttctctctgaatacatttccctaagcatcatttcaactgcttgtactgattcatcacaaactcaatctgggaggaaagaaatgctccagttaacggtgctaagggcggcccaagtcactctcaacagccccagggccttttataagggctccctggccccttggtctcatgcctttagtaacaaagtatgtgattaaaaaaaaattaggtaaaggaatcaagtacatcaaatagctactaaagcctgtaagtatgatgaagacataagctcttctgaatactgccatcattccaggcccagtgcactccattctaccccagtggcatatagtgcagtggttaagagaactgacttgaaagctgggttctgccatgtacattagctacctgacctcagacagtggcttcacttctcttaaccgtaacaaggagaccataatcatactttattcagagtcaactaagttaatatatgtaaagtactgagagcagtgcttggtgcaccatatcatccaagcaatggactcttataaacctacatctacttatagcgctggagacagagggcaaatatcaataagcaacagttaccacacaaacactggaacaaaaggcaacacttgatactagtgacaacagagaagtctcaaaccttttcagacaggcttgacttgttaactgtcaggagtctgtaaatatatgtgggctcaaaggcagctccagggcgaatatccctcacgattttatctccaagagctgcaatggaaagaggacacaggttttcctaactacaatgaactcataaatgatgaaaaaagcaacatcatcaaaactcccccacctcccacctggctgaatgttgagaatggcataggtgtaaagacactatcttcccaacaagactgaatttaccaaatttaagtcatctgtctccataactcccaa

SEQ ID NO: 44207 - DNA, 1303 bp, Homo sapiens
gaggggttcctgagcacccactttattttgcctccacctgtgctaggtgggcccctctgggttctaaggcatctctgtatctttgtgcttctcttgttgactattcattaactcattccctcactgagggcagagggcgcacttcattccatttctgcatccctaacaccatgttcccattacttgggaagtgcaaattccaagccaataccaaaagctgcattataagcatttaaaaagcttaagaccctatgcyacccctggtggtatcctgcaacgatgccctcgacattcactcttcttcaaagcaatgaagcttcaagtaaacttgacttaaatggcattttctcaactatttttctctctgaatacatttccctaagcatcatttcaactgcttgtactgattcatcacaaactcaatctgggaggaaagaaatgctccagttaacggtgctaagggcggcccaagtcactctcaacagccccagggccttttataagggctccctggccccttggtctcatgcctttagtaacaaagtatgtgattaaaaaaaaattaggtaaaggaatcaagtacatcaaatagctactaaagcctgtaagtatgatgaagacataagctcttctgaatactgccatcattccaggcccagtgcactccattctaccccagtggcatatagtgcagtggttaagagaactgacttgaaagctgggttctgccatgtacattagctacctgacctcagacagtggcttcacttctcttaaccgtaacaaggagaccataatcatactttattcagagtcaactaagttaatatatgtaaagtactgagagcagtgcttggtgcaccatatcatccaagcaatggactcttataaacctacatctacttatagcgctggagacagagggcaaatatcaataagcaacagttaccacacaaacactggaacaaaaggcaacacttgatactagtgacaacagagaagtctcaaaccttttcagacaggcttgacttgttaactgtcaggagtctgtaaatatatgtgggctcaaaggcagctccagggcgaatatccctcacgattttatctccaagagctgcaatggaaagaggacacaggttttcctaactacaatgaactcataaatgatgaaaaaagcaacatcatcaaaactcccccacctcccacctggctgaatgttgagaatggcataggtgtaaagacactatcttcccaacaagactgaatttaccaaatttaagtcatctgtctccataactcccaa

SEQ ID NO: 44208 - DNA, 1303 bp, Homo sapiens
gaggggttcctgagcacccactttattttgcctccacctgtgctaggtgggcccctctgggttctaaggcatctctgtatctttgtgcttctcttgttgactattcattaactcattccctcactgagggcagagggcgcacttcattccatttctgcatccctaacaccatgttcccattacttgggaagtgcaaattccaagccaataccaaaagctgcattataagcatttaaaaagcttaagaccctatgctaccyctggtggtatcctgcaacgatgccctcgacattcactcttcttcaaagcaatgaagcttcaagtaaacttgacttaaatggcattttctcaactatttttctctctgaatacatttccctaagcatcatttcaactgcttgtactgattcatcacaaactcaatctgggaggaaagaaatgctccagttaacggtgctaagggcggcccaagtcactctcaacagccccagggccttttataagggctccctggccccttggtctcatgcctttagtaacaaagtatgtgattaaaaaaaaattaggtaaaggaatcaagtacatcaaatagctactaaagcctgtaagtatgatgaagacataagctcttctgaatactgccatcattccaggcccagtgcactccattctaccccagtggcatatagtgcagtggttaagagaactgacttgaaagctgggttctgccatgtacattagctacctgacctcagacagtggcttcacttctcttaaccgtaacaaggagaccataatcatactttattcagagtcaactaagttaatatatgtaaagtactgagagcagtgcttggtgcaccatatcatccaagcaatggactcttataaacctacatctacttatagcgctggagacagagggcaaatatcaataagcaacagttaccacacaaacactggaacaaaaggcaacacttgatactagtgacaacagagaagtctcaaaccttttcagacaggcttgacttgttaactgtcaggagtctgtaaatatatgtgggctcaaaggcagctccagggcgaatatccctcacgattttatctccaagagctgcaatggaaagaggacacaggttttcctaactacaatgaactcataaatgatgaaaaaagcaacatcatcaaaactcccccacctcccacctggctgaatgttgagaatggcataggtgtaaagacactatcttcccaacaagactgaatttaccaaatttaagtcatctgtctccataactcccaa

SEQ ID NO: 44209 - DNA, 618 bp, Homo sapiens
ataaactataacttgtgaatacgctgcagtccttaaaaaacaatgctgaagattaagttaaggctcttgagatctaaaaaaaaaaacaatcgcaaaggaaaatatttaatggaaaaacattcaacaatataagaaatgcaaagccgtgcacggtggcgcacgtctgtagccccagcattttgggaggctaaagagggaggatggcctaagcctaggagttagatggtgcagggagtgagctacgattgtgccactcactccagcctggatgccagagccagaccccatctctaaaaaagaggaagaagtgggaaaaacattttactaaacaagtrtcattccacattttaaggaagaaactactataccatgaacaaaccacaacgagctggctcccgccagccacccacctcccgccaccctaaggcctgcccctcctctaggcactgttcaagccctccacgcttctcaactgggtctctgcaacaatctacctccgcctctgtgctcacccctcaccctccaaactgcatgtggccaccacagagctgtctctcaactgaaccttactattctggtgcccaggaaaagcctttctagtctcccagaacttttcag

SEQ ID NO: 44210 - DNA, 565 bp, Homo sapiens
ggaatcttatatgcatagtacatgaaagaagccagtctgaaaaaattacattactgtatgatccaagctatatgatattctggaaaaggcaaaactgaaaagaaagatcagtgactgtcagggttggtggggaggggtgaataaggggaacccagaggatttttagggcagtgaagctattctggacgatactgtagtggtggatacatgttattatgcatttggcaaaatccacagaatgtataagagaaggaatraagcctaatgtaaactaaactttagttaataagaatgtaatgttggtttatcaaatgtaccatcctaataaaagatgttcatagctggaaaaactgggagtggggtgtgtggagtatatgcgaacgctgtagtttctcctctattttcctgaacacctaaaactgttttcttaagtccattaaaaaaaaaaactcatacagcctattaaaaatttattagaggtagaatatcaataatccaggtgaaagtctacaaccatgtcagaacacaatctaactcctttgatatttacaatctcaaaaaattc

SEQ ID NO: 44211 - DNA, 565 bp, Homo sapiens
ggaatcttatatgcatagtacatgaaagaagccagtctgaaaaaattacattactgtatgatccaagctatatgatattctggaaaaggcaaaactgaaaagaaagatcagtgactgtcagggttggtggggaggggtgaataaggggaacccagaggatttttagggcagtgaagctattctggacgatactgtagtggtggatacatgttattatgcatttggcaaaatccacagaatgtataagagaaggaataaagcctaatgtaaactaaactttagttaataagaatgtaatgttggtttatcaaatgtaccatcctaataaaagatgttcatagctggaaaaactgggagtggggtgtgtggagtatatgcgaacgctgtagtttctcctctattttcctgaacacctaaaactgttttcttaagtcyattaaaaaaaaaaactcatacagcctattaaaaatttattagaggtagaatatcaataatccaggtgaaagtctacaaccatgtcagaacacaatctaactcctttgatatttacaatctcaaaaaattc

SEQ ID NO: 44212 - DNA, 565 bp, Homo sapiens
ggaatcttatatgcatagtacatgaaagaagccagtctgaaaaaattacattactgtatgatccaagctatatgatattctggaaaaggcaaaactgaaaagaaagatcagtgactgtcagggttggtggggaggggtgaataaggggaacccagaggatttttagggcagtgaagctattctggacgatactgtagtggtggatacatgttattatgcatttggcaaaatccacagaatgtataagagaaggaataaagcctaatgtaaactaaactttagttaataagaatgtaatgttggtttatcaaatgtaccatcctaataaaagatgttcatagctggaaaaactgggagtggggtgtgtggagtatatgcgaacgctgtagtttctcctctattttcctgaacacctaaaactgttttcttaagtccattaaaaaaaaaaactcatacagcctattaaaaatttattagaggtagaatatcaataatccaggtgaaagtctacaaccatgtcagracacaatctaactcctttgatatttacaatctcaaaaaattc

SEQ ID NO: 44213 - DNA, 502 bp, Homo sapiens
aggtcaaccttcttatctctactggtacatattcggggaggggtgctattataggtaggagatagctgagcaccatgacaacacttcgctgacctcagaattcctgaagttaaaaaaagaaaaaaaatttgtgtgggcatkgtggctcatgcctatagtcccagcactttgggaggctgaggtgggaggatgacttgagcccaggagtacgaggtggcagtgaggcttgttcccaccactgcactccagtctacatgacagagtgagacccgtctctaccaaaaataaagattagcctggcatggtggcgtatgcctgtggtcccaactcttcaggaggctgaggtgaaaggatcacttgagcctgggagatcaaggctgcagtgagctgtgatggagccactgcactcagcctgggtgacagagtgagaccctgtctcaaaaataaaaacaaaaacaaaaactaaaacaaaaaactgcaagtaaaacaagaaaattcccca

SEQ ID NO: 44214 - DNA, 502 bp, Homo sapiens
aggtcaaccttcttatctctactggtacatattcggggaggggtgctattataggtaggagatagctgagcaccatgacaacacttcgctgacctcagaattcctgaagttaaaaaaagaaaaaaaatttgtgtgggcattgtggctcatgcctatagtcccagcactttgggaggctgaggtgggaggatgacttgagcccaggagtacgaggtggcagtgaggcttgttcccaccactgcactccagtctacatgacagagtgagaccmgtctctaccaaaaataaagattagcctggcatggtggcgtatgcctgtggtcccaactcttcaggaggctgaggtgaaaggatcacttgagcctgggagatcaaggctgcagtgagctgtgatggagccactgcactcagcctgggtgacagagtgagaccctgtctcaaaaataaaaacaaaaacaaaaactaaaacaaaaaactgcaagtaaaacaagaaaattcccca

SEQ ID NO: 44215 - DNA, 502 bp, Homo sapiens
aggtcaaccttcttatctctactggtacatattcggggaggggtgctattataggtaggagatagctgagcaccatgacaacacttcgctgacctcagaattcctgaagttaaaaaaagaaaaaaaatttgtgtgggcattgtggctcatgcctatagtcccagcactttgggaggctgaggtgggaggatgacttgagcccaggagtacgaggtggcagtgaggcttgttcccaccactgcactccagtctacatgacagagtgagacccgtctctaccaaaaataaagattagcctggcatggtggygtatgcctgtggtcccaactcttcaggaggctgaggtgaaaggatcacttgagcctgggagatcaaggctgcagtgagctgtgatggagccactgcactcagcctgggtgacagagtgagaccctgtctcaaaaataaaaacaaaaacaaaaactaaaacaaaaaactgcaagtaaaacaagaaaattcccca

SEQ ID NO: 44216 - DNA, 1485 bp, Homo sapiens
tgtggctaatgcatctgaggaactaaatttttaaattattttttgagacaagctcttgttctgttgcccaggcaggaatgcagtggcactatcatgactcactgcagcctcaacctccaggctcaagtgatcctcccacctcagcctcccgagtagctgggattacaggcatgtgccaccacgcctagctaattttttcattttttttgcagagacaaggtcctgctatgttgcctaggctggtctcgaactcctgggctcaagcaatcctcccgcttcagcctcctaaagtgctgagattacaggggtacgctaccgtacccagctaattttaatttaaattgccaaatatggctggttgatcccatactggacagtagagctctaaatagttgagacccagagagggacaatgaatcctttagggccacaagcaagttagtggtgctgttgggactagaaccctggtggaatgcctggtcctgtctttctagagaggcatcatggtcccgtggctcggggcacccattccaacccagactgcccgggcttacaactctgatcggctgctttcgtgttttcacatagtttcctcactgccttgcctcattctgaaagaggttacagtttgggtctgttttcctggcacactttccacatcacagggaggttattctgctgctcattctttcatcttgcaactttgtatgagatctgaccttgatctcattttctgttgctcatttttgctcaaagttactttcccttcgcttgtaggagggtggcttgtctaacatcagagctccctcttctgcggtttgggaacacaggggcttgctttccgatgtcctggctctgttcctctcgccactcttatggggaccttgtcttttcttcctatagccctgtcctgctcacctttgattccaccccccagttgctccacaatacggggctctgttctggaaagacgacttcctagagtccagagggctgggaatgcctagatctggatttttttttttttttttttttgagatggactctcactctgtcgccaggctggagtgcagtggcgcaatctcggctcaccgcaacctccgcctccccagttcaaatgattctcctgcctcagcctcccaagtagctgggactacaagcgcctgccaccatgcccagctaactttttgtattttttttttagtagagacggggtttcaccatgttgaccaggatggtcttgatctcttgaccttgtgatccacccgcctcggcctcccaaagtgctaggattacaggcgtgagccaccacgcccggccttttttttttttttttttgagataaggtcttactttgttgcccaggctggagtgcagtgatcacagctcactgtagccttgaactcctcagctcaagggatcctcccatctcagcctcccgartagctgggactgtagatacgtactgccacacctagctaattt

SEQ ID NO: 44217 - DNA, 578 bp, Homo sapiens
tatgcccatctaatttttgtatttttatttatttatttatcgatgaaatctcactctgtcgcctaggctggagagtacagtggtgcgatcttggctcactgcaacctctccctcctaggtttaagcaatcctcccacctcagcctcctgagtagttaggattacaggagtgcaccaccacacctggctaatttttccttttctatttttagtagctttttctatttttagtagaggcagggtttcaccatgttggccaggctggtcttgaactcctgacctcaagtgatccacccacctcakcctccctaagtgctggtattacaggcatgagccatcatgcccagcccaggctctcctttcttcagcatccttcatgtccctgccaaccacatacctatacatttatcatcatgctgtttcctttaagaatctacagtgattcccaaatggccatcatggcaagtctagactcctctgctcagctctcagagctgtctgtggtatggctctaccctgtctatctagcctttcttctccaaggtacccaacacagcctcaacagagggacaggttaag

SEQ ID NO: 44218 - DNA, 499 bp, Homo sapiens
tgtcccaaggccccggctgtccctgcccaactcaccaccaggcccagcaccagtgtgcgcacgcgctccccaatctctggggagatgtcgctgccaaactgctgcagtgtggtgaggaagcgcttgagcttgctgagctgccgggccccgcaggctgggggcaggtgctgtgtggacaaggaggctgtggacgaggtggccgggccattgctgaagccgttgggtgtgcacggygcaccattgatggctgttggtgagtggctgctgccgttcatcactgcaggagggaagcggacatgaggacacaaaggtgatggtgacaacacaacccagacggcggcgacagtgagggaagcagcgactaaggtgacaatgtcaaaagtgacggcaacaatgatgagacacaaggacagtagcgctgaggatgacagcaggagccctgggcccgcccagggcagctgagctggcccttagcatgctgaccatctgtccttccggc

SEQ ID NO: 44219 - DNA, 532 bp, Homo sapiens
tattggggtcagtgttccaggggcctggcagacatggggctgctatggaaagtcccagggccgggcctcaccccttttctcaggtgacagagctaaggccaagcctcttgcaaggcggccagcgcacccctcctgcgcctgggacacccgcacccygtgcccttggcctcaggagcctgaggggcggcctccaggctctgaaggcaggtcagaggtcacagggctcccaagtcccttgctgacaggggagggggactggatgcctctgggaggcctgaagtcctggccagctccttctgtcaggaggactgaagccccgcacacactcacggctggctcccgcctcctgcagaaggacacgctccctacaaagggtaccaactcccctgccctcagagcgagccctccatttccctgcctccactcaccccccaccacccttacacacatgcacgcacacatgcacacacacatgcatacatatacacatgcacacaatgtacacacatgcacgcacacatgcacacacaca

SEQ ID NO: 44220 - DNA, 532 bp, Homo sapiens
tattggggtcagtgttccaggggcctggcagacatggggctgctatggaaagtcccagggccgggcctcaccccttttctcaggtgacagagctaaggccaagcctcttgcaaggcggccagcgcacccctcctgcgcctgggacacccgcaccctgtgcccttggcctcaggagcctgaggggcggcctccaggctctgaaggcaggtcagaggtcacagggctcccaagtcccttgctgacaggggagggggactggatgcctctgggaggcctgaagtcctggccagctccttctgtcaggaggactgaagccccgcacacactcacggctggctcccgcctcctgcagaaggacacgctccctacaaagggtaccaactcccctgccctcagagcgagccctccatttccctgcctccactcaccccccaccacccttacacacatgcacgcacacatgcacacacacaygcatacatatacacatgcacacaatgtacacacatgcacgcacacatgcacacacaca

SEQ ID NO: 44221 - DNA, 532 bp, Homo sapiens
tattggggtcagtgttccaggggcctggcagacatggggctgctatggaaagtcccagggccgggcctcaccccttttctcaggtgacagagctaaggccaagcctcttgcaaggcggccagcgcacccctcctgcgcctgggacacccgcaccctgtgcccttggcctcaggagcctgaggggcggcctccaggctctgaaggcaggtcagaggtcacagggctcccaagtcccttgctgacaggggagggggactggatgcctctgggaggcctgaagtcctggccagctccttctgtcaggaggactgaagccccgcacacactcacggctggctcccgcctcctgcagaaggacacgctccctacaaagggtaccaactcccctgccctcagagcgagccctccatttccctgcctccactcaccccccaccacccttacacacatgcacgcacacatgcacacacacatgcatacatatacacatgcacacaatgtacacacatgcacrcacacatgcacacacaca

SEQ ID NO: 44222 - DNA, 532 bp, Homo sapiens
tattggggtcagtgttccaggggcctggcagacatggggctgctatggaaagtcccagggccgggcctcaccccttttctcaggtgacagagctaaggccaagcctcttgcaaggcggccagcgcacccctcctgcgcctgggacacccgcaccctgtgcccttggcctcaggagcctgaggggcggcctccaggctctgaaggcaggtcagaggtcacagggctcccaagtcccttgctgacaggggagggggactggatgcctctgggaggcctgaagtcctggccagctccttctgtcaggaggactgaagccccgcacacactcacggctggctcccgcctcctgcagaaggacacgctccctacaaagggtaccaactcccctgccctcagagcgagccctccatttccctgcctccactcaccccccaccacccttacacacatgcacgcacacatgcacacacacatgcatacatatacacatgcacacaatgtacacacatgcacgcacacaygcacacacaca

SEQ ID NO: 44223 - DNA, 532 bp, Homo sapiens
tattggggtcagtgttccaggggcctggcagacatggggctgctatggaaagtcccagggccgggcctcaccccttttctcaggtgacagagctaaggccaagcctcttgcaaggcggccagcgcacccctcctgcgcctgggacacccgcaccctgtgcccttggcctcaggagcctgaggggcggcctccaggctctgaaggcaggtcagaggtcacagggctcccaagtcccttgctgacaggggagggggactggatgcctctgggaggcctgaagtcctggccagctccttctgtcaggaggactgaagccccgcacacactcacggctggctcccgcctcctgcagaaggacacgctccctacaaagggtaccaactcccctgccctcagagcgagccctccatttccctgcctccactcaccccccaccacccttacacacatgcacgcacacatgcacacacacatgcatacatatacacatgcacacaatgtacacacatgcacgcacacatgcacrcacaca

SEQ ID NO: 44224 - DNA, 566 bp, Homo sapiens
tcagatcactgcaatctctgtttcctaggttcaagcaattcttccacttcagcctcctgagtaggtgggactataggcgcgtgccaccacgcctggctaatttttgtatttttactggagacggggtttcatcatgttggccaggctagtcttgaacccctgacctcaagtgatctgcctgcctcggcctcccaaagtgctgggattacaggtgtgagccactgcactcacccaggaaatgrtgccgccttatggtgtgttttattgcagttgtgtctcctttgaaggcacgaacaaggaaactaaaggagttatgtattgcaaagctatgtaatactacgtgaaacctagtccacactttttttctgtcatggaattgaaagttttgttttgttttgttttttgttttttgagacggagtctcgctctgtggcccaggccggagtgcagtggtgcgatctcggttcactgcaagctccgcctcccgggttcatgcgattctcctgcctctgcctccagagtagctgggactacaggcgcctgccaccacgcccggctaatttttt

SEQ ID NO: 44225 - DNA, 566 bp, Homo sapiens
tcagatcactgcaatctctgtttcctaggttcaagcaattcttccacttcagcctcctgagtaggtgggactataggcgcgtgccaccacgcctggctaatttttgtatttttactggagacggggtttcatcatgttggccaggctagtcttgaacccctgacctcaagtgatctgcctgcctcggcctcccaaagtgctgggattacaggtgtgagccactgcactcacccaggaaatggtgccgccttatggtgtgttttattgcagttgtgtctcctttgaaggcacgaacaaggaaactaaaggagttatgtattgcaaagctatgtaatactacgtgaaacctagtccacactttttttctgtcatggaattgaaagttttgttttgttttgttttttgttttttgagacrgagtctcgctctgtggcccaggccggagtgcagtggtgcgatctcggttcactgcaagctccgcctcccgggttcatgcgattctcctgcctctgcctccagagtagctgggactacaggcgcctgccaccacgcccggctaatttttt

SEQ ID NO: 44226 - DNA, 538 bp, Homo sapiens
acttatttttccctgaaagtgccttgatcttgataacattctaaccaagaatgctctagtcartgctgctttgtcccataaatcagagaggcgggaccagttctcaagaagagggctctctccaggaaacctccaactccagtcctcctcttcttaagctaaagttcactttcatcatccctcagatctcagttcatgcctgccctcaggtccatgcaagccatgacctctcctccctccaggttccaggacttgctgtctataaagacctacattgcttcttcacaccccagcatccccctctaggtcagacttgatttacacatcccattttcaaggtatggaactgatgattcgtgcagtgaggctgatgcaaagccaggcatccaagaagctggatcctaattctgacccatgtcatttttgtcttaaaagtgttagctgatttcaaaccatttaacctaatggttaatgacatggagccctctatgatcttcgctttgaattaaatttttctttttatgtaattgtagattga

SEQ ID NO: 44227 - DNA, 538 bp, Homo sapiens
acttatttttccctgaaagtgccttgatcttgataacattctaaccaagaatgctctagtcagtgctgctttgtcccataaatcagagaggcgggaccagttctcaagaagagggctctctccaggaaacctccaactccagtcctcctcttcttaagctaaagttcactttcatcatccctcagatctcagttcatgcctgccctcaggtccatgcaagccatgacctctcctccctccaggttccaggacttgctgtctataaagacctacattgcttcttcacaccccagcatccccctctaggtcagacttgatttacacatcccattttcaaggtatggaactgatgattcgtgcagtgaggctgatgyaaagccaggcatccaagaagctggatcctaattctgacccatgtcatttttgtcttaaaagtgttagctgatttcaaaccatttaacctaatggttaatgacatggagccctctatgatcttcgctttgaattaaatttttctttttatgtaattgtagattga

SEQ ID NO: 44228 - DNA, 538 bp, Homo sapiens
acttatttttccctgaaagtgccttgatcttgataacattctaaccaagaatgctctagtcagtgctgctttgtcccataaatcagagaggcgggaccagttctcaagaagagggctctctccaggaaacctccaactccagtcctcctcttcttaagctaaagttcactttcatcatccctcagatctcagttcatgcctgccctcaggtccatgcaagccatgacctctcctccctccaggttccaggacttgctgtctataaagacctacattgcttcttcacaccccagcatccccctctaggtcagacttgatttacacatcccattttcaaggtatggaactgatgattcgtgcagtgaggctgatgcaaagccaggcatccaagaagctggatcctaattctgacccatgtcatttttgtcttaaaagtgttagctgatttcaaaccatttaacctaatggttaatgacatggagccctctatgatcttcgctttgaattaaatttttctttttatrtaattgtagattga

SEQ ID NO: 44229 - DNA, 475 bp, Homo sapiens
tatgaatacaggggcacacctcctcatccagctaatttttaaatttattgtagagccagggtctcactacattgcccaggctggtctcaaactcctggccttaagtgattctcccccgttgcctcccaaagttctgggattataggtataagtcaccatgcccaaccaatgtccttgaattttaaactgccaaacrgtcaattatataggtctttaatttgttatttatttgtatatccactgagttgaaagtgatagctgaacattatttatctcttagaagtaggagaagagaatgggaacaagagtgtggaaaaaaaaggaaaaaatcaataaaattctacagtattaaattttagaattaaaacatttagaattaaagtggaatttctactattgaaatccaaaaatcagccaggcacagtggctcacgcctgtaatcccaacactttgggaggcccaggcgagcagatca

SEQ ID NO: 44230 - DNA, 1252 bp, Homo sapiens
atatttaaaaattagctgtacatggtggcatgagcctgtagtcctagctgctcaggaggctgaggcaggaggattgcttgagcccagcagttcgaggctgtagtaagttatgattgtaccactgcactgtagccagtaagttatgattgtaccactgcactgtagcctggacggcagagcaagaccctgtctcagtcagtcaattaatcaatcattcagtatmtaggagtggaatggctgggtcatgtaatagatatgtttaatgttttgttgttgttgttctttaggccaatacagcagaatagaaatattgaactttttttttttttgagacggagtctcgccctgtcacccaggttgaagtgcaatggcgcgatctcggctcactgcaatctccgcctcccaggttcaagcgattctcctgcctcagcctcctgagtagctgagattgcacgcgtgtgccaccgcgtccgggaaaatatttaacttttaaagaaactgctgaagtaccttctaaagcagtcaatttgccattcccatcagcacgtatgaggcttccgcatagcctttcttggctggctacaaactactgcagaagcttcagaactgagtctcccattgggtttacctggctggtgactacaatcaaagccctgaggcctgcactccctgggccccagacaaagagggaggggtgtcctagaaatacttgctgaagacagtgtcaggaatctgcattctctaaggaagcttcttggccccaggactgccccaggggtgggaaatattgagcaggacccaaggggccctctagctcagcattggaaaaaaatcactctgcacctgaagaggccacagtcccatattacagcccaactctcatgaaactcacttttgcataactaagtatctgagctggtgtcagggcccccaaaagcagtcatggtcgctggctcagagacctgttccagggaggtggtcccccagtagactgcccaggaaggacctgaagaactgagggccctagagtcctgaggaccctcctgggtggaaggatactgatctaggcctattccccactggaaggagctatggggcagcacccaggactagaggacaacgtccatgtacctacccattactgctggggcctggcctttccagctggccctgcttgtggctcaggatccctgatgttaggaggtggtacaatctttagggtgtgagcccctccagagtctggggtgtgcta

SEQ ID NO: 44231 - DNA, 600 bp, Homo sapiens
tcagctcactgcaacctccgtctcccatgttcaagcgattctccctgcctcagcctccctagtagctgggattacaggtgcctgccaccacacctggctagtttttgtatatttagtagagacagggttttgccatgttggccaggctgaccttgaactcctgacctcaggtgatcctcccgtctcggcctcctaaagtgctgggattacaggcgtgagcyggtgcgcctggcctgaagataatctttacactcatttatttttgggtgatttgtagtattttagtattaggaaaagtactgagaatggccttgtacaatctttgttcccctcagttgctgttttacttattttttgttttttttaagggacggggtctcactgtattgcacaggctggcctcaaactcctgggctcaggcgatctttttacctgagcttcctgagtagcagggactaccagtgtgtgccacctcacccagccattattttactttttatttcttatattttaattacagagacactgtctcactatgttgctcagtctggtcttgaactctggagttcaagtgatcttcctgccttggcctcccaaagt

SEQ ID NO: 44232 - DNA, 901 bp, Homo sapiens
cctccttacttgtctggctgctcatggttaacagaagcccagggagaagctgactctaycttctcttcagccacacccaagatattggtataagggaggctggcaccatgagtattagtataagggaggcttccgggttgtgcgctaatacagctggacctcaaataaccagagcctaatgaccactgtatgtaactgaattcctgattgatatgggtttagtcttctaacctgtatattccttgatgtttaaaataaataatcttaacatgtgttagaaatcctttcttctagccaggtgtggtggcatgcacctgtagtcctagctacttaggaggctgaggcgggaggatcccttgagcccaggagtttgaggccaatctggacaacacagtgagacccatctctaaaaaaagaaataaatcttttcttcttgaacaaacctcatgaataaaaccaaatctttcttggctgctttaaggtctggaaaagagcttcctttcctgcaaaagttgtttttgagcacctatgacgtgtcacccctgtctaggctcaagaaccgagaaggtgcaggcaatgggccagagtgagtactaaccacagaacgttcctgagaagttgccttcatagactaattctagtttgtgtttgtttttattttgagacaaagtcttgctctgtctcccaggctggaatgcagtgtgtgatcttgactcactgcaacctctgcctcctgggtccaagcaattcttgtgcctcagcctcctgagtagctgggattacaggtacacatcaccatgtctggctaatttttgtatttttagtaaagatgggatttcaccatgttggccaggctggtctcgaactcctgacctcaagtcatctgagtctcccaaagtgc

SEQ ID NO: 44233 - DNA, 517 bp, Homo sapiens
agagttaattggactggggtgaaaggcagagagacagaggtgagaaggaagaatgtataactgaattgagtcctgcaagataaataattgcaatttgtagaaagaacaaagatggaaaaagagcacttcaagtagatgcagcattatgaacatgaaacagcatgggattcagggaactgagagtggttgttcatggctggggtgaagggggtatgtgggggagtggggttgggggggtatgtatgcgtgatcaggtgggagggctcagtgaggcagtcagaagccaagtcatgaatgtccttttatgacatacatacatacacacacagagtacttgaacatttggaatatcactcatttccagcaagaaaatataaataattaattcaacctgatgtcactaatcactagatgatccacttcaagtacagaagataatttcaaaaagtttcactgttcagaaaagatsaatatacttatataacaaacaaactctgaagctctgtttgtcaggcta

SEQ ID NO: 44234 - DNA, 624 bp, Homo sapiens
tttggtggatctgtgttgatgccatatttctccttgagaagcttcaactgttcctccttcttctttgtgtccatcttctgaaatgcctggaaatgtggtaagcaccaaaattaaattaccaatctacagccaaatgaatttcatcaatagcattagccaaaaaagaaagtcatagtagacatatatcatcacagtacagttctacactaattctcttgagacggagtctctctgttgcccaggctggagtgcagtggcgtgatcttggctcactgcaggctccaccccctggggttcacgccattctcctgcctcagcctcccgagtagctgggactacaggcgcccgccaccacgcccggctaattttttgtatttttagtacagacggggtttcaccgtgttagccaggatggtctcgatctcctgacctcgtgatccgcccacctcggcctcccaaaatgctgggattacaggcatgagccaccgygcccggccagttctacactaattctcaaatgagatcactacacaatgagaactttgctatacttaccctgttggcattatagtacaaaaccacaaggtatctgttacaaacattgaatcccgataggtgatcaca

SEQ ID NO: 44235 - DNA, 619 bp, Homo sapiens
tgtctgaagtttcaggtgtccactaggggtcttgaaacttatcccccacagacaaggcagggggactactgtatattgaagttaaaatcttgactctgtgatttctagctgtataaccttaaacaaatatcttaagccctctgagcctcagcttcttcgtttataaaatggaaacaagaatacctgctttatatggccattataaggattaataagctaatacttgttaagctcttaactcggtgcttggcatgttgtaagctttcagtagctcgtggctattattaactattgtaattaaaaggagaaaagaaaagaactcacagcagtctgagcagtgatgtgtgtgcaacccacgattttggctccagccaaaggcttttctccttgagctctcttcctcaaagccatcaatgcaggcatttctgaaaaggcccaataaatacagcaatattaaagaagaaggaataagagataaaagaacaaacagaaaaacttgttttcttaarttaagatccttcccctgatcaggttagattaggtttctccagggatcaagacattaaacctgtattttcctttataaagggcttttggaggcaaatgctccagggttctg

SEQ ID NO: 44236 - DNA, 507 bp, Homo sapiens
gcttgatttgaaagaatgggcaaaaatcaatagatttaaagttggcatatttcaaggagacagtctagacagggacaattaaagttttgtgtgtgtgtgtgtgtgtgtgagagagagagagagagaacagagagagagggagagagcacacatatatgtgaaaaggggaagaaaaaaaggatgaggaatgatttctaaagtgggtgaaagtaacacayatatgcaatcttttttggtctgttttagtttaatgcagtttaggtacaggtaaaaacgttccagggagttgtttataaacctgccctactgttttaatatcctgagataaagatggccttttacttaaaaaagcttggtgcaaaggaaagggagaagagagcagcttgactggcaatgcaatgaatgaaagggaggtaacagagaaaaatgcgaggtcaagagcagtctccatattcaagacagtttgaaccatggcttcaccacttgctagactagattccatgacct

SEQ ID NO: 44237 - DNA, 611 bp, Homo sapiens
ggacaattagaaacctactttaagtaagatagcawggggtattcacagcacattccattccactccagctttatttgtttgccagaagagttcctggtctctcacatactaaacacatggtggatctgactaaaaggtatagaagaaaaccagaaaagaacagtgacagccaactgtagttgacaagggaacaaacatggagaagtgtgtcttaggagtcataagattcaacagctgtgtgtcctgaattaattggggcatagtgaaaggaatagaactagaaagaactaggaagctcaaagggagtataccactgtcttccctcttcttcaagtaaagacaactgtctgacttacagaatattgtagaacggccttgttgtgtacttatataatatcctcaaacaagatggaagagcagctagtgcctattacatagcctgcttaaaaaacaataaaaatcccataatattctactactttatagataagaataccaaaatattaggcctacaaaatccaatgactgcttattatgaaggcatttactggaatctgtttaaaagggggaagggggtagcaaaactgatgtacatgaagagttcacatttt

SEQ ID NO: 44238 - DNA, 608 bp, Homo sapiens
ttaagatacattttcacattcatttaacacatctgctgattaactagtcctgagcttaccttgggaatagacagataaattagatgtggtctttactcttaaggccctcaaccatgaaaaatgcaatttcgtatgtcagacaactatataaatagattttcttatttttttaacttttagatttttttatagagatggagtcttgctgtgttgcctaggtgggtctcgaactcctggmctcaagcgatcctccagctttggcctcccagagtgctgggattacaggttgcgcttggccataaataggttttcaatggaatctaacaaggtgttatgaaagaagtatcctcaaagtgttggggaagttcctaggcatgagaagctcttctgtaggtattaccagaagttacccagaagttactgcatgtagaggactgtctttgcaacacaaatgaagggaaggtatacagttgatgaaatattaagagttgtactatgttatatactgagcctgatagatttacaccaacagctttctaggttactgtaccaaaaaattctataaatagctaaggatttttagttgataactgaactggaaatcatct

SEQ ID NO: 44239 - DNA, 521 bp, Homo sapiens
atcatttgactgtttttatcatattagcacctccaatcccattagctttcctaaccccatcagcattcagaaatggattctgtatctttrtcagcataaccatgatttccttactttgctattccttggatatatgtcattaaccagtctgggtacaattagtgcaaggagtagaaatgagactatattctgtgaatttctaactctccattttggcagaacaactctggaccagccactatagctgtcagggtgatttatgattgttcttcaccaagctgacagccggtggagaaaaagcttcatgcaagaaaaattccttatatttattctacctagtttaatacctgatgaaccacgttataagaacaattcttaaaatagccttgaggagagcacctccacattgcccagacatacaatttattatagaaatactggtggagaatggaggggagatggtggtcatgctgtgaacttgactggcttacggacaagacattggttggaaagctggcaat

SEQ ID NO: 44240 - DNA, 575 bp, Homo sapiens
aaaggggaagagaccactccccatgcccaaatatacaaacttttcttttcactattagtatcaatactgaggacaagagataccacataggtctctgaatttattattcttctctgccaattttactgtgtccacaagagaataaagctatccatatttcctgttttatattatgggcagtcacatgccctctaattggaggattgcatgccaagmcaatggcctggcctcataaaacctcactagctattatactgatggggccagactatgatgcagagttgtgaaacttatctctaaaccttaggtccaaaaaggacagaaaaaaataaatcatttctagctagagagctctcatggcaaccaacttcttaaaggagtaaggcaatgagtttattcatatttcatcctgcaaatatttattcagctcttattatgtgccagccacctcttgctatatcatgacatctgctatatcatgtgatttaagggggagggctaccatttatgaactgactgtatactttatataggttatctgatttgttcatcaagacaactccacaaaatagaaa

SEQ ID NO: 44241 - DNA, 579 bp, Homo sapiens
gagaaaatgtaaagttccttacacatggtggattctcagtacatacttgttcctaccctccccctcaccttgaggttgatagaatgtgttttcattttgtcaccttgtagtctacactaattaccactttaataaggataatattacaaatgtatcttttacctgaacccaaattgaggcatctgtaattactgtcacctttactgcctgctgtcagacaaaccaggtagatctctgtcatcctagagggtgctccttgggaagctgttttatttttttctgtatcyggggcttacacagtggtaggcgtataacagacatttgataaatgtttgaatagatgaatgcatttcatgggatttgcatcagacctggggaatagctctgtcccacatcctggccttggggccctcctacctggcaaaggaaagatttgccaaccctgacttagggataggccagccccttcccaaagaccttaaaccccattgaccttccttcatcagcagtgtttaaagttgttccactgtttaaaaactaggaatattgcgaggcagactggggagctgggctttctaa

SEQ ID NO: 44242 - DNA, 478 bp, Homo sapiens
agcatatattgacatatatgcacatatacatatatgtatataactatcaaataatgtaaaatgaaaataaatcaacgtaaacttcatttcttttatttttgtacatctagtagcatggcttcattttcagcttcttgtggtagtttttaatttgaaaaaaagtaaatattagctgggcacggtggcttatgcctgtaatcccagcactttgggaggctgaggcaggaggatcacgagatcaagagatcaagaccatcctggccaacawgatgaaaccccgtctctactgaaaatacaaaaattagctgggtgtggaggtgtgcacctttagtctcagctactcaggagtgtgaggagggagaatcacttgaacccaggatgcaggggctgcagttagccgagattgcgccactgcactccagactgggcgacagagtgagactccatcccccaaaagaaaacaaagtaaatattatgt

SEQ ID NO: 44243 - DNA, 551 bp, Homo sapiens
catgtggctcctcttcatgtgtatatacccatacaacaacactctacattttctgggacaagttctcttacctccatactactggaatgaaaactgaagttcagtaagtccaagtgattaactaacccaagaccttatgatcaataagtgaaaaggtcaagattcacaatcagattttcttactaagttcagggaattcactcactgttccacggaaatagaaaccattgaaggaaaagacccagaagagtatcagcctatggtcagggaaagcttctgggaaaaagtgatacctgtgtacaagcctgtcactgccctgccaggtgtmtgtctttgtactagtcagtgattatctttgtatcttcagtgtggtgctcaacgcatgttgaatgaatgagcaaatgtattgaatgagtaaagatgtcattttaatgtttttatttaagttcggggatacatgtgcagaacgtgcagatttgttacataggtacatgtgtgtcatggtggtttgctgcacctatcaatccatcatctaggctttaagccccaca

SEQ ID NO: 44244 - DNA, 604 bp, Homo sapiens
tgcatacagggtttatatgttttaatgaaagtaattgtatgttcatacttgctgttctttaaaaagtataactagaatagacattctgatcaacataccttatgttatatcatatttacttaatgattgtcctattaatggacagatggacagtatactgtttgcagttttctactcttttttttttttttgagacggagtctctctctgtcaccaggctggagtgcaatgatctcggctcgctgccacctccgcctcctgggttcaagcagttctcttgcttcagcctcccaagtagctgggaatacaggcatgtgccaccaygcccagctaatttttgtatttttagtagagacgggatttcaccatgttggccaggatgtcttgctctcttgacctcgtgattcacctgcctcggcctctccaagtgctgggattataggcgtgagccactgcacccggcctgcagttttctactcttatattgctgtagaacatagccaaacacttggctatgttggtgtcactatttatgtagaataggttcttagttaggaggtggtataagggagttgttaagagcacagcttatctagggctaaaa

SEQ ID NO: 44245 - DNA, 608 bp, Homo sapiens
acttcttcaaagagatgtggcttttgtttctaaaatgatggaatgtagagaaacgaaaaactataaactagattcagtgatgcgacacagtaggctgttgtaaaaaagaaaagcaaaaagaatcctaagaaaaaaataaaggagacaacactgtaaaaacacagtctttggtcaatcaggtgactcccaaataactggtcactatagatactaggaagtaacttattacatggttgtcccccagattaactaacatcaggtgggcagagggacagagtgagcagcccatcaaatctaacaaagagatgtatatagagtaggcractgataaatatctgccaactaagtactcatcattcaggttcttattgcattagattatatgtagaataaccaagaaaagatgaagtttcagtcctctagaaccaggtctttagtagctgaaattataaattttaggaccaaccgtaatccaaggtgtcatcaaccctaatagtcttctgcgatttctatctctggtctctccatttctacccaggctgctcatatatctcagtgccactaactcctgcccccgcagatccaagtgtcttgagcataaattcaaa

SEQ ID NO: 44246 - DNA, 609 bp, Homo sapiens
attgatgtacttcactttaaagtaaaaacactttattagggaaagcattaaagatttcttcatggagaattagctaaattgatacacagacacattgtttcagcgttcttgtgggytcacattaatttattcctgtagtaaacttgctttctttccatagtatgaatagcccaatggatatttttgtaatgatgaaaaatagtttatgcaattaataacccatgttctctttttatcaggttagtagcagggagtgacatcatgagagaaaacagtagccagggataatggaatgtttctaatgaccctttgaataccatcttcataggctggggcacaagggccatattcttgccttcccaccccttttctcagtgtcttctcatggagttgtaaaaataataaaaaataatttaaagattaagaaaattacgttcgaatattggtgtttttttttttttctagatatcaaaagggtggtcagtggcccagctaggaatctacgactcatctgacaacagtctctgtctccatgtttgtgttcctcactcgttccatgtatacacccccataggtacacctgctcagtttgcaatttacaagccatgc

SEQ ID NO: 44247 - DNA, 609 bp, Homo sapiens
attgatgtacttcactttaaagtaaaaacactttattagggaaagcattaaagatttcttcatggagaattagctaaattgatacacagacacattgtttcagcgttcttgtgggttcacattaatttattcctgtagtaaacttgctttctttccatagtatgaatagcccaatggatatttttgtaatgatgaaaaatagtttatgcaattaataacccatgttctcttttyatcaggttagtagcagggagtgacatcatgagagaaaacagtagccagggataatggaatgtttctaatgaccctttgaataccatcttcataggctggggcacaagggccatattcttgccttcccaccccttttctcagtgtcttctcatggagttgtaaaaataataaaaaataatttaaagattaagaaaattacgttcgaatattggtgtttttttttttttctagatatcaaaagggtggtcagtggcccagctaggaatctacgactcatctgacaacagtctctgtctccatgtttgtgttcctcactcgttccatgtatacacccccataggtacacctgctcagtttgcaatttacaagccatgc

SEQ ID NO: 44248 - DNA, 609 bp, Homo sapiens
attgatgtacttcactttaaagtaaaaacactttattagggaaagcattaaagatttcttcatggagaattagctaaattgatacacagacacattgtttcagcgttcttgtgggttcacattaatttattcctgtagtaaacttgctttctttccatagtatgaatagcccaatggatatttttgtaatgatgaaaaatagtttatgcaattaataacccatgttctctttttatcaggttagtagcagggagtgacatcatgagagaaaacagtagccagggataatggaatgtttctaatgaccctttgaataccatcttcataggctggggcasaagggccatattcttgccttcccaccccttttctcagtgtcttctcatggagttgtaaaaataataaaaaataatttaaagattaagaaaattacgttcgaatattggtgtttttttttttttctagatatcaaaagggtggtcagtggcccagctaggaatctacgactcatctgacaacagtctctgtctccatgtttgtgttcctcactcgttccatgtatacacccccataggtacacctgctcagtttgcaatttacaagccatgc

SEQ ID NO: 44249 - DNA, 609 bp, Homo sapiens
attgatgtacttcactttaaagtaaaaacactttattagggaaagcattaaagatttcttcatggagaattagctaaattgatacacagacacattgtttcagcgttcttgtgggttcacattaatttattcctgtagtaaacttgctttctttccatagtatgaatagcccaatggatatttttgtaatgatgaaaaatagtttatgcaattaataacccatgttctctttttatcaggttagtagcagggagtgacatcatgagagaaaacagtagccagggataatggaatgtttctaatgaccctttgaataccatcttcataggctggggcacaagggccatattcttgccttyccaccccttttctcagtgtcttctcatggagttgtaaaaataataaaaaataatttaaagattaagaaaattacgttcgaatattggtgtttttttttttttctagatatcaaaagggtggtcagtggcccagctaggaatctacgactcatctgacaacagtctctgtctccatgtttgtgttcctcactcgttccatgtatacacccccataggtacacctgctcagtttgcaatttacaagccatgc

SEQ ID NO: 44250 - DNA, 609 bp, Homo sapiens
attgatgtacttcactttaaagtaaaaacactttattagggaaagcattaaagatttcttcatggagaattagctaaattgatacacagacacattgtttcagcgttcttgtgggttcacattaatttattcctgtagtaaacttgctttctttccatagtatgaatagcccaatggatatttttgtaatgatgaaaaatagtttatgcaattaataacccatgttctctttttatcaggttagtagcagggagtgacatcatgagagaaaacagtagccagggataatggaatgtttctaatgaccctttgaataccatcttcataggctggggcacaagggccatattcttgccttcccaccccttttctcagtgtcttctcatggagttgtaaaaataataaaaaataatttaaagattaagaaaattacgttcgaatattggtgtttttttttttttctagatatcaaaagggtggtcagtggcccagctaggaatctacgactcatctgacarcagtctctgtctccatgtttgtgttcctcactcgttccatgtatacacccccataggtacacctgctcagtttgcaatttacaagccatgc

SEQ ID NO: 44251 - DNA, 549 bp, Homo sapiens
tatattcttctttttcttaaggccatagaacttgtagattttcagagcactttgatgcttcatttagacaaagattagctaaaatgaaatcttacagacttcattgtttccatatgctcatgaactctctcttctttactttggctgagtactctgtttctccaggattagagcataatagtaagtagatgtatttgttagtttcatgtaactctggctgctgtatacatcaatcaaaagatgcatagtggctctaacaaattagatacttaagttttgctcatgtaatatccaaaataagagtttttgatccattgaatcaaatgttatgatccatttgatccaccacacctctttcatgtggcaattcaggaatccagtaccttccatcatattgttttaatatatttaatgggtagcttccaagattgctgcatttgtctgcatcaagcaggcagaaaggaaagagccaggaaawctacacttaggaatttttagtgcatcagggctggacatgttgcagatcctgttcactggcacttatttcta

SEQ ID NO: 44252 - DNA, 405 bp, Homo sapiens
tgttgctcttgtttaagaggcattcacrggcaataagcaaatcacctcaggatgaatacatttggttcctgattctgaatctgtggaaagattgttaaaatataaagcaatatacaccagttactgacccactgggaaattctgtagctccataaagcacgttaaaacattgtagttatttcagtaagtctgtgtttgcaggctgagatgctacggaatcgggcagggaaggagaatgccttgcaattagatgaatttgccaagagattttaagtggcatgaaatgcctggtatcagcctctgggaatcagcgtaacattcttccctgttggagtttattccactaggatgttatcatcggtgccctagcaggactcccagaacccttgggaagtatttttggat

SEQ ID NO: 44253 - DNA, 528 bp, Homo sapiens
ctggctttgtttttagaagcacttacttttatgtggccccgtgattggccatgtaataaagagactcacagcaatgcctgtgcctggactacgcatgacgagttcacaatttaggacacacacgggatataaacacgtgacttcccacctggagaaaagcgcagcgtgagccctgcactgactgtcaagcgagtcttgaagtaccatgtgcctgcctgccatgggttgtcgagtgggaatatttgggattaatatttcttttctcttttgttttaaacacccctaatgagccccagagttccacttattcggtcagataggaacactgcagcctgtctggggaaggatgttggactaacaaaaatccccaaagaaggtgaactataaatctaaataccagcagaacctttcaaagcaggaagagaatcctaggaagtcaccctcttatgttctcatgagacactgtaaagcagtcctrtcgctctcccttgactgagactgaggtcacacagccacattagtcaaaaa

SEQ ID NO: 44254 - DNA, 3191 bp, Homo sapiens
aaaattagtaatgtcactttgtgatctagtgaagtaatacagaagttatgctatgtcaaagataaagagaactctgtagttatgaggatggtcggcagaaatgtgaaggatggctcttaaatctcttctcttccactctccttcggaagcctctgtctaatcatttgcttcctttattagtgggacccttaatagggtccaattaagttctgtattttaggggatctctctgaagttttttggttctataatgtaaaggttgtcgtgtttacagtttttttccacatcacgagttcaggacatgataacataataaacgaggttttctacaaagccaaggatctgaatgacaaaggaaggacaactagagattagggatataaaagtgacttccaggaatcttttcatttagtgtattaagtatcacatgtctgtcagatttctttaattggctctttcagctgtgtggaggtcgtagtgggggaaacatgccagtaggacaagagggagctggtgggagatgcaaagaacacacttgctttccacagagtgacacctgacttgtgctttgcctgtgtgctctttccagaacctgtgagaagtttctacaatggtgggctcagctctcaggagaggtgcccatgcatatgtctacctggtgagtaaggccagtcacatctccagaggccatcagcaccaggcctggggatcgaggcctcctgcagcagagtgtgccacccaaagagctccaggcagtgtggtggagctgctgggcaaatcctaccctcaggacgaccacagcaacctcacccggaaggtcctccccagagttggcaggaacctgcacaaccagcagcatcaccctctgtggctgataaggagagggttaagcagcacttctacaagcagtatgtgggccgctttgggaccccgttgttctcggtctacgacaacctttctccagtggtcacgacctggcagaactttgacagcctgctcatcccagctgatcaccccagcaggaagaagggggacaactattacctgaatcggactcacatgctgagagcgcacacgtctgcacaccagtgggacttgctgcacgcgggactggatgccttcctggtggtgggtgatgtctacaggcgtgaccagatcgactcccagcactaccctattttccaccagctggaggccgtgcggctcttctccaagcatgaggtgagtcttgagatgtttctcatcgctgaaggatgtcatagacattttatgttgaggtcactaacatttagctcgatgagaccagcatagtcatccttgcttgccttattttgccttagtgaatcatccatacttaatgacatcttgtgtataggtgtgccccagtactttttgaccgctttgttgtgttagtaactacagaaattggtaagccttagtttccagttgtctgtccttatcctttctctcaatactgacccgccattctctgggttacttcttatgaatggagaatagtctgtggctcaaattcacctttaatccaggatggctgaaggtgcaacatggaaacctgtggtcaggtcattcttaattctgttaggagaagtaaattatattttcttgctgttagagagaaatgaatttcttaggtaccttaggggcctgatgatttattggcttgggctgtaaactgtgtcttgtccccaggcactttcctcaccctccctggctttgcatgttgctgtgagatgtcttaattgctgtgggatgtcttaattgctgctattcttgaagcatgtgttaggatgatgcatggagccttttcccaactccttgcgtctgttagatgttatcctaatatgttgtgtgcatctgttagatgttatcctaatacgttgtgtgcatctttttttgttgttttttttttttgcaaattctgaaatccctaaaagcttgattccatttcctaaaaacttgccataccacttgtccctcactcatgttttaaaaaccatctctgtttttatataagaaacaaatgcgttaaactaagcacagggtgtatttcattttacctccatagcaatgtcccttccagacatgttcacttgggaaaaggggggaattattatcgtcacaaaactctctcctgccaacgtaagttaaatgagttattaatatgaaaacaaatagtatagcatccttaggccaataggtaaccattgttctgttgtattctataagtcctatagcaggagataactgaacaggactgccctccccttctctcctttttctttctgtttacctctggatgtgctgttcttttgcgactctgtgataatacagtaatagcttagccttacacaaaaaggccatccgtgctggatctcgggggatctcaaatgagcattctcattacttggaatagctgactattttccaagttaggaaaaataatgattaataaggatatagatttattagggaactaatatgagatgaataaagacaggtcaaaatctgggaaatatgaccaagtgatagaatgtcatttaaaattaatgtacaagaggagctgtgatgccagtaatatgacgtccaggtcacagtagcagacaggtgctcagcccagcttacctcattaaagaaataagaaaggactgtgtgctctgatttgtaagcctgcatgccatgaaagaggcaatgaaggctgccaggcacttctagcattttaatggagggaaaatcaaggctgccacagaagatgggaaataggaagtggataggaaattagccttcaccttgtttcatatttgttttgggtccagtccaatttggtagttagtacaaattactaatctaaactgatgatgctactatatattctgcgtatagttaaaaaattatgctcatgtgtatgtatgtatctaatcttcttatataaggtgcatctgtgttcattgcttcgtttactcctcttaataaaaacctcgcaaggtagatcattttgacttcagccatgaggaatgaggtcccgaaaggtttagtgacttacccaaagttgctgaagcagttagtaacatgcctaraactggaactcagctcttctgaattcattgcctgtttttctgtattctgctttttttcatgacactcctttctacgtgggacctgcttatgaccca

SEQ ID NO: 44255 - DNA, 585 bp, Homo sapiens
ggcctttgcttctcactcatctctctttgactatgattgctcaacccatttttatttctatcactaaaagtataagcacagataagtcctaagggatcatgaaaatgatactgtwaaaattcaaataaactagatatctctgtagtttttgaaattgtggacttatgtaatttcttggaattagaaatgtaaaataatagccagaaagttctggctttagcttccttttgcaaaatttagatacagcctatgagttggccaattccactggcttgtatatgtggctatttcatatccactttatgctaaggcatttttaaagggtccagcaatgtgtccagttccaaatgttctcattctgtgtttttttctcctcccagcccctggacatcaagacaaaaaacagaacaaaagctttaccaagtcaacatctaatttacaaaatttgtctacattctgcctagtttcattttgttgcattattatttaaaaatgttaaaatgtatttcctgtattttccaattactctcaatataattttaaaatctgatgttatagttaaatttgcactgacttatttccttt

SEQ ID NO: 44256 - DNA, 585 bp, Homo sapiens
ggcctttgcttctcactcatctctctttgactatgattgctcaacccatttttatttctatcactaaaagtataagcacagataagtcctaagggatcatgaaaatgatactgtaaaaattcaaataaactagatatctctgtagtttttgaaattgtggacttaygtaatttcttggaattagaaatgtaaaataatagccagaaagttctggctttagcttccttttgcaaaatttagatacagcctatgagttggccaattccactggcttgtatatgtggctatttcatatccactttatgctaaggcatttttaaagggtccagcaatgtgtccagttccaaatgttctcattctgtgtttttttctcctcccagcccctggacatcaagacaaaaaacagaacaaaagctttaccaagtcaacatctaatttacaaaatttgtctacattctgcctagtttcattttgttgcattattatttaaaaatgttaaaatgtatttcctgtattttccaattactctcaatataattttaaaatctgatgttatagttaaatttgcactgacttatttccttt

SEQ ID NO: 44257 - DNA, 549 bp, Homo sapiens
gagtctgagcggacttcggtcaaggcaggtctttcccagcaccgaggaggtgagaataagataatccacgcttcgctttctttgaggccttgctcaaaaaaaattttttttttttttttggagacagagcctccctctgtcagccaggcaggagtgcagtggcatgatctcggctcactgcaacctctgcctccctrgctcaagcaattctctagcctcagcctcctgagtagctgagattacaggcgtgagccaccacagccagctaatttttgtatttttagtagagatggggtttcaccatgttggccaggctggtctcgaactcctgacctcaggtgatctcccgcctcggcctcccacagtgctgggattatagacatgagccatagtacccagactttccttaagcttttaaaagctcaacttacaaaagtgttcttttatttaaatacgacaggtgtgagcaatcgagatttagggttcctttgattaaccttcggtcccgtccacgaagtggtgaactgaacatcattaaagcttccacac

SEQ ID NO: 44258 - DNA, 1762 bp, Homo sapiens
actttgactggagtatgccagatcaaatagtataaggaatagtttgttctaagactattgaagtttatgagagaaatatgataagcatattttagtgaaaggtataatgggttttgaatcataaagcctgtcttaattaggtatgtatgattttggacacattatgtaaatcttctgaatatctgttacctcagaaaaatatagaaacttttggtgacaacagccaaactcgcagagttgctatgagaaacaaatgagattagtaagtgctgaaaaacagtttacaaacgtgtaagtgttttcacaggaatcattattatgtgttttaatggcaattcctattttaaaaagatattgagaagtatttaagactaatgattataaatttatggttatatttcctggaactgcaataaatttaaaatgttattttaaaggtatatgtactagtgtttcttaaattattgaacagaatagtataagagaatggtaaattatgtgtgaactgaatcaaaattggaatggtagtaactgagtgcttatcaaacacaaggcattgcactaggaattgtatctgccctcaatatgccttttattcacttatttattcattcattccttaacagctttgttgaagtagagtggatatacgaaaaactgcttatgtttaatgtgttcaacttgatgagttaggacatatgcaaacacccggggtgccatcaccacaatcaagataatagacatatccaacacctcttaaaattttcttacattcactttgttttttttctttgtttattgtgttaagaacatttagcatgagatctaccctgttaagaaagtgcacaataccctattgttaactataggcacgatgctgtactgaactctaaaattttttcatccagcataactgacactttatacccattgaatagaaactctccacttcccccattccctaacctctaacaaccactccaatactctctgcttctataagtttgactattttagatacctcatataagtggaattatacaatattgtccttctatgattggtttatgtaatttatcataatatcctccaggtctctctttgttgccacaaatggcaaatttttttagggctgacatattccgtttatatatgtaccacattttatttacccattcatcagtccttggacacttgggtggttttcctatcttggccattgtgagtaatgttgcaatgaatacgggcatacagatatctcttggaaatcctgatttcaattcttacatatgatttagaataagagctaaaactatagactccaaagaaacactagtattatttttttcatgcctcttttgatataggctttaaagatccagaatttcttagcccactgacaactttcatttatctttaaagtaaagtgggtcccagctatatgaatagacctgtcaactcatagattcaagaaaaaccaaaggttaatactgatgacaaaacaagacacaccccaacatataatcagcagaatcgaccaggacttaatagataaggttttatcaccatccaaaatgtgttaaattgatttttgacagtgatggagtggtgaaattctatattagtttgacagacatgaattaaatgcgttattaawactgtctaatatttttgtgagttcacatcaccctgtccacttgtatatgatttataggcatcagttcctaaaagatatgccacaggaaatctagtaaaacacaaa

SEQ ID NO: 44259 - DNA, 1255 bp, Homo sapiens
cttccatgaatgtcctggaaagtttatctggactgcaggatagaggagagattggggagaggaataggggaattgtttaaaaaacagtgcttctgggcacaagatggaaggcctggattagggaatttaagcacttttctgtgaccagtgagcagatatttgaacaggcctgcaacgtcgaatgattccacataatttgccactctggtcttccccaccgggagctgtacctacccaaataggacaccaggttagaaaaggagaaaagcataaggcaagtgggaaaagtagacttggtttccactccaaccgaagtgagtatgtgaagatgttttctcctctccaagctccaaaacccagacctctgtgccctcttggatgcaggggggaaagctcaagaaaccaacctcccagctccttcatttcagggaattgaraggagatcacagttcagcaacaatgaaagacaggtcttgctctgactccagagcaacgtgtgaagtgggtacagaggagggtttccaggctgacagtaatgaagtgacagcagatgtcaaagtcttgcctcaagctaatcaaaaggctgctggctgcctccatcagcaatgcctgtacctcgtgcaatcaatctccctctccctcccacctccccttatgcacacatgcatgcacacacaatcacgcatgcacacacatttatttggggagtttaaagaggaaaaagcctttgctctcaacagactccaatgcctttccgctacccaactgactacacccccttcctcctttcttcccctcctgtggtcgtacaatgaggaaactttaagatcgcctcttcacaaaaagatgtgggcccctactttagcagattgtgggcaatgtgtgggagaattctatgaggcctaggaccagcccagccacaggatatcttttctcccactgctgcagagagatgggccttgcagaagcagaactgacaacaagcaccagtcccttgcaggtccctgacctccaggagagatttgccccaaggacagggcgctggtattctcttgagactgatgccttatccttcctacccctggttttctggagcttctcaggaatacattggaatgcagcctgtgcttgtgcagttctcccttttcaaatgcaaggcaaaaatgagtttgtcaagattgagctgttgagcccgctaaaaacgttcctgagagtgaataccccagggctcgagcaatcaatccgccattgcagg

SEQ ID NO: 44260 - DNA, 576 bp, Homo sapiens
tttactgcctttattgtctgtctgcctcactagaatgtgagctccatgagcacagagtgctcctgacttgtgttcactggtgaacgacttttgcttagctcagtgcccggtgtgaatatttgctgaataaatcaattaagtgaataaatgtatcaggcaggatacagaggaaaaaactgggtagaagaaggggagcaggcagagagggctttttggtggaggtgacatctgggcttgaaatatcaataaacgtttacaaggaagacaaatttgggaatgaggggtggtcacagctaggcacattcttgggagaagatatggaatgtacaaagcaggcaataagactagtcatgtcagcaagtggataatgagcgttttgcacactttgctatggaactgaccttcacctaayggcagtgactaaagggtcccttatgcatagaaagaaacgtgagtgagtgttcagggtccacatccagactcaggtagtgaccctgccaccgatacaccattggtacttggacaggcaatattatcccttccatcctcaaggtgcctcaactataaaaggaggca

SEQ ID NO: 44261 - DNA, 602 bp, Homo sapiens
ttattcctatgacttaatgccctattacctcttcttttttttttttttttgaatatctgatttcattgagtctagtccttttatctgctggtaaattttaaatagttctgggacattgactttatcaaagcacagcctagacatgtcattttccttcctaatagctttcgatggctgcccattgagtcctaagtaaatgagaaactggacaacttgttatgcctcataactctgcacattctgatctctgtgcttttgttcatccctccatttgtccagactccctccttaaacttttgaatatccaaatttgatctgtgctttaagatcctgcctgaaaaggacctctttcaaaaggccctctgttgttttcccttttgatctttctatctttccaacacttttcacattctatcttacataatggtcattcattagctcacactctcacacacacatatgtgtgtgtrtatatatatataatatcaatacacatatatacatgcaaactcacacatatacatatatatgtaggtataatgaattaaagtgattatacacagacatacatagtatatagacatacatatatatagacatat

SEQ ID NO: 44262 - DNA, 587 bp, Homo sapiens
ttccgggcccccacaaacactgatttccagaatctgaacagaattattattggaacttcaattttaggaattgaggctacagttttgactgttttagttctaacagttaaggtagaaaacaaaactttcctcagtagaaaacactggagaggcacaacttgctggactaaggactgagatgtgttcagtgggttgtactctggatagggaatggtggtttgagggaatgaaaatcaggtaagccctataaagcattctctcagtggaggtggagtcataggatcaatgcgacatttttctctgtggcctgacacacccttcctctggggatgctgttttggaaatgatggagaacagtcagaatagtattgttatcccattttacagatgtggcttggaggaatgaaatgtcacaagcatacttagagagtgcatctgagccttaaacccaacttttctgactcgttttactgcgttgtttctttctcctgcaccatgatgtctgcactggttagttccttcttttgttggttcactggacttgccagcctctgaggccaggatgccatgkggagctatgctgcagt

SEQ ID NO: 44263 - DNA, 868 bp, Homo sapiens
tgacctacattgtcatcagttattattctaaaacccaattttatcaagccatggatataaaacttgaatgtgacaatgatatccttactccatgccacatattagctaaacaattcacgtacaatatctaagctataytcaagtaaatctttgagggaaatagttttaccattagccgacagattaatgaacttgccccaaatcatacagttagtgagtgctagaggtgagaagtagaatttaaattctggtctgagtccagagaccagcatagactgccaagcatacttaaagaaaaaacttcattggctcttcacgggaatgcaaattcccaaattgaacattcaattattatataagatgaaatttcatctataaataattatttcatccataagatgaatgtcattttcctttttcaagttaatgtttctcttgcaaccttctttccttctgcaataagcactcatacaaataaaatagatgcaaaatatttatttgggatttgatttctacatcactgaaaattctgtagaggaaacaatctctgtagactcatccaaatctaatattatatgattctatgctaccttcacgctatgaaaacttcaaactgtctccctcccttactaaaataagcaatttagaaacaagcctggcctttcttttctgtgacgcatacattttcctctaccctgaaactgcatctccatgactgtacttgtccaagccttccacaaatcttcaagggcatgctcgattgtcaccttttccataacgctttatctgatgctataagaaaaattataaatttatacttctgagcctgctattcaatttgtacttgtagtatagcacaatacccact

SEQ ID NO: 44264 - DNA, 588 bp, Homo sapiens
tgctgcatcaaagggttctgtattagtgaagggaactaaaatatattaaaaatataggctgtgtgacctacaattaaagggggaaacttgatgtatttatgtaaagatgggaagccatcctcagatttcttaccctcagcttaagtacttggacttctggagtaaagaagcatttgattatgtaaaactttgctaccctagagtgtgttccatgtrttaacagcagcatctgccctgaaggattggttagaaagaatagcagtggcctacgttgttattctatttgtagttggaacttatattaaatatttaggaaatatatattgcttgaattaagaaaaacttggtttactcctttttcctaagatcttcataaagctcagagaagacaatatgccaaagtcaacttagagagaaggctactgtttgtcctcacaagactgtctttagaagtaaatacatttctggtataagaagggggctgcttgcactgttacatgctagctttagtatctctattaataagccaattaggaaagaatcttatgcctgctaattaaggagcacagatgatccatcttcaataaa

SEQ ID NO: 44265 - DNA, 588 bp, Homo sapiens
tgctgcatcaaagggttctgtattagtgaagggaactaaaatatattaaaaatataggctgtgtgacctacaattaaagggggaaacttgatgtatttatgtaaagatgggaagccatcctcagatttcttaccctcagcttaagtacttggacttctggagtaaagaagcatttgattatgtaaaactttgctaccctagagtgtgttccatgtattaacagcagcatctgccctgaaggattggttagaaagaatagyagtggcctacgttgttattctatttgtagttggaacttatattaaatatttaggaaatatatattgcttgaattaagaaaaacttggtttactcctttttcctaagatcttcataaagctcagagaagacaatatgccaaagtcaacttagagagaaggctactgtttgtcctcacaagactgtctttagaagtaaatacatttctggtataagaagggggctgcttgcactgttacatgctagctttagtatctctattaataagccaattaggaaagaatcttatgcctgctaattaaggagcacagatgatccatcttcaataaa

SEQ ID NO: 44266 - DNA, 625 bp, Homo sapiens
aataaatcactgaattgtaaattcttaaaaaatggccagattttaaacttaaccatgttggaaacatcacattggattcraatttcagtttctttttatactatattttaacttattcttcatagattttgcagttaacagtaggtggtggggaagctgggcttttcttgaaagaacttacttgaaaacaccatttttttgaatggagaaggaaatattctaaacaacagtctagaattcctgtgaggttgctattgtaaaagcagcctggtttgtgaatcatcaatccctatctttgattctgttattttccaaattgttagtaaaatagagtaggttctcactctactctgtcaccatcttctgtagcaaaatttggcttcctagaatggtggaaactctgtttttcctccttatgccctgtaatatacactctcaaaggccctgataagaaacactgacttgcacatggcaagtctaatgacatgtggctccctacccagttgagccacgttcaccattttctgagctaagggaagtctgtggctgctgtgtgctggccccttgaaatgctccagctcagtgtggccaattctgctctggctcttgagagatgcaagatgca

SEQ ID NO: 44267 - DNA, 625 bp, Homo sapiens
aataaatcactgaattgtaaattcttaaaaaatggccagattttaaacttaaccatgttggaaacatcacattggattcgaatttcagtttctttttatactatattttaacttattcttcatagattttgcagttaacagtaggtggtggggaagctgggcttttcttgaaagaacttacttgaaaacamcatttttttgaatggagaaggaaatattctaaacaacagtctagaattcctgtgaggttgctattgtaaaagcagcctggtttgtgaatcatcaatccctatctttgattctgttattttccaaattgttagtaaaatagagtaggttctcactctactctgtcaccatcttctgtagcaaaatttggcttcctagaatggtggaaactctgtttttcctccttatgccctgtaatatacactctcaaaggccctgataagaaacactgacttgcacatggcaagtctaatgacatgtggctccctacccagttgagccacgttcaccattttctgagctaagggaagtctgtggctgctgtgtgctggccccttgaaatgctccagctcagtgtggccaattctgctctggctcttgagagatgcaagatgca

SEQ ID NO: 44268 - DNA, 625 bp, Homo sapiens
aataaatcactgaattgtaaattcttaaaaaatggccagattttaaacttaaccatgttggaaacatcacattggattcgaatttcagtttctttttatactatattttaacttattcttcatagattttgcagttaacagtaggtggtggggaagctgggcttttcttgaaagaacttacttgaaaacaccatttttttgaatggagaaggaaatattctaaacaacagtctagaattcctgtgaggttgctattgtaaaagcagcctggtttgtgaatcatcaatccctatctttgattctgttattttccaaattgttagtaaaatagagtaggttctcactctactctgtcaccatcttctgtagcaaaatttggcttcctagaatggtggaaactctgtttttcctccttatgccctgtaatatacactctcaaaggccctgataagaaacactgacttgcacatggcaagtctaatgacatgtggctccctacccagttgagccacgttcascattttctgagctaagggaagtctgtggctgctgtgtgctggccccttgaaatgctccagctcagtgtggccaattctgctctggctcttgagagatgcaagatgca

SEQ ID NO: 44269 - DNA, 586 bp, Homo sapiens
catctaccagcccatgtagatgactcaaagcttgatgtaaccaggaaatttatggaagttattgatgtgtaataaattgacagagtgacagtagtaggtcatttgcttatattacaaatcttcatgaaaaacaagttttaattctattcctatttagagcattaataattgtagaaaattttacatacatgttcccaaaagcttgatctttctttctcctagtttgttataacagtaagttctcccttagtgctgtcaatcttcagtatcaaactaggcatgtggcaggatgctggtgagagaatcatattaatgatagacactaggaaaatttaggctcagagtaatttgttaaaatttgtaatcacatttttattgcataaaatcactgtaatatcattatcatagtatgtactatagaagagaaaatatgtgtagttaattgaaagtggttaaatgtcctctgggctaaaatgcaaaaaattttatagcaaaccttgaatttaatttgagctcaaagtattaggtcactgtaccattcatttttwaaactctgactgagatagataaaatattcagatttctc

SEQ ID NO: 44270 - DNA, 606 bp, Homo sapiens
tgcatgggaaatcagagcatctctgggcattataggaaaaaagaattttgtacagggctacattattaaaggcctgagatgttaatccaaaacatcatttagttttctgactaagaaattgtgtttcaaatagtatcaaagaaaactagatgaatttcccatcaaattctctattttctttttctatctcgaaagataacaagatgctaattatctcaatctagtcttcaaaaaattaacaatgcaaagtttagttttataaagtgcttattctctaataaatagaagtggaataattagtcattaattattggtaatacatgttatttattctcttattcttttagttttaaccaactatcattgattgaaaacattatttgattcatgttactgtaataagctttaacatacttctgttccttccccatgccctcttcccctgccctccyctctacctcacttatctcctcttttctattctcaatcaactaattattcgtgggagcatgtactaggggcaacattacttttttttttttaatgaagtatctaggtcttcaccattttcgacacaatgctatatttttcgtaccatatgttttt

SEQ ID NO: 44271 - DNA, 545 bp, Homo sapiens
atgtcctgaggaagtcctcagacttaaaacagatagttctttctcttcttgccccaggcagaaaattctgactacttctgcctgtagtctggagtcttgggagttagaagaaaagcttctgactcaaggagttcctgacatctctgtgtggactctttcaagcgaagttcagagaaagttcagttaggaagccctcctgtagccaccaaatgccccttctgccacgaagataaaagctagtaatgattggcacatgggaatgaccatgtagttgagttaatcaactgtgcagatatgacggctacctacgtgaaaccccagagccttctactctggcttttgatttgacaaccasaagccacaacttaaaatggcattggtgttactgaatgctttcaggagctcttttgcccttttgtgttagatcccaaatattaatggaaatcagcctttacttgcagttttctactgactgtgggaaaagaaattctgcatattttttaaagtagtatcaatcaagtcatcctacaaggtgtgtacaagtt

SEQ ID NO: 44272 - DNA, 535 bp, Homo sapiens
caggctcaaagcctcagctaaactcagatctctgtggagactttgagtgaacaggaaaccagagccagagctacttaatgctagcacttagttctcaatttaacgggttcccccagttgactcccccagagactaaatgttttctaaagtttagtctctcccctgtacaaagagaatcagccagctggcttgatgctccagggagactttcccagaactgtatcaggtgaagcctgcaaactggtgggtggtgagacaccagctgctatgtgttctcccctctcagcaatgagggcaggaagcaaggcaggccaccaaatccaaggactacactgagagatgtgagaaaccatacggtgctgtgtagaagtcagacaaacgaaatgcagatrccagctccccctcagcccctccactttgctgccacctgcctattgtcattcctcactgctaatggcagagaataaagagaatgttaatagtcccaagatgtcactgaagaaggatcagatcccatatcaaaggtttactttaa

SEQ ID NO: 44273 - DNA, 795 bp, Homo sapiens
tgcatattttgaaaaattgttcaggtgtgtatagtgttgaaaacaatattcaaaaattatctgtctttgagtcatatgttttatgaaaaaaaaggtctttccaaaaaggtaattaaagaaatattaggtcagaaatatccttttttggtataaagcagttttccttttctgtgcaacttttttatttaatagtaataataataatwattattatttgagatgagatttcactctatcactcagtctggagtgcagtggcgtgatcttggcctcccaggctcaagcaatcctcccatcttagcctcccggttggctgagactacaggtgcacatcgccacgcctagctattaataatttttctatgttttctttgtagagacagggttttgccatgttgcccaggctggtctcgaactcctggactcaagcgatccacccacctcagcttcccaaagtgctgagattataggcatgagccaccatgtccagtcttattttaaattatatctgagtctttgaaattgggttttctaatttagctttttatttactttgaatctacttactttgtttgttctattgcctgaagtttctagtatttaagttaacctaaatttactgtccctaagatatgctaaattgagtttcaatctctcttctattattgctttggtattattgccttcagttgataaaaatcaattaaattcacttcaaaatgaaagaaaatttcatcttgcagtatcacatcaggaaaccaatttttgataaatagtattcacctcacaatgttg

SEQ ID NO: 44274 - DNA, 1819 bp, Homo sapiens
taattcagtcactgagtaacaaacaagagaaattattgaaaacaattaatcaagacaattaaatggcaaagactatgaatcatatttatcttggttcagaaggaaaatatgtcttgagaaaaacatgcagatttagatatctctgtgtttraagtctttaactttcttatatggtaaactgaaattctggaaaagaagctaacttaaaaaaacagtggaaaaagagaagtaaaacaattttatataaaaggcacaagacaaactctatatttcttagctttgagttaggctggaaaattttaccacattttgaaactagttatcttaccgtaacagtgaaattattaaaagtcctaagaatgattgagcagacatatatagtgtatgcaaaactgcattatgtttcaatatgtgtgtatattatgacattagtatttgctttaaatctcttctctaagatactgaattatgaaagacagaatttactttattcttatttatttattttggagacagagtttcactcgtttcccaggatggagtgcgatggcgcaatctcagctcacagcaacctcagcctcccaggttcaagtgattctcctgccttagcctcctgagtagctgggattacaggcatccgccacaacgccgggctaattttgtatttttagtagagatggggtttctccactgttggcaggctggtctggaactccggacctcaggtgatctgcccatctcggcctcccaaagtgcagggattacaggcgtgagccaccatgcccagcctcctttttatttttataatatgaaaataaaaatgataattgtcagaataaacttctctatacagatactacagaagataccttcctttttgttcttttatgtctgtcattcagtctagattttgcagtcttatttggcaggcacacttaaatttcaaaatctagaacttataaaaagtggttttcaataaatatttttaaatacttttaaatgtttacaataaagtatatcactttttaaaattaatatataagtatataagcatatttataaataagcaaaatataatggtaaaatgagtatctaaaaggaaatatggaagttggtctaagaatgtcataatgcttcctacacagactatttattacagtttttaataaatgaagcatagtctgctcttcataatgaataatcttattatattttaatatcatatagcatagtgtttattttctaaaatgcttttcatagagtaaaaatgccatcaattaaaacagaaggcaaaaatcgatggaatactatcttagattgtttaagcaaaagcaatgaaaactagaattgtgtataaaactatcttccaagagagaaggcaatataaagacatttttggaaaaaaatgattttttttaacacccagaaaactctcgaaagaaagaaactgtcccttaataaaacgaatggaatggaaatcacttttcatagaaaataaggacattgataaataatatgggtaaatccaaactgtcactgactttgtaaaaaagggcaattaggggacttaaaaacaaaataaaaatgaaatctaagatacaaataacatggaatatgatgagaggggttagaaatcagagataaacattttgaagtccttcaggacttcaattcaggaggattacaaatagattaagtagagatcgcattaagttaaacatccatcttaaaaattgcaacaatctgtatgtgtgtgtgtaactttgtgcacaaatagtagaaactgttaaaatccaatgaaatgtttataaaactaagg

SEQ ID NO: 44275 - DNA, 1819 bp, Homo sapiens
taattcagtcactgagtaacaaacaagagaaattattgaaaacaattaatcaagacaattaaatggcaaagactatgaatcatatttatcttggttcagaaggaaaatatgtcttgagaaaaacatgcagatttagatatctctgtgtttaaagtctttaactttcttatatggtaaactgaaattctggaaaagaagctaacttaaaaaaacagtggaaaaagagaagtaaaacaattttatataaaaggcacaagacaaactctatatttcttagctttgagttaggctggaaaattttaccacattttgaaactagttatcttaccgtaacagtgaaattattaaaagtcctaagaatgattgagcagacatatayagtgtatgcaaaactgcattatgtttcaatatgtgtgtatattatgacattagtatttgctttaaatctcttctctaagatactgaattatgaaagacagaatttactttattcttatttatttattttggagacagagtttcactcgtttcccaggatggagtgcgatggcgcaatctcagctcacagcaacctcagcctcccaggttcaagtgattctcctgccttagcctcctgagtagctgggattacaggcatccgccacaacgccgggctaattttgtatttttagtagagatggggtttctccactgttggcaggctggtctggaactccggacctcaggtgatctgcccatctcggcctcccaaagtgcagggattacaggcgtgagccaccatgcccagcctcctttttatttttataatatgaaaataaaaatgataattgtcagaataaacttctctatacagatactacagaagataccttcctttttgttcttttatgtctgtcattcagtctagattttgcagtcttatttggcaggcacacttaaatttcaaaatctagaacttataaaaagtggttttcaataaatatttttaaatacttttaaatgtttacaataaagtatatcactttttaaaattaatatataagtatataagcatatttataaataagcaaaatataatggtaaaatgagtatctaaaaggaaatatggaagttggtctaagaatgtcataatgcttcctacacagactatttattacagtttttaataaatgaagcatagtctgctcttcataatgaataatcttattatattttaatatcatatagcatagtgtttattttctaaaatgcttttcatagagtaaaaatgccatcaattaaaacagaaggcaaaaatcgatggaatactatcttagattgtttaagcaaaagcaatgaaaactagaattgtgtataaaactatcttccaagagagaaggcaatataaagacatttttggaaaaaaatgattttttttaacacccagaaaactctcgaaagaaagaaactgtcccttaataaaacgaatggaatggaaatcacttttcatagaaaataaggacattgataaataatatgggtaaatccaaactgtcactgactttgtaaaaaagggcaattaggggacttaaaaacaaaataaaaatgaaatctaagatacaaataacatggaatatgatgagaggggttagaaatcagagataaacattttgaagtccttcaggacttcaattcaggaggattacaaatagattaagtagagatcgcattaagttaaacatccatcttaaaaattgcaacaatctgtatgtgtgtgtgtaactttgtgcacaaatagtagaaactgttaaaatccaatgaaatgtttataaaactaagg

SEQ ID NO: 44276 - DNA, 1819 bp, Homo sapiens
taattcagtcactgagtaacaaacaagagaaattattgaaaacaattaatcaagacaattaaatggcaaagactatgaatcatatttatcttggttcagaaggaaaatatgtcttgagaaaaacatgcagatttagatatctctgtgtttaaagtctttaactttcttatatggtaaactgaaattctggaaaagaagctaacttaaaaaaacagtggaaaaagagaagtaaaacaattttatataaaaggcacaagacaaactctatatttcttagctttgagttaggctggaaaattttaccacattttgaaactagttatcttaccgtaacagtgaaattattaaaagtcctaagaatgattgagcagacatatatagtgtatgcaaaactgcattatgtttcaatatgtgtgtatattatgacattagtatttgctttaaatctcttctctaagatactgaattatgaaagacagaatttactttattcttatttatttattttggagacagagtttcactcgtttcccaggatggagtgcgatggcgcaatctcagctcacagcaacctcagcctcccaggttcaagtgattctcctgccttagcctcctgagtagctgggattacaggcatccgccacaacgccgggctaattttgtatttttagtagagatggggtttctccactgttggcaggctggtctggaactccggacctcaggtgatctgcccatctcggcctcccaaagtgcagggattacaggcgtgagccaccatgcccagcctcctttttatttttataatatgaaaataaaaatgataattgtcagaataaacttctctatacagatactacagaagataccttcctttttgttcttttatgtctgtcattcagtctagattttgcagtcttatttggcaggcacacttaaatttcaaaatctagaacttataaaaagtggttttcaataaatatttttaaatacttttaaatgtttacaataaagtatatcactttttaaaattaatatataagtatataagcatatttataaataagcaaaatataatggtaaaatgagtatctaaaaggaaatatggaagttggtctaagaatgtcataatgcttcctacacagactatttattacagtttttaataaatgaagcatagtctgctcttcataatgaataatcttattatattttaatatcatatagcatagtgtttattttctaaaatgcttttcatagagtaaaaatgccatcaattaaaacagaaggcaaaaatcgatggaatactatcttagattgtttaagcaaaagcaatgaaaactagaattgtgtataaaactatcttccaagaragaaggcaatataaagacatttttggaaaaaaatgattttttttaacacccagaaaactctcgaaagaaagaaactgtcccttaataaaacgaatggaatggaaatcacttttcatagaaaataaggacattgataaataatatgggtaaatccaaactgtcactgactttgtaaaaaagggcaattaggggacttaaaaacaaaataaaaatgaaatctaagatacaaataacatggaatatgatgagaggggttagaaatcagagataaacattttgaagtccttcaggacttcaattcaggaggattacaaatagattaagtagagatcgcattaagttaaacatccatcttaaaaattgcaacaatctgtatgtgtgtgtgtaactttgtgcacaaatagtagaaactgttaaaatccaatgaaatgtttataaaactaagg

SEQ ID NO: 44277 - DNA, 1819 bp, Homo sapiens
taattcagtcactgagtaacaaacaagagaaattattgaaaacaattaatcaagacaattaaatggcaaagactatgaatcatatttatcttggttcagaaggaaaatatgtcttgagaaaaacatgcagatttagatatctctgtgtttaaagtctttaactttcttatatggtaaactgaaattctggaaaagaagctaacttaaaaaaacagtggaaaaagagaagtaaaacaattttatataaaaggcacaagacaaactctatatttcttagctttgagttaggctggaaaattttaccacattttgaaactagttatcttaccgtaacagtgaaattattaaaagtcctaagaatgattgagcagacatatatagtgtatgcaaaactgcattatgtttcaatatgtgtgtatattatgacattagtatttgctttaaatctcttctctaagatactgaattatgaaagacagaatttactttattcttatttatttattttggagacagagtttcactcgtttcccaggatggagtgcgatggcgcaatctcagctcacagcaacctcagcctcccaggttcaagtgattctcctgccttagcctcctgagtagctgggattacaggcatccgccacaacgccgggctaattttgtatttttagtagagatggggtttctccactgttggcaggctggtctggaactccggacctcaggtgatctgcccatctcggcctcccaaagtgcagggattacaggcgtgagccaccatgcccagcctcctttttatttttataatatgaaaataaaaatgataattgtcagaataaacttctctatacagatactacagaagataccttcctttttgttcttttatgtctgtcattcagtctagattttgcagtcttatttggcaggcacacttaaatttcaaaatctagaacttataaaaagtggttttcaataaatatttttaaatacttttaaatgtttacaataaagtatatcactttttaaaattaatatataagtatataagcatatttataaataagcaaaatataatggtaaaatgagtatctaaaaggaaatatggaagttggtctaagaatgtcataatgcttcctacacagactatttattacagtttttaataaatgaagcatagtctgctcttcataatgaataatcttattatattttaatatcatatagcatagtgtttattttctaaaatgcttttcatagagtaaaaatgccatcaattaaaacagaaggcaaaaatcgatggaatactatcttagattgtttaagcaaaagcaatgaaaactagaattgtgtataaaactatcttccaagagagaaggcaatataaagacatttttggaaaaaaatgattttttttaacacccagaaaactctcgaaagaaagaaactgtcccttaataaaacgaatggaatggaaatcacttttcatagaaaataaggacaytgataaataatatgggtaaatccaaactgtcactgactttgtaaaaaagggcaattaggggacttaaaaacaaaataaaaatgaaatctaagatacaaataacatggaatatgatgagaggggttagaaatcagagataaacattttgaagtccttcaggacttcaattcaggaggattacaaatagattaagtagagatcgcattaagttaaacatccatcttaaaaattgcaacaatctgtatgtgtgtgtgtaactttgtgcacaaatagtagaaactgttaaaatccaatgaaatgtttataaaactaagg

SEQ ID NO: 44278 - DNA, 1819 bp, Homo sapiens
taattcagtcactgagtaacaaacaagagaaattattgaaaacaattaatcaagacaattaaatggcaaagactatgaatcatatttatcttggttcagaaggaaaatatgtcttgagaaaaacatgcagatttagatatctctgtgtttaaagtctttaactttcttatatggtaaactgaaattctggaaaagaagctaacttaaaaaaacagtggaaaaagagaagtaaaacaattttatataaaaggcacaagacaaactctatatttcttagctttgagttaggctggaaaattttaccacattttgaaactagttatcttaccgtaacagtgaaattattaaaagtcctaagaatgattgagcagacatatatagtgtatgcaaaactgcattatgtttcaatatgtgtgtatattatgacattagtatttgctttaaatctcttctctaagatactgaattatgaaagacagaatttactttattcttatttatttattttggagacagagtttcactcgtttcccaggatggagtgcgatggcgcaatctcagctcacagcaacctcagcctcccaggttcaagtgattctcctgccttagcctcctgagtagctgggattacaggcatccgccacaacgccgggctaattttgtatttttagtagagatggggtttctccactgttggcaggctggtctggaactccggacctcaggtgatctgcccatctcggcctcccaaagtgcagggattacaggcgtgagccaccatgcccagcctcctttttatttttataatatgaaaataaaaatgataattgtcagaataaacttctctatacagatactacagaagataccttcctttttgttcttttatgtctgtcattcagtctagattttgcagtcttatttggcaggcacacttaaatttcaaaatctagaacttataaaaagtggttttcaataaatatttttaaatacttttaaatgtttacaataaagtatatcactttttaaaattaatatataagtatataagcatatttataaataagcaaaatataatggtaaaatgagtatctaaaaggaaatatggaagttggtctaagaatgtcataatgcttcctacacagactatttattacagtttttaataaatgaagcatagtctgctcttcataatgaataatcttattatattttaatatcatatagcatagtgtttattttctaaaatgcttttcatagagtaaaaatgccatcaattaaaacagaaggcaaaaatcgatggaatactatcttagattgtttaagcaaaagcaatgaaaactagaattgtgtataaaactatcttccaagagagaaggcaatataaagacatttttggaaaaaaatgattttttttaacacccagaaaactctcgaaagaaagaaactgtcccttaataaaacgaatggaatggaaatcacttttcatagaaaataaggacattgataaataayatgggtaaatccaaactgtcactgactttgtaaaaaagggcaattaggggacttaaaaacaaaataaaaatgaaatctaagatacaaataacatggaatatgatgagaggggttagaaatcagagataaacattttgaagtccttcaggacttcaattcaggaggattacaaatagattaagtagagatcgcattaagttaaacatccatcttaaaaattgcaacaatctgtatgtgtgtgtgtaactttgtgcacaaatagtagaaactgttaaaatccaatgaaatgtttataaaactaagg

SEQ ID NO: 44279 - DNA, 1819 bp, Homo sapiens
taattcagtcactgagtaacaaacaagagaaattattgaaaacaattaatcaagacaattaaatggcaaagactatgaatcatatttatcttggttcagaaggaaaatatgtcttgagaaaaacatgcagatttagatatctctgtgtttaaagtctttaactttcttatatggtaaactgaaattctggaaaagaagctaacttaaaaaaacagtggaaaaagagaagtaaaacaattttatataaaaggcacaagacaaactctatatttcttagctttgagttaggctggaaaattttaccacattttgaaactagttatcttaccgtaacagtgaaattattaaaagtcctaagaatgattgagcagacatatatagtgtatgcaaaactgcattatgtttcaatatgtgtgtatattatgacattagtatttgctttaaatctcttctctaagatactgaattatgaaagacagaatttactttattcttatttatttattttggagacagagtttcactcgtttcccaggatggagtgcgatggcgcaatctcagctcacagcaacctcagcctcccaggttcaagtgattctcctgccttagcctcctgagtagctgggattacaggcatccgccacaacgccgggctaattttgtatttttagtagagatggggtttctccactgttggcaggctggtctggaactccggacctcaggtgatctgcccatctcggcctcccaaagtgcagggattacaggcgtgagccaccatgcccagcctcctttttatttttataatatgaaaataaaaatgataattgtcagaataaacttctctatacagatactacagaagataccttcctttttgttcttttatgtctgtcattcagtctagattttgcagtcttatttggcaggcacacttaaatttcaaaatctagaacttataaaaagtggttttcaataaatatttttaaatacttttaaatgtttacaataaagtatatcactttttaaaattaatatataagtatataagcatatttataaataagcaaaatataatggtaaaatgagtatctaaaaggaaatatggaagttggtctaagaatgtcataatgcttcctacacagactatttattacagtttttaataaatgaagcatagtctgctcttcataatgaataatcttattatattttaatatcatatagcatagtgtttattttctaaaatgcttttcatagagtaaaaatgccatcaattaaaacagaaggcaaaaatcgatggaatactatcttagattgtttaagcaaaagcaatgaaaactagaattgtgtataaaactatcttccaagagagaaggcaatataaagacatttttggaaaaaaatgattttttttaacacccagaaaactctcgaaagaaagaaactgtcccttaataaaacgaatggaatggaaatcacttttcatagaaaataaggacattgataaataatatgggtaaatccaaactgtcactgactttgtaaaaaagggcaattaggggacttaaaaacaaaataaaratgaaatctaagatacaaataacatggaatatgatgagaggggttagaaatcagagataaacattttgaagtccttcaggacttcaattcaggaggattacaaatagattaagtagagatcgcattaagttaaacatccatcttaaaaattgcaacaatctgtatgtgtgtgtgtaactttgtgcacaaatagtagaaactgttaaaatccaatgaaatgtttataaaactaagg

SEQ ID NO: 44280 - DNA, 1819 bp, Homo sapiens
taattcagtcactgagtaacaaacaagagaaattattgaaaacaattaatcaagacaattaaatggcaaagactatgaatcatatttatcttggttcagaaggaaaatatgtcttgagaaaaacatgcagatttagatatctctgtgtttaaagtctttaactttcttatatggtaaactgaaattctggaaaagaagctaacttaaaaaaacagtggaaaaagagaagtaaaacaattttatataaaaggcacaagacaaactctatatttcttagctttgagttaggctggaaaattttaccacattttgaaactagttatcttaccgtaacagtgaaattattaaaagtcctaagaatgattgagcagacatatatagtgtatgcaaaactgcattatgtttcaatatgtgtgtatattatgacattagtatttgctttaaatctcttctctaagatactgaattatgaaagacagaatttactttattcttatttatttattttggagacagagtttcactcgtttcccaggatggagtgcgatggcgcaatctcagctcacagcaacctcagcctcccaggttcaagtgattctcctgccttagcctcctgagtagctgggattacaggcatccgccacaacgccgggctaattttgtatttttagtagagatggggtttctccactgttggcaggctggtctggaactccggacctcaggtgatctgcccatctcggcctcccaaagtgcagggattacaggcgtgagccaccatgcccagcctcctttttatttttataatatgaaaataaaaatgataattgtcagaataaacttctctatacagatactacagaagataccttcctttttgttcttttatgtctgtcattcagtctagattttgcagtcttatttggcaggcacacttaaatttcaaaatctagaacttataaaaagtggttttcaataaatatttttaaatacttttaaatgtttacaataaagtatatcactttttaaaattaatatataagtatataagcatatttataaataagcaaaatataatggtaaaatgagtatctaaaaggaaatatggaagttggtctaagaatgtcataatgcttcctacacagactatttattacagtttttaataaatgaagcatagtctgctcttcataatgaataatcttattatattttaatatcatatagcatagtgtttattttctaaaatgcttttcatagagtaaaaatgccatcaattaaaacagaaggcaaaaatcgatggaatactatcttagattgtttaagcaaaagcaatgaaaactagaattgtgtataaaactatcttccaagagagaaggcaatataaagacatttttggaaaaaaatgattttttttaacacccagaaaactctcgaaagaaagaaactgtcccttaataaaacgaatggaatggaaatcacttttcatagaaaataaggacattgataaataatatgggtaaatccaaactgtcactgactttgtaaaaaagggcaattaggggacttaaaaacaaaataaaaatgaaatctaagatacaaataacatggaatatgatgagaggggttagaaatcagagataaacattttgaagtccttcaggacttcwattcaggaggattacaaatagattaagtagagatcgcattaagttaaacatccatcttaaaaattgcaacaatctgtatgtgtgtgtgtaactttgtgcacaaatagtagaaactgttaaaatccaatgaaatgtttataaaactaagg

SEQ ID NO: 44281 - DNA, 606 bp, Homo sapiens
tggtccaaggggctttttggtaaatccagaatgtaggctctccttgacttttccctggtcccctcttcctaccaccccctcctagcttattctcttatcctctgaggtctctgtgggagtctaaattccacacctggctttcacgtggctctgggcccatctaacataaaatgtgtcccttcacttctttcctttcctgtcatcaaagcatgtttgactggaaggaactatagcgatcatctaacccaacctgcattttatggatgaggaagctgctgccctaagagggtcactgacttcccawggtctcacacctcattgaggcgaggctggaaaggaagttcttgtccattttcaaatccagggctctaccatggatccattctgcctgtatgtagagcttccaagcttgtcgggggcctccacatctagaaagactcagcctgccctccttgagcctttgctcgaaggggcgctcaaacctagggtatgtgtcaagcacagtggtaacagcatgtgtcctggaggtggactgccagaattcaaatgcttacctttctgtttactaactggggtcttaggcaaattccctaacctctatgagtt

SEQ ID NO: 44282 - DNA, 622 bp, Homo sapiens
tattttcatgctagtgtaataattattttagtctcctccatctttactcttcactcatttattaaaatcataaactttatttggtcctttgctatctacttgccaatgacagagaaataaaaactcaacttcgcaattcctgatgtcaacatgcttaaaaggtagtggagatgatatactatcaggatctgctttgaggtgccacaagtgggataggtatgctcatgggcacaaaaatatgaccrggtcaaaaaaagcttttctgagatgacacttacaccgattggaaaaataaagatagcaaccacaataaggtagcttatttaattggccaagaaatgaagtgtgtgtgtgcgtgtttgtgtgtgtgtgtgggtgtgtatgatgactactaccacagtagcccacccccttaccttcagggaatacattccaagaaccccagtggatacatgaaaccgcagatattcttgaaccttatatacaccacgctttttcctatacatacacacttatgataaagtttaactacaactttgtcacaatgactgattaacaagaataacaataaaatagaacaattataacaatatactataatgaaagttagacaaatatgaac

SEQ ID NO: 44283 - DNA, 589 bp, Homo sapiens
ccaggcatggtggctcatgcctgtaatcccagcactttgggaggccaaggcgggtggatcacaaggtcaggagatcgagaccatcctggctaacacggtgaaaccccatctctactaaaaatacaaaaaattagccaggtgtggtggtggacacctgtagtcccagctattcaggargctgaggcaggaaaacggcgtgaacctgggaggcagaggttgcagtgagccgagatcgcaccactgcactccagcctgggcgacagagcgagactccgtctcaaaaaaaaaaaaaaaaaaaagtcataattttattttgtgcaatttagaacatttatcgtcatttttgtttcttcacataaaacatcaatatgattttaatcatgccacagctattcatcatatgcacataagatctataatactataataaaacattaacttataacataagaaactaaagacgataaccttctttaccatagttctaaaagcttttcccaaacttaaaatacaaatttccttgagaagggttatattcttcaaaatatagcaaaaactcaaagaatcaaattttgggaccaggcagcac

SEQ ID NO: 44284 - DNA, 589 bp, Homo sapiens
ccaggcatggtggctcatgcctgtaatcccagcactttgggaggccaaggcgggtggatcacaaggtcaggagatcgagaccatcctggctaacacggtgaaaccccatctctactaaaaatacaaaaaattagccaggtgtggtggtggacacctgtagtcccagctattcaggaggctgaggcaggaaaayggcgtgaacctgggaggcagaggttgcagtgagccgagatcgcaccactgcactccagcctgggcgacagagcgagactccgtctcaaaaaaaaaaaaaaaaaaaagtcataattttattttgtgcaatttagaacatttatcgtcatttttgtttcttcacataaaacatcaatatgattttaatcatgccacagctattcatcatatgcacataagatctataatactataataaaacattaacttataacataagaaactaaagacgataaccttctttaccatagttctaaaagcttttcccaaacttaaaatacaaatttccttgagaagggttatattcttcaaaatatagcaaaaactcaaagaatcaaattttgggaccaggcagcac

SEQ ID NO: 44285 - DNA, 589 bp, Homo sapiens
ccaggcatggtggctcatgcctgtaatcccagcactttgggaggccaaggcgggtggatcacaaggtcaggagatcgagaccatcctggctaacacggtgaaaccccatctctactaaaaatacaaaaaattagccaggtgtggtggtggacacctgtagtcccagctattcaggaggctgaggcaggaaaacggcgtgaacctgggaggcagaggttgcagtgagccgagatcgcaccactgcactccagcctgggcgacagagcgagactccgtctcaaaaaaaaaaaaaaaaaaaagtcataattttattttgtgcaatttagaacatttatygtcatttttgtttcttcacataaaacatcaatatgattttaatcatgccacagctattcatcatatgcacataagatctataatactataataaaacattaacttataacataagaaactaaagacgataaccttctttaccatagttctaaaagcttttcccaaacttaaaatacaaatttccttgagaagggttatattcttcaaaatatagcaaaaactcaaagaatcaaattttgggaccaggcagcac

SEQ ID NO: 44286 - DNA, 1851 bp, Homo sapiens
tcactctccttttctattttagagtctgatctatgaaactctttttcctccctttcctcattgcattcagggtttctttgacataggacacagtgaactgctctttagttcttgtctttccccaaccctttgtgaggtatcaaatccaagtccactaatctataaattttacctctagagccatrcaaaagagaatcagttactatcacacttataggtctagagaaaaggatgcaaagctaaattgcacaatctcgtttgaaacaattctagttctattagggatcttgtcagcagtaaaaaaatgcacaagcagcaatcccagaaatgctgagaggctatccaaaactcacctttttccaaaatcttaccttcttctaaaaagaattcaaagtattctttgttctcatttttgacaagattttgatttgggatatgagtagaaaacagtgaatatacagtagtaggtactaaatatataatcagcttttgttttagaagctacatatggaagcttatgaaatcttttaatcaagtagttttgactatccacaaccaaacagaaatctcttaacagcccaaattaccatacatgattctattaattaccaaacttaatgtgttgtgcaaattctaccaaataagtaataaagcttatcccataaccaaccatgattcagctaatcaagtttctaaatcctgcttcatttacttggatactaaagcaagacataaatgaatagatttaatgtccttcgaggttatgtggaatttgaagctattgatggaaatttacctatgagttagtcaataggtcatttgtctgggaaagtggtagccagacagataatgaactttgcgtctacatctggttctcatttttgagtctagcttaaaatcagagtcaacaaattgaccaaagagtttagtatctcattgccattttatataggtggctgacctgtgccaagaaagggagagatgaatctgatggggactacagagtttttaaatatacttgcaactgaatctaatctgattcttaaaggcatattttggatctagagcactgagaagaaaggctgccctaataccagttaaactcagatggtgacagaaaatgtactcaagtagattctgatgtgtttcctttgtcaaactgagttcaattatggctcaaattaatttgataaaaatgcaaaatttattttaaaacttattagaaacaaaggagaatatgcctgtaaaccaacaggtattggtgtatttctcaaagacttaaaaaaataacaaacacaacaaggagactgaagactttacattttctttccagtttggtctaacttttagttggcatcttggatctattactaaatgagaaaataaatctgaccccctagtagagtttactattgatagagaatggtatgtctataaaaaactaatatatgtaatatgtaattaagaggtggtggcaagctgggtgcggtggctcacgcctgtaatcccagccctttgggaggccgaagtgggcggatcacgaggtcaggagttcgagaccagcttggctaacatttagtaaccccatctttactaaaaatacaaaatattagccgggtatggtgatgcgcatctgtaatccctactactcaggagactgaagcaggagaatcacttgaacccgggaggtggaggttgtagtgagccaagatcaggccattgctctccaacctgtgtgacagagcgaaactccatcacaaaaaaaaagaggtggtggtgtcagaatcttgcggtttagatttataatggcgttcattatttttaaattttatctagttttttttttgctac

SEQ ID NO: 44287 - DNA, 1647 bp, Homo sapiens
tttctatgcatccatgtgttctcatcatttagctcataggtgaaaatatgtggtatctggttttctgttcctgtgttagtttgctaaggataatggcctccagctccatccatgtccctgcaaaggactggatctcattcttcttaatggctgcatagtattccatcacatatacataccacaatttctttatctagtctatcattgatgggcatttaggttgattccagtctttgctattgtgaaccgaaagaagacatacatgtggccaaaaatcatgtgaaaaaaagctcaccatcactgatcattagagaaatgcaaatcacaatcacaatgaggtaccatctaacactagtcagaatggctattatgaaaaagtcaagataatagatgctgctgaggttgtggagaaaaaggaatggttatacactgttggtgggaatgtaattgagtttgaccattgtggaagacaatgtggtgattcctcaaagacctaaagacagaaataccatttgacctagcaattctactactggggtatataccccaaaggaatataaatcattctattataaaatcagaagaaagtttaagtgcaaaggtgtggaaatgagagacagcacggaatattcagagaagagaaagtagctagaccgagaagtgagtgtgacatgttcaactttattattatacaaacatctattttccgtttagaagttagcatggttgaaaacaattattttcactggagataatgcaactgtagagctgtttaacttctaatgtgtacctcagacccctaactaccaaagaaataaagacgtagcaaagtgggacctgaggctgataggacacagactaagcacatctgccctccgctccaacttttcatacatcactaaattgttccttggagtaatttgagaaccaggaattaaataacaaagccctaatttgaggggatttagctctaaatcatactggaattgtagtagcaagatggtagaaaaaaggaaggaaactataaatgaataggrccaacataaaacgatagacatgcatataagaatggatttcagaggaggtcaaatttagatcctctgaattggatggtaaacttgagttcaacagtagcagaaatctataatacagattttcaagaaatggcaatattcaggcaggtaattcttatgggtatctggtttaagaatctgaagatagtgataataagaccccgcctccatggaaaaggaagaaatagtggcaaggaatatctacacagtgtcagagccctaacctagaggaatgtagtttcatcagaaaaactgaaaagaaaataaagaaatcaatccagaaatgtagtcatacgaattgggaagatacaatggggtgttttaaagcctgaatctcaaggatcacagggaccctgggataaactccctacattatgatgccaggccttagacagcataatgaataaaggtgcctgcttgtagctaaccattggggttctgaaagtactgactgcagagagctgactccagaattggtatcagtaagtctgcaggacaacaatatcagagacttcaagggctagggagggccaggctggatagcaaggtaaaaacatatcaatcatattccaga

SEQ ID NO: 44288 - DNA, 543 bp, Homo sapiens
gtggagaaaactgtgcagcgcccttgttttctgtcgtgctttgttttgtatttcagatgtgctggtcacatctgttctttatctcccctcttccactgtgattttgtttacaggatcccagaacaatggggactgcagaatctccacacagatgacaggagacaaggctctcagggggtagtcactgtctgcaaaacgtggagccaaaggcgtggttttcagagtagctgccaacactccaagttactcaggctcatggaccaggaatgactggaaaggagactgccttgtctggggaagatccagacccacagatgcaattttttgaaagtaatctctttacaatggcctgcccatctcctctctctgcttagaagtttttgtgttctgtaaggagccttctaatgggcttctgtctgcctgggcttctgtccctttggttctcccagtctkctctctgtctcttttgtttctttcatccctggattccaggaagtcaaggtcagggcagcttaccagtccctaaacaccattattttggca

SEQ ID NO: 44289 - DNA, 543 bp, Homo sapiens
gtggagaaaactgtgcagcgcccttgttttctgtcgtgctttgttttgtatttcagatgtgctggtcacatctgttctttatctcccctcttccactgtgattttgtttacaggatcccagaacaatggggactgcagaatctccacacagatgacaggagacaaggctctcagggggtagtcactgtctgcaaaacgtggagccaaaggcgtggttttcagagtagctgccaacactccaagttactcaggctcatggaccaggaatgactggaaaggagactgccttgtctggggaagatccagacccacagatgcaattttttgaaagtaatctctttacaatggcctgcccatctcctctctctgcttagaagtttttgtgttctgtaaggagccttctaatgggcttctgtctgcctgggcttctgtccctttggttctcccagtctgctctctgtctctttygtttctttcatccctggattccaggaagtcaaggtcagggcagcttaccagtccctaaacaccattattttggca

SEQ ID NO: 44290 - DNA, 549 bp, Homo sapiens
cccacctcagcctcccaaagtgctgggattacaggcatgagccaccgtccccggctgaatccctcagttttctaaagtgcagttttgttatctgtaaaatggaaataataagagcaatgcaaggattagattgagctgatgcrcgtgatacccttagcacagcacctggctcaatcaatgacagccacgattggatcagattctgcttgcttacagtcagccgtataattaaccctcctccctccacttgccaccctccaccaaaaacccagagctaatattaagaagctttgatagttctaatctgctcttcccttcctccaaggggataaataagctctccactggctttaagccaacagccacccacaccttgaccgcatgaagtttctccttgtctgcctccccaagcacgaaacaggcaccatttgatgtgttttcactgttccaattttccattttccaggccaagacgaattgacagaacttccaaaacactttgcaaagacagtgagtgcacaaagctgcagctcacagccttgtcccgtg

SEQ ID NO: 44291 - DNA, 549 bp, Homo sapiens
cccacctcagcctcccaaagtgctgggattacaggcatgagccaccgtccccggctgaatccctcagttttctaaagtgcagttttgttatctgtaaaatggaaataataagagcaatgcaaggattagattgagctgatgcacgtgatacccttagcacagcacctggctcaatcaatgacagccacgattggatcagattctgcttgcttacagtcagccgtataattaaccctcctccctccacttgccaccctccaccaaaaacccagagctaatattaagaagctttgatagttctaatctgctcttcccttcctccaaggggataaataagctctccactggctttaagccaacagccacccacaccttgaccgcatgaagtttctccttgtctgcctccccaagcacgaaacaggcaccatttgatgtgttttcactgttccaattttccattttccaggccaagacgaattgacagaacttccaaaacactttgcaaagacagygagtgcacaaagctgcagctcacagccttgtcccgtg

SEQ ID NO: 44292 - DNA, 556 bp, Homo sapiens
cagactaagatgagaaatgaatagagctcacattgtggagataacagccttgcactaggcctattattagcagagcttatgtctccctttctcattcttcttcagtgcaaaaaactttacacaatttagtgttaagtttttctaataggctttctacctctttccccaacaacagtatctaycatgaattaaatgatatatgaatgaattttgagatacagtagaatttacttaataaagtgctaaagcaaatgcctttgggacataaaatcttttatatgactaaccattctaatatagcttttcaaaatgtcaaatttttccgtattggttttgcttgtaaactgtaagttattttgaaatggggtgcctttaactatatctaccactggggtcaatagggtgctattaataagttagcatggagagaagttcattgatcagagattaatgaatgggtctgtctaccagtcaggattaaattttactgatagtaacagtgacctcaaataattgtatctttaacaagatagaaatttacttattttcacgcaaa

SEQ ID NO: 44293 - DNA, 1460 bp, Homo sapiens
ggcattacgcattagacaaaactcatggtattatacaacacaaagagtaaaccctgatgtaaactgtggacattagttaataataatgtatcagttaagctcggttcatcaatgacaacaaatgtactaaaccaatgcaagatgtcaataataagggaaactgttagtctgggggtgcagggagtatgtgaatcactctgtactttctgttcaattttttctgtaagcctaaactactctaagaaataaagtctattaattaaaagaaaagacttggactaagggttttaccagcagagactacatgatgtgagcaccaggaagctggaggtttatggtaccatataggcaacattgtatttagactggatgcagtgtttgaggttttaagattggaatcagggcgagcagtataataatactaattatcattttttgacctcctaccaggagctaggcattgtgctgaagtgtttagataatctaatgtaattctcacaataactcttgaagtaggtaccattatgtatatgaatgacccagattaattaattcacagaaacatttaccaaagcacctgctagacgcttgggattcagcactggacaatacaaacaagtaacttacgaaatatcacatggcaaataagtgatggggtctagactctagttcatttctatctaatgtctatattgttaatcaaaactattatttactagccctgcaatttcagaacagaaacttaaccttattggtcttcaatttccttatctgtaaactagggataatatttaataacatccatcttataacagtgaagtgaggatgaaatgaagagttaaaatatgggccaactagcaggtattgaaggagttctggtccctttcttctctgatgctttgaggttctgaatgcctttgctgttctgaatgcctttgctccaatattctagatgccattggatttccacatccctagcacttttatgaggttcttccttattctcactttccaagtaagacaccctatgtccttaaactccactttcttgaatctctggaaagggtcgtttctcttttggtaatttgtgttctgataggtagacttctaagatggtcttctggtactcattcccttgtatcatttcctccttttgagtgtggtctggatatagtgaattgttttaagtacagactatagcaaaggtgatgccatatcatttacatgattaggttacaaaagattgtgagtttcattttaccagcatacactctttttttttttttttttgaggcagagtcttgctgtgttgcccaggctggagtgcaatggcgctatctcggctcactgcaagctccttctccygggttcatgccattctcctgcctcagcctcccaagtagctgggactacaggtgcccgccaccactcctggctaatttttatatttttagtagaga

SEQ ID NO: 44294 - DNA, 592 bp, Homo sapiens
gcaatgtcaggctgggcaccgtggctcacacctgtcatcccagcattttgggaggccaaggtgggcagatcgcctgaggtcaggagtttgagaccagcctggccaacatggcgaagccccatctctactaaaaatacaaaaattagccaggcatggtggtaggcgcctgtaattccagctacttaggaggctgaggcaggagaatcacttgaacctaggaggtggaggttgcaactgcgttccggcctgggcgacaagagtgaaactctgtctcataaaacaacaacaacaaaaaaaaaacaagaagggcaatgtctccccagatgaagaacgtcagatggattaggagacttattgtctcctaataagggaaacacattcagatcaccccaaactaaggtactgatgtgatcagtaaaactatcatcggtgaaagcaatgtattggacctatggtttcttttcaggctactgcaaaagctacaggaagtttcctttgggtgatgcaaccagctctataaaactctaccacctgtggtttaggatgcagctgaggagcaccrggggctggatcttcaagggtagagatttat

SEQ ID NO: 44295 - DNA, 658 bp, Homo sapiens
aaacaagactctgctcctcgctttccatcaccatctcctacacaccctcattttctcatgctagaattgtcccagaaaccctgtctctctgcctactggtctcctccttctccaagtcatcctacctactgcagccagattaagattgctaaattattgctattgaaacacactgctgaacacaaagctgccacatgctcctgggcctggcttgctgcttcaattctgtctccactccccagagtgcacctcctgctctgctgtgccggggctgctttctgctgctcccagaggccacatggggggccttccaccctcagtcctaactgtatctagcctcttaccaatatctaggtcaagaatggcttctgactcagacatgttaaacacacacacccaacaaagacagcagcaacaacagcagcaacaaaacaactctttttttttttttttaaatgagacggagtttcgctgttgtcacccaggctggagtgcaatggcgccrtctcagctcactgcaaccttggctcactgcaacctcagcctccggggttcaagcgattcgcctgcctcagccttccacgaagctgggattacaagcgtgcgtcaccatgcctggctaatttttgtatttttagtagagatggagtttcaccac

SEQ ID NO: 44296 - DNA, 544 bp, Homo sapiens
tgtttctctctgaattccaactacacttccaaatcctgctcaggtgtcactcttggccagaatctttccctgatcaccacctccctcctacaatacacttaatcacactctcattaatcccaccttgtgtatccttgtgaattcttaagcatatatgtcacaatttaatcatctattttttggatttttttcatgatccacagactgcctgcatcaacatcacttggcaaagtcttaggtatgcaaatttttagtcccctctttagacctgttgaatcagaaactctgggagtggggcccagcaatccatggtgtaacaagttctccaggtgattctgataaaagctaaaattagaaaacccactctcctgggaacttcccttactcatcttaaatatcctaaatcactggcacaaagtagataataaacaaatgtttactgagctgaactttagcctctaagcctttaattcaataaaaccaccactggtcttctggaagacttccccagatragattctaaggaaatgtttaaaacaacacc

SEQ ID NO: 44297 - DNA, 593 bp, Homo sapiens
ttcaagaagtttaatatatcccaaatagtatgaacccaaagaaatatataccaggacacatcatactaaacttctgaaaagacagaaaawattgaaagcaggcacagaaacatgacttgttatccttaggggcacatgaattggaatgacagtgaatttcttatctaaagccatgggggcaagtaggaagtggcacaatatttttcaagtgccaaaagaaaagaactgtaactgttgatctacacaaatgttgatgaatttaaaagatgttatgctagattaaaggatgtaatgtttaaagttaaacattaagttgacttggtagatagctggtaaaacatttctaagtgtgtgagggtgtttttggaaaatagtatttgtttatattttttgtttttggaagtgtgcaattactttagtttttttcagctttattgaggtatagacaaaagattagtatttgattcaatagacaaacaagatctgccctcacaaatgtgggcaggcatcacctagttcattgaaggcctagatagaacaagaagggcagaggaagtgcaaattatctttctccttgagctgggacatacttt

SEQ ID NO: 44298 - DNA, 593 bp, Homo sapiens
ttcaagaagtttaatatatcccaaatagtatgaacccaaagaaatatataccaggacacatcatactaaacttctgaaaagacagaaaatattgaaagcaggcacagaaacatgacttgttatccttaggggcacatgaattggaatgacagtgaatttcttatctaaagccatgggggcaagtaggaagtggcacaatatttttcaagtgccaaaagaaaagaactgtaactgttgatctacacaaatgttgatgaatttaaaagatgttatgctagattaaaggatgtaatgtttaaagttaaacattaagttgacttggtagatagctggtaaaacatttctaagtgtgtgagggtgtttttggaaaatagtatttgtttatattttttgtttttggaagtgtgcaattactttagtttttttcagctttattgaggtatagacaaaagattagtatttgattcaatagacaaacaagatctgccctcacaaatgtgggcaggcatcacctagttcattgaaggcctagatagaacaaraagggcagaggaagtgcaaattatctttctccttgagctgggacatacttt

SEQ ID NO: 44299 - DNA, 578 bp, Homo sapiens
cttgtctgtcagagggccagccatgagaaccatcagaaaaaagtgggcataccaggttgcattctccatctagcagcctgtggtcacagcagcaagatgtctggctttccctaacttcaaccttcaaaccatttgttcatcccatttaatttttaatttttatttatttatttatttttgagacggagtcttgcttgctctgttgcccaggccggagtatagtggtgcgatctcagcttactgcaaccttygcctcctgggttcaagtgattctcctgcctcagtctctcgagtagctgggattacaggcgtgcgccaccacacctggctaatttttgtatttttagtagagatggagttttgccatgttggccagtctggtctcaaactcctgacctcaggtgatccaccccctttggcctcccaaagtgctgggattacaggcatgagccatcatgcccggcccatcccatttagtgtcagtttgttttaatcagtatttgatatttagatactgacatgttcaaattctatctatctgtaaaaaatgttttttaggtaacttcctaaattatttg

SEQ ID NO: 44300 - DNA, 533 bp, Homo sapiens
gactaggaaagcaagcagacatgaatttgaatcttgccttttcctgtcttaggcaaatcatgtaattgttttgtacttctgatttatttaagtaaaatagaagtaacattattcatgtatagggcatctgtgagtcctccctttcttccatstttcttgctctcattctttctatttattcatttagttattccaagtcatatctcacctattctttttttgaataatcagatgggaattctgggtagaaatttaaaaatgaaggttcaataaatatcccaggacagaatagctgtctgctggcttagacttgtcatcatcagttgcttaactgaagcaactgcacatagttatgcaaaacacacatgcatattcacttacagagaaaaccttcctgtaatggtgcctacctaaagcagcacaaatctgaaagatttattgatgataacagaactggggaatattttcagtgagtatgacaaatatttaatagccttagtaacaagttctgacaaattggttagcaaaccaca

SEQ ID NO: 44301 - DNA, 533 bp, Homo sapiens
gactaggaaagcaagcagacatgaatttgaatcttgccttttcctgtcttaggcaaatcatgtaattgttttgtacttctgatttatttaagtaaaatagaagtaacattattcatgtatagggcatctgtgagtcctccctttcttccatgtttcttgctctcattctttctatttattcatttagttattccaagtcatatctcacctattctttttttgaataatcagatgggaattctgggtagaaatttaaaaatgaaggttcaataaatatcccaggacagaatagctgtctgckggcttagacttgtcatcatcagttgcttaactgaagcaactgcacatagttatgcaaaacacacatgcatattcacttacagagaaaaccttcctgtaatggtgcctacctaaagcagcacaaatctgaaagatttattgatgataacagaactggggaatattttcagtgagtatgacaaatatttaatagccttagtaacaagttctgacaaattggttagcaaaccaca

SEQ ID NO: 44302 - DNA, 490 bp, Homo sapiens
cctaagaaatgttgtgaatgccatgttaaaaacctggcatttctaagatttttgtgaaatgctttagtgaagagcaagaaagttatgttgyttttcatagagaaaaaaattatctgtaatgtatgggtgaactagaacttttttgcatgtttagaggtcttaacaaactcttgatcaagggagttcattgtgtaattatcatcacatatttaatctgctttccacctaaattatcagtagtagggtcaacagcaaagtccacatttccaaaaatatgtggttgatttgcctccctaaaagtaactgggcttgagccactatgctggcatgtattgttttcttgaaggcaaccttagtttttaaaaagtattatcttgttttaaataacaaattatctgcaggccactaatccatttccttttagttttcttcttatattgatgaataggggtggggagtagcatcttttatcctcaatttggtccttagc

SEQ ID NO: 44303 - DNA, 573 bp, Homo sapiens
atcattattttaaaataaatcactatattcttaaagagttaatacctacacctctacaccttattaagaaatcactacattttatgttctcttttcaacatcatcaaacatggcagattcccaaattatccaaatatagcaacaggatatagtaataatatatgacaaataatacatagaatataacatactaatatatgttacatattatatcaaaaagaatattgcatgactatcagaatatcacattctccattatttccatattctctctcattcatgacctcrctgtcactcattccatcacaaattttattcaataaactttaatgaaactcatacatttttatcttgacattttatcgtaagacaatagaaagaaaaaatccctgtcaagtaggagctcgttatattttggaaaaacaacacagaacacaagacaaagtgtattgataaggatatcaacacaatattcaagagcttgaagtggggagcctaagaaatcaggtctatatgcagctatttacattaaggcatactgatcaatcctaggatacttcatgtctgcctgcc

SEQ ID NO: 44304 - DNA, 537 bp, Homo sapiens
caaagcacacacttctttcccatataaatattttgtcaaagataaaaacaaaattgcagtttggcaccataacaataatacatattaggactgccagaatgactgcgtgaggaactcagtgcagctatgtaactcgaaaataattaacaacaaaaaaaaaccaagaataaaaatatttaaaatcttgagaaaatgtcataaggacataaagcaaatggaaacctgttaattcaataaaatgaattaaatctctgtaacaaaagcaaaagtctataraacaagaacctactgctgtgtctggagttggttccttctggtgggttcatggaccggctgacttcaagaaggaagccgtggaccttcgctgtgagtgttacagctgttaaaggtggcacagacccaaagagtgagcctcagcaagattgatcgtaaagagcaaaagaacaaaacttccacaaagtagaagaggacccaagggggttgccactgttggctgaggtggccagcttttattcccttatttgtccctgcccatgt

SEQ ID NO: 44305 - DNA, 542 bp, Homo sapiens
tagaagttctccataaaaacactatttacaatgttaggagatagactggaaatttatttccttttcatctttattgagatataatagacaataaagattgtatgtattcaaggtgtactgtgatgttttgatatacatatacattatgaaatgattaccacatcaagctaataaacatgtccatcacgtcacatagttactattttttggtagtgagaatacttaatatctactctgttagcaaattacaagtatataatacattattatgaactatagtcactgtgctatacattaggcctccagaacttattcaccttataactgtaaatttgtacctttggaccaaggtctccctacttctcccatcttctcacccctggtaatcatagttctactgtttctatgtatttggcttttttggattccacatataagtgagatcacaccggcattactcacagtagccaagacatagaactatctaagtgtccattgacaggtggataaagaagttgtgctacacacacacacawacacac

SEQ ID NO: 44306 - DNA, 1785 bp, Homo sapiens
gctgggcttaatacatgggcaataggttgatctgtgcagcaaatgaccatggcacacatttacatatgaacaaacctttacatcctgcacatgtaccccagaacttgaaataaaagttgataaaacaaacaaacaaaaaagaaacctgcacatgtacccctgaatctaaaataaaagttgaaaaaaagaaaaaagaaaatcccattccaactataaggctgaaagtcaactgcacacatgagaataaaactcagcaaaattctctgtcagactattctgtttcctcaataatttgttcttttggccaattgattaaaatattgtaacatccttgaagacaatattttattataaacttattggcaattttataaagagaggtgactaccagttctagagttcttatcataacataggcacttgcgcctggccagcctccaagtcacaaccattttgtggcactggtgttattctacttgaggttgtttttctgtcaattttcaagacattctcttgcctgccagcttctaatcatattgacaatatatgacagcttcttggaagcctatttctgattaaaatgtcctttaaaattcactggatttggcaacaactttaaaccattggttatctgatatcctggaccatagctagagaagcagatggtgtgggacccagatggaagtggatttatttttccaagaaatacccctgaactcaatgactttgagtcagtctttatttcaaactttatttctacacagttcatctttcttattaaaaaaaaatggatttcagaatgtgtagatacaaggatattccagacagaaataacaaagctttcaatgcaatataaattattgattcaaaagtggaagtcatgttctttccagtgattttctcatagtccaaaatcctggcttttaaagttagacttactggtgttcatttttggattttgaatcgcactagctttgtgacctgaagcaaatcacttaagatctctgagcatcagttttcttttagataattcatatctttcttgctattatattattatgctattattgtatattcctttctatcctgagagttaaataatcatcctatgtatgggcctggttaatgttaataaggctagttttcttctttgtttccctgcaggaattggctttcatgctttattgatgtcctttgatttgtcagtatcattcaaacttttctctacaagtcctcccacttgcaagatatctccttgtaggttcatacccactctcttattttccttgtaacaagttttttgattgaatgtggataataatttctgcagtttttaaagttgcattgaattttcagggagaacacgccaaaacctatgaataattcaacattatcagaaaaggtcacctttctgcccctctgccacaattttctacaagtttttctttttctttctttttctttctttctttctttytttttttttttttttgagacagagtttcactcttattgcccaggctggagtgcaatggtccaatctcggctgaccgcaacctccgcctcccaggttcaagtgattctcctgcctcagcctccagagtagctgggattccggccatgcgccaccatgcccagctaatttttgtatttttagtagacatggggtttctctatgttggtcaggctggtctcacactcccgatctcaagtgacttacctgcctcagcctcccaaagtgctgggattacaggcatgagccaccgtgcccagctccaagttttt

SEQ ID NO: 44307 - DNA, 552 bp, Homo sapiens
tggctcagaggggcccgagcttggtttaaagctctgctgtcagcatctagaaattcttcctaatttttacacaagagagcccatatttcattttgcactgagccccacatattatgtagccagcctggcctaccacagacaagccaacaggcccaggtgctccccatcaccggcctcagtctgtcagtggtaaaatggaagcataatgcctgcctcacagttgccaaagctggccagggacccatacactcaacacttcatgagtgtgagatgccatccccctaacggagggccacggtttgctgcctggcaagtgggattattttcccaggtattggctaccacatgaatgttctgcaggtataacgaggccagagatagacacacacctcagaatgatggatgttgacatcatcatcatcatcatcaacatcatcttcatcactgtaaaacactgagctggccccagaatgggtcacatcatttaggggtctgaaagtgctgcacagcagggccaggggcagtcaaattcagcattggtaccaacmtgca

SEQ ID NO: 44308 - DNA, 557 bp, Homo sapiens
tataatgtccttcattttaatttggaattaatatgatttggaagacacaaaggggccacagctccaaagagctcccctttggtcttgccacggggccayaggtgggagagagtcctgggtctgctgggcctcctgagcatcttcctccggtacaggccccaggcagatgcactcccgttttcttccctcctcccaccctgatcaccagaggtaggaacaggccttgcagtctatctttatcctcatcgctgctgcttgccaggcattctgttgtttgttttggtgttttccccacctgtttagacaaaatggcatatgcagagtgtgccttaaaagaaaacaaaaaattgacacttgcttgaaatgtttaaagttcaaagtctgttttgtgcttgaacaaggcctagaaataacatgatgtggcaccgccattcttgccgcctggtatcaggaagtctggcggccctctgggcggtgagaaccctgatgccgccttttctggtaactttaagagcagggcagatttgccacacattctgagtgaaatgttatgacgg

SEQ ID NO: 44309 - DNA, 574 bp, Homo sapiens
taagccaaaattctgcaacatgaaaaaacaacagaaattcactgaacgatagagaaagggggtgctcatttgtgttattgatgtaatctartaaacagaaaaataaatttaaaaataagagaacagagaaacacattattcatatgaaaaaagatcatggaataaaaatgaacaaaaaaagagggtaggtcccaaagtgagtatgtaaagataaaaaggctgtaggtttaaaagaaaatgtagcaaactgagtataagtagaaacaggcagaaaaataagaggaatttgggcagtttttttaaaaaaatgccaaggtttataaatgaaaggagcagaagtaaaatgtgttatatacaggctaaactgattctgaaaaaaacttgttcactgatataattgagaagttcttgccaaatgcaggtaaaagaacaataacgtgcataataataaagatcacagaagatcaaagattaaatataaagaaactgctatttttaaagaaaacaaataaaataatcagagacatgttaaaattttttcgtgctaaaaactataagtctatagtgttctagc

SEQ ID NO: 44310 - DNA, 574 bp, Homo sapiens
taagccaaaattctgcaacatgaaaaaacaacagaaattcactgaacgatagagaaagggggtgctcatttgtgttattgatgtaatctaataaacagaaaaataaatttaaaaataagagaacagagaaacacattattcatatgaaaaaagatcatggaataaaaatgaacaaaaaaagagggtaggtcccaaagtgagtatgtaaagataaaaaggctgtaggtttaaaagaaaatgtagcaaactgagtataagtagaaacaggcagaaaaataagaggaatttgggcagtttttttaaaaaaatgccaaggtttataaatgaaaggagcagaagtaaaatgtgttatatacaggctaaactgattctgaaaaaaacttgttcactgatataattgaraagttcttgccaaatgcaggtaaaagaacaataacgtgcataataataaagatcacagaagatcaaagattaaatataaagaaactgctatttttaaagaaaacaaataaaataatcagagacatgttaaaattttttcgtgctaaaaactataagtctatagtgttctagc

SEQ ID NO: 44311 - DNA, 595 bp, Homo sapiens
agaaaactgaggctcaggagggggagttgacatgcccaagctcccttgagctcagatcrgcttgactcaatgtccaacattcccttggtagctttttctccggggtcctgtgctataagaacttctctctgcactgtatttttttttctcccaattcttagctatttcctcaagcaatgattggccaaggacctagcataatccaccacattggccaaggggacgtggtgcaccccaaggccatttctctgcattggaggctgcgaatctcctctggaaaattcccaacccgaggacccaccatgagcccagctcagcctgaccagacagcctctgcctggagcattcacatcagatggaaagaagctgctgtgtcctccagcatcctgggaccctgtcctctgcccagtgacacagcagccatggctagcttgatttctggtctccaaagctaagcataaccttcccggggtttctggtttttcagcctgtacgaaacatgtctctgttctaattaaagttcccatggtatggtgttctcatatatggctcagtgttctctgtttatatggggtactcagaattaaaaaatggg

SEQ ID NO: 44312 - DNA, 586 bp, Homo sapiens
tttagtattataatacaaagaaaacttccttcattctgatttctagttcaaaaaccattttaagataaggaatttcacaaagttatttaacaacctaagtggcataaaggactgtttccaagacttcctgacatggaggactttcctttctcttcccacttccactcttgcatgtcctcaagcagccggtgagactgttcccatttgcgatcttatgtggtaacggatcaagcttacacacctgaatatatcagaaatggaaactgttgtttatagtctcaatcacagaacactttamaaatcaaagtatcatagaatatcttttctttttgcctgccttctcgcatccttttttattttgcttcttcattaaacctctaaacaaaggctatgaagaggaatactcggaagtaccaaagccatgccttctccacacacactgaacattcctccattccaaccaggaacaatgaagtccaaaccaccccaagctcatagagatttggcatattcctagatatccccaaggaagatgatatgatcattccacaacccttggttccagactttaaatacaccatagtat

SEQ ID NO: 44313 - DNA, 549 bp, Homo sapiens
tgcctgtagrcttgatggctggagctcaagcagccgtcttgaactatgaggatgaccccacatgcccatcacatctgaaaggcctcaaggcctttgggcgagacggtatgggccaggcaaccagcctcatgatgtgtcccacaccgcctaacagatgagtgagtgtcccaggtctgggttcccttacccctctcttgaatctacagaagagaagtttcatgatctcagatcacagccctatggaagctcttgccaaacactggggaagcctaactctaataaaagtgttcccatgggaagtccaacacagctctcattctgaatgacctgtattgttggtccaagcagggatacatcaaagagactggtggtttattagcattacccagaaggtcagtgtcaccactcgggaaggagatatgaagtccccacttccaagttcttaccccagagagagaggctgctgctctgcttgtggatttactactcatctacccagacatgctactccctccccacaaagtctcccgtcagcttctcaagcagact

SEQ ID NO: 44314 - DNA, 557 bp, Homo sapiens
aattaagctagagaaagcaaatgtggcaaaatgttaaaaactggtgaaagtgggagaaggatatgtggacgttcactgtatattgccgtttttgtacttacttttctatagctctgaaacttttaacaaaaaggtggaatatttaaaaattaagcctaattytaatgatatatgtgtgtgtgtgtgtaaatatataaataaccagttacagttattgaagtaagagttttaaagtatttttggaaggatacataagaactgttaatctttacccctatggaggtgaaatgggtgttgtgagagacagcctgtaaagccttcacatcttttaaattctgaactttacctactcaaaataagcaagcaaataaaactacaatgaaacaagtttttatgtagattgtaacactaatgtaaatcttgcaaaatgtcatgtaaattaagctttcataaattctccaatttcgacatagcaattatgttagcatataacagaaaagcctaccaaaacaagactatgaataaatgaattttattttttccttattatctattta

SEQ ID NO: 44315 - DNA, 1503 bp, Homo sapiens
attttacacatgatagaagtaaggtaaaggaagcaataataacctccaggtcaaacagctgattaagtcttagaggcttaataaagtctaggccatctcactccagcatccatctgctcaaccattatgctgttctggctgttttacagaaatcacacccaaaaagctccattcayatttaattggccattcttaactaaagaacagactaagaaatgtggtctctgaatgggcacacttccacaaggattaaaagttagagtgttataccgaaagatggaggatggttattagatagctaatgtgtatatcctatgtctcttccacttgtaggtatagaaccttggggaaacttccacagcatagaagacaggaaaacatgcacatcatattgtttgcactaagaagtaaattgggactagtcagcatgcatcaataggatgtatgtattattattgttgtatagtcatggttaaaaaaatgagtgaagcagacatacgtatatcatcaggggaatcataaattaataatattgagaaacaaaataaaaattcacaataatatattcaatttgttataacttatttaaagtttatgaacataccaaacacggcaggtgcatatgccttaaaattggaaaagtctgcataacagttatacatatcaatgacagggtgcaagaaatgatgggaaaatgaacattctaagcaagaatttaacaatatttttcatgttttatttctttaaaatgatggcaacacctatgtcaaactcttagattgagttagatttgagtaggatgttcataaaatgtttatgttaatcactttaattttatatatttaaaaaaattgatgagaaagtataatccagtccatcaaaaaatgaaaataataataacatgcagggtgaacattttgattcagtttggttgctcacaactgagctccagtttacatttgtgaagttcctcttcacatgaatcctactgaagggcaaagaccatcgctctttaggtccactgaaaactctactctcttctttccagtttccctacagctagggcaaaattatgaggcctatgatagactttgactctggggatgatgattcaagagaaagaaagggttagaagctgtcttttccttattgcgaggatagtaacacaactggaaagtcgcatcctgaagcagaagtagagacagaaccaagctccagcctgctggcaggagcagctgtttcctctctaggctagttgtgaactgtagtttgagcctaattgtcaagccatctaacacattttcaaaacaacccagtatctatttaatctttttttctgtttacatatcagagttaacttttcttgggaagaaatgaagtggaaatatggttgctgcctaagaagtaataataggagatacaggaagcagtttgaaatggaataggtatgtaaaacactaatggagcagaaatacagtcgaaaataacatgcaaaaacaaaca

SEQ ID NO: 44316 - DNA, 1503 bp, Homo sapiens
attttacacatgatagaagtaaggtaaaggaagcaataataacctccaggtcaaacagctgattaagtcttagaggcttaataaagtctaggccatctcactccagcatccatctgctcaaccattatgctgttctggctgttttacagaaatcacacccaaaaagctccattcacatttaattggccattcttaactaaagaacagactaagaaatgtggtctctgaatgggcacacttccacaaggattaaaagttagagtgttataccgaaagatggaggatggttattagatagctaatgtgtatatcctatgtctcttccacttgtaggtatagaaccttggggaaacttccacagcatagaagacaggaaaacatgcrcatcatattgtttgcactaagaagtaaattgggactagtcagcatgcatcaataggatgtatgtattattattgttgtatagtcatggttaaaaaaatgagtgaagcagacatacgtatatcatcaggggaatcataaattaataatattgagaaacaaaataaaaattcacaataatatattcaatttgttataacttatttaaagtttatgaacataccaaacacggcaggtgcatatgccttaaaattggaaaagtctgcataacagttatacatatcaatgacagggtgcaagaaatgatgggaaaatgaacattctaagcaagaatttaacaatatttttcatgttttatttctttaaaatgatggcaacacctatgtcaaactcttagattgagttagatttgagtaggatgttcataaaatgtttatgttaatcactttaattttatatatttaaaaaaattgatgagaaagtataatccagtccatcaaaaaatgaaaataataataacatgcagggtgaacattttgattcagtttggttgctcacaactgagctccagtttacatttgtgaagttcctcttcacatgaatcctactgaagggcaaagaccatcgctctttaggtccactgaaaactctactctcttctttccagtttccctacagctagggcaaaattatgaggcctatgatagactttgactctggggatgatgattcaagagaaagaaagggttagaagctgtcttttccttattgcgaggatagtaacacaactggaaagtcgcatcctgaagcagaagtagagacagaaccaagctccagcctgctggcaggagcagctgtttcctctctaggctagttgtgaactgtagtttgagcctaattgtcaagccatctaacacattttcaaaacaacccagtatctatttaatctttttttctgtttacatatcagagttaacttttcttgggaagaaatgaagtggaaatatggttgctgcctaagaagtaataataggagatacaggaagcagtttgaaatggaataggtatgtaaaacactaatggagcagaaatacagtcgaaaataacatgcaaaaacaaaca

SEQ ID NO: 44317 - DNA, 550 bp, Homo sapiens
tttcatgtattgaaaacacagtcccaaaatccatacactgattgaagatggggctttggggaggtaattaagattagatgagatcatcaggatgaggccttcatgatgggactggtggttctataagaagagaaagaggggcctgagctgacataaacactcttgcctttttgccatgtgatgcccttttgccctctgccatgtactagtacagaaagaaggccctcatgagatgccagcaccatgctcttggacctctcagctgccaaaaccatgagctaaatacatttctgttcattacaaattattcagtctatggtattctgatatagcaacaggaaatggactaggacaagtatcccctcagtataacagaacaaggacttctgtatcagaaaagcttgagttctaatgtaggctctgtcccacccttctgtgacacttgggaagtaatctaatagtgctaaatgtcaggtaattcatctgtaactctatgtagtarggttcctgtgagcatgaaataagatagatttcctgactctacttttcc

SEQ ID NO: 44318 - DNA, 590 bp, Homo sapiens
cctttcatccttaagggctggtataaagttatatgtcttatgataccaccagaaggctttagtgcgagagtaccacatgctgaccatctgtgaggcgggagaaatattgtctagggagaccaaatcaccctcctttttcttgaaaataatatattaacctccttatatacagatgttacattttctccattttacaaagcttagctttataggattctcaaatacattgaaggaaacaatttccttataaaattttacttatatctaaatttccagaaaataaattttatgtttgatgcttccttttcctaacagaccatggaaacatcaagggaggcrtgtatcactgatgtgtaccctctgtaccgtgttcaaagcagttgcacaaagagtaatgcgtttggaatgggaagcctgttggtagccagcgatgctgccacattcaagtgggcatccccgcccccaattacctggcctctcaactaagcacagggctttctctctcttttagaggtgactttctagaagattattggcaaattggaaaacaaaagtcctaattgtcacatcatttgttaggatgtgaaaat

SEQ ID NO: 44319 - DNA, 510 bp, Homo sapiens
gggctcagtcttactccaaacctcaatgccacacaatattccttggtaacaaacctacacatgtacccccaattctaaaataaaaatggaaatagaaaaagcagtgtataggccgggcgcggtggctcacgcctgtaatcccagcactttgggaggcccaggcgggtggatcacaaggtcaggagatcaaaaccatcctggctaacatggtgaaaccctgtctctactaaaaatacaaaaaattagccgggcgcctgtaatcccagctactttggaggctgaggcaggagaatggcgtgaaccygggaggcagagcttgcagtgagctgagatggtgccactgccctccagcctggtgacagagtgagactccgtcaaaaaaaaaaaaaaaaaaaagaaaagaaaaaagaaaaagaagtgtataaaggtgtgggcaaatgagagggatgaagcaccccaggaagccactgccactcccaggatgggaggtcaaggggtggagagagccct

SEQ ID NO: 44320 - DNA, 597 bp, Homo sapiens
agtgaatgtgacaagatcataggaggatagatcaacaacctaagagttcaaagtatcaggaaattatctatatggtaactgaaattaccaacaattatgactggaatgattcctgggagtatggcagtgggtgaaccaaaagaggaaatcttccaggaatgagggctgataagcgtagtgacttgtgtagtgtcgtgatgtgaactttaaaggttaagggggagggagacgagagagagaattatctggaactaatactgagatacatagaggacatccacccacctccatgcccattggaagaggcagcaaaagcagccaaactggagaaataatagaaaagcagtgcatgatttttctgaatctagttcagaacttcactttgtggatcaggaagagattwtgaactttgtgcaaattcatagtcactgaattgtgaagaattgtacagtgcagaatgtgaatataaatgaatacagatcagttcctcacactttctacagctttagtaaattgatcactcacatttagaataatgaatctcacacatcacaaattcctcctccagaaaaaaaaagacgacacgatgtctttcac

SEQ ID NO: 44321 - DNA, 597 bp, Homo sapiens
agtgaatgtgacaagatcataggaggatagatcaacaacctaagagttcaaagtatcaggaaattatctatatggtaactgaaattaccaacaattatgactggaatgattcctgggagtatggcagtgggtgaaccaaaagaggaaatcttccaggaatgagggctgataagcgtagtgacttgtgtagtgtcgtgatgtgaactttaaaggttaagggggagggagacgagagagagaattatctggaactaatactgagatacatagaggacatccacccacctccatgcccattggaagaggcagcaaaagcagccaaactggagaaataatagaaaagcagtgcatgatttttctgaatctagttcagaacttcactttgtggatcaggaagagattttgaactttgtgcaaattcatagtyactgaattgtgaagaattgtacagtgcagaatgtgaatataaatgaatacagatcagttcctcacactttctacagctttagtaaattgatcactcacatttagaataatgaatctcacacatcacaaattcctcctccagaaaaaaaaagacgacacgatgtctttcac

SEQ ID NO: 44322 - DNA, 580 bp, Homo sapiens
aagtactcagcatgtcaaggctatgagctttgggttattgtgttttgagtcccagcaatatactatcaagacaagaaatgtctaataccatgatatcagatataaatattaataacatagcctggccaacatggtgaaaccccatctctactaacaayacaaaaaattagctgggcatagtggcgtgtgcctgttgtcccagctacttgggaggatgaggcaggagaatggttataactgaggaggcagaggttgcagtgagctgagataaaatatatatatatatgacagtcttttccttttattgtttttttacacatattggtttcttgtagttttataatctcatcccttctgtaaaatggccaatacgaagagtgttaataaaggaccttcaactctctagcattcagtaagcattttaattaattttaacatttttattattttgtttttatgttaaatttcttcattgacttttaaaattacatctgtctacctttgtgatttaagtaaatatacaacatttccttttcttggtatcttaaacttcctctttgactacttttaaaattctact

SEQ ID NO: 44323 - DNA, 580 bp, Homo sapiens
aagtactcagcatgtcaaggctatgagctttgggttattgtgttttgagtcccagcaatatactatcaagacaagaaatgtctaataccatgatatcagatataaatattaataacatagcctggccaacatggtgaaaccccatctctactaacaacacaaaaaattagctgggcatagtggcgtgtgcctgttgtcccagctacttgggaggatgaggcaggagaatggttataactgaggaggcagaggttgcagtgagctgagataaaatatatatatatrtgacagtcttttccttttattgtttttttacacatattggtttcttgtagttttataatctcatcccttctgtaaaatggccaatacgaagagtgttaataaaggaccttcaactctctagcattcagtaagcattttaattaattttaacatttttattattttgtttttatgttaaatttcttcattgacttttaaaattacatctgtctacctttgtgatttaagtaaatatacaacatttccttttcttggtatcttaaacttcctctttgactacttttaaaattctact

SEQ ID NO: 44324 - DNA, 580 bp, Homo sapiens
aagtactcagcatgtcaaggctatgagctttgggttattgtgttttgagtcccagcaatatactatcaagacaagaaatgtctaataccatgatatcagatataaatattaataacatagcctggccaacatggtgaaaccccatctctactaacaacacaaaaaattagctgggcatagtggcgtgtgcctgttgtcccagctacttgggaggatgaggcaggagaatggttataactgaggaggcagaggttgcagtgagctgagataaaatatatatatatawgacagtcttttccttttattgtttttttacacatattggtttcttgtagttttataatctcatcccttctgtaaaatggccaatacgaagagtgttaataaaggaccttcaactctctagcattcagtaagcattttaattaattttaacatttttattattttgtttttatgttaaatttcttcattgacttttaaaattacatctgtctacctttgtgatttaagtaaatatacaacatttccttttcttggtatcttaaacttcctctttgactacttttaaaattctact

SEQ ID NO: 44325 - DNA, 552 bp, Homo sapiens
tgaccatgactctgtggataagattgtcattcagaaataccattctgtgaatggccacaactatgaagttaggaaagccctgccaaacaagagatggctagtgtttcatccagacaaagaggtcgaaatggttctggaaactttggtggtagtcgtggaggtgtttatggtgggaatgacaactttggttgtggaggaaacttcagtagctttggtggcagtggggatggctataatggatttggtgatgatggaggcagttttggaggtggtggaagctacaatgattttggcaattatcacaatcagttttcaaattttggaccgatgaagggaagaaactttggagccagwatctctggcccctgtgtgggtggaggccaatacttcgccaaaccacgaaaccacggtggctatggcagttccagtagcagcaataactatggaagtggcagaagattttaattactgccaggaaacacagcttagtaggagaggagagccagagaagcgacagggaagcaataggttaccacagatttgtgaactcag

SEQ ID NO: 44326 - DNA, 552 bp, Homo sapiens
tgaccatgactctgtggataagattgtcattcagaaataccattctgtgaatggccacaactatgaagttaggaaagccctgccaaacaagagatggctagtgtttcatccagacaaagaggtcgaaatggttctggaaactttggtggtagtcgtggaggtgtttatggtgggaatgacaactttggttgtggaggaaacttcagtagctttggtggcagtggggatggctataatggatttggtgatgatggaggcagttttggaggtggtggaagctacaatgattttggcaattatcacaatcagttttcaaattttggaccgatgaagggaagaaactttggagccagtatctctggcccctgtgtgggtggaggccaatacttcgccaaaccacgaaaccacggtggctatggcagttccagtagcagcartaactatggaagtggcagaagattttaattactgccaggaaacacagcttagtaggagaggagagccagagaagcgacagggaagcaataggttaccacagatttgtgaactcag

SEQ ID NO: 44327 - DNA, 661 bp, Homo sapiens
tgcatgctaaaatttaggagattggactgagtattaatcctggaacttctttaagaatattacctttgtttggccaggtgcggtggctcacgcctgtaatcccagcactttgggaggctgaggcgggaagatcacaaggtcaggagatcaagaccatcctggctaatgtggtgaaaccccatctctactaaaaatacaaaaaattagctgggtgtggtggcgggtgcctgtagtcccagctactcaggaggctgagacaggagaatggcgtgaacccaggaggcagagcttgcaatgagctgagatcatgccactgcactccagcytgggcagcagagcaagactctgtctcaaaaaagaaaaaagaaaaaaatatatatatatagtattacctttgttttctttgttttaaagtaaagccctaacaggccaaggttggtggctcatgcctgtaatcccagcactttgggaggcctgggggaggtgggtcacttgaggtcaggagttcgagaccagcctggccaacatggtgaaaccccgtctctactgaaaatccaaaaattagcctggcatggtggtgcatacctataatcccagctacttgggaggctgaggcaggagaatcgtttgaatccggaaggttgaggctgcagtgatctat

SEQ ID NO: 44328 - DNA, 573 bp, Homo sapiens
gttgggtgagaccaggctggtctgatcctccctggcccactcaccagggtcccctgctcagcacagcctcagtgactgggctcccaaacctgcaacactgtaagatgccagtgggattgttggaggtggaaatgtaattattgctgttggaagggggtgaatcgttggaaaatgggcgaatgggaagaagtaccctggcscggaggaagaggctatgggtgaaggattgtagggagtcagaaagacaaggggagcattgaacaacacaggaagtccctccggccaccttctgaaggtggggaccattcatgagaaaccccgaggatgccctcagtccttgtgcagcaccaggaggaaagagactggcccagggccacccctgagtccgcatcatcacacagggtccttcagctgagcccctgttgtatctgcagctggacatgcacagatccctgtcccatggtgctgacgagcaccacaggctcctggtggcccatggaagccacctcatgcctccttcccaaggccatccagccagcaaggcctgccacagacacactgtgagcatgcgca

SEQ ID NO: 44329 - DNA, 547 bp, Homo sapiens
gacatgcatagtttaaaaagtaccctgcccccaccaagatgattctgaatagtactctatgcatttccttctcccctttttgaagtcattaatgttggaatataatattaaaatttttactttatccttatttaaccaagacagtataattctggttttattctaccagccttaaaataatattttgatagtttatttgtacccttattgctaaaagatttcaaggtggctattttgaagtttggaagaaaatrtttctaaatcctactaacttaatcttctgttttgagaagaggtaaataggagctttttttctactcttcacagggacagatatggcttttctaaagactgctttggaaatggcaagaacagcagtatattccttacacaaatcctcaactagagaagtaagttcaaatcatctgatattctgtggcattgatttttaaattcatgacagtgtttttaggatttgctgtgaatactagataccacagtatctatttctcctgaccattttgacatgtgaaacttaaattttcca

SEQ ID NO: 44330 - DNA, 494 bp, Homo sapiens
gatggcttccaggactatgtgatctgattcctgactctctgaccttatccagagccactcttcctctcatgaggaacgttcccacctctggatctttgtggttycctctgaaacactcagatctttgaatggctggcttagttctttcactcagtattcaactaaaaaggccttccttgtcaatcctatctaatattgtcctaccccaatcattccctatttcattaccttgttttattccctccatttcattcctccactatctaaaattattatatatttatatttccttacacttggctcaaaaaaaaaaaagatgaacaaagaagctggtaatttttttaaaaactaccaatgaggttggaaacagacaaagatgacttatctgtgtataccttttcctacaattttaatttctttttgtttgtttgagaccaggtcacttggtcaccaaggtttgacctcctgggctcatggtcctcctatctcaccct

SEQ ID NO: 44331 - DNA, 559 bp, Homo sapiens
tcaaatccagaaattagcttggtcttggttacttacacaggtggtcaaagctctgaggctgagttttgtttgtttctctttcagcctttcagcaataatggctccaggctgacatatctgggatattattccatgtatttgctatttctacccattatgctatctctacttctagttttattaaacaamtattaatagctacctctgtagtatatctctgtcctcaaatgtttttgtctgtttgatatttggtttagatcaggaatcacaaattaaatccctacagagaatgagtagacagcacaaatgatgaaattggcccagcataggctaacaggagtgttgagatatatggtgaaccagaaatgagaaagccctggcccttctaaagggagaagtgctgctgatctctacttgcttggagccatgtggaaattctggtagtactaggttttctggtttttatagtgaagttgggaatacagattttaattgaatacttataatttaaaatttttgaactatttcaaataaaatactgtgttggcccttagtctat

SEQ ID NO: 44332 - DNA, 559 bp, Homo sapiens
tcaaatccagaaattagcttggtcttggttacttacacaggtggtcaaagctctgaggctgagttttgtttgtttctctttcagcctttcagcaataatggctccaggctgacatatctgggatattattccatgtatttgctatttctacccattatgctatctctacttctagttttattaaacaaatattaatagctacctctgtagtatatctctgtcctcaaatgtttttgtctgtttgatatttggtttagatcaggaatcacaaattaaatccctacagagaatgagtagacagcacaaatgatgaaattggcccagcataggctaacaggagtgttgagatatatggtgaaccagaaatgagaaagccctggcccttctaaagggagaagtgctgctgatctctacttgcttggagccatgtggaaattctggtagtactaggttttctggtttttayagtgaagttgggaatacagattttaattgaatacttataatttaaaatttttgaactatttcaaataaaatactgtgttggcccttagtctat

SEQ ID NO: 44333 - DNA, 526 bp, Homo sapiens
agaattacaaggtctcttttttcaagcacagtgaaatgaatatcccatcaaaaataacaccttggatttwaaaaaaaaaggtgcttggatacaacttgcaagaactaaattctcttttagtttttattctagagtaattcctaagccctgagacaatgccctttgtgtgaagcagaatatgaggtactcactggcttagggtaaaactgactgtacttgtctccatcttccacaagcccagctgatattttattaacatccctgtgcaggcagcacctggctcagtgcctcgcacataacaattgctcagtaagtgggaggcaggttggagggatgaataattacaaatttcccttgtgtttcacaggtcttgggaggaagccggttaatgtcctcttctcttgttatttactttgcaaactaccattaggattcggatgcgttccagagaaggctttttatttagcaacatgagaactaggcaacctacttttttgttctcaaatttgaaccattgctatgaaaa

SEQ ID NO: 44334 - DNA, 366 bp, Homo sapiens
taagrgtcagacatgcaagcaggtgaaacctttgatcctggattgaacttgttttgctataattttgaagctcctctttctttaggcatgcatggaactagcattgttataccgtacatgtatctctgtaaacaacctcatatcctttttgtaacaagacagaacagataaaaacaaacagaaaccatctactaatatttagcaaaaaaatgactctggggattccatagaaagctcattccacaaatatttaaaatatgttaaacaataactcttaagttatggtgagagttaataaaagacctctgaccatctagcaatctgtttgaagagtttatacaacttatttttttaccctttaataca

SEQ ID NO: 44335 - DNA, 366 bp, Homo sapiens
taagagkcagacatgcaagcaggtgaaacctttgatcctggattgaacttgttttgctataattttgaagctcctctttctttaggcatgcatggaactagcattgttataccgtacatgtatctctgtaaacaacctcatatcctttttgtaacaagacagaacagataaaaacaaacagaaaccatctactaatatttagcaaaaaaatgactctggggattccatagaaagctcattccacaaatatttaaaatatgttaaacaataactcttaagttatggtgagagttaataaaagacctctgaccatctagcaatctgtttgaagagtttatacaacttatttttttaccctttaataca

SEQ ID NO: 44336 - DNA, 608 bp, Homo sapiens
tggctaaagagataattgagtagaaggctgggatgagagagcttgtatcaaatamagcaaactttttttgttttttaaaaaaaggtcttcatatctgcttataattgaacacaagttctgaagtattggttccatcatgagacctggaactccataaacctatgtctgttctggttcacagtgccttatacatggtaggacttaataaatatgcactgaatgaactaattggagtatcacagaatatagcttaaaatgacctcagtgagctcaaagtttcagtgattcactttattaaacaattgactgtaacctctttcaagatgatctgttacttggaaatttaaaatcccagtagtgtcttatgtaatgtaagacaaagtgtttagaacaatgttataatgtggctctcaattaaatatgttaacttcagctaatttaaaactattgggagcaaagggaggcagaaagattccatctgatgttacaataggcacatacttagagaggtctgggagtgctgggtgcagaggtcaaatgtagtaaacgtgaacttctgtggagacagggagaggctacccagtagtcaaaagaagatctggtctcca

SEQ ID NO: 44337 - DNA, 638 bp, Homo sapiens
ccaaagaaacaatttagagcatttctgcaattctacatgtcatctccaggtcctgtctaatctcacggttcaatggaaacaacatatcgtttggagaagtattccatttcatctactcagatcctattccattgaggatctgaggatcctacacctcttaaatatttcaaatgaaatagtcttctgaatgttgaacaccgaaaatagaatccttttgcagaaacaaaatgcaaataggtataaagtaacaatttaccatattatttattttggagatcccagttactggctcatagtaaataataaatatttatcaaataaccaaaaacataaatatgtagtgggtgctagtagtgcagctggatattgccctctactagtcactttttctaaatgacagctggtgagctgctctggctctccgagtgccctggcttgctactgcagccaaggttcaggtagtcacctggagggytgcgttagctttccccacatctttaggggtgcaagttctgtgtctctttcctctgttctctggagtgggttgctggttatgaaagaatgcaacattaaaagtaacagactgtatctatcagaaagataaaaagtaaaaggaatgagagagaggatggggaaat

SEQ ID NO: 44338 - DNA, 1243 bp, Homo sapiens
ctggcctactccactgactatgtaggatgggtactgagatgtcacatggcaatagggtccgtgcttcttttggtcctgccagtcagaacatggggaggtgaaaactgctgcatagaggaggcaggggacttgagggtaggagaaagctaccccaccacccccttttctcactgtaaggacatttgagcactctttcccccaccattctgctccatgtgaacatgtatgtcccacatatatgttttgcttgttcatgccgagtcagctgcagcaaagcacgagtctgcaatttagtgtcattgtcagggcctaacacatggaatgagtttgatattcacttgtagaagaagaggagagagctgggaatggatttggagaaggactgaccagaggatggaagaatagtcagagcttggttatggaaatgcctccattggcagagaaggggagccactggatgggcttcttatggtcactgaggttttagggatggtctgaggatactccaggcttttagcacagacctgcaaggcagactgcagggagaacagtactttagatccactaaaaataattcacctttatagattctttcagcacttcacctttacctctaaatgcatgagaggggtttctgccttctatggaccacagttcaaagaccacactacttactcataagtctggctcccaataaggggctcaattatcagactttcacttcatttacccctacgctctactgacctcacaactctctggcctcattgggatgcccgatccgttgatcctgacgctttcttactctctcgccttccttgtggcttcaatcttctcctgatcaagctgtggctccttcatcagtgccatattcactactttaaaaagttactacctcccttgtttcctttccctcatattacccttgtccctaaactcccaacctggttaaactcagccatttccttacactgagttgtacctgagcatctctatactaccagagggaaaaaaaacatcttgtcataactgggctgattgaatgattgaactctctttaaactaatgaccacaaatctcaaatttcatatcttctcttatctccagaaacctccaaaaarcctcacttcagactgatgaatttgcctcacatgataccaagaaataggtgtgttacagctcccatgtaaacaaaacccttcagtgtgccctggagaaacagtctatctgtataaatggcatg

SEQ ID NO: 44339 - DNA, 1760 bp, Homo sapiens
tgtaacttattcaaacaaaagcaaacatacacgtttattccacaagtattccttgagcaattcctgtctctttggcacgatgctagatttgggggatggatgcaaggaagaagacagatatcatcagtccacaccattgtggagcttaaatgacattggatgggacagacaatgaacaagacaacaagcaagaaaagaaacctttacaagccagtgatccccgtggagaaggaratgaacagagttttgcaatagaaataatgaaggggttatttaggaggttctgttttcaattaagtggtcagaaaactcctcttctgtggcaaattagtagacaatattcagtagacatactaataattctccaaaccttgagaattgagttggtttttccatttacgttggcattctttgtattttgaatacattttgagcagcatgtaactagatataacttcattacaaagatatcatgtacttaatgtgttacaacattcttataacagggttatatgtaaccaaataggttgttattattctttattaaaattttcagggcagccaggttcaatattgtatacccacttaaactaataaacttttaatacatatattttaaattattccttctttatttcagctcaattttctttcactcaaccctctgtggaaatgagcagccaacttctcacctcagaaactaggcccatatgacacctgaacaatgtcacttaattatttcttcaactaattttttgagaaatgggatctaaattattcatttacctaataaaatacttattattgaataattttgttgaagtacgctaaattcctcctgcattccctatctcaatttgattatgagggaagggaggacagagaatctcattacaatagaaagatgtggtggctatgtaatcaaccactcatcggatatttcagtcttcaccacgatatgctcatctggtggtcatcagacctacttcaatatgtgtggtaataatgaacaaaatattcctcctttgaacagctctaactgctgaaaagttatactgagatcaaatccatttacttctctttttccaatgtgctctggatgagacctcaaagccacagagaaaaagtctcatgtgattttcccaactgcccccaaatgactgcacttatcaatatttgcctcctgtttacttacatccgccccatttcctgtaagtatgtctcatagggcataatttaaagccatttccatttttattaccaattcagattaaatccccaagctactcgattccttctaattatgaagggctaattgtaatgcaataatgacagaattatttggcttggtcagaaaatggaatttttgtcccctctcacccattccacttcactagacatgcagtccaacacggtacttagctttcaatgaccacatctggctgttgttgacaaagacctagtttgctattcaaagagataaaatgatgttcagtgtggaaaagtaagtggttcttattcacagctttaaaatgctacttcatctgtgtatcagtcaggccatatgatatttacatttagtggtcagacaacatgtttgaaacagttttaatcttttctttcattaatttgagatcttgcaccatctttagcaagtcctttgctctccaataacttctatcatttatcttcttcttacgtctgttacttattaaattgtgatcgttttttcaagtacaaatgtctgcatagaaatgatg

SEQ ID NO: 44340 - DNA, 613 bp, Homo sapiens
tcacaccaaaatattctacaggtaaagcaaacctattcttaaaagcataagcactgatggaaaaccaaactatgttctctcttaaagtttcaaaaaaggcacttacgcaaatgtaatgacagtgaaatcgagccagttccatggatcccgaaggaaagtaaaatcttctaaacagaatccccttgcaataatttttataagtgattcaaaagtatatattcctgtgaaggtgtatctgaaaacaagcatccaaaaaatttgataaagtaacagtgttttttcatagcataccaatttcttatcactccatcagtggaatagataaatactaaaaaagaaaactaagcagatggattttaatttcatacaaatgaaacgtagccctaaatttaaattcagcttcctaacacaaagagttgtttcgtaaagtgtcttaagagtagtgtgagaaatacaaggtatatgaaatctatttagccattgtctgaaatgtcttggtatttatgtaaatatagtctcctgagaaatatttagtatgtttacaygatggaatagccaatcaataatattgcagaagcatgaaatgattttcttttagggaaaaaaatctcaa

SEQ ID NO: 44341 - DNA, 609 bp, Homo sapiens
aaggcaggtgggatgatgtgtaattggtgactaggccataaagggcagggcagcattgcattctctctctctttttctctctttytctctctctctcgctctctctctaagggcagagcagcattgcattctctctctctctctccctttttcgtctctttctctctatctcttcctctttctcccagtatcagtatcagctatggggaaagccatgctgagaacagtcccatggagaggcccacatggtaagaaactatagcttcctgcaaacagcctcctggatgagctcagaagtgggttcttcagccccagtcaaatcctcagagtctgcagccccatcttgatcgcaaccttaggagagagatctgcccagataagttgcttcagattttggaccctcaaaacctgaaagatgaaaaaatgtttggttcttaagctattatgtattgcggtaatttgttacacagtagtagataactaacatacaccttaattaaaaagcagatattgtcagactaggttaaaaagtaagacccaccactttatacccattaggatgactattatgttaaaattaaaaacaaaacaaaattaaaagatagaaaa

SEQ ID NO: 44342 - DNA, 609 bp, Homo sapiens
aaggcaggtgggatgatgtgtaattggtgactaggccataaagggcagggcagcattgcattctctctctctttttctctctttttctctctctctcgctctctctctaagggcagagcagcattgcattctctctctctctctccctttttcgtctctttctctctatctcttcctctttctcccagtatcagtatcagctatggggaaagccatgctgagaacagtcccatggagaggcccacatggtaagaaactatagcttcctgcaaacagcctcctggatgagctcagaagtgggttcttcagccccagtcaaatcctcagagtctgcagccccatcttgatcgyaaccttaggagagagatctgcccagataagttgcttcagattttggaccctcaaaacctgaaagatgaaaaaatgtttggttcttaagctattatgtattgcggtaatttgttacacagtagtagataactaacatacaccttaattaaaaagcagatattgtcagactaggttaaaaagtaagacccaccactttatacccattaggatgactattatgttaaaattaaaaacaaaacaaaattaaaagatagaaaa

SEQ ID NO: 44343 - DNA, 599 bp, Homo sapiens
tgagctgtgttttgaaggataagtaggagatgttaaattaaacaaggggaaaggaaaaaataaaaaataaaaataaatttaaaaaataaataaggggaaaggcgttgtaggctgcctggcatattaagtggatcagcatggtgctgggaggagtgcatgcaccaggtaggggaaatgaggggagagggggttggtgagatacaggggctggatcattaggggatcagcatggagctgggaaggtggagcttcatcctgaaaagtgagcatgtaagcaggagaataatgagataaggagatgcttctggaagctctcagactgcaacatggtccatgggctggagcaggtccaggtggggcaaagaagccaggcaggagggcttagaccaagcaatagtgggagagacaaggaggtggaaatcatcgggaagttatttaggatctcagagtagtaggactctctgatcagtcagttgtggagggtgatggtgaagaggaatcctgtatgattagcaggtttggagcttgggaggtggacattggaccatgggaagaaagcaagtgagagarcaattttattttggacacatttggtgtga

SEQ ID NO: 44344 - DNA, 509 bp, Homo sapiens
gcatgccaattagacagaattccttgcacgtcgtgagtcctccaaaaaatatttgtgaaataaataartgaatgggatatggtttttcctatcacacacttctggagccagtggcctgatttgttatataatatgtcctgcagagggcaaggccaggcaggcaccacaatggaaaggggcaattcagagcagagactccctttctgtgcttccaaacttctattttgcagactgtcctatagagcaagtcttaaaaactccaagacctacacgggcaagatgggggtgtgtgatggttaatattgagtgtcaacttgattggactgaaggatgcaaagtatttttcctgggtgtgtctctgagggtgttgccaaaggagattaacatttgaattagtggactgggaaaggcagacccaccctcaatctgggtgggcaccatctaatcagctgccagtgtggccagaataaaaagcaggcagaagaatgtggaaagactagactggttta

SEQ ID NO: 44345 - DNA, 509 bp, Homo sapiens
gcatgccaattagacagaattccttgcacgtcgtgagtcctccaaaaaatatttgtgaaataaataagtgaatgggatatggtttttcctatcacacacttctggagccagtggcctgatytgttatataatatgtcctgcagagggcaaggccaggcaggcaccacaatggaaaggggcaattcagagcagagactccctttctgtgcttccaaacttctattttgcagactgtcctatagagcaagtcttaaaaactccaagacctacacgggcaagatgggggtgtgtgatggttaatattgagtgtcaacttgattggactgaaggatgcaaagtatttttcctgggtgtgtctctgagggtgttgccaaaggagattaacatttgaattagtggactgggaaaggcagacccaccctcaatctgggtgggcaccatctaatcagctgccagtgtggccagaataaaaagcaggcagaagaatgtggaaagactagactggttta

SEQ ID NO: 44346 - DNA, 557 bp, Homo sapiens
ttgccaaagaggatcccaggggatcaggtaaggcaccaacagcatccctacagatccccaaatctgcaaaagggagacacaaygagatgactgtcagtgtagcctaatttctccaggaaacagcctatccacaccaccaggaagaaaggcctctgccctgtttctaagcactgttcaattcacacaatctttcctaatagggtcagagagaatatgatatttcagttgggaatggaattgaaaaaaattattcaggtgggttcataagtaagggtgggacaggaatacaaattggaaataatcacacgtccaattctagaaaaacgactaggtaaattataacacagccacatggcagaatatcatgccttcattaacactgaaggtcatactaagaattggtgattgtcacctttcatctggcttatttccatctgaactcctggcttctatctatgtctcctacagcctatgtattagtcagggttctccagaaggacataactaataggatctatgtatatatgagacagagtttattagggagaattaaccca

SEQ ID NO: 44347 - DNA, 557 bp, Homo sapiens
ttgccaaagaggatcccaggggatcaggtaaggcaccaacagcatccctacagatccccaaatctgcaaaagggagacacaacgagatgactgtcagtgtagcctaatttctccaggaaacagcctatccacaccaccaggaagaaaggcctctgccctgtttctaagcactgttcaattcacacaatctttcctaatagggtcagagagaatatgatatttcagttgggaatggaattgaaaaaaattattcaggtgggttcataagtaagggtgggacaggaatacaaattggaaataatcacasgtccaattctagaaaaacgactaggtaaattataacacagccacatggcagaatatcatgccttcattaacactgaaggtcatactaagaattggtgattgtcacctttcatctggcttatttccatctgaactcctggcttctatctatgtctcctacagcctatgtattagtcagggttctccagaaggacataactaataggatctatgtatatatgagacagagtttattagggagaattaaccca

SEQ ID NO: 44348 - DNA, 557 bp, Homo sapiens
ttgccaaagaggatcccaggggatcaggtaaggcaccaacagcatccctacagatccccaaatctgcaaaagggagacacaacgagatgactgtcagtgtagcctaatttctccaggaaacagcctatccacaccaccaggaagaaaggcctctgccctgtttctaagcactgttcaattcacacaatctttcctaatagggtcagagagaatatgatatttcagttgggaatggaattgaaaaaaattattcaggtgggttcataagtaagggtgggacaggaatacaaattggaaataatcacacgtccaattctagaaaaaygactaggtaaattataacacagccacatggcagaatatcatgccttcattaacactgaaggtcatactaagaattggtgattgtcacctttcatctggcttatttccatctgaactcctggcttctatctatgtctcctacagcctatgtattagtcagggttctccagaaggacataactaataggatctatgtatatatgagacagagtttattagggagaattaaccca

SEQ ID NO: 44349 - DNA, 557 bp, Homo sapiens
ttgccaaagaggatcccaggggatcaggtaaggcaccaacagcatccctacagatccccaaatctgcaaaagggagacacaacgagatgactgtcagtgtagcctaatttctccaggaaacagcctatccacaccaccaggaagaaaggcctctgccctgtttctaagcactgttcaattcacacaatctttcctaatagggtcagagagaatatgatatttcagttgggaatggaattgaaaaaaattattcaggtgggttcataagtaagggtgggacaggaatacaaattggaaataatcacacgtccaattctagaaaaacgactaggtaaattataacacagccacatggcagaatatcatgccttcattaacactgaaggtcatactaagaattggtgattgtcacctttcatctggcttrtttccatctgaactcctggcttctatctatgtctcctacagcctatgtattagtcagggttctccagaaggacataactaataggatctatgtatatatgagacagagtttattagggagaattaaccca

SEQ ID NO: 44350 - DNA, 557 bp, Homo sapiens
ttgccaaagaggatcccaggggatcaggtaaggcaccaacagcatccctacagatccccaaatctgcaaaagggagacacaacgagatgactgtcagtgtagcctaatttctccaggaaacagcctatccacaccaccaggaagaaaggcctctgccctgtttctaagcactgttcaattcacacaatctttcctaatagggtcagagagaatatgatatttcagttgggaatggaattgaaaaaaattattcaggtgggttcataagtaagggtgggacaggaatacaaattggaaataatcacacgtccaattctagaaaaacgactaggtaaattataacacagccacatggcagaatatcatgccttcattaacactgaaggtcatactaagaattggtgattgtcacctttcatctggcttatttccatctgaactcytggcttctatctatgtctcctacagcctatgtattagtcagggttctccagaaggacataactaataggatctatgtatatatgagacagagtttattagggagaattaaccca

SEQ ID NO: 44351 - DNA, 603 bp, Homo sapiens
actcaccaaaaggcaggatgggctgtagaccagttacaggtttctttcattctgtgggtagatgtgtgtgtctctagcagcctttttggaaagaatgcttgtattctacagatgtctctgccttggcaattctgttcaactcaaaagtggtaatctatcatcctctgctgagaatttacccagcaagtgcctgaagaaaaaaagccatttagtttttgcttccacacatgaaatggctaactctttttaagtgaggcttggggatttaagagttggatatcagatacctggatttcatggaccagcaaaatgtaaaaaaaaaaccaccaccaccaccaccamcaacaacaaaaaagccccaaagttgtgtagtaacacaaagctgcaggttttaattttgctttgtcaatatgttaagaaaaccaaaacagaacaactggtatttattatctcatcatctcatagaaaaatgggcatcttaacactaaaatgtgggaaggtcattataggaataaaggataatcctttcagtgaaatacagtcatgctctgcataacgatgttccaatcaacaatgaaccgcatattcttatgcggtttttcc

SEQ ID NO: 44352 - DNA, 550 bp, Homo sapiens
ccctttcccccatgaccgtgaataattggatgtcagctgcttctgaactcccctagtatctgccagttccttgaagaagtcacacttcttttcaaactccagctcatttatcctggaaaatgaaggaaaacctatggagagccgaggctgagattctgaactgagattaactgttctatggatgagagaaactcaaatgaagagagcagaagaaagttgggggggcaccatttgggagccattctgtgtggtgacaaaatacctttaggggacatgtctcaaggcagccttcaagcctgctaatttccaaatgtctctttagcatgcaatttccctacaaaattcaatgagatcttcaagtggccccatcagacctaggatgaaggctcaycgggaatgacaattatagaatgacaaagcttccgggctgaggagttggctgggctcacctattggctaagggaaccgtttctcccattcaaatttggtccttcgcaaagattacaagttcctccttgttaatgaacttttgagttgctcttgaaaagta

SEQ ID NO: 44353 - DNA, 565 bp, Homo sapiens
agattttaactgtgcaagggagggtggagtcacttgttcttccrtgtgccaccctcctgtgtctttgctctgtcgggatgaccaaggctctacacacacacacacacacacacaagcatgcatgcacacacacatgcataagcatgcatgcatacacacatgcacacacacacatacacatgcctagtctaggtctatctctatgctcctccaacgtcatgtattaaactcatataggacatcattttataattttttaaatttttttaatcaaaaaaaaatccaaccaggctggagagcagtggcacaatcatagctcactgttgccttgaattcctgggctcaggggatcctcccgtctcagcctcccgagtcagctggaacaattggtgcacaacaccatgcccagctaattcttaaattttttgtagagacaggatcttgccatctggcccaggctggtctcaaactcttgtcatcctcccacctcagactcccaaagtgtagggattacaggcatgagccactgcgtctggccaggacctcattttataatggtcagtca

SEQ ID NO: 44354 - DNA, 565 bp, Homo sapiens
agattttaactgtgcaagggagggtggagtcacttgttcttccgtgtgccaccctcctgtgtctttgctctgtcgggatgaccaaggctctacacacacacacacacacacacaagcatgcatgcacacacacatgcataagcatgcatgcatacacacatgcacacacacacatacacatgcctagtctaggtctatctctatgctcctccaacgtcatgtattaaactcatataggacatcattttataattttttaaatttttttaatcaaaaaaaaatccaaccaggctggagagcagtggcacaatcatagctcactgttgccttgaattcctgggctcaggggatcctcccgtctcagcctcccgagtcagctggaacaattggtgcacaacaccatgcccagctaattcttaaattttttgtagagacaggatcttgccatctggcccaggctggtctcaaactcytgtcatcctcccacctcagactcccaaagtgtagggattacaggcatgagccactgcgtctggccaggacctcattttataatggtcagtca

SEQ ID NO: 44355 - DNA, 589 bp, Homo sapiens
agagatgtagtttcaccgtgttagccaggatggtcttgaactcctgacctcgtgatccacccacctcggcctcccaaagtgctgggattacaggtgtgagccaccgtgcccagctgaaactaatatttctaatctgggtctaaggcatttcatggaaaaatatttaagtgttaatgagaaactaccaaaacgacttttattagtaaaaatatatgaaatcagtgaatccaaaaaatcaatatgtagataggagagagtcatttttagcagagaaggcatataatgtgcttaaggataaattagagaacagcaatggagcaagaaactcctctaattcctggccactgaaagtgtgtccatggatcagcatcttagacatcatctgggaacatgttggaaatgcagagtcttgggccccaccccagacctgtggaatcagaatctgcattttagcaagatgaattccaggtgattcgtatgtaacccaagtttgagaagcactgctgtcatctatttcccccatgcaaatgcaagaccatgccaaaacatcacactctgaaaatcagagccagkatatgtgagtggtgac

SEQ ID NO: 44356 - DNA, 1771 bp, Homo sapiens
tgcattatctttaaaaatatactaaacagagaggaattatagtccaatgtcacttttgaatcctgatgccaaattaaatattgaattattatacaataactgtatagctttcattatagaaatgcaagaatgtttcagtattgggaaatgtattaacacattagaaggccaaagaagtcaacaaacatcacacaaatccccaaaccaaaaaacaaccaatatggtggttctagatatttgttgatatctaaaaggcatttgattaaagtagatattccatcctgataaaaactaagtaggaatcactggatacttccttaacatgattaaaaaatatttctaaccaatagccagcagcaaacagcaaagacatttccaggataatcaggaaccagataagttgccttctatgaccacttttatttaacagtattctggaatttctgctcaagactttaagaaaagcaatgaagtcttaaatcagaaaaccagagataaaattgccatgttattgatatgattgagtaccttgaaaaacaaagagagtttaaaaattattgggcctaataagatgggtgagtaggaggtagataaggagagccagatgggactagagtaaactatgtgctcagtaacacctgctctggattaactggcgcctaccaacaaataatcaaacgccagactttcatatttccaatttccagaggatgtctactttgttctgcccaaatgacttcagaggagaagagaagtgcttgttttgcataagatgtgacaaagtggagcacagaaaactttgcattgggctccactttagtgaaaccattgactgggaaggtgaaaaagagacacttcaggcagaaaagagcacaaactagaggaagatgtgtaatatcttggtgtgagtggggacctacctacagggagctcagtatcactgggcataaagggtgagtcaagaagcacagatggcctttaaaatccagaccaaccaaaggacttacatgttattttgtaagagatacaacccattgcagggctttaagtgggatgtaacatgaacaattcacatttatgttggacttttaataataatagcttccatgggaagttcttttgtttatattccttggttccatagtccttgtagtaaaaataattttactacttccagagagtaaaaaaataacagcaatggtggactcaagcagtgcatgcttagagtagatggctgtgttggaacacggcagacattcattaaacatttgttgattgaattgactgtttccatggcgtatatgagtgagctgtcagaattacaccctttggaagaaaagagttctcttaaaaaattaccacctgattgggcattttgataagctataatgatcttacttctggcagtaacacgtaatatgagtcccatctattttcaattaccttcatgtccaagttcttggaaagagtttccagggcgggcacgaattcttgaatggctttctcaatttgcyggtgctcttgcctgaataagtgaatgtctccagaaagcttcacaatgcttgaatcacatctaatggcaagatggaaattggtgtggatcaatacctttataacatttttaacactatagtagacacctgcacattcatttgatggccaaagttctaaagtcatttgaagaatgagttggtagatataggagtgtattcaggaatctctttcttcatttttcccttctctttctgatgagagagaaaccaggttgaat

SEQ ID NO: 44357 - DNA, 591 bp, Homo sapiens
agtatttcagtagggtcctgaagctacaattagccacaggagttggcagtactagggaaaaggaaccagccacctgctactgcctgtaaccatactctagcctgggagctgaggggaattggggcggggcagggaagtatgtgcaaatattacttttcagcaaagactgaagtgttgaaaaaaaaaagaggacattctaattgagactgtatttgtggatgaatgtaagaaaaatggaataagactcatggggcctaatgtaatttacatccagggacacagaaaaagtatctctcaaataaatgttgaacaggtagtgggaaaagaaaacagaagtgcattctgatcactttgtttaatatgccaggtatatatagtaactttttccttataaagtcatctttgggctaactttacagagtgttttatatgatttcatagaatttagagagtatattattaaaagcatccrgtgagagttttatgttactggtttttagtaagatgttaagaataattgtattagaatgtgctttgccttactttctttgtcagatgtacccaaagtagccactatttatagaagatgca

SEQ ID NO: 44358 - DNA, 1904 bp, Homo sapiens
tattcactgctggatttactttgcatatattttatttagatcttttgtgtgtatgtttataagtgacattgttgtaaaatgagctggtcttactgtaatcaacaaacaaaaattagtaatatttttgcatacccttaagaaccaattaggaaatgtaatatagcaaaaacagcaacataaagatagtactcatgctagtggtaaaaacaaattaagctagggtgtaaaagctaaccaggatgtagaaaacatccttcaggaatgcgtagaggaaaaatagaaaaaattatcactgtgtgtgttttgatttcattatatgctgccaaaatgctcttcaaatactaccacccatagtatgaattgtattttccttacatccttaccaatatgtttattttagtctagcctagtggatgaaaagtaaatttttgttattttagttttgcatttcctgatatgaaaaaggtggaatacgttttttaaaaaatgtctattgactattccaaattcttaatctgtgaattgacagtttatatcctttacctttttcagtgtaaacctctgaaatgcataagtctggtccagcagtaccagtatttgggctttattctcaggaaaaatagaactgtttgacaaaggaatgggcaaggaaattcatggcatgctgtctgtaaagactggaaaaggacctaaacctccctcaacaacaatttgatagatggagtacatccaaaaatatattttatatatgtggtggcagttctgaaagttgaaagttaaaaacacgctgagtgatttttgacagatggtgagattacaagagaaactatgcatttgactttattttaatgtgtagatgttttaacagatatgtaacataactgagaagaaaaggcagacattatcataaagggaaatattactgtaactatcaaaatcatttggattatctggaaaactattgggataatcagtgaaaattgaacatagtttggataatttcaaattattacttggtgtaattattacttgtgaagggctattgtggttatgtttaaaagtaagtccttatttctgaagtatttagtgatggaaaaaggagacattaaaggaaagaagttaatgaaaagaaaaaattagctcattttaaaatcttaggaacatttcaacagtgtaactaaggatgtttttccttttgrgttgatagcggtaatttagagccaaatttgtgtttttttttttttttgttttgtttttgttttttttttcgagatggaatctcactgtcactggagtgcaatggcacgatctcggctcactgcaacctccgcctctcaggttcaagtgattctcctgcctcagcctcctgagtagctaggattacaggtgcccaccaacacacctggctaaattttgtatttttagtagagacagggtttcaccatgttggtcaggctggtcttgaactcctgacctcaggtaatccgcctcagcctcccaaagtgctgggattataggcatgagtcaccgcacccggcctagatccttatatattttttcacttaatcttagtccattttaatatttctattcatctcccccatggtttcttttttgttgttattttttatgatttatgtgtcttttggggtagccttaaatcctctcagaaacaatgcagggtaaagattgatgattaatagcaaactaaaaatagttaatatttattgagctctgtggctaattgcacacagtaaaagcatatttacaactaactaccttgctgttaaaggagtactatcattcagataaacaggtttggagagaggcaccataggctcagattgtgctctacacaatataagtaatgcattaacatttctatgtttatataattattaaaa

SEQ ID NO: 44359 - DNA, 1904 bp, Homo sapiens
tattcactgctggatttactttgcatatattttatttagatcttttgtgtgtatgtttataagtgacattgttgtaaaatgagctggtcttactgtaatcaacaaacaaaaattagtaatatttttgcatacccttaagaaccaattaggaaatgtaatatagcaaaaacagcaacataaagatagtactcatgctagtggtaaaaacaaattaagctagggtgtaaaagctaaccaggatgtagaaaacatccttcaggaatgcgtagaggaaaaatagaaaaaattatcactgtgtgtgttttgatttcattatatgctgccaaaatgctcttcaaatactaccacccatagtatgaattgtattttccttacatccttaccaatatgtttattttagtctagcctagtggatgaaaagtaaatttttgttattttagttttgcatttcctgatatgaaaaaggtggaatacgttttttaaaaaatgtctattgactattccaaattcttaatctgtgaattgacagtttatatcctttacctttttcagtgtaaacctctgaaatgcataagtctggtccagcagtaccagtatttgggctttattctcaggaaaaatagaactgtttgacaaaggaatgggcaaggaaattcatggcatgctgtctgtaaagactggaaaaggacctaaacctccctcaacaacaatttgatagatggagtacatccaaaaatatattttatatatgtggtggcagttctgaaagttgaaagttaaaaacacgctgagtgatttttgacagatggtgagattacaagagaaactatgcatttgactttattttaatgtgtagatgttttaacagatatgtaacataactgagaagaaaaggcagacattatcataaagggaaatattactgtaactatcaaaatcatttggattatctggaaaactattgggataatcagtgaaaattgaacatagtttggataatttcaaattattacttggtgtaattattacttgtgaagggctattgtggttatgtttaaaagtaagtccttatttctgaagtatttagtgatggaaaaaggagacattaaaggaaagaagttaatgaaaagaaaaaattagctcattttaaaatcttaggaacatttcaacagtgtaactaaggatgtttttccttttgggttgatagcggtaatttagagccaaatttgtgtttttttttttktttgttttgtttttgttttttttttcgagatggaatctcactgtcactggagtgcaatggcacgatctcggctcactgcaacctccgcctctcaggttcaagtgattctcctgcctcagcctcctgagtagctaggattacaggtgcccaccaacacacctggctaaattttgtatttttagtagagacagggtttcaccatgttggtcaggctggtcttgaactcctgacctcaggtaatccgcctcagcctcccaaagtgctgggattataggcatgagtcaccgcacccggcctagatccttatatattttttcacttaatcttagtccattttaatatttctattcatctcccccatggtttcttttttgttgttattttttatgatttatgtgtcttttggggtagccttaaatcctctcagaaacaatgcagggtaaagattgatgattaatagcaaactaaaaatagttaatatttattgagctctgtggctaattgcacacagtaaaagcatatttacaactaactaccttgctgttaaaggagtactatcattcagataaacaggtttggagagaggcaccataggctcagattgtgctctacacaatataagtaatgcattaacatttctatgtttatataattattaaaa

SEQ ID NO: 44360 - DNA, 1904 bp, Homo sapiens
tattcactgctggatttactttgcatatattttatttagatcttttgtgtgtatgtttataagtgacattgttgtaaaatgagctggtcttactgtaatcaacaaacaaaaattagtaatatttttgcatacccttaagaaccaattaggaaatgtaatatagcaaaaacagcaacataaagatagtactcatgctagtggtaaaaacaaattaagctagggtgtaaaagctaaccaggatgtagaaaacatccttcaggaatgcgtagaggaaaaatagaaaaaattatcactgtgtgtgttttgatttcattatatgctgccaaaatgctcttcaaatactaccacccatagtatgaattgtattttccttacatccttaccaatatgtttattttagtctagcctagtggatgaaaagtaaatttttgttattttagttttgcatttcctgatatgaaaaaggtggaatacgttttttaaaaaatgtctattgactattccaaattcttaatctgtgaattgacagtttatatcctttacctttttcagtgtaaacctctgaaatgcataagtctggtccagcagtaccagtatttgggctttattctcaggaaaaatagaactgtttgacaaaggaatgggcaaggaaattcatggcatgctgtctgtaaagactggaaaaggacctaaacctccctcaacaacaatttgatagatggagtacatccaaaaatatattttatatatgtggtggcagttctgaaagttgaaagttaaaaacacgctgagtgatttttgacagatggtgagattacaagagaaactatgcatttgactttattttaatgtgtagatgttttaacagatatgtaacataactgagaagaaaaggcagacattatcataaagggaaatattactgtaactatcaaaatcatttggattatctggaaaactattgggataatcagtgaaaattgaacatagtttggataatttcaaattattacttggtgtaattattacttgtgaagggctattgtggttatgtttaaaagtaagtccttatttctgaagtatttagtgatggaaaaaggagacattaaaggaaagaagttaatgaaaagaaaaaattagctcattttaaaatcttaggaacatttcaacagtgtaactaaggatgtttttccttttgggttgatagcggtaatttagagccaaatttgtgtttttttttttttttgttttgtttttkttttttttttcgagatggaatctcactgtcactggagtgcaatggcacgatctcggctcactgcaacctccgcctctcaggttcaagtgattctcctgcctcagcctcctgagtagctaggattacaggtgcccaccaacacacctggctaaattttgtatttttagtagagacagggtttcaccatgttggtcaggctggtcttgaactcctgacctcaggtaatccgcctcagcctcccaaagtgctgggattataggcatgagtcaccgcacccggcctagatccttatatattttttcacttaatcttagtccattttaatatttctattcatctcccccatggtttcttttttgttgttattttttatgatttatgtgtcttttggggtagccttaaatcctctcagaaacaatgcagggtaaagattgatgattaatagcaaactaaaaatagttaatatttattgagctctgtggctaattgcacacagtaaaagcatatttacaactaactaccttgctgttaaaggagtactatcattcagataaacaggtttggagagaggcaccataggctcagattgtgctctacacaatataagtaatgcattaacatttctatgtttatataattattaaaa

SEQ ID NO: 44361 - DNA, 1698 bp, Homo sapiens
gtacatttggaaaaataaaactttattaaatcaaaaaataaaaataaaaataaaaacgtttgtatatattctccacaaaaagcagaattttattgtacagaacactgggctaaaaatcagggtacacaggaggtggagaggagatgtgtgaggcgagagcagcccgcagygagcagtggggaggagggaaagctctatcagcctgggcggcagagctcctccctgtgaggtcctgcctgggcccaccttcccacccacatccatgggcatctcagagatcctcgagggggcactccccagtagcatggaatcatagaatctgtgtgccataccagttgtttctgtccaatttgacagttcttctcaggaaaactatgatctgtgtgtctctcttgaatggaattgtttttctctgattgttcattcatctctgatcacttaaaaagtaattggaaaaagtaaaacatattagtatcatctatctccagtaactatatctggtgattcttttctactctccctacacatctcactttattcaaaaccagactgtatctgtactcccagaaccttttctcccactcactgttaaaccttgcctctgactcccccagaccaccctactgaggctctcctctgccgggggttccaggagaaaatcaatagtacctttgacagtccttagcatcataaacctctcttaagcaggattaagaagactctgagtttttagaactccattcttccttctttacacacactcttgaaagaaaaagtatgatacgttaataccatatgtacacagtaatgttgtgaaaagctcatccactcccatggtttcagctgacacctcttcatgtatcattcccacagtgactccccaaagccttgatctcctcactcaacttttctgataaatttctaatgcagcttgtgctaaatggtaatcaggttttcataaaaccccactgctaaaatgcctgtaacttacttcttctaaattacttcagtagtatatatacagggtgcgtgcgtctgtgtgtgtgtgtgtgtgtgtgtgtgcatgtgtgtgtgtaagagagagagagagagagagagagagagagagagagagagatggagcccatacaatatggtaatcatgagtgacagtccagggctggtctgcaatgttctgtcagaaaacaccactctccagaggaggcttccacaggccctgctgttttccctgattctcatcaactaccattgctgactacagggtgccatttctactgaagtaacttaagagttaggcgttatcatgttggcttgactcatttagcatcacctctctgctgaccaattggaaattccaattctatcagtgggaaatctccaaactgctctcgacagtggctggactaatttacattctcaccaatagtgtgtaagtatgcaccaaggaataccacgcagccataaaaagaactagatcatctcttttgcagcaacatggatgcagctggaagccattatctgaagtgaacaaatacagaaaacgaaaaccaaatactgcatgttcttacttaggtgggagctaaacgctggctacacatggacagaaagatggcaacaatagacactgggagctactgggtgagggtaaatgggttgaaaaactacctattgggtatgatgctcattacctaagtgcat

SEQ ID NO: 44362 - DNA, 1698 bp, Homo sapiens
gtacatttggaaaaataaaactttattaaatcaaaaaataaaaataaaaataaaaacgtttgtatatattctccacaaaaagcagaattttattgtacagaacactgggctaaaaatcagggtacacaggaggtggagaggagatgtgtgaggcgagagcagcccgcagcgagcagtggggaggagggaaagctctatcagcctgggcggcagagctcctccctgtgaggtcctgcctgggcccaccttcccacccacatccatgggcatctcagagatcctcgagggggcactccccagtagcatggaatcatagaatctgtgtgccataccagttgtttctgtccaatttgacagttcttctcaggaaaactatgatctgtgtgtctctcttgaatggaattgtttttctctgattgttcattcatctctgatcacttaaaaagtaattggaaaaagtaaaacatattartatcatctatctccagtaactatatctggtgattcttttctactctccctacacatctcactttattcaaaaccagactgtatctgtactcccagaaccttttctcccactcactgttaaaccttgcctctgactcccccagaccaccctactgaggctctcctctgccgggggttccaggagaaaatcaatagtacctttgacagtccttagcatcataaacctctcttaagcaggattaagaagactctgagtttttagaactccattcttccttctttacacacactcttgaaagaaaaagtatgatacgttaataccatatgtacacagtaatgttgtgaaaagctcatccactcccatggtttcagctgacacctcttcatgtatcattcccacagtgactccccaaagccttgatctcctcactcaacttttctgataaatttctaatgcagcttgtgctaaatggtaatcaggttttcataaaaccccactgctaaaatgcctgtaacttacttcttctaaattacttcagtagtatatatacagggtgcgtgcgtctgtgtgtgtgtgtgtgtgtgtgtgtgcatgtgtgtgtgtaagagagagagagagagagagagagagagagagagagagagatggagcccatacaatatggtaatcatgagtgacagtccagggctggtctgcaatgttctgtcagaaaacaccactctccagaggaggcttccacaggccctgctgttttccctgattctcatcaactaccattgctgactacagggtgccatttctactgaagtaacttaagagttaggcgttatcatgttggcttgactcatttagcatcacctctctgctgaccaattggaaattccaattctatcagtgggaaatctccaaactgctctcgacagtggctggactaatttacattctcaccaatagtgtgtaagtatgcaccaaggaataccacgcagccataaaaagaactagatcatctcttttgcagcaacatggatgcagctggaagccattatctgaagtgaacaaatacagaaaacgaaaaccaaatactgcatgttcttacttaggtgggagctaaacgctggctacacatggacagaaagatggcaacaatagacactgggagctactgggtgagggtaaatgggttgaaaaactacctattgggtatgatgctcattacctaagtgcat

SEQ ID NO: 44363 - DNA, 591 bp, Homo sapiens
tgcataagtctcatctcttcattgaagctcctcaatggtaggcaagtgcagtgtcatatgtactacaggcatacctcgttttattgtrctttgctttaagacttcacagatattgcatttgttacaaattgaagatttgtgataactctgagtcaagcaagtctatcagcatcattttccagcagcatgtgctcatgttatgtctctgggtcacattttggtaattcttacaaaatttcaaactttttcatgattgttatatctgttacagtaatctgtgaacaggaattgatgatgttatgactgtaattgttttggggtgcaatgaatcatgcctgtataaggcagcaaacttaataattgtgtgtgttctgactgctgcactggccagccattcctccatctctctccctcttctttggcgtttccattccctgagaatcagtactattgaaattagggccgggtgtggtggctcatgcctgtaatcccagcactttgggaggccgaggcgggtggatcacgagatcaggagatcaagaccatcctggctaacacagtgcaaaccccatctctactaaaaatacaaaa

SEQ ID NO: 44364 - DNA, 591 bp, Homo sapiens
tgcataagtctcatctcttcattgaagctcctcaatggtaggcaagtgcagtgtcatatgtactacaggcatacctcgttttattgtactttgctttaagacttcacagatattgcatttgttacaaattgaagatttgtgataactctgagtcaagcaagtctatcagcatcattttccagcagcatgtgctcatgttatgtctctgggtcacattttggtaattcttacaaaatttcaaactttttcatgattgttatatctgttacagtaatctgtgaacaggaattgatgatgttatgactgtaattgttttggggtgcaatgaatcatgcctgtataaggcagcaaacttaataattgtgtgtgttctgactgctscactggccagccattcctccatctctctccctcttctttggcgtttccattccctgagaatcagtactattgaaattagggccgggtgtggtggctcatgcctgtaatcccagcactttgggaggccgaggcgggtggatcacgagatcaggagatcaagaccatcctggctaacacagtgcaaaccccatctctactaaaaatacaaaa

SEQ ID NO: 44365 - DNA, 591 bp, Homo sapiens
tgcataagtctcatctcttcattgaagctcctcaatggtaggcaagtgcagtgtcatatgtactacaggcatacctcgttttattgtactttgctttaagacttcacagatattgcatttgttacaaattgaagatttgtgataactctgagtcaagcaagtctatcagcatcattttccagcagcatgtgctcatgttatgtctctgggtcacattttggtaattcttacaaaatttcaaactttttcatgattgttatatctgttacagtaatctgtgaacaggaattgatgatgttatgactgtaattgttttggggtgcaatgaatcatgcctgtataaggcagcaaacttaataattgtgtgtgttctgactgctgcactggccagccattcctccatctctctccctcttctttggcgtttccattccctgagaatcagtactattgaaattagggccgggtgtggtggctcaygcctgtaatcccagcactttgggaggccgaggcgggtggatcacgagatcaggagatcaagaccatcctggctaacacagtgcaaaccccatctctactaaaaatacaaaa

SEQ ID NO: 44366 - DNA, 553 bp, Homo sapiens
gtctaggtcactctcccatgtagccagccccatcctcactggatcttccaggtaagatccccatcacagtgaccaataaaggcttttttatccttaaaatactttttaagttcagaaacacaacacacacacacacacacacacacacacacacaaaacacacacacaggaccactggcccttgtctttatccgaattagcccaggcacttgtgaccacatcaatggatcctagaacccaagtgattagaagcaatatttccaccaatccctaagtctccagccatcacaaacatctctctatagattgatggcctttttataaccaattaaaagaaaaaaaacgatacatttttaaattaaaataccatttatttagtgagagttacatgttcttttagctgaatagaatacaaccttttaaaatattttattttattttatttaaagttccagggtacctgtgcaggatgtgcaggtttgttacataggtaaacatgtgccatggtggtttgctgcacytatcaacccatcacctaggtattaagtccagc

SEQ ID NO: 44367 - DNA, 554 bp, Homo sapiens
gtgggcctgctctaatccttcagatgctcacaagggtatattgaaagctgctctgagtggtcattcctggcagtctgtattgtaatccatgttccccattgctgcaccctcctgcgctctgatctttcttcttaatcaagccttttattctccagtgtcacttttttaaaaaaaatgatggtgatggtgtcatcatacatgtcctactgtcgttccaggccatctcggaaacgcaggtcccttggcgatgttgggaatgtgacggtggccgtgcccacggtggcagctttccccaacacttcctcgaccagcgtgcccacgagtccggaggagcacaggccttttgagaaggtggtgaacaaggagtcgctggtcatctccggcttgcgacacttcacgggctatcgcatcgagctgcaggcttgcaaccaggacacccctgaggaacggtgcagtgtggcagcytacgtcagtgcgaggaccatgcctgaaggtagggctgctgctccggggtccgagtgtcatgggtgggacatcaaggctgaccaaggaca

SEQ ID NO: 44368 - DNA, 326 bp, Homo sapiens
tcctaaacttagacacatacagaatgtggacaaggttctggggagagcaagagcgtcaccctgtaatgggaacatttctctaagccaagagttggaaaattatcaccggcaggcctaccacctgtttctggaaataaagttttattggaacactgcactgtctgtggctgctctcttgttatgaaggcagagttgagtagttgctacagagaccatagagccacaaagcccaaaatatttactatctgaccctttacmgaaaagttctattgacccctctaggcgaagcatttcccatacaaaagtcagcttgtggcctgggtgca

SEQ ID NO: 44369 - DNA, 1981 bp, Homo sapiens
aacttccccagtagccggagtatttctggaagccactgtggtggacagcccttaagaccccaatatctattcctcctyctttatagaaggacagaacatccagttttcaatgggacacatggccacccagaataaaagctgtttcccagcctcttggaagttacgaatggccatgggactttgtctcaaaaaagaaaagtcttgctctgtcagccaggctggagcacagtgacatgatcttgggctcattgtaccctctacctcctggtttcaagtgtatctcctgcctcagcctcccaagtagctggggttacacgtttgcaccccaaccacgcctggctgagttttgtgtttttagtagagatggggttttcaccatgttggccaggctggtctcaaactcctgacctcagatgatccacctccctcggcctcccaaagtgctgggattacaggcatgagtcaccaggcctggcccatgccactaatttctggccgtgtcccattcataagacgtcttccttgctgatgcgctatatccctcaccatcctcccacaatcagcccacaaaagataaacctttttagactgtcatggaaggaacacagaagaacccttaagtcccatgataaacatgtaacctttgtttgttaggtaacatgaatgagaaaatggagaccttcattctgaagctgtccatcagcgtctgtccatcaccacatagggcccaaaagtaagacccacggtgcgttacaagctgttgtgtagacatgacccaagcttgatttctaggtttctggtggcaatccggaacaatccacctctcactgtccccaatccataaagagtccttcagttgaatatcaccaggaacaaagttgctgttaattcttaagttgcctctgcacaaatcaccaaagtatttattctcctagacagatgcagtcctacacttagcttcacaggcttggcgagtggggcaccggtcaggcttcaactcctacaggctccatcagaggacatcctggaattgtgtgcaacctgttcaactgcacatggcagccttaaagaggtccaggatttccatctgaggtattaagaaaagcaatcataactcttccttccactccccgaaagcatcacaaggtcttacccacagagctcagctttagtgagcaaacttcttatacctcaaataagaatcctgtttggacaatgaagaatctgcctttggctaagtgttggctgctgtgtagataatgtgcatattgcctaaacagtcaggctctgaaaattggggaacttcatcccattgcaatggaaatagtcaaggtaagggaaggcctggagatgcaggttggcctttgttttctggggttctcagactcagtaccttcacagttcaggaagcctctgtcctcctcctcacatagcagataccaccttgatcctgctcatcttccctggtttcagtagaagtcatttttttgagcatctgttactcacaaggacaggtggctaacacattttagagctaccatgttaggtgggaattgacacccagagcaaggccacacaactagagtgagccacactcacactcagggtagccaactcccaaagctagcgatccttggtgaaagtccaaataccaacatcaataacacttaagagcgtgttaatgcttatcagtttctaagccccaaagtcactactgttccttatacaaaaaacatgcctccaatgaatgcaaattaagaccacagtgatttgtcattttagaaataccaggctggcaaaaatgtcaaaacctaatacgttatagtaggcagagaaatggccccgtgcaagcatccatctcctcctgtcatgggacacatcgtgggtcatggcaatggcaagggcagcccatgtggagcagctactgcaggatgccagttgcagaggcggcagcatggccagggctgcgcaattcagagcc

SEQ ID NO: 44370 - DNA, 1981 bp, Homo sapiens
aacttccccagtagccggagtatttctggaagccactgtggtggacagcccttaagaccccaatatctattcctcctcctttatagaaggacagaacatccagttttcaatgggacacatggccacccagaataaaagctgtttcccagcctcttggaagttacgaatggccatgggactttgtctcaaaaaagaaaagtcttgctctgtcagccaggctggagcacagtgacatgatcttgggctcattgwaccctctacctcctggtttcaagtgtatctcctgcctcagcctcccaagtagctggggttacacgtttgcaccccaaccacgcctggctgagttttgtgtttttagtagagatggggttttcaccatgttggccaggctggtctcaaactcctgacctcagatgatccacctccctcggcctcccaaagtgctgggattacaggcatgagtcaccaggcctggcccatgccactaatttctggccgtgtcccattcataagacgtcttccttgctgatgcgctatatccctcaccatcctcccacaatcagcccacaaaagataaacctttttagactgtcatggaaggaacacagaagaacccttaagtcccatgataaacatgtaacctttgtttgttaggtaacatgaatgagaaaatggagaccttcattctgaagctgtccatcagcgtctgtccatcaccacatagggcccaaaagtaagacccacggtgcgttacaagctgttgtgtagacatgacccaagcttgatttctaggtttctggtggcaatccggaacaatccacctctcactgtccccaatccataaagagtccttcagttgaatatcaccaggaacaaagttgctgttaattcttaagttgcctctgcacaaatcaccaaagtatttattctcctagacagatgcagtcctacacttagcttcacaggcttggcgagtggggcaccggtcaggcttcaactcctacaggctccatcagaggacatcctggaattgtgtgcaacctgttcaactgcacatggcagccttaaagaggtccaggatttccatctgaggtattaagaaaagcaatcataactcttccttccactccccgaaagcatcacaaggtcttacccacagagctcagctttagtgagcaaacttcttatacctcaaataagaatcctgtttggacaatgaagaatctgcctttggctaagtgttggctgctgtgtagataatgtgcatattgcctaaacagtcaggctctgaaaattggggaacttcatcccattgcaatggaaatagtcaaggtaagggaaggcctggagatgcaggttggcctttgttttctggggttctcagactcagtaccttcacagttcaggaagcctctgtcctcctcctcacatagcagataccaccttgatcctgctcatcttccctggtttcagtagaagtcatttttttgagcatctgttactcacaaggacaggtggctaacacattttagagctaccatgttaggtgggaattgacacccagagcaaggccacacaactagagtgagccacactcacactcagggtagccaactcccaaagctagcgatccttggtgaaagtccaaataccaacatcaataacacttaagagcgtgttaatgcttatcagtttctaagccccaaagtcactactgttccttatacaaaaaacatgcctccaatgaatgcaaattaagaccacagtgatttgtcattttagaaataccaggctggcaaaaatgtcaaaacctaatacgttatagtaggcagagaaatggccccgtgcaagcatccatctcctcctgtcatgggacacatcgtgggtcatggcaatggcaagggcagcccatgtggagcagctactgcaggatgccagttgcagaggcggcagcatggccagggctgcgcaattcagagcc

SEQ ID NO: 44371 - DNA, 1981 bp, Homo sapiens
aacttccccagtagccggagtatttctggaagccactgtggtggacagcccttaagaccccaatatctattcctcctcctttatagaaggacagaacatccagttttcaatgggacacatggccacccagaataaaagctgtttcccagcctcttggaagttacgaatggccatgggactttgtctcaaaaaagaaaagtcttgctctgtcagccaggctggagcacagtgacatgatcttgggctcattgtaccctctacctcctggtttcaagtgtatctcctgcctcagcctcccaagtagctggggttacacgtttgcaccccaaccacgcctggctgagttttgtgtttttagtagagatggggttttcaccatgttggccaggctggtctcaaactcctgacctcagatgatccacctccctcggcytcccaaagtgctgggattacaggcatgagtcaccaggcctggcccatgccactaatttctggccgtgtcccattcataagacgtcttccttgctgatgcgctatatccctcaccatcctcccacaatcagcccacaaaagataaacctttttagactgtcatggaaggaacacagaagaacccttaagtcccatgataaacatgtaacctttgtttgttaggtaacatgaatgagaaaatggagaccttcattctgaagctgtccatcagcgtctgtccatcaccacatagggcccaaaagtaagacccacggtgcgttacaagctgttgtgtagacatgacccaagcttgatttctaggtttctggtggcaatccggaacaatccacctctcactgtccccaatccataaagagtccttcagttgaatatcaccaggaacaaagttgctgttaattcttaagttgcctctgcacaaatcaccaaagtatttattctcctagacagatgcagtcctacacttagcttcacaggcttggcgagtggggcaccggtcaggcttcaactcctacaggctccatcagaggacatcctggaattgtgtgcaacctgttcaactgcacatggcagccttaaagaggtccaggatttccatctgaggtattaagaaaagcaatcataactcttccttccactccccgaaagcatcacaaggtcttacccacagagctcagctttagtgagcaaacttcttatacctcaaataagaatcctgtttggacaatgaagaatctgcctttggctaagtgttggctgctgtgtagataatgtgcatattgcctaaacagtcaggctctgaaaattggggaacttcatcccattgcaatggaaatagtcaaggtaagggaaggcctggagatgcaggttggcctttgttttctggggttctcagactcagtaccttcacagttcaggaagcctctgtcctcctcctcacatagcagataccaccttgatcctgctcatcttccctggtttcagtagaagtcatttttttgagcatctgttactcacaaggacaggtggctaacacattttagagctaccatgttaggtgggaattgacacccagagcaaggccacacaactagagtgagccacactcacactcagggtagccaactcccaaagctagcgatccttggtgaaagtccaaataccaacatcaataacacttaagagcgtgttaatgcttatcagtttctaagccccaaagtcactactgttccttatacaaaaaacatgcctccaatgaatgcaaattaagaccacagtgatttgtcattttagaaataccaggctggcaaaaatgtcaaaacctaatacgttatagtaggcagagaaatggccccgtgcaagcatccatctcctcctgtcatgggacacatcgtgggtcatggcaatggcaagggcagcccatgtggagcagctactgcaggatgccagttgcagaggcggcagcatggccagggctgcgcaattcagagcc

SEQ ID NO: 44372 - DNA, 1981 bp, Homo sapiens
aacttccccagtagccggagtatttctggaagccactgtggtggacagcccttaagaccccaatatctattcctcctcctttatagaaggacagaacatccagttttcaatgggacacatggccacccagaataaaagctgtttcccagcctcttggaagttacgaatggccatgggactttgtctcaaaaaagaaaagtcttgctctgtcagccaggctggagcacagtgacatgatcttgggctcattgtaccctctacctcctggtttcaagtgtatctcctgcctcagcctcccaagtagctggggttacacgtttgcaccccaaccacgcctggctgagttttgtgtttttagtagagatggggttttcaccatgttggccaggctggtctcaaactcctgacctcagatgatccacctccctcggcctcccaaagtgctgggattacaggcatgagtcaccaggcctggcccatgccactaatttctggccgtgtcccattcataagacrtcttccttgctgatgcgctatatccctcaccatcctcccacaatcagcccacaaaagataaacctttttagactgtcatggaaggaacacagaagaacccttaagtcccatgataaacatgtaacctttgtttgttaggtaacatgaatgagaaaatggagaccttcattctgaagctgtccatcagcgtctgtccatcaccacatagggcccaaaagtaagacccacggtgcgttacaagctgttgtgtagacatgacccaagcttgatttctaggtttctggtggcaatccggaacaatccacctctcactgtccccaatccataaagagtccttcagttgaatatcaccaggaacaaagttgctgttaattcttaagttgcctctgcacaaatcaccaaagtatttattctcctagacagatgcagtcctacacttagcttcacaggcttggcgagtggggcaccggtcaggcttcaactcctacaggctccatcagaggacatcctggaattgtgtgcaacctgttcaactgcacatggcagccttaaagaggtccaggatttccatctgaggtattaagaaaagcaatcataactcttccttccactccccgaaagcatcacaaggtcttacccacagagctcagctttagtgagcaaacttcttatacctcaaataagaatcctgtttggacaatgaagaatctgcctttggctaagtgttggctgctgtgtagataatgtgcatattgcctaaacagtcaggctctgaaaattggggaacttcatcccattgcaatggaaatagtcaaggtaagggaaggcctggagatgcaggttggcctttgttttctggggttctcagactcagtaccttcacagttcaggaagcctctgtcctcctcctcacatagcagataccaccttgatcctgctcatcttccctggtttcagtagaagtcatttttttgagcatctgttactcacaaggacaggtggctaacacattttagagctaccatgttaggtgggaattgacacccagagcaaggccacacaactagagtgagccacactcacactcagggtagccaactcccaaagctagcgatccttggtgaaagtccaaataccaacatcaataacacttaagagcgtgttaatgcttatcagtttctaagccccaaagtcactactgttccttatacaaaaaacatgcctccaatgaatgcaaattaagaccacagtgatttgtcattttagaaataccaggctggcaaaaatgtcaaaacctaatacgttatagtaggcagagaaatggccccgtgcaagcatccatctcctcctgtcatgggacacatcgtgggtcatggcaatggcaagggcagcccatgtggagcagctactgcaggatgccagttgcagaggcggcagcatggccagggctgcgcaattcagagcc

SEQ ID NO: 44373 - DNA, 1981 bp, Homo sapiens
aacttccccagtagccggagtatttctggaagccactgtggtggacagcccttaagaccccaatatctattcctcctcctttatagaaggacagaacatccagttttcaatgggacacatggccacccagaataaaagctgtttcccagcctcttggaagttacgaatggccatgggactttgtctcaaaaaagaaaagtcttgctctgtcagccaggctggagcacagtgacatgatcttgggctcattgtaccctctacctcctggtttcaagtgtatctcctgcctcagcctcccaagtagctggggttacacgtttgcaccccaaccacgcctggctgagttttgtgtttttagtagagatggggttttcaccatgttggccaggctggtctcaaactcctgacctcagatgatccacctccctcggcctcccaaagtgctgggattacaggcatgagtcaccaggcctggcccatgccactaatttctggccgtgtcccattcataagacgtcttccttgctgatgcgctatatccctcaccatcctcccacaatcagcccacaaaagataaacctttttagactgtcatggaaggaacacagaagaacccttaagtcccatgataaacatgtaacctttgtttgttaggtaacatgaatgagaaaatggagaccttcattctgaagctgtccatcagcgtctgtccatcaccacatagggcccaaaagtaagacccacggtgcgttacaagctgttgtgtagacatgacccaagcttgatttctaggtttctggtggcaatccggaacaatccacctctcactgtccccaatccataaagagtccttcagttgaatatcaccaggaacaaagttgctgttaattcttaagttgcctctgcacaaatcaccaaagtatttattctcctagacagatgcagtcctacacttagcttcacaggcttggcgagtggggcaccggtcaggcttcaactcctacaggctccatcagaggacatcctggaattgtgtgcaacctgttcaactgcacatggcagccttaaagaggtccaggatttccatctgaggtattaagaaaagcaatcataactcttccttccactccccgaaagcatcacaaggtcttacccacagagctcagctttagtgagcaaacttcttatacctcaaataagaatcctgtttggacaatgaagaatctgcctttggctaagtgttggctgctgtgtagataatgtgcatattgcctaaacagtcaggctctgaaaattggggaacttcatcccattgcaatggaaatagtcaaggtaagggaaggcctggagatgcaggttggcctttgttttctggggttctcagactcagtaccttcacagttcaggaagcctctgtcctcctcctcacatagcagataccaccttgatcctgctcatcttccctggtttcagtagaagtcatttttttgagcatctgttactcacaaggacaggtggctaacacattttagagctaccatgttaggtgggaatwgacacccagagcaaggccacacaactagagtgagccacactcacactcagggtagccaactcccaaagctagcgatccttggtgaaagtccaaataccaacatcaataacacttaagagcgtgttaatgcttatcagtttctaagccccaaagtcactactgttccttatacaaaaaacatgcctccaatgaatgcaaattaagaccacagtgatttgtcattttagaaataccaggctggcaaaaatgtcaaaacctaatacgttatagtaggcagagaaatggccccgtgcaagcatccatctcctcctgtcatgggacacatcgtgggtcatggcaatggcaagggcagcccatgtggagcagctactgcaggatgccagttgcagaggcggcagcatggccagggctgcgcaattcagagcc

SEQ ID NO: 44374 - DNA, 1981 bp, Homo sapiens
aacttccccagtagccggagtatttctggaagccactgtggtggacagcccttaagaccccaatatctattcctcctcctttatagaaggacagaacatccagttttcaatgggacacatggccacccagaataaaagctgtttcccagcctcttggaagttacgaatggccatgggactttgtctcaaaaaagaaaagtcttgctctgtcagccaggctggagcacagtgacatgatcttgggctcattgtaccctctacctcctggtttcaagtgtatctcctgcctcagcctcccaagtagctggggttacacgtttgcaccccaaccacgcctggctgagttttgtgtttttagtagagatggggttttcaccatgttggccaggctggtctcaaactcctgacctcagatgatccacctccctcggcctcccaaagtgctgggattacaggcatgagtcaccaggcctggcccatgccactaatttctggccgtgtcccattcataagacgtcttccttgctgatgcgctatatccctcaccatcctcccacaatcagcccacaaaagataaacctttttagactgtcatggaaggaacacagaagaacccttaagtcccatgataaacatgtaacctttgtttgttaggtaacatgaatgagaaaatggagaccttcattctgaagctgtccatcagcgtctgtccatcaccacatagggcccaaaagtaagacccacggtgcgttacaagctgttgtgtagacatgacccaagcttgatttctaggtttctggtggcaatccggaacaatccacctctcactgtccccaatccataaagagtccttcagttgaatatcaccaggaacaaagttgctgttaattcttaagttgcctctgcacaaatcaccaaagtatttattctcctagacagatgcagtcctacacttagcttcacaggcttggcgagtggggcaccggtcaggcttcaactcctacaggctccatcagaggacatcctggaattgtgtgcaacctgttcaactgcacatggcagccttaaagaggtccaggatttccatctgaggtattaagaaaagcaatcataactcttccttccactccccgaaagcatcacaaggtcttacccacagagctcagctttagtgagcaaacttcttatacctcaaataagaatcctgtttggacaatgaagaatctgcctttggctaagtgttggctgctgtgtagataatgtgcatattgcctaaacagtcaggctctgaaaattggggaacttcatcccattgcaatggaaatagtcaaggtaagggaaggcctggagatgcaggttggcctttgttttctggggttctcagactcagtaccttcacagttcaggaagcctctgtcctcctcctcacatagcagataccaccttgatcctgctcatcttccctggtttcagtagaagtcatttttttgagcatctgttactcacaaggacaggtggctaacacattttagagctaccatgttaggtgggaattgacacccagagcaaggccacacaactagagtgagccacactcacactcagggtagccaactcccaaagctagcgatccttggtgaaagtccaaataccaacatcaataacrcttaagagcgtgttaatgcttatcagtttctaagccccaaagtcactactgttccttatacaaaaaacatgcctccaatgaatgcaaattaagaccacagtgatttgtcattttagaaataccaggctggcaaaaatgtcaaaacctaatacgttatagtaggcagagaaatggccccgtgcaagcatccatctcctcctgtcatgggacacatcgtgggtcatggcaatggcaagggcagcccatgtggagcagctactgcaggatgccagttgcagaggcggcagcatggccagggctgcgcaattcagagcc

SEQ ID NO: 44375 - DNA, 559 bp, Homo sapiens
cagtcagctaccagaacctggttaaatgcctcactggatggcgtggcccacagggagcatggagccacggggtgggtgggagggccagtgtgttcaaggcctgtcaccctcagccttgcacagctggggctgccctggcacagttccttgggggggttgtgcaccctaactggttcctgtcccttgtcaccctaactggcctcascatcatcactgttttctgagccctcatccctggctcacagctgcacatgcagaggcctcgcatggacagtagacagggtgcttgtgttagccccgggccgacccctctgcagaggtttgcaccgcgagagacggggcccacctgctctctgcagctgctgcactgagttcctgctccagtcccctgctgctccctcctccagaatacccttcccacctggccttggtcgtgtgctcctggggcccatgaggactggtgccatgagtttgtgggggctccctgagtggggtgggctgggccattctgccttggtgcttcctttgctccgtgtggttcttgtgtcttacgccagtt

SEQ ID NO: 44376 - DNA, 1459 bp, Homo sapiens
caatattgatgtctgtattttaatttcacattaatcctttacctggtaaaaatgtatttacttattctattaattagtattattttattatgataatatataattaatattgttatttgctrtaggttatcagaccaggatgaagagggaaagatcaagcaggagtatatcatatctgacccctccttttccatggtgacagtccaaagggaagatagtgggataacctgggaaaccaattcaagtagatcttctactccttgggcttcagaagaaagtcagacttctggtgtgtgtagtcgggaagggtcaactgtgaattctcctcctggaaatgtttcctttattgtggatgaagtgaaaaaggttcggaaaaggactcataagtcaaagcatggttcaccatcattacgccggaaaggcaacagaaaaagaaattcttttgaatcccaagatgttccaacaaacaaaaaaggcagtcctttaacttcagcaagccaggtactaaccacggagaaagagaagtcatatactggcatttatgataaagcaagaaaaaagaagaccacttcaaatacacctccgattactggggcaatatacaaagaacacaagccattagtgttaagaccagtctacataggaacagtacaatataaaattaagatgtttaattcggttaaagaagaattaattcctctacaattttatggaacattgccaaagggttatgtaattaaagaaatacattataggaaagggaaagatgcatccattagtctagagccagatttggacaatagtggttctaatacagtgtccaaaacacgcaaattagtagcccaaagcatagaggataaagtaaaagaggtttttccaccctggagaggcgcactctccaaaggatcagagtccctaaccttaatgttcagtcatgaagatcaaaagaaaatttatgctgattctcccctaaatgccacatctgcattggagcacacagttccctcttattcaagtagtggcagagcagaacaaggaatacagctcaggcattcacagtcagtgccacaacagccagaagatgaagcaaaaccacatgaagtggaacctccatctgtgacacccgacacacctgcaactatgttcctgagaacaacaaaggaagaatgtgagcttgcttcaccaggaactgcagcttcagagaatgactcttcagtctcaccatcatttgctaatgaggtaaagaaggaagatgtgtattctgctcaccattccatttctctggaggcagcgtcaccaggtctggcagcatctacccaggatggtttggacccagaccaagaacagccggacctgacttcaatagaaagggcagaaccagtctccgcaaaactgacccctacccatcccagtgtcaaaggagagaaggaggaaaacatgcttgagccatccatttctc

SEQ ID NO: 44377 - DNA, 1501 bp, Homo sapiens
tctaggtagttttatgtttgcttccccctgtgtaattatccagtactggccacatttattgctaagcgaagaggcctattctaacatagtcttaaaggtggctgaaaagtgggggagaaagataatggaaatgatttatcagtcccttgtagaaccataaaataaccagtaagcacagcctcacccatagtcttaggaatatttcttgcttcctttgctctgggaaaaattgcaagtgatcaaggcaggctccttgggtcactaacaggggaaccagttcttgtatcccttgtgtatctgcagtggttcagtacagaaaatagaaacgctctaggtattttaaacaggaagatggggttatggaaattggtagaaagactgaagaaattaattcaggagtctccaatggctctattagagagagacagggagagagagaatgaatgagagaatgctatagtgatgattcagaaccaggaagcctctgccttcacccccactactggcattactgctgccacaactgcttccagacacccgcaagactggcgatgggtcctggaatgatgagttctcatgttttgatggccttgcttggctggagaaatagcagcaggaaaatggcctccacctcactccggccttccctgtctctcaagagtatatccaattggtgagacctaattgacatccagaatattgacatccagaatattggctacaagatagtctggaaaatgtagtttttatttttccagcctttgcattatagtaatggcatctagaaggagggtaaaacagtcaccagaaggtgaacaagccaatctaaggtatccatgacctcttggcacccataaaaagcgtgaattgtaatgtgctatcccctttaccttcatattctgtaggaaagtatttaaatcggaccctgctgggacctggttaggtatgactcctattttattggcattttcactcatttatttgctctttcacacacctaacatattgagcaccctatacataccaggcactgtcagtctctacgttaatgatgaagagagacatagggacacaaattagcaggatattacaattgggtgtgataattagggttggaaagttggagcactttagtggcccatagcaaggacataccaggctctgtgcaatagacccataggaacgaggcagacagagtgggaatgggaaaagggtcccaggcagagagagcagcatatrctcttccccaaagaactgggggacgaaccacgaatatacaactactgggactccatggctgggtggatgggggtagtgaaagacagaacaaaagtggaaatcaggtgactccaaggattctagcttgggcaacacagagaaggaggatgccagtcactcagctggaagtgactcagcttgaccacccacgaagttggaggtgtggttgccggcagctggtgagtgagaggtggcccagtcagacacttggacccaataacaa

SEQ ID NO: 44378 - DNA, 3160 bp, Homo sapiens
gcttgttttttccatgtttggacagctatgtgatccaatatggcaggagctattaaaatgtaaattaatttacctatattatttaaataaattacttaaattaattggttgattatatttaacatgcaactaaaaagtcggttcttcagtcacactagccatgtttcaagggctcaaaatccacatgtggctagtggctaccacgttggacagcgtgaatacagaacattgccatcatggtggaaggttttattcactgagttatctctgagctcaggacagagtcatggatagtgaagggtgggaattgggagtgaagtggcacaaaaggaataagctggggagaagaggttgcagcagacttctgtgagcaaccaggaagcaattcaagtcaagaaataattgctagcccaggcatggtggttcatgcctgtaatcccagcattttgggagccgaggcaggccgatcactggagcccaggagtttgaatagcctggccaacatgatgaaaccctgtctctaccaaaaaatacaaaaaattagccaggcatggtagcacgtgcctgtagtcccagcagctactcaagagactgagtggtgaggatcacttgaacccaagaggtggaggctgcagtgagccaagattgtgccaaggcacaccagcctgggcaatacagtgagatcccatataaaaaaaaaaaaaaagaaagaattgctaattgccaatgcataaccacagaacctgagggaaacatagaagaataaaagagatgtagtccctgccctcaggaaattcagagtaggacaaaagaaacagaaatacccattacaaaaccactttaatacaagttccagtgacaaaaaggacatctcaggagacagtgatcgaggagctcatggagttataaacaggaattaaagatgagatcattaaatggctgaaggatgggtgaaaaaggggaccaacgggtaggagaggaggagaggactccacaagggagatgacagggattggagggaaatgcaggggtgtaagtgctggcaaacacaagcttgatgtggagccaggcaggcagagggtgtagactccccaggatcaccaaggacggctttttattcatctctcaccactacatttgaaagacatttattcttattaccgaaatgatggaataggcatgtgctttggactcagaaaatcttgggtttgcaccctagctctactactatgtaccagctatgtgaccttagacaacttacctaccctctctgagcctaccttttcttcctcatctacagaactgggaaatgatagctatttctaaatactgtcacgaggattaaatgatgtgtgtaaaagtgcttaacagaatgcctagcacatagtagatactcaacagggttagtttcccttcccttttctgaaggcactggctacatctgcagactttgggggcagaatgcttggttaaactccactctgcctctcatgccggctgtgtgataagtgggcatgttgcattccaacagaggcattcccaagtgacaggtgagtgtggacatgttacagcttaagcctgagcacaccactgtttgcagcaggaataggaactattggcaaaatcacttggtaggattccattcacacttcttatgttaaggagaaatgtttgccagttaatctcacagtaacaatttgagaacgatgagaagaaatcttgaagcaaccactcagaacaattggggagggagagggggcattcaatagggttttatttacacttgtatggtcagatctgctgcaatctgcgcccgtggtgacacctcacagcactccctattggtttacacttttagaacttaatcacatacatttgggcttacagtgttatctcttctataacagatcatctgcttccttttcatttatcttatctcccaagccaatatccaattttcttgaaggcaaaagctgagtatatgctctttctatcccaggtcatacctagcacattcctgaacttgctgtagaaaggagaaaaagagaaaggaaggaaagaaaggagaagcttgtattcgtgtttgaaatctgaaataaatagatatttgataatgaaatggccacactgrgtaatactcacacggcccattacagtctaacatttggtgtcaagtgctgtgttgtggcacagtctgggccatcttcatgtcaatctcaaataatcaagactgtatcttggaaacatgctagaaaaaccctttaaggttctgcagccattacttgttctaaattattttaaagagatacaataaatctttttgctcatattttatatgttttttaaaatagtatatgaattcattttcttgcaaaagatttgaaaaatagggaaatataaaagtaaaccatagaagttgccttcacactttcatctcactcccacccccctgacaagccctgttaactatttattgtgtttccctgaagtaatctaactcactaggttcaagttagatccatgcatttgtttcctgtgggtgctgtaacaaatcatcataaattcaatggcttaaagcaacagaaaagtattccctcacagttctagagggcagaagtccaaaatcagtatcactgggccaaaatcaaggtgttagcagggccattctccctccagaggctccaaaggagaatccattcattgccccttcggccactggcagctgccaacaatccttggtttgtggccacatcactcccctctctgcctccatggtcacattgccttcccctctcctgcatgtgtcagatcttctgcttcctacttagaaggatcgcaatgtggtgacatgtagggcccactggataattcaggatcatttctccacctggagattcttcattacacctgcaatgacactttttcagtatgtcataacatttacaggttccagagatttgaatctggtatcttcaggggctattattcagcccactccagtaatttgttttgttttttgaaaaaacagtgaagccttccttcaaaaattaatgacaataataataacaaaactgctgtcgagatcatgttcatgttactacaactgggaaaagttaatattctgatgaatctctaacatccctcaccactttcctctact

SEQ ID NO: 44379 - DNA, 550 bp, Homo sapiens
atgtcccctaccctgggtgttgggcagagatgggggaaccatgacaggtgaggggaggacaggaggcctctaggaattggaccaagggtgtaaggacagatggcaagaggatagtttcagagctccttgccctcccgggtyaggctgggtacccagctagcctctcctctagctgcctccctggccctctgggtgcctttgctgggtttccaagtctccactattctctgacttggcctcctgctccccatcagcggaaggcgcagatcacgtgcacagtcatcttcatcgtgtggggcgtcctagtccacctggtgatcccacccttcgtattcatggtgactgaggggtggaactacatcgagggcctctactactccttcatcaccatctccaccatcggcttcggtgactttgtggccggtgagtccctgcctctgcctcccacctctttttctgcttctttggtttcagtgcaacagacctatgttgggggtgccctaggtagggttccatgttctgggcacttctcttacccagtgggattctc

SEQ ID NO: 44380 - DNA, 607 bp, Homo sapiens
gcatgattattttcagagaccatggatcgtttgaatcataaaattcctgttaatgctggaagagacataaaaaataatttagaccctctcttccgaaatagaaaaacaaggactaaaaattatgcaatttacaatagatttacagcccttaagccaggtagctgatgttcatctgaaatcctccygttgatactggtcaccagcttctgactttggacaaattcccctaagaaaggaatggcactaagcagctagttctaggttaggagggtgttagggtgttagggtatgtggggggaatgttgtctgttataggatgaccacatttcttaggataatactttgttggagcaatcttccaagtattaagaagtcccccaccacccctcaaaaaagcgcattttagaatgggaagaaatccacccctttgcttctctgactttctctcatcaccttctgctttcctccctaaaaccaaatcccacttgccaagggtatgttcaggttgttaattagaaggctagtatccaaaaatagctccctttccaggctgcccagtacctgaaattcccagggataaaagcaaagccatcatttcatgtctgct

SEQ ID NO: 44381 - DNA, 607 bp, Homo sapiens
gcatgattattttcagagaccatggatcgtttgaatcataaaattcctgttaatgctggaagagacataaaaaataatttagaccctctcttccgaaatagaaaaacaaggactaaaaattatgcaatttacaatagatttacagcccttaagccaggtagctgatgttcatctgaaatcctcctgttgatactggtcaccagcttctgactttggacaaattcccctaagaaaggaatggcactaagcagctagttctaggttaggagggtgttagggtgttagggtatgtggggggaatgttrtctgttataggatgaccacatttcttaggataatactttgttggagcaatcttccaagtattaagaagtcccccaccacccctcaaaaaagcgcattttagaatgggaagaaatccacccctttgcttctctgactttctctcatcaccttctgctttcctccctaaaaccaaatcccacttgccaagggtatgttcaggttgttaattagaaggctagtatccaaaaatagctccctttccaggctgcccagtacctgaaattcccagggataaaagcaaagccatcatttcatgtctgct

SEQ ID NO: 44382 - DNA, 612 bp, Homo sapiens
actccaggcatcacatcgggtctaccaaattggtatttatgcagtggggctcaggaatatggatcttaataaacacacagatcatgaatgtcatgcacactcaagttgagaactgatgctctgtaaattcatatttgtatcagtgcatcagctcttcaacatggccgtctttctccttgcacagggtcaattgttcaaagtagaaagaggctaaaacacctcygagagaaaagaaaagattaatgtatcataaaaaacctgcaaaatactagagagtttttaatgagatctttaatattgctctttataaaaaaagacataggtctttggtaatttgctatttttaatctgtaatatataaatataaaggagtatgtttccttctaaatttgaatttaaaaaggacattggccatccttcaaaaatacaatattgttttttctatggatgttgtaattttgtgggcagtaatttgttctctctaaatctcaagaacattgagccctcacctcatcctgttgttgggacacaatgcagaagcagttctgttggtgaaattgtgggttgggaggatgccatttcaacttctgcagcaaacaatgacatggccaa

SEQ ID NO: 44383 - DNA, 612 bp, Homo sapiens
actccaggcatcacatcgggtctaccaaattggtatttatgcagtggggctcaggaatatggatcttaataaacacacagatcatgaatgtcatgcacactcaagttgagaactgatgctctgtaaattcatatttgtatcagtgcatcagctcttcaacatggccgtctttctccttgcacagggtcaattgttcaaagtagaaagaggctaaaacacctctsagagaaaagaaaagattaatgtatcataaaaaacctgcaaaatactagagagtttttaatgagatctttaatattgctctttataaaaaaagacataggtctttggtaatttgctatttttaatctgtaatatataaatataaaggagtatgtttccttctaaatttgaatttaaaaaggacattggccatccttcaaaaatacaatattgttttttctatggatgttgtaattttgtgggcagtaatttgttctctctaaatctcaagaacattgagccctcacctcatcctgttgttgggacacaatgcagaagcagttctgttggtgaaattgtgggttgggaggatgccatttcaacttctgcagcaaacaatgacatggccaa

SEQ ID NO: 44384 - DNA, 612 bp, Homo sapiens
actccaggcatcacatcgggtctaccaaattggtatttatgcagtggggctcaggaatatggatcttaataaacacacagatcatgaatgtcatgcacactcaagttgagaactgatgctctgtaaattcatatttgtatcagtgcatcagctcttcaacatggccgtctttctccttgcacagggtcaattgttcaaagtagaaagaggctaaaacacctctgwgagaaaagaaaagattaatgtatcataaaaaacctgcaaaatactagagagtttttaatgagatctttaatattgctctttataaaaaaagacataggtctttggtaatttgctatttttaatctgtaatatataaatataaaggagtatgtttccttctaaatttgaatttaaaaaggacattggccatccttcaaaaatacaatattgttttttctatggatgttgtaattttgtgggcagtaatttgttctctctaaatctcaagaacattgagccctcacctcatcctgttgttgggacacaatgcagaagcagttctgttggtgaaattgtgggttgggaggatgccatttcaacttctgcagcaaacaatgacatggccaa

SEQ ID NO: 44385 - DNA, 583 bp, Homo sapiens
tcatggataatgggtaatgtgcagggatcacttagcgagagaggaagcaagagagaggcagggaaggaggggcagtgccaggctcttttgaacaaccaactctcatgggaacaatagagtgagaaactccctcaaactcccttcccagggagggcatttatgtgtccatgagggatccacccccaagacacaaacacctcccaccaggcctcacctccaacactggggatcaaatttcaacatgagatttggagaggacaagcatctaaactgtaatagagagttatgatcaaaagagcaaagattgcatcttccccatgcagccttcagaccaagggacccaggatcacccacagccagatacgccaaccatcatcaacaagtggctggggaagtcaaataagaacagttcgtgaaaatgctcacttctggttagtgtttatgacaagcatttgcaccagcagaagtaygagcctccccctcatcgccccctcaccgtgctgtgccatcacagcacttcctacagcgcctgttgtccacataggatgaaatgttggagtcttcctcagggaggtgattgaag

SEQ ID NO: 44386 - DNA, 563 bp, Homo sapiens
agtcaacagttacagatccaagatccagggggaggatgaaggaactctcaggaatcactgtccagtattgatgcctaacaaagaatataaatgcaggccattataggggtttacaaaagccacattagcaactatttgttcattcttaaaaaaaaaaaaatggacattttggcagggcgcggtggctcatgcctgtaatcccagcactttgggaggccgaggcgggcggatcacctgaggtcaggagtttgagaccagcctggccaacatggtaaaaccctgtctctactaaaaatacaaaaattagctgggtgtggtggtgggcacctggaatcccagctactctactcgggaggctaaggcaggagaattgcttgaacccgggaggcagagrttgcagtgagccaagatcacagcactgcactccagcctgggcaacagagcaagactccatctcaaaaaaaaaaaaaagaaaaaatatagacattttgctttaaaggaaaaaataaaaataaaaaagaattatagcaattaattaagcagagattcttttaatggttaaa

SEQ ID NO: 44387 - DNA, 563 bp, Homo sapiens
agtcaacagttacagatccaagatccagggggaggatgaaggaactctcaggaatcactgtccagtattgatgcctaacaaagaatataaatgcaggccattataggggtttacaaaagccacattagcaactatttgttcattcttaaaaaaaaaaaaatggacattttggcagggcgcggtggctcatgcctgtaatcccagcactttgggaggccgaggcgggcggatcacctgaggtcaggagtttgagaccagcctggccaacatggtaaaaccctgtctctactaaaaatacaaaaattagctgggtgtggtggtgggcacctggaatcccagctactctactcgggaggctaaggcaggagaattgcttgaacccgggaggcagaggttgcagtgagccaagatcacagcactgcactccagcctgggcaacagagcaagactccatctcaaaaaaaaraaaaagaaaaaatatagacattttgctttaaaggaaaaaataaaaataaaaaagaattatagcaattaattaagcagagattcttttaatggttaaa

SEQ ID NO: 44388 - DNA, 519 bp, Homo sapiens
aaaccaagttgcaccccagccacctcctgaggtctgtgtcatgggcgtggccactctatttggctcagaataaatctcttcaagtatttcacagaggttcagccttttcattgacaaagtattcatatcacttgttgaagaatcctttctagaatcttccacagctctttgagctgtagtttctgaagtccatctttattctccctcccatcactggctcctgttttgttctccagaactctgaaaatactaacaactatgattttgtgacmcaatttggaagttcttacagggaaacctcagcaagaaacagctcagtgctagacgcagtggctcatgtctataatcccagtactttgggaggctgaggtgggaggatcacttgaggccagaacttcaagactagcttgggctattttaaaattttttaaaagggggagcatctcagtgactgcagcaggcctcagcctccactcccaacagttagttgggctctaccaactgttggccgagtctcca

SEQ ID NO: 44389 - DNA, 595 bp, Homo sapiens
  misc_feature (1)...(595): n = A,T,C or G
aaaatgtttatgatttcccagtttatggttaaacacctgtattagtccatttttacactgctataaagaacttcccaagactgggtaatttataaaggaaagaggtttaattgactcacagatctgcgtggctggggaggcctcaggaaagctacaatcatggtggaaggggaagcaggcacaccttacatggtggcaggtgtgtgtgagagagatcgtgtcagaacacaggaaaagctaccatttataaaaccatcagatcttgtgagaactcatacactatcgcragaacagcatgggggaaaatgcccccattataaaatcacctcccacaaggtccctcccttgacacgtgggaattataggaattacaattcaggatgagaaatgggtgggaacccagagccaaacacaactggaacgtataaacacaactggaatatgaaggtgtagatttttgagaggggtagtagaaacanaaagcagtagaaagaaaacatttttcagccttgtgtctcaagtatgtttgacatggccttatttttaatgctgaagcctaaaaacaaatgaactatgcaataaaaaagaattggag

SEQ ID NO: 44390 - DNA, 602 bp, Homo sapiens
gtcataagaaaaagagaaaacattacacagacaccagacggaagtccctcctacccctatttacccaagtagggatggagggatgcactggccactgagtcacgcccactgtaacttggtcctctctgaacccaggtcccagttgtgctattttgtgactctctcccagcctgacctactcccagaacaggacacagattttataaaccaaaggctgcttgatttctagagggcgaagtgagatttgcagccttgcataaaagttttctgggctctcggtttgtgtgcagtcagtgcctcagagctgaaaccctctgacaatacttgtcaaagccaagagatgaacagccaacaactattgatatttttccagctagttccagaaaacccactattttcatagaatagcttctcactcagaaaaccaaccagaagctcaaagctttgcaaagttttcatattcaacctatggacactcgtgacgtttcacgtgagacccctgtgaccacacgccactcttcacacagaggcaggcacaaagccaagcgaggaccagccctctgaggatcctgcgaygctgacacatatgtgcgtgttcacgc

SEQ ID NO: 44391 - DNA, 595 bp, Homo sapiens
aattctatttccatccatttgtctccatcttcacagtcagtaccctaatctaaggctctcacccatttactgcaatgacatctgaactagttttatctccctatgatatattttccatgctacatccaagcagatttccctataatgtaaatatgaataygttatattcttgcttaaacctttcaaagactactaacattattggtttaagttatctcctgaaatggcttctggatagggtcctcatatggtccagtttgtcttagacagacctattttatgtgtgctgctgtgacataacattataaatatttcccccttttttataagtgtttcagtctttatgataaaatatgtggtcactctcattataaataacttcaagattggactgctgtttgtcttatggccatttctcacattgcatattttattcaaactctactcaacttgcttcagtgataaaatgtggagactctgattttgtggagactctgactttctttgcctaatcattgtagcaaactaatctcttcaaaatatcctctgattctatcatcatcatcaccatctcaatacaatttgttcacttgtt

SEQ ID NO: 44392 - DNA, 595 bp, Homo sapiens
aattctatttccatccatttgtctccatcttcacagtcagtaccctaatctaaggctctcacccatttactgcaatgacatctgaactagttttatctccctatgatatattttccatgctacatccaagcagatttccctataatgtaaatatgaatacgttatattcttgcttaaacctttcaaagactactaacattattggtttaagttatctcctgaaatggcttctggatagggtcctcatatggtccagtttgtcttagacagacctattttatgtgtgctgctgtgacataacattataaatatttcccccttttttataagtgtttcagtctttatgataaaatatgtggtcactctcattataaataacttcaagattggactgctgtttgtcttatggccatttctcacattgcatattttattcaaactctactcaacttgcttcagtgataaaatgtggagactctgattttgtggagactctgactttctttgyctaatcattgtagcaaactaatctcttcaaaatatcctctgattctatcatcatcatcaccatctcaatacaatttgttcacttgtt

SEQ ID NO: 44393 - DNA, 535 bp, Homo sapiens
gaaagaaagaaagagaaagaaagggagagacagagagaaataaagaaagraaaaaaaaaggaaacctaacaggttacattttcttctttcctgccttgaaaagagtgaatacaaacgtttctctcccctgtcctccttgagggcagctagattaattgtgacagcttttcttaagaataatacacactgaaaagtgcatagctgtaagcacacagcttcttacattttcacaaaccaaatatgcccctgtaaccacccagacgagttaaacctgccatccctgaccccagaagtccctcctgtgtccctttccgttcactgcttgccgggagccatgactctgacttcccatagtttagattagtttttcctgtgttcctcttttttttttttttttttttgaaatggagcctcactctgtggcccaggctgcagtgcagtggtgaaatctccattcaccgaaacctctgcctcctgggttcaagtgtttctcctgcctcagcctcccaagtagctgggattacaggtgcgtgcc

SEQ ID NO: 44394 - DNA, 535 bp, Homo sapiens
gaaagaaagaaagagaaagaaagggagagacagagagaaataaagaaaggaaaaaaaaaggaaacctaacaggttacattttcttctttcctgccttgaaaagagtgaatacaaacgtttctctcccctgtcctccttgagggcagctagattaattgtgacagcttttcttaagaataatacacactgaaaagtgcatagctgtaagcacacagcttcttacattttcacaaaccaaatatgcccctgtaaccacccagacgagttaaacctgccatccctgaccccagaagtccctcctgtgtccctttcygttcactgcttgccgggagccatgactctgacttcccatagtttagattagtttttcctgtgttcctcttttttttttttttttttttgaaatggagcctcactctgtggcccaggctgcagtgcagtggtgaaatctccattcaccgaaacctctgcctcctgggttcaagtgtttctcctgcctcagcctcccaagtagctgggattacaggtgcgtgcc

SEQ ID NO: 44395 - DNA, 1623 bp, Homo sapiens
ttcaaattccaaaaagcacacgtaagaagggctgctgtttcattcacacagtgaaatattgtgcatctgaaagaatatgtagatgggtggcatcttcaacaaccccaggatcacagacgtttaaatttcaccccttctactgctgtaaggcacagcagaaggagtgtaatttaaacgtctgtgatcctggctgggcgtggtgactcttgcctgtaatcccaacacttagggagcccaaggtgggaggattgcttgagctcaggagttcaagaccagcctgggcaacctagtgagagctcatctctacaaagattttttttaaaaaaattagccaggtgtggtggtgcactcctgtagtcccagctactcagcaggctgaggcacgatgatcccttgaccctgggagatcaaggctgcagtgagctgtgatggtgccattgtactccagcctggggaacagaacaagaacccatctaaaaaaaaaaaaagaaagaaaagttcatattccaaccaagatctcaccattrcatcatcaagcataaacacctgcccccactgaaaaagtacagaggaaggcagtcatataatatcttccctcctgacctcaccaagttccagggcaggaagagtctcgccaccccagcacacagtaggcccactggaaaatgagtgctcccttctctaggcatttcattgtcatggtcataaagtcaggttcatttttctaatgaaagagaaagccaaaaatggaggctgatttttttcttttttctttttttttttttttagtctcactctgtcgccaggctagagtgcaatggtgcgatctcggctcactgcaacctccgactccctggatcaagtgattctcctgtcagcctatcgagtggctgggactacaggcgcccaccaccacacctagctaatttttgtagttttagtagagacagggtttcaccatattggccaggatggtctcgatctcttgacctcatgatctgcccatctcaacctcccaaagtgctgggattacaggcatgagccaccacaccgggcctggagggtgattttgaccaggccttctcaagttttggaaggaagtggagctgacttctcttctgttgcttttgcccacccaggatcacttattcctctgggtaatacagcaccccaggcacaggggccgcctgtcacatgagcgtgggcatggctcatgtgcggccaggccccagtgattctgcaaaggttgcccataagtccttcccccgccccaggactggcatattgatgtggtgggatggaagctgtccttctgctgggtctgcagatgggggcaatgtaaagcctgacattgccggatgatgtcagaagcggaacccataggcaaaagccagctttccagcactccactctcagtttcctgccatctccacttctgtggatgtgtgcccggcatctgcctctgcccctgcctctgagagcagtgactgagcaaacagtcctggacctggttgaaaggatgggcctgtctgtttctagcagagtggtctttcagaaagctgattcctgaaagttggcatcaagggaagcagagccaggaggtggaaattgagactgggtccc

SEQ ID NO: 44396 - DNA, 1623 bp, Homo sapiens
ttcaaattccaaaaagcacacgtaagaagggctgctgtttcattcacacagtgaaatattgtgcatctgaaagaatatgtagatgggtggcatcttcaacaaccccaggatcacagacgtttaaatttcaccccttctactgctgtaaggcacagcagaaggagtgtaatttaaacgtctgtgatcctggctgggcgtggtgactcttgcctgtaatcccaacacttagggagcccaaggtgggaggattgcttgagctcaggagttcaagaccagcctgggcaacctagtgagagctcatctctacaaagattttttttaaaaaaattagccaggtgtggtggtgcactcctgtagtcccagctactcagcaggctgaggcacgatgatcccttgaccctgggagatcaaggctgcagtgagctgtgatggtgccattgtactccagcctggggaacagaacaagaacccatctaaaaaaaaaaaaagaaagaaaagttcatattccaaccaagatctcaccattacatcatcaagcataaacacctgcccccactgaaaaagtacagaggaaggcagtcatatmatatcttccctcctgacctcaccaagttccagggcaggaagagtctcgccaccccagcacacagtaggcccactggaaaatgagtgctcccttctctaggcatttcattgtcatggtcataaagtcaggttcatttttctaatgaaagagaaagccaaaaatggaggctgatttttttcttttttctttttttttttttttagtctcactctgtcgccaggctagagtgcaatggtgcgatctcggctcactgcaacctccgactccctggatcaagtgattctcctgtcagcctatcgagtggctgggactacaggcgcccaccaccacacctagctaatttttgtagttttagtagagacagggtttcaccatattggccaggatggtctcgatctcttgacctcatgatctgcccatctcaacctcccaaagtgctgggattacaggcatgagccaccacaccgggcctggagggtgattttgaccaggccttctcaagttttggaaggaagtggagctgacttctcttctgttgcttttgcccacccaggatcacttattcctctgggtaatacagcaccccaggcacaggggccgcctgtcacatgagcgtgggcatggctcatgtgcggccaggccccagtgattctgcaaaggttgcccataagtccttcccccgccccaggactggcatattgatgtggtgggatggaagctgtccttctgctgggtctgcagatgggggcaatgtaaagcctgacattgccggatgatgtcagaagcggaacccataggcaaaagccagctttccagcactccactctcagtttcctgccatctccacttctgtggatgtgtgcccggcatctgcctctgcccctgcctctgagagcagtgactgagcaaacagtcctggacctggttgaaaggatgggcctgtctgtttctagcagagtggtctttcagaaagctgattcctgaaagttggcatcaagggaagcagagccaggaggtggaaattgagactgggtccc

SEQ ID NO: 44397 - DNA, 554 bp, Homo sapiens
aaaaacccacataagattctgcttgtgaagatgacactattctaagaggacccttaattaggatgaaagttccccccgccacagatgaaaggcagacagccagaggagacgggaggacttctgattagggaggcacccacacccaggtgcagcggcagcactgaatgccttacctcaatcaccctatggtgggggagcgcccgctcaatgtggtcgttgccttctgccttgagctgaacgtggtacacacatcccggctgcaaaaaaactcaggagtcagytctctagaaagggggcttgtcgtatcgtgcctggtccaagcctggtttggctgcacgagatcattaagacaggagcatttctctcccctcatttcctaatctgtggcctgttaaccttaagagtccagagttcctttaagaacacccctagtgttgaaacatctgaaattttgcgactccttccatcccaactcagtttcattttctcctaccccaaaataaatcaaatttggtttcttatttcaaaattccaagcatactatgtgctcttac

SEQ ID NO: 44398 - DNA, 549 bp, Homo sapiens
ggcatagggaccgtggagatttgcatttcacagatgaggaaacaggtttggagaggtgacacgacctgtcccaggcatcacagccaggacaggacctgtcccaggcatcacagccgggatgtgcatagcaggggtttggaactatgaggtgcccaggacccagggttggattgaaaagggcgcaggggactaagataagcagacagttgtccccagcgctggggagagtcttgggaccagtctgatgccttgtatttcccaggctccaggctcctcgccgggacagtgtctctttgggtgcgtgctggatccctgggggacgtggcacatccccaggctttctaaacattggrtgggttctggcatttggttttgtaacgtttctgggtcactcccgcctgtggccacccttccttaggggagccgtgtgtccttggggctttgctgggtggtctcgagggtgggagaagaatgggttctcctggaccaatggagcccgtgcccctcggggccacattgctcctgcgctccctgactgcggacgcgtgt

SEQ ID NO: 44399 - DNA, 566 bp, Homo sapiens
ggaattctagctaggaaatactttagatttggattagtataaatatggatagtagagttgataaactttcaaaaatgtttggtaattagaatcaattagatggcagaattttattctcaagaatctctgagcagtgtatccgaaacctctaaggattttcggaacagtgttctatagttatactccactgggacagttcacgaaataaaaaagccctgatacaccttwattatagaagaaacctagctcttcaataacccttgcatttcagagtggattaattgatgctgatgtcttggaaaagcaggcactgaaaaactgtgctcaagcaatagaggaacatggaaccatgaataggggcagtaagcccaaggtcttaaaaatgatctccagggaaacctcaggaaatctgaatcatcaacttccactagtccatacggaagagactgagacacagaaaaagtaaatgaatatgccacatttccaaagcacacacctatgtattctactctaaacctcaatcttctcattatcttcttgtacctctcttaggaattccagatgac

SEQ ID NO: 44400 - DNA, 408 bp, Homo sapiens
gatctgcctgcctcggcctcccaaagtgctgggattacaggcrtgagccaccgtgcccagtcgaaagtgaacctttcactgggtgtggtggctcacgcctgtaatcccagctctttgggaggcccaggcaggaggatcgcttgagtccagaagttcgaggctgcaatgagctatgatggcaccactggactccagcctgagcaagaccttatctcttaagaaaaaaaaaaaaaaaaagaaaggtcccaaagtgtaggatctgaagcagcatgccccctcttccaggaaggctcaaacatccccttcctaacagattctccaaggctgccctaaaaggaaataaaggctgcgcccaaatgagatctttggccccaaggagatagatttcttgctctcatgtttgtttcc

SEQ ID NO: 44401 - DNA, 567 bp, Homo sapiens
tccgaaaataccccaccaaagcggtacttatagtccaagtttcctaccttggctggtgcacgaggttgcctgtttgccgcagtgcctgcttttctccctgcgtcacctccaccgtctcctgaataacagtctcgggtttatctatggcttctgtggggagccaggacacccagacagagtggggcacaaaaatcgggtgggacatgtctcttctctcagccggagtcccactccacgtaggcacagagatcccgaacgggccctcaggttgtgagaaacacactcacccgttcaaacccaaagaatggacttagaggcacgaagaacagtgaaaatgagactttttataacggtcttgtaacatcgggtgtctgggaygacgcacctgggtcagtcacaacaggtaatttatctccggtacgcaagtccctcccctagttcctcattggttgagtactatggggttacaaccttcccggatgacactaagtttcattatcctccttataaggttataacccatcgccttccccgcttaagtttcaatttcccaataatgaaactttc

SEQ ID NO: 44402 - DNA, 512 bp, Homo sapiens
tgggcgcctgtaatcccagttactcaaaaggctaaggcagagaatcgtttgaacccaggagtcagagggtgcagtgagccgagattgctccattgcactgcagcctgggtgacgagcaaaactccatctcaaaaaaaaaaaagaaaaagaaaacatactttataagtgatgccttcttaccatatgaagctaaatagctgcaaggtgaatgaaaattttaacaatagtgagaaatacagacaagtgttgcaaaatggactaggtcataccacatactatagttatatttgttttgcattcacataggtyaaatgcaaaacaaaaaaacactttttatgttcgtatatgtttaagtaacatgaccataaactaatttaaaagttgacaatggggatgggagttatgattttttttttcttttggaaagggttcatcttttacttaagttggaaaaaatatgttcatgagtaatttaggttatatataagatttcacttcccgacctaaggtca

SEQ ID NO: 44403 - DNA, 586 bp, Homo sapiens
caagttttccagatggttccaaatgtctactgttcatacctcctgtggtgttcttccacattgtatcaggattggtgtgtatgaccaatgtaacagggacatgaaaacatatctcactgaagctaggtcataaaagacattatgctttctgtgttggctcctttagatcactggctttggggagaagttgcttccataaagaaactcagccctgttgagaggcctacgtgatttggaagcgcagstcccttggaaacagctagcatgcacttgtcgggcttgtaagccatttggaagtggtcccttcaccagtaacaattctggatgattacagttctgctgacatctggactgtaacctcttgagatatcctgaagaactatagagctatgttgtttctgaattcctgacctacaaaaattttgagataacaagtgtttttgtttgaagccacaaaattttggggggtaatttgttacacagtagcaggtgattcatacatcttgttagagtttgctcatgttatctgaggcatgaaagatcaatgaatgcttttcccacagttattgaattcacatttgcctat

SEQ ID NO: 44404 - DNA, 553 bp, Homo sapiens
ttaaggggactagtgattggcatgccagggactgggcaccaggaccctgcagcgtccctcccattatattacactgaagaaaaattaagttgattatcttttaagacttttcatattttaaagtgggatatctgaagatgggtgctcattaaagtccagcagttaagtatctaatggaggaactccaggtggctgacatcccattggaaaagcctccaaatgctgctcaaattgtgctctagagacagcatggcacctactcctcaaattaattatgacccatcccagctcatatttttggcatactttaagtcctcttaccatgtagccaaaacagtctaagatttacttattttggctttgttttgacaccgcaaatcaaggagaatggtgttggacagggattacaaatgcaaatgcttccttgagccaggcagggaaatgaatgaagtgagccaagttggggagaatggggaagacaaamggaactagagagactgtgccctgttaaaggtggccacagggactcaataggcagcagattattaccatg

SEQ ID NO: 44405 - DNA, 564 bp, Homo sapiens
tgagcaaataaaaaatattctcagtcttggggatatgaaaacattatgatagcatatctgtttmatttttttatgaaaggttagtcactagtcaccagtcactgagattgacgagaatacaaagagagccaacaaatagtattcctgccctcatgcagcttacctaataaacaatatcttacatagtctaattactagctgcggcaagggctgtgctagaaaagaacaagaagctgtgaaaatatatattagaatggaatctagttgaggagagggatagggttagggaaagcttccctgaggaactggcatctatacagcaattggcacatgggaaataataaatatattgaatgaatgaataaattcattaatttaaatgaagttgggggtctcttgggaatatgttttttctaagcatggaaaaaaagaatgaagtacccttcaagaagtcccatgtggctggaactcacagagtaaattcctcacatttcccagaacataattgcttgttgaatgaaatcaaatagctttttctctctgaaatgtccacagaatgaagta

SEQ ID NO: 44406 - DNA, 558 bp, Homo sapiens
tgagtttgtcttatcttcagctttcaccatgcctgcaccatacatttttccatacccaaaaggtgagtattttctaaatttgtcttgctctctgtcaaaatcttaatttctgtgttatcccagaaagctctccaagaccactcctgacctgttcaattcctccttggttttttgagactaaatctaatagkttggtgtaaattaaaaggaatggcaaaaactgcaatacttttgcaccaatctaatgagcttgtaagaagtcttccctcaacctcaccaatttccatttctcaactttgttctcaatatttactcctaagtctgagccctagagccctaagtagagggtcttttcatcataacacttgtactctcttatcaatgtaacgtcacttgactgtgatcctgcaagactgtgtacagctttgggggcaggaattatgatattcatttcagagtttccagtgcctacaccagacccaagaagaatatgttttcacaaatctattgaatggtagaacaaatgactgattgatgaaaacacaaattacttgatgg

SEQ ID NO: 44407 - DNA, 622 bp, Homo sapiens
caataaatccatcaaagcattaagcattgtctcagtatggtggatctatggagtgctttgtagacagccctccttgcctatcaattctttctagtttcaaaacagtgaatatgtactatttttgcaatataaaatttcaataaatgttaactcaagccagrtacattccttcagtctgtcctatatttgtatggtgctccagagtgctcaaatatcatttcattaaaaaaatttacttattttttttcaaatatagaaacaggcagggctttgctctgttgaccaggctggtcttgaactcctagatcctcctggatcctcccacttccacctcccaaagtgccggtattacaagtgggagccatccggcccggccggcttcatttgagaaatatttccccagaactccatatattatgaataattcctttcttcttgtttagataccatcttagtcatatctctgttacctcacttgtcacatgataatcagttgctcacccatccatctcccttgattgctcgagaagagtctgattttcagcaccttgaacagtgtgcaatacatacatgcttcatacgcagagaaggaaatgatatcactacagtgtaattattccca

SEQ ID NO: 44408 - DNA, 606 bp, Homo sapiens
ggctcagctagctccacggacagccaagcctcgggagccagggtggagaaagcttcataatggccataggcattgtcctcatactcctccacctcctccagtctgcagccagccaccatgttgtgcgtcagcaaggcttcccacagcccccgcctctagccattgacactgaggtcttccatgcagccagcccagcagggaggcattggcagcccctggtgtcaggcctgagcrgtgttcctggaggtgacgagaggcctctgcaccagctccccaagaaggagactgtcacgtggctccaggtagctgaggactcctcggttcaaagtacatgtggggtactggtccatggagatttctagctggtgaatgttgatgtggatgctgaccttgtggggctgtgcgtcagtcacaggcacactgttgaggagcaatacagtaccctggcccttctcaaccatggaccacaggtggccctcaaatatgtccacatggatgaagtccccatgccagcctgctgcctggaaggccaagggtgcctgccagctctgtgtggtgagtgtaaactccagggttccttcatcctgagtgccccaggcaggcaag

SEQ ID NO: 44409 - DNA, 210 bp, Homo sapiens
attaactcccaaatacacaccaagtttgggtcactaagtaaatccactaggctcagcataatgagtgacatttcagtaattgatgccctagaatatgttmattgtgaacccatgattcttttcgatgctaaaataaaggcttgggtagttttggctttggagttgagctagcgcagaagaatagtcaccatcgattaggcccctacagtg

SEQ ID NO: 44410 - DNA, 620 bp, Homo sapiens
catttagcggattttttaaattttcagatattgtatttttcatgtctggaagtttccttttgttttttatatcttcctttttattgatttttttcaagttttttaaaccattgagcatatattaaaaagctgttttaatgtccatgactactgattttattatctttttcatttctgtttctgtttcaattgactgacatttctgtgttttggcatatctagcaatttttgattcaatacttgatattataaatattacattgttcagtatttgaatttttccttttattaaaaagtgaggttgttttgttgggaactaaatttagctgtggatcaacatattaatttcaagacttgtatcaagttttgttatagtaggtctagaatcatctaaaataacactttaatctagtgttagtttagctctacctaagtcctgagaactttaytgggtctttaccaaatatttagttttcaataatgattgtctctctgtctggtcagaacttaattgttttccaacattgtaacagatatgataattcttaagtttacaaatctcccatatttgtaccttgctcggttttgttaagtttaaacttatgaaagcatagtttagt

SEQ ID NO: 44411 - DNA, 494 bp, Homo sapiens
aggtaaaaaaatagataatcattgtcattaagaggcttaaagtctagcaagggagacgcattgaaaatttaacagtgtagccaggtgtggtggctcacgcctgtaatctcagcactttgggaggccaaggtgggcggatcacttgaggtcaggagttcgagaccagactggccaagatggtgaaaccctatctctactaaaaaatacaaaaattagctgggggtggtggtgcatgcctgtaatcccagctacttgggaggctgagacaggagaattgcttgtacctgggaggcagaggttgtagtgaaccaagatkgcaccattgcactccagcctgggcaacaagagcaaaagtgtgtctcaaaaaaaagaaaaaaaaaaaaagaaagaaaaagaaaatttaattgtgtggtaaatcccatgtggttgatcccatcactcaagtactgagcatagtacctgataggtagtttttcaacccttgtccccaaacc

SEQ ID NO: 44412 - DNA, 531 bp, Homo sapiens
ggaagatgttttatttcattttcagcttcccagtcgactaagtttccctccatacaaaggttgtattgaattagatgacctcaatgaaaatgttctgagcttgtacaacttcaaaaaaacattcaatctcaacacaactgaagtggagccttgtagaaggtaaataaaatgtagaaaccagaaactctgtaactggagttttggtaacttgcagtacttttacatatgataaaggatgggccagtgagatgctatygatgttgctagttgctttgggccagtagttcttcaagtatgtgtgcatgcaacactggcagtcctgccctaaaatctaattatggtagtctcttcttaatttgtatgaaatgctagatagttttctcacttgaaaaaagtctttatgaaaatttttgtgcctcctaccacaaaatatttaatattagatggtacctgatctagaggcctgatttagtggctcatgcctgtaatcccagcactttgggaggttgaggtgggcagatcacctggggc

SEQ ID NO: 44413 - DNA, 553 bp, Homo sapiens
acaaagtctctcatatagtagggtggtttcttcattctttattttcaacaaacagatactttttgagggcaagacagaatagtctaaaattaccacagcccataatcattttaaatagttatagaatctacctgagcaaattggaaagacaagaactggaacaatcataatcctactgtaggtacctactgacagttktatttcttcaccttcctttttcacgtaactcctccacaatttatctgaatagatctttagaaaacattaaaattccacaagtcatgaactcttttatttgagagataaaggatttcaaaactgtatttaaaatttagcttcatgaatcggttttgatgaaagaatgtaaaaatgcaaatttcagtaaacattgcaaattgttgcttatgtattgccacacatacgctggaagatttaactaacatgatcaatttaaatgtaaacacatttaaattcactgctgattccttgttgattatctcgctgcttgtagctttatttcatttttcaataaagaatgaagagaaatgtctca

SEQ ID NO: 44414 - DNA, 475 bp, Homo sapiens
gttccagagaggttttgttcttcctgtagggctgaagcagtgcctactcaataaaaccagtcatcrtgcaaagaaatgccacctgacccaaaggcaaagccagagtgcagcttggagcaaagaaggtattttattaagaattttacataaaccataagatatattttatattactttgcgagccttcttcctgtcttgacttaattctttttgagagaattcatttcattttcatttggttggttttcttcttgttacaaagatgatctatagaaaatatagaagtataagaaaattaaagatactaactgataattgcttaatgatttagtatctgcttgtttagtctttgttatatttacagtaggcaaacatgtctaccgttgtgaatttattactggtatgtataccctagtaagttaaaagttgtacgtactttgaagttttgcaaaattgagttcatattatagaatta

SEQ ID NO: 44415 - DNA, 475 bp, Homo sapiens
gttccagagaggttttgttcttcctgtagggctgaagcagtgcctactcaataaaaccagtcatcgtgcaaagaaatgccacctgacycaaaggcaaagccagagtgcagcttggagcaaagaaggtattttattaagaattttacataaaccataagatatattttatattactttgcgagccttcttcctgtcttgacttaattctttttgagagaattcatttcattttcatttggttggttttcttcttgttacaaagatgatctatagaaaatatagaagtataagaaaattaaagatactaactgataattgcttaatgatttagtatctgcttgtttagtctttgttatatttacagtaggcaaacatgtctaccgttgtgaatttattactggtatgtataccctagtaagttaaaagttgtacgtactttgaagttttgcaaaattgagttcatattatagaatta

SEQ ID NO: 44416 - DNA, 552 bp, Homo sapiens
ggtgccatctcagctcactgcaactccacctcctgggctcaagtgattctcctgcctcagactccctagtagctggaattacaggckcacatcaccatgcccagctaatttttgtatttttagtagggacagggtttcaccatgttgactaggatggtctcaaactcctgacctcaggtgatccatctgcctctgcctcccaaaatgctggaataacaggcgtgagccactgtgcccgaccagcatagttttttgcacagagaaagcgccagtgaatgtttgttattttgtttcattaaaatgatgaggtaccatgatagccatgctagaaaggacaaatgtcatgttctgctttctctgcgttaggggaaatgataagcagagagactgagagagaagtgagtatgcttcatatatggatccatcaaatggatccatgtacatcccaaatgattcatgctggagtgcaacagaggtaaaagaccagcctctggagagcaaagaatcaggcaaataaattgttgattttaggtagatatgtctggaaattgt

SEQ ID NO: 44417 - DNA, 588 bp, Homo sapiens
ataaaggcatctgacaaccaaaggctgcccgttgacagtacaacatccagctttctagttaccaacactttgatttcaggaaaaggaacagggggacagccataatgcagatgtagttttcatacttaaaaatgtaattgtctttgggaaacaaaaatgcagccagctcagtttattatagtttaataagtcttctaaaatagaaaattaagcaggaggctcctttccatgataaaagtctgctgcctagttaagtggtaaaagtggaaacaagagaacatccaataaacttggatatatagagagaaggatgagcacaggggacaactattgatcaagctcatggactctgtaaattgggaygggttctttaaatgatctaggtctcacactgtaagtggtttgaaatacaatgaatcatgatgatctcttccagcattaagatttttgtttctgagactatcccacctgttgctgggatgtcaggtaaagtctgaaggccttccttgaactgtgcctcagtcccacagcagggacagaattttgggctggagaagcaaagttccaaccatatgaaatattaaggat

SEQ ID NO: 44418 - DNA, 606 bp, Homo sapiens
ttatgagtcattgcattgaaggccaccagccagacaccactgtgagccataaactgtcatataaaagcttttccaaccaccaccacaacaacaaaatattctcagaacatagatatacacagaatacggtccctgtgtcaacagtcacttgtgtgggctcagtgctgacaacggtgctgtggctactccaggtatgctgcaatccctctttgaagattgccatcagggctggaaacacatatttttggtattctgagtccacaagtgtaatatttttacatcgtgtttgattttcggaaatggttaaaagtcattcgccacatacttcagtttataaaagaaatgtccaactggctggaaagagtggtggaagggsagaggggtgggaatggttaatgggtaccaaaaatttagaaagactgaataagacctagtatttgatagcacaacagggtgactatagtcaatcataattgaatcgtacattaaaaaataactaaaagagtataattggattgtttataatacaaagtataaatgcttgaggggatagataccccattctccatgttgtgattatcacacattgcacacctgtatcaaaac

SEQ ID NO: 44419 - DNA, 559 bp, Homo sapiens
taaatacgactgtgcataaggaaagggagatgagtttcactatgcaatttcatcccaggaacacrcatgcagggtcttaacttaggctactacaggctgtcaacaaatctggttactaaagacctggccttgaagggagaggaagagcctagtatttttttaaaatcaattattgcattatcttctctttcttttaaaagtttttaagtatccatggtcagaattttggtaaaattgttgcaagttagaatttaaattactccttttacaaaaattacatttaggacttttgatctctgcccatacctaatatcatgcagtgaatctcttctacaaaatagtgttatagcttttaatgtcatccatcaccctatatgataatacaacagagcaatctgagaaactggaaaagctgcctgtggatgtctgcatccaatttcaatgatttttttttctcaccaggattcgaagcagccccttactgatttcaaatgcacattttatgtttagtgcttggaggagccgggtagtgttggaatctgacataaaaattattatt

SEQ ID NO: 44420 - DNA, 619 bp, Homo sapiens
ctagcctacctgtcaggatactacacactctcaaataaccactaatgggttaatcttcttaagagatagctcccatgacaacaaacgccttccatcaatttccaacaacatagcactagtttaccctcctaagctcaccttcaactccagggaatagtctacactttagccaaattgaattattccctatgtagtaaagaatcttggccaggtgcggtggctcgtgcctgtaatcccaacacagtaagaccccgtctctacaaaaattacaaaaataattagcctgggttggtggtgcacgcctgtaatccagctacatgaaaggctgaggcaggagaatcgcttgaacccaggaggcggaggtcgcagtgagtygagatcgtgccattgcactccagcccgggcaaaaagtttttttgaaactccgtctcaaaaaaaaaaaaaaaaaaaaaaagaatcttatgcaaggagaggcctggcagctcctgagagataatctctaaatccttggaatgtcccacctgataggagtgttttgttttgttttttaacctgggagctttgggccacaccaaataatctgtgctaacaatgtgatttatggaggggtcttcaggcc

SEQ ID NO: 44421 - DNA, 619 bp, Homo sapiens
ctagcctacctgtcaggatactacacactctcaaataaccactaatgggttaatcttcttaagagatagctcccatgacaacaaacgccttccatcaatttccaacaacatagcactagtttaccctcctaagctcaccttcaactccagggaatagtctacactttagccaaattgaattattccctatgtagtaaagaatcttggccaggtgcggtggctcgtgcctgtaatcccaacacagtaagaccccgtctctacaaaaattacaaaaataattagcctgggttggtggtgcacgcctgtaatccagctacatgaaaggctgaggcaggagaatcgcttgaacccaggaggcggaggtcgcagtgagtcgagatcgtgccattgcactccagcccgggcaaaaagwttttttgaaactccgtctcaaaaaaaaaaaaaaaaaaaaaaagaatcttatgcaaggagaggcctggcagctcctgagagataatctctaaatccttggaatgtcccacctgataggagtgttttgttttgttttttaacctgggagctttgggccacaccaaataatctgtgctaacaatgtgatttatggaggggtcttcaggcc

SEQ ID NO: 44422 - DNA, 619 bp, Homo sapiens
ctagcctacctgtcaggatactacacactctcaaataaccactaatgggttaatcttcttaagagatagctcccatgacaacaaacgccttccatcaatttccaacaacatagcactagtttaccctcctaagctcaccttcaactccagggaatagtctacactttagccaaattgaattattccctatgtagtaaagaatcttggccaggtgcggtggctcgtgcctgtaatcccaacacagtaagaccccgtctctacaaaaattacaaaaataattagcctgggttggtggtgcacgcctgtaatccagctacatgaaaggctgaggcaggagaatcgcttgaacccaggaggcggaggtcgcagtgagtcgagatcgtgccattgcactccagcccgggcaaaaagtwtttttgaaactccgtctcaaaaaaaaaaaaaaaaaaaaaaagaatcttatgcaaggagaggcctggcagctcctgagagataatctctaaatccttggaatgtcccacctgataggagtgttttgttttgttttttaacctgggagctttgggccacaccaaataatctgtgctaacaatgtgatttatggaggggtcttcaggcc

SEQ ID NO: 44423 - DNA, 585 bp, Homo sapiens
tgctactgcccacatcttccttctgccccagaaactccctatgctgcagccttggcactcctgagcccatgtcctcctcatgattgtgagatcacatggatgaagatgtcatgccactcccatcakccccttccagcctcacaggatggtgggaaagccttgagttccagtccccactttataatccatcatgagactaatcaagttggttcagctctttggactcaggtcccttctgttcaaagagaagataaggctgaactcccaagtcatttccagctcactatgctattagatttacagcatctcaaggctgaaaggaattgcagacatcacatagtgcagtgctttgcatctggtgcacttgggcaaactgatcccctcagctctcaagggcatgtgggccaggctttgtaataaccacgttttctggtttctacatttgatgctttgacatggggccccactgaccctggagggactgcttctcccagagccagccagtttctgacagctgcctttcatatatgcaaaccaacccatccagagcccacactcgcaactgcctcctgtcacactcacact

SEQ ID NO: 44424 - DNA, 585 bp, Homo sapiens
tgctactgcccacatcttccttctgccccagaaactccctatgctgcagccttggcactcctgagcccatgtcctcctcatgattgtgagatcacatggatgaagatgtcatgccactcccatcagccccttccagcctcacaggatggtgggaaagccttgagttccagtccccactttataatccatcatgagactaatcaagttggttcagctctttggactcakgtcccttctgttcaaagagaagataaggctgaactcccaagtcatttccagctcactatgctattagatttacagcatctcaaggctgaaaggaattgcagacatcacatagtgcagtgctttgcatctggtgcacttgggcaaactgatcccctcagctctcaagggcatgtgggccaggctttgtaataaccacgttttctggtttctacatttgatgctttgacatggggccccactgaccctggagggactgcttctcccagagccagccagtttctgacagctgcctttcatatatgcaaaccaacccatccagagcccacactcgcaactgcctcctgtcacactcacact

SEQ ID NO: 44425 - DNA, 658 bp, Homo sapiens
tgttggtgcacccatcacccaagcagtgtgcactgtacccaatgtgtagtcttttatcactcaccccttcccactctttccccagagtctccaaagtcattcttatgcctttgcatcatcatggttagctcccccttatgagtgagaacatacaatgttggttttccattctggagttaattcacttagaataatggtctccaactccatccaggttgctgtaaatgccattatttcattcatttttatggcccttgccaatttctatggtgtaaataccacccccctcctcagcctatttcaagctactaataggatacctacttggcttacaaaacttctgaaaacttaataaccagctctcagcagctattttgagcatctcaaacttcctggacagaatgcgtatggagtgccaagcccagcaccaggtgcagagcaaagcgcagcatcagcaggagtggccattgctgttttctgtctgatmttagttccttccaagatctccctcctggtttgccagagactgagctagacttttcttggcctgtgaatgacatttatcactacttaccaacagagctttggataaattactgacttcttgcaaaatctcagttttcttctatccaaaatggggggcaggggaggggaatct

SEQ ID NO: 44426 - DNA, 574 bp, Homo sapiens
cccttttttaaaggcattaaacccaccaatgagaccagagccctcctggcctaatcactacttaaaggcaccacctcttaatactcttacgatggcaattaaacttcaacctgagttttgaaggagacaaacattcaaatcacagcaacggaaaaaaccacaggttgaataacacctctaaattcatccagcaaaggcaatactcaatcccacatcttctgaatccaaattctgattcattttacatcacgacgctgcctttaatgtctcctctttcataatcgacctgaatctctgctttattttcttttcctctgtctacaaaaggggagcaattatctttaggcccaacacctccataataatcagggattcatctcatctaggggtaaggatgaaggggtaatttaaagacagcgatgctgaaagcatggtcccctaaccagcagcatttcatcacctgggaacttgttggaaacaccaactttcaggcctcaccccagacmtactgcatcagaatcctgggaggagagccccagcaatctatgctttaacaagcctccaagtgacactg

SEQ ID NO: 44427 - DNA, 602 bp, Homo sapiens
agagtctgcactgccacagataggcaataggaggagctcccaggtagaaactggcaaacctcttcaattaggagatgacacacatgcacaagcccagaaagaacatatcctagaaaagacttgcaagatgtctacaaactctagctgggacaaatggtggaagatttccctgtacaaaccagaccacatagactaggagaggtggctgatttttcasatgccaaggtctcatcagaagataacaaggcatacagagatcagggaaacacagctcaatcaaaggagcaaattaaacttccagaaactgaccctaaagaaacagagctaaaccaagcatagtggtacatgcttatagtcccagctacttgggaggctgaggcaggaggataagttgagcccaggaatttgagaccagcctgggtagcaacatagtgaaacctgtatctaaaacaagcaaacaaacaaacaacaacaacaacagaagaaaaacttaataagagaagaaatagagatatatgaataatttaaaatagttgtcataagagtgctcagtaaattaaaagggagcacagatggataactaaacaagatcgacgaaaaca

SEQ ID NO: 44428 - DNA, 588 bp, Homo sapiens
gtttcttaacataataaactrtattaatggattttaaggagttatcctggtattcctagaataatcccacttgatcccatttttaattttttgtgctgaaatttaaaaatatcatctttgaggtgtaaataacacccaataagttgaattcacttaaagggcacactattttgtcagttgtatatagccacgaaactacgaccataatcaagaggcaaaacttttccatccgccccaaaagattccttatgtcccattacagtacacccttccctctactccgagtcccaggtaaccactgattctattcctttacatgcttcattttttaaagattttatataaatggagtaatactagatatatgtctgtgtgtatgtctatctatccatccatccatccatccatatatacatttctgccttcttttcctctgcctgattttgagattcttccatgcttttgtgtttatcagtagtttgttctgttttcttgctgagtagtattcctttgtataaatatactatattttttgcttattcattcagttaaatgatggatatttaagttggttccagtgttttggct

SEQ ID NO: 44429 - DNA, 591 bp, Homo sapiens
aaaaaccaaaaagaggctcaagcttatttaaatgatggagacatttacatctcacatagagaaagtctagaggtaggacagactctctgccaaatttctagattgctttttgtgtgtgtgatttgctcttctcttttcccctggaaggtttggtcttggctcaggctgtcttccttcatggtttcaagagggctgccagcagcagctggggtagcgtgctttcttatttcacatataggcagatagggaaagcatggaataaaaatccttcctttctacctaaattgaccaacttaggtcatgccctcacttctggacaactaacattgccaggggaatrccctgtgttgattggcctaaacctgagtccttgaagtaaacactggtcaggaagatgagattaccagaacctacatctgaaggcacacagggtaagagggggagagtagacactgaataaaattgaggtctcctaggaaggagaaaggcgtgagagttgctcaacaaatacccaagagagtccaccacacctagcatttaagcatcccaaggagagctgtcaagacctgtgtgcttgctgggaagatgtca

SEQ ID NO: 44430 - DNA, 591 bp, Homo sapiens
aaaaaccaaaaagaggctcaagcttatttaaatgatggagacatttacatctcacatagagaaagtctagaggtaggacagactctctgccaaatttctagattgctttttgtgtgtgtgatttgctcttctcttttcccctggaaggtttggtcttggctcaggctgtcttccttcatggtttcaagagggctgccagcagcagctggggtagcgtgctttcttatttcacatataggcagatagggaaagcatggaataaaaatccttcctttctacctaaattgaccaacttaggtcatgccctcacttctggacaactaacattgccaggggaataccctgtgttgattggcctaaacctgagtccttgaagtaaacactggtcaggaagatgagattaccagaacctacatctgaaggcacacagggtaagagggggagagtagacactgaataaaattgaggtctcctaggaaggagaaaggygtgagagttgctcaacaaatacccaagagagtccaccacacctagcatttaagcatcccaaggagagctgtcaagacctgtgtgcttgctgggaagatgtca

SEQ ID NO: 44431 - DNA, 591 bp, Homo sapiens
aaaaaccaaaaagaggctcaagcttatttaaatgatggagacatttacatctcacatagagaaagtctagaggtaggacagactctctgccaaatttctagattgctttttgtgtgtgtgatttgctcttctcttttcccctggaaggtttggtcttggctcaggctgtcttccttcatggtttcaagagggctgccagcagcagctggggtagcgtgctttcttatttcacatataggcagatagggaaagcatggaataaaaatccttcctttctacctaaattgaccaacttaggtcatgccctcacttctggacaactaacattgccaggggaataccctgtgttgattggcctaaacctgagtccttgaagtaaacactggtcaggaagatgagattaccagaacctacatctgaaggcacacagggtaagagggggagagtagacactgaataaaattgaggtctcctaggaaggagaaaggcgtgagagttgctcaacaaatacccaagagagtccaccacacctagcatttaagcatcccaaggagagctgtcargacctgtgtgcttgctgggaagatgtca

SEQ ID NO: 44432 - DNA, 662 bp, Homo sapiens
ttttttttttgagatggagtctcgctctgtcacccaggctggagtgcagtggcatgatctcggctcactgcaaactctgcctcccgggttcaagccattctcctgcctcagcctcctgagtagttgggattacaggcgtgtgccatgatgcctggctaattttttgtatttttagtagaaaaggggtttcaccatgttagccaggctggtctccaactcctgacttcaggtgatctgccctcctcggcctcccaaagtgctgggattacaggcatgagccaccgctaccggctgacttggttacttttcttcgtttgcttctctagtatgtagatttagcacttctttggtcctttgtttccatgaaggtcctcatgtcatgtaaaatttatataaatttgtatacttttcccctgttaatctgttctatgtcaatttaattttcaggcccaactgaaagctctaaragggtagaagtcaaattttgcctcccctacaatataaagatagattaattctaggtgctcatagaaaccatatataatcgtgggagtaaacattttaagttaaccatgtaaataattgaaatagaatacataactctggccgggcgtggtggctcacacctgtaatcccagcactttaggaggctgaggcgggtg

SEQ ID NO: 44433 - DNA, 535 bp, Homo sapiens
attcacccagactgacacataaaggaaagtaaaaaagaatgctaatatttcacatttaaaacctaaagcataaaaggtgtgaaatggaattttatttacggcttggaattcatttctggctgccgtaagkaatcaaagattagttttaaaaaaatgacaggcggctgaagtttctgctcatagtaagtagctaaaacaaagtactaaatatataataaagtgtattaagtatgtctttgtcattttgagaaaaagcttttacatggtatatggtatacagagtatatgctatacagtatggaataattctttggtctgaattatctacaacttggggctaagaaactcaatggcttacacagtggcaaatcaatttaatacctagggaactattgatatctctaccttataaaaccgttacttaatgaaatagttggaaaactataatttcccttacaaaataattcttgcaaattgagctaattaatttgtaaaataaaagaactataaaaatgtcatacctaagaacaccacc

SEQ ID NO: 44434 - DNA, 545 bp, Homo sapiens
catcagataacattagctgggctttctgcaccagtggtccaaaaccctgggtaacataaatgtttgcactctatctggagcccagtctttgtcagccagcattttagccccagcacttaaccaccagcttggcaatagctagcagataaatgtttgagggactaggtgattcaatttacttaattaatagattcttagagccacttcctttacagaggaggaaatytgtgaatgtgtgcatgtgtgttttctgagtaaagttcaaagaaacattaatgacccagacaattccaccctcaccccaccctggattttggctcaataatatttgagttaaatatgagcaagtatcatgtaggcatttgggaacttgattttgaactactcagcaacatcacaaggcagagatctctggtcctggcctggttatgatctgtgtccagaagtgtctgctccctctcggtctcaggtgtatcagctcatagagcagtgagaaggctgagagctgggccaggaagcttctgctagtcaggattagattgatt

SEQ ID NO: 44435 - DNA, 250 bp, Homo sapiens
tggtgcctggtacagagcccgccccccacccccccgccaacacacacatcccagcagtatccttaacctgccttccctagtggaggagcatgagggaaagaaagacattgacagtcccaccttccygtcctctgccagctcctggtggagcagtagcagtgcctatggctccaggaggcctgggggctttgagctgaagttaatagggcaacagggaggtggctgggcccacagtgacaccccctgtccc

SEQ ID NO: 44436 - DNA, 1100 bp, Homo sapiens
ctgggattacaggcgtgagccaccatgcccgccctatcttctcttataaggaacaccagtcatattggattaagggcctgccctgctccagtatgacctcatcttagctacttacaaccacaaccacagtatttccaaataaggtcacattctgaggctccaggaagtacatgaattttggagaggacaccattcaacccagtacattcagtttctatttaacataaaaaataattcccatactatacaggatgaaaaaatgacttatgaaataggtgaaagattgttgaatatacaaatgtgatcttttcttttccaatcacatacagagataagaattttttgggaatatgtctcattcacaaatatgtattatatgcaaagagaaatttatacattgttcaagtaggattcagggaattaacctaggtgcgttctcttgtttctatttcaaccatattgttctccagatttttttcctaattctgatttccctgtaggattgttcagatttaaataaagcctgtaaagcagaagtagtgaacaagcctgggtactaaagttaaatattacagaggcagataaaataagtctgagaaaaattcatgcatttaattctatctattttgcccacatagttatgctgatatttcattcacttggattcaccaacytaaaatttgtaactataatggagaatcttttttctgtatttgaaaaaagtgcactgagcaaattaatagtataaatatgatttcaaggataactaagagaatatttatttctatgtatggttaatcaacatgcccccttccatattccatgtgccctttgactaattatctccaattcatctttcaggtcacaattcaagtataaataataaattagaagtacatattactataaaaaattgacatgtgaattatgaatcaatctcctcaatttgttaaagaatcttctaccaagtactcttttcttgaataaacttttacccatattacagttaccatatctttgtaacaacattaagggagcattgattttactatattaaatagacagttttctatttcaaatagacttggctgaattatttt

SEQ ID NO: 44437 - DNA, 544 bp, Homo sapiens
tcagtcacttcaaaactctggatttacttgggttatgttgagctgataaaaaattatatttagagagatcagtaatttgttaagtgacaactcaattcttcccatcactgaaatttgtgactttaccactaccagacacagccaagtaaacagaaatctatcacattcatttagcccttattgtctattgctcatgaggatttagctgtycaccagacaggaaccagcaaccagtatggaagcacttgtgtggctggctgctatatgaataatgtcagcaaatgtgaattaactcatgagaggctgaaaaactattactgccagtattggatacgacaaaaaatgaaatcccaccttctaaagacagaaagttgcccagcattttatttcaaatgttaaagtcttaaaagcttctcctaaagtcaaacaagtaacttttcacttgtgacacatatatacacacatataggtatacatgtatatgtgtttatgtgtaggtatatatgtatatatgtgtgtatgggtatgtatatgtgtctataca

SEQ ID NO: 44438 - DNA, 544 bp, Homo sapiens
tcagtcacttcaaaactctggatttacttgggttatgttgagctgataaaaaattatatttagagagatcagtaatttgttaagtgacaactcaattcttcccatcactgaaatttgtgactttaccactaccagacacagccaagtaaacagaaatctatcacattcatttagcccttattgtctattgctcatgaggatttagctgtccaccagacaggaaccagcaaccagtatggaagcacttgtgtggctggctgctatatgaataatgtcagcaaatgtgaattaactcatgagaggctgaaaaactattactgccagtattggatacgacaaaaaatgaaatcccaccttctaaagacagaaagttgcccagcattttatttcraatgttaaagtcttaaaagcttctcctaaagtcaaacaagtaacttttcacttgtgacacatatatacacacatataggtatacatgtatatgtgtttatgtgtaggtatatatgtatatatgtgtgtatgggtatgtatatgtgtctataca

SEQ ID NO: 44439 - DNA, 556 bp, Homo sapiens
ttaatagtattttgtctttgtaacaagaaatgattagtttcacttccaacatttttgataaaatattcattagtcatttatttcaggttttaatgagtcaggaaattgggtctcgtttgctaatgttaagcattatttaagcacaggctcttgagcagaagagwgctatgtaagttcactcctatcgtgataagaacaacttcttatagccaatatgaagtagaagttgtatgaagtacaaatagtcacgagatacgggttcataactaggtcactcagcaatcatcccactgtgcaagctgcacctctttttagcaaactttattttcttaagttttaaatgtttgtttaatcaatggcaactttttattttaatcttagataccagtggtttattagaggtatagaaaagcccatttactagccacataaggtctcatatgccagaagcttaagtcaaaacaaaccattttctcattcattgtgaaaaaaatatttcattattttcaaaccaattttactctcaggttttgtttgtttgtttgtttgtttgttt

SEQ ID NO: 44440 - DNA, 556 bp, Homo sapiens
ttaatagtattttgtctttgtaacaagaaatgattagtttcacttccaacatttttgataaaatattcattagtcatttatttcaggttttaatgagtcaggaaattgggtctcgtttgctaatgttaagcattatttaagcacaggctcttgagcagaagagtgctatgtaagttcactcctatcgtgataagarcaacttcttatagccaatatgaagtagaagttgtatgaagtacaaatagtcacgagatacgggttcataactaggtcactcagcaatcatcccactgtgcaagctgcacctctttttagcaaactttattttcttaagttttaaatgtttgtttaatcaatggcaactttttattttaatcttagataccagtggtttattagaggtatagaaaagcccatttactagccacataaggtctcatatgccagaagcttaagtcaaaacaaaccattttctcattcattgtgaaaaaaatatttcattattttcaaaccaattttactctcaggttttgtttgtttgtttgtttgtttgttt

SEQ ID NO: 44441 - DNA, 556 bp, Homo sapiens
ttaatagtattttgtctttgtaacaagaaatgattagtttcacttccaacatttttgataaaatattcattagtcatttatttcaggttttaatgagtcaggaaattgggtctcgtttgctaatgttaagcattatttaagcacaggctcttgagcagaagagtgctatgtaagttcactcctatcgtgataagaacaacttcttatagccaatatgaagtagaagttgtatgaagtacaaatagtcacgagatacgggttcatarctaggtcactcagcaatcatcccactgtgcaagctgcacctctttttagcaaactttattttcttaagttttaaatgtttgtttaatcaatggcaactttttattttaatcttagataccagtggtttattagaggtatagaaaagcccatttactagccacataaggtctcatatgccagaagcttaagtcaaaacaaaccattttctcattcattgtgaaaaaaatatttcattattttcaaaccaattttactctcaggttttgtttgtttgtttgtttgtttgttt

SEQ ID NO: 44442 - DNA, 1919 bp, Homo sapiens
tgcattctctaaccaccatcgttcatgctagccctgcaaatgatgatgactggataattgctctggtttctaatgatattattgctgctattccacagccaatcgtgttccccattctcagagcatcacaaaatagaagtttgatcaatgcaaaccacatggaagaagcaacaggctgcgttctgcttagaagtcctaacgcagagcatcccagatgagatgggagctctaagcacacaggcaatcaagcgtgcacagcagacgctaatgactcccataaacggcagttcaatcaaatgctttatttctgcctggaataaactcatccatgatttgcaaatcaaactttacccaaaagtatttctacctggtgcagcaagaccttcactctcctgcccgggggaaagcaacatcctggtcaacacaggaatgccccttgagccatggtaaacaggtgcctggaatctgcctccaaatccccacactaagggtgaaccaatagaaattccaggtaaaaggtaaatggaaattatcttccatggcttaggtttttgcacagatgaatcacggcataaataacacagtcaaaataaacccagaatccattttgacagaaaaaaatattcctatttccaaaagatgcacaccagaagccaaaaactgctaaaactctatcctatttcattaggtcactgctgctcactaccatgacaagcacgcacaggctaggtacgggaccggatggagggagcttgtgtatgtttgccaaaatgtttgtggacctgcctccactaaatggggaaaaaaaaaagagattggattagaagattcttagacaaacacgtgtaggaagagaccacattgatattttttgtattatttaaactggagcttctgcgggctcaggtgactaagtatccttatctataagtaaaatagtcagacaacaagaggacatccctcagatacaccctggatcattggatctgttagttcttgctgccataacaaatgctacagactgagaggctgaagccacagaaatttattttctcacagctctggaggctggaagtctgagatcaaaaggttggcagagtcgctttctcctgaagcctctctcgttggctggtggatggccatcttctctctgtgtcctcacatggcccttcctctgtgcacgtctgtgtcccttctcctcttcttataaggacaccagtcatttggagtagagcctactcataggacctcattttaacttaaccacagcttgaaagaccttatcttcaaattcagtcacaatctgaggtgcttgggggttaggacttaaatttggaggtggggggacaaaattcagcccatgaagtcacttctgtgccctgggaggttgggaaatgggggaagctaattgaagaaactgtgaggagaggattcctccctagaaagtgaggagtgggggcaaagaccctccttccaaagagggtcccaggcagaaggctgctagagtctgggtggaggctgttagcgcaccccactcctcagcgtgatggagggaggagcatgatgacagtgtgctgacagggcaccaagcagcccgggagaaagctgagggtctctagaccccacaggagccggggatccccctgctgataggaccaagactcccccaactctccccaccctaccccttgtcaagaaaataaactaaagacaaaatcttctcccaacctgggtatcctctctacgaaagtgctagaaaaaaaaaacaaaaacaaataaacaaacaaaaaaacacttttattattgagtaagcattaagccagaaagtgatgtgtcttgctagcaatccctagaagattagagagacagaaagaaatcttacccattgatatagccaggcagamacaacccattccatg

SEQ ID NO: 44443 - DNA, 588 bp, Homo sapiens
cagagggggaaaaggggagaaacagatcaaccttccaggacaggcaagacacccctggtttgaggggttgagccttccaggacaggcaagacaccccctagtttgaggggttgagccttccagggcaaacaaggcaagatgcccccctggtttgaggggttgagccttccaggacaggcaagacaccccctggcttgaggggttgagccttccaggacgggcaaggtgagacatccctggtgttgaggggttgagccttctgctaatttcaagggttgaacctgacacaaccccmccgctgccctttcctttcttcttgggggaagagagagtagttccactcccgtaggtccctaccctaggggaagagagagagagacagagagagacagacagagaggagagcgagatagagacagagaggagagagggaaagagaggcagagacagagagagagggaaagacgcggtgggggggaagagaggcagagagagacagagaggggatagaggcagacacccacagagaggggaaagaggcagagagagaggggaaagagaggtgtgtgggggggaagaggcagagag

SEQ ID NO: 44444 - DNA, 553 bp, Homo sapiens
tgcgatatgagcaggttgtaaaggaataacagagctttcagctggctgctaggagtttaactactgggtgtggtcagtgagacagagaagaggttgctccccaagccctgtcatcccagggtgacggtggcacactggtgcttcgacaccgagactgttgctggggaggaagaggggcacacaggcatcacaacagtaagccagccagtcaccaaagactaaaccagtgaataacaggcccaggatggggactaccaaaagggctagaatatcttgtctaaaatgtccagtttctaacaaagaatgacagggtatgtggaggaggaggagggaaggaagaaaaagaaaaagaaggaaagtatgactcatacattaggaagaaagcaacaaaaactgctgtgagagtgaccaaatgtcaaatttaactgaatgagatttcaaagcagccactatcaatatgttcacaaaactaaaggacgcataaatgaacatgccacaaatagaggctgttggtaaagagatggacatttaaaaaaatacccaaacrgaaatt

SEQ ID NO: 44445 - DNA, 532 bp, Homo sapiens
cagatcaagagaaaatctagaaatgaacacattcaaaagttaacagaatcttaaaatggaaacttaattttccaaaatggtatgtctttttttttttgatccaaacagcttgattaccctcttaatccctatcttgcgggaaaagtttttccagtctggaagggagcctattgccatttgaatacgtcaatatgtctgcattttgaatayactacctcaaataatcctcatgaaaaatcctaatgaagaataggtttacttattcccaagtcatatttcttcttaggtttgtttccttattggaaaaataagaaaagtggactaaatgatttccaaatttccctccagctttaataatccatgattctacataaaatattctgatgtctgttcctgaggagcttataatttggttagtgaattaaagataacatgatgatttcaggcactaggaaaatatacaaataaccttaactaagcaaaaattatcaatataacttgagtagtgaatagctctgagaattgctggaga

SEQ ID NO: 44446 - DNA, 560 bp, Homo sapiens
tttgtaggggtaggcgagtgtgggtttgtggggtgtgtaggggtgagtgtgtgtgagtttgtaggggtaggtgagtgtgggtttgtggggtgtgtagggggtgtgtgtgggcttgtaggggtaggcgagtgtgggtttgtggggtgtgtaggggcgagtgtgagagtgtaggtatgtgggtgtgagtgtggatgtgtgtaggcggtgagtgtgaaattgtgggtttgtgggggtgggtgggtgtgagtgtgtgggtttgtgggtgggtgtgggtgtgagtgggtgggtgaggggggcatggggatgggtgtgaacatgtagttgttctttcaggcataggacccatagctctagagctttcatcagattctcaaaggggaccttgactcggmaaaggttaagacccattttagagatgagaaattaaagcctggagctgaggagcgactggcccaaagtccctctctgctctgaggtgccttcgcaggcaaaaacctgaaccagccccctaggcagccaggcctcccaatggacaccactcacctcactccttccagcca

SEQ ID NO: 44447 - DNA, 542 bp, Homo sapiens
agagttccttctccatcctgcttcagttagagggcttccttcccaggaagagcagggcatcagcatctctcatccggctccccagtgcctgctgctgtggctaagttccgaaagactgcagttgagaagtggagattcccatcttttgcccaaccctcacttgcttaaagaaggctctaccttgggtggaccacactgagaatactggsgccctaatcacccttgggccggcttgtgagaccatgccaagagatgcaagctgaaaggatttcaggttactaactcattcccactcctccactccctacccagagctcagtgtttaaaaaaatacagaaggcagcctaggcaacgtggcaaaactccatgtctacaacacaaaaattagctgggcgtgtggtgtatgcctgtggtcccaaccactaaggagtctgaggcaggagaatctcttcaacctgggcagtgagccgagatcgcgtcatggcactccagcctgggcgacagtgagactccgcaccccgcccccgcaatacacacacaca

SEQ ID NO: 44448 - DNA, 601 bp, Homo sapiens
tgcattgattgagctgactaactgaatttcctggtttgtaacatagggtagtgtaacagcttcaaatgaaagtacttggtatcctttgtggctggtatagcatgyggcacaaaggttaagatatgggctttagagtcagacttcctaagtttaaatcctggctctgctactactagctgggttttgaattaattattttatacctcagtttcctcattgcaaattggttaatattaatatttgcttcataaggtacttgtaaagggaaaattagtacattataaaattttaacaaagtttggtattattagtttttttttttaaggaatgaatgaataaacaaaataaatgaaagcgccaggcacagtggctcacgcctgtaatcccagcactttggaaggccgaggtgggcggatcacgatgttaggagttcaagaccagcttggccaacatagtgaaacctcgtctctactgaaaatacaaaattagccagtcatggtggtgcatgcttgtaattccagctacttgggaggctgaggcaggagaatcacttaaacccgggaggtggaggttgcagtcagctgagatcatgccactgcac

SEQ ID NO: 44449 - DNA, 555 bp, Homo sapiens
tgtctccattgtgtctgcctactccccgattcaaaattccttcctgctttcaaatccaagaaaaataaactcagattccagggtcagacatttttctctttctaaaaagtatcaacactccctcccctcaccactccccacaaggaagtggatgcaatgcctgttcacaaaggcacattgggtgaggatctctgtgtttagattcctctctacagaggccagaaagyctttagagtcacagaactgaccctcgggctgaagcttgaggtcatccttcatgttcagagttcctcacatgccgtcccctgctctctgccagactgtttggtgacaaagagtccagagggagggagagtaagaaggggaaggggccaaggcagggcttctctttccaagatgtaaaaggcaaacttcaggccaccaagtccaaatcgacaaccagatagagcctctgtgctggtttgagctattgctcaacgttctaggctttaatattttaagaaaagtttattatgacaagtcaatgacagcacttttagtaggttaataaatcat

SEQ ID NO: 44450 - DNA, 555 bp, Homo sapiens
tgtctccattgtgtctgcctactccccgattcaaaattccttcctgctttcaaatccaagaaaaataaactcagattccagggtcagacatttttctctttctaaaaagtatcaacactccctcccctcaccactccccacaaggaagtggatgcaatgcctgttcacaaaggcacattgggtgaggatctctgtgtttagattcctctctacagaggccagaaagcctttagagtcacagaactgaccctcgggctgaagcttgaggtcatccttcatgttcagagttcctcacatgccgtcccctgctctctgccagactgtttggtgacaaagagtccagagggagggagagtaagaaggggaaggggccaaggcagggcttctctttccaagatgtaaaaggcaaacttcaggccaccaagtccaaatcgacaaccagatagarcctctgtgctggtttgagctattgctcaacgttctaggctttaatattttaagaaaagtttattatgacaagtcaatgacagcacttttagtaggttaataaatcat

SEQ ID NO: 44451 - DNA, 507 bp, Homo sapiens
caaaacaaatgtgcatagacaatgacatttacttgtccccttctagattattattattwtttttttaagtgaaacgtggtttagggaagactgaggggcagaaagtagtaaagactgaagccagactggaagtggcaactgtcagtgtgagtctgagctcccaatgaacagtgcccacagttatcattgaaatcagaggtaggctaagggcgtgtgctggggcagctggaccgcttgctgctgatgcagaagaactgttttgtatcattgtattgagcaggaatgtttctactttagctgttactctcttgcccctttggggataatttacttatttcattcacacatcaaagtagctaaagataccaatgtataaaaaataagaaaagtatcatgtgacattcagtaagtcctcattttttggattatatgccttatcaattttaaaaaattgagaacttaatccaaatatatgtatatttggttatttataaattatatacaagt

SEQ ID NO: 44452 - DNA, 602 bp, Homo sapiens
cactccaagaagttaaggtacttgtcaagagtcaccttaactgacgggcataagcgccaagaccctatcsagatcattgcagtctgaatcctctttcagttatcatcagcctctcctctaccccataaagagatgaagtccaagtctgaaaactgaattggctgcttagtagaaaaaaaaaaatcactgagaatacacgacacaatgaggttagaacatttctgtgaactgcaaataccatgcttttgtttatctaaccttatgaataatttgggaatgtaatctgcctcagaaacatggatcaaatttaacattcacttttgatcagttacgcccattatgagtggaatagtgtcacacttgcgcccattttagtttctctggctttcaacccattaactcccacgtctgctccacatttttgattctctcataaaggcactaccatctatgttgtcatctgagccagaaaagtaggagtcaatcagactccatcctgtcttttgcctgctgccatctgccaatttaataagttgatgagtctgcttgatttatatcctaaataatacttgagtccacactctccttattcttcccatacc

SEQ ID NO: 44453 - DNA, 582 bp, Homo sapiens
cctttctcctgtcaacctctgctggaataaaccagtcccccggaggagcaactttgtattcacacccaccgttgtgtcggccagtgtcactcagctctgagatttagcaggcagaagttcagatttccctgtgatggttagctttatatgtcaacttgcctagtctctagcacatgtaccctgttacttaatcaaacayggatctagttgttttgtaaatgtgattaacatctagaatcagtggactttaagggaagaagattatcctcaataatgtgggcctcatccaggcagatgaaagctttatgagcaaaacggaggtgttggagaagaaaatactctccctcagcactgcagcaactcctcctgggtttccagtctgccagatttccgtataaatttcaaaatgcctaacccccacaattgtgtgagcaaatttcttactgatctttcagtgacccatctattatttccatctctctctctctctaaatatatatttatataaaatctccatatctctctccatatatatgtgtgtgtatatatatatgtaaatatatatatattcttatatgaatg

SEQ ID NO: 44454 - DNA, 588 bp, Homo sapiens
atgcattatacaacagacccaggtaagggaaggagcatgtgcatttcaagtctcagctcacttcttaattagctgtgatactctgggcakgtgaccccaactatacgagcctgtgtgcctgtcaacccaaaacaatcctaagcaaaaacaccaaagcttggggcatcttgctacccgacttcaaactatactacaaggctgcagtaaccaaaacagcacagtactaataccaaaacagatatatagaccaatggaacagaacagaggcctcagtaataacatcacacatctacaaccatctgatctctaacaaacctgacaaaaacaagcaatggagaaagatttactacttaccaaatggtgctgaaagaactggctagccacattcagaaaacagaaactggaccccttctttacaccttatacaaacattatctcaagatggattaaagtcttaaatataaaacaccaaaccacaaaaaccctagaagaaaacctaggcaataccattcaggacataggcatgagcaaagacttcaggaataaaataccaaaagcaatcacaacaaaagctaaaattgacaaatg

SEQ ID NO: 44455 - DNA, 581 bp, Homo sapiens
tgagtcaattaaacctcttttctttataaattacttagccttaggcagtgtgagaatggctaatacagcacctttcaaagcaaacccatgcccaaatatcatcttaccaggggtcagataggctgccttgggtctgaccaaaaggcaagggaagagttgaacccaagtggctgagtagagaaggagtgtgacagattccacaaagggaaaccaagaatctgtagctttaggaccagacaacaaattaagacacatttactatgtatccatcattgactaagcactgtggttgttttgacccaaattatcctcaagacagctcatgatgaatgtgctactgtaagcaccatttcacaaatcagaatactgaggctgggaatagttaagtgactggctcaagataatatggaaaaaacgtcctaaaggctgggttctaaagcaggcagtctggctcctgtgtgccacrttcttaactaagccctgctacatttccaaagaaatagtttcatgagagatacccatggagcaaatcaggagctaaaagcagagtcaaggactctgaggttctccttttggccaga

SEQ ID NO: 44456 - DNA, 582 bp, Homo sapiens
atgtgtgggcttgcaatattgccaaacattgtgtggcagccagacgtcatagcaaacaaacaaatttggatctacagtaaagttcagaggcacacagatttacaatttgaatatgaacacttaacaaaacttactaacctgtcaggttctattaattgacctttggagagtagagtattagcagtttatgaagtaaacatcctttaataaaagcttaaaaatgacttktatattttatataattatataaaatattaatgcaacatttgtggaaaacctgaggagcatgcattaaagattgaaaaatactgcttaaaagatagtagagaataattacatttgaggaatggtagagatacctaaattttatcagcaacatcttaaattcttggtcctcaatttcatcattactttcttctctgttttttttttttttaatagaaggtgaggtgctataaaagtaaatgataaaaattgcactgcctcctagggatattttcaagccatgaagtaaaatctatataaacatggacatggtttagtgattgcagatattttatttttctagaatagaacgttatg

SEQ ID NO: 44457 - DNA, 582 bp, Homo sapiens
atgtgtgggcttgcaatattgccaaacattgtgtggcagccagacgtcatagcaaacaaacaaatttggatctacagtaaagttcagaggcacacagatttacaatttgaatatgaacacttaacaaaacttactaacctgtcaggttctattaattgacctttggagagtagagtattagcagtttatgaagtaaacatcctttaataaaagcttaaaaatgacttttatattttatatmattatataaaatattaatgcaacatttgtggaaaacctgaggagcatgcattaaagattgaaaaatactgcttaaaagatagtagagaataattacatttgaggaatggtagagatacctaaattttatcagcaacatcttaaattcttggtcctcaatttcatcattactttcttctctgttttttttttttttaatagaaggtgaggtgctataaaagtaaatgataaaaattgcactgcctcctagggatattttcaagccatgaagtaaaatctatataaacatggacatggtttagtgattgcagatattttatttttctagaatagaacgttatg

SEQ ID NO: 44458 - DNA, 530 bp, Homo sapiens
gaaatggaagactgcagcatttctaagattcaaagttagtctatacagctggatcaagaaaagcaagggggaaactggtaccagatgtttgctcttactgaaacatatggcaggctgaatacatataccacttgggctgttcagtccaacacgatggtgaggaggaaaactgggaaccactaatgttctaagttatggatccttctaaaatgtatgtatctaatgtgtgcttaggcaagacagctgggagtatttcacaaaaagctccggtacaatctcacttcaatacacaaatcaatacatagagtatatatacatacaggtatatagccacattatctctctaattgaaaacaggtaattcttttaaaatcacactgtacacttgcaacatctatgttttcttccccaattacacgttytacaagaaagcattaccatgagataatcacaaggaataatagtgaaaaacaatcaatattacactgcaatgtttgcaatacagacaaactttgtagaaattatttctt

SEQ ID NO: 44459 - DNA, 580 bp, Homo sapiens
cacttactgattcctaactttacattagtaaatgtgatttagccagaaattcaaaacattgtaatagactaggtattaatatcttatgagacgtgattttatttaaattagataacatcagctagtaactagtgaaatatatatttgaaaccagatgggtaaactgtctttgtttattctaccagactatgttttttaccaactaagttgtctttctgattgtccaaatattcctgcaaatagagtaacatttgtcttaaaggagaacaaaggacagagctttcttttgatcctattgtgggtatgaaaaagaacaatagcaaaagtaaggaaataaaattctgaaataaggagcaaatttcctcagaaatgacatgaagaaacagtgaatgagttaaaacaggagatttttaacaaaatgtgacaaataaggatcaaaataggaaaacataagaaaaaaaatacttcagaagcagcaagatacatagttgacaactggaaatacaaataataatgtgacaatagttaatgatataaaaagtcaaaytgattaaaagaattcgagaactatagaattttt

SEQ ID NO: 44460 - DNA, 1808 bp, Homo sapiens
catcatagggtgtctatgaaatatttttaggtgatcctaatgtacagactgttgagaacaactaagctactgatttcagaagccaaagcaattgatgaatgagatggtcaaaatatgagaatattcttcagaataaagaggtaacctcatcccaaattgagacgtgaggtagcagcaggctaggaagtaatcagataaattgtggaggatactggtgtggtatttttttctaaattgcttaacatgtcattttaatcagagaaagatggtagattactgttcattgccaagcagagataggccaaataattctctggcttgattaatgagtttttttcttaaacaagtgaaatgagcatgtacttgtttaacaaagtccctttacatggcttggtctgaggttagtaggtttagatctcagctgaaggaggaaagtrctagttagattgcagctgttagacaccaatacactaatgagccaactatggcatctaatcaatgtgtgaaaaatgggtaatgctcactaatgccctgctaatgttctcataatgatctgtcaaagtgctagagctaattattgtcatggtaatttggcccaagttcactagggataatcctggcattggtgaataagaacatacattgccagtgtgtcacatactttatatctacttttctatttctcctcacatggagatcctgtgtgtcattttctataaacttttaaacatgtacttacatacttcatttttcgttcgttttcttgtttttcaagctccatgttttgtcttttcatcctatttccatttatttttattgcaaaaagtaatgacgaggatactggacaggcacttaagagccctaggacctggtcctggtccactactgtcagagcaaggcattttatccttatagtaacaaagaactagataaggcataatgtacttattgctttaaaataatagaattctacatttcccttttatgtccactcaatgtttttgtccatagtaccatttttttttccttcaagtttattcatcaccatggaaatttacttttgagctatggggcatatagcaagcaaggtggctactgttagtccatgacacagaaaatggagctcacctgctatagagatttagaagagggagtagaaaatagaggtttcagatacgaaaaaatacttcaaagtattatacatagcaaggtaacactgttgcctccaaactttctcctagagtagtttttcttgcagaagagtttctcatttataatctcttcaataataaattaccatagcaatgctttggatcaatatagcacgtagtgaagggctcagatccctttttatctcagtttacaacatcctagtgagatagctggatagctgggcagataatagctaaagtaggcaaagggaaattaacatttatggacagaacaattttgccttacacatttcctttttgaaagcattctttatcttaaggctgttcttctgtgtgtgtttacagaagatattttcagtaaatgcaacccaacatcgtaaggcactttgccctttttcaccttgaagtcaaataaggaaaggaggcaacttttactcccataatagacaaaagctgtaacatgtaacaaactcggggactttaaaagattttttaaaaatatgtaaacatgaccttagatcagaggtcagcaaacttctcctattaaagaccagatagtaaatattttattttatttttttattatactttaagttctagggtacatgtgcacaagtgcaggtttgttacatatgt

SEQ ID NO: 44461 - DNA, 589 bp, Homo sapiens
tgcattttgtgtagcacatatggttctggactagaaagcattacactttgcagagaatctcagtttctccaccaaggctcaaaattcccatgctacttaaaataagtctccttaagttccccattcactgcatttctaaccatctccattgtatcgttctctgtatgacagaacatgaagtttttactccttttatctgttctgaaatttatctgtaatttttcgaacactttctctcagagctacagtttttcatctatcacaggagtagtaaactttctttgtaaaggcccagatagtaaataatttaggctatatggatcatatggtctctgtcacaactcagctctgcccttgtagttcaaatgcagccawagatagcagaaaaacaagtgaccttggttgtgttccacaaaacattccttttataaagtaagcagagggccagaactggcatatgggccatagtttgctgacccctgatctgtcttattacttatcagtgggaagtatgtatatcttgctttgtcttttttgaagggagtacaattaagggttttcttggaagtgtttcattaatattattttt

SEQ ID NO: 44462 - DNA, 589 bp, Homo sapiens
tgcattttgtgtagcacatatggttctggactagaaagcattacactttgcagagaatctcagtttctccaccaaggctcaaaattcccatgctacttaaaataagtctccttaagttccccattcactgcatttctaaccatctccattgtatcgttctctgtatgacagaacatgaagtttttactccttttatctgttctgaaatttatctgtaatttttcgaacactttctctcagagctacagtttttcatctatcacaggagtagtaaactttctttgtaaaggcccagatagtaaataatttaggctatatggatcatatggtctctgtcacaactcagctctgcccttgtagttcaaatgcagccaaagatagcagaaaaacaagtgaccttggttgtgttccacaaaacattycttttataaagtaagcagagggccagaactggcatatgggccatagtttgctgacccctgatctgtcttattacttatcagtgggaagtatgtatatcttgctttgtcttttttgaagggagtacaattaagggttttcttggaagtgtttcattaatattattttt

SEQ ID NO: 44463 - DNA, 527 bp, Homo sapiens
gaaagaaaacatgaattcctacaaatgtgattctacaaagatacatgttaaaagccttcagaggaaaataaatacaaatatctyctatattctatttgctatgtcatacctgactcaaaaatatatgtaagatacacatttaagagaatatctcatgaaattgattggatgccaattttcaattggcttttttcatttgtacattaaagattcttacagaagatcaagaaaattataaatatgaatacatcaacagaatatatcatcatgatgtaagacaatttgaattgctctggaacttcaaaagcattttgttgaattcacagaaataatttctcaatggtactttatatggtaagtaaaaatatttggctttgatatagcatttttctgtcactactgaaatattatatttttaacttctcattatattctagaactttaatggaatttttatctctagataacaaatggcaattttgtgttctattactctagtctgtgggcttttctttgtctctatagca

SEQ ID NO: 44464 - DNA, 527 bp, Homo sapiens
gaaagaaaacatgaattcctacaaatgtgattctacaaagatacatgttaaaagccttcagaggaaaataaatacaaatatctcctatattctatttgctatgtcatacctgactcaaaaatatatgtaagatacacatttaagagaatatctcatgaaattgattggatgccaattttcaattggcttttttcatttgtacattaaagattcttacagaagatcaagaaaattataaatatgaatacatcaacagaatatatcatcatgatgtaagacaatttgaattgctctggaacttcaaaagcattttgttgaattcacagaaataatttctcaatggtactttatatggtaagtaaaaatatttggctttgatatagcatttttctgtcactactgaaatattwtatttttaacttctcattatattctagaactttaatggaatttttatctctagataacaaatggcaattttgtgttctattactctagtctgtgggcttttctttgtctctatagca

SEQ ID NO: 44465 - DNA, 527 bp, Homo sapiens
gaaagaaaacatgaattcctacaaatgtgattctacaaagatacatgttaaaagccttcagaggaaaataaatacaaatatctcctatattctatttgctatgtcatacctgactcaaaaatatatgtaagatacacatttaagagaatatctcatgaaattgattggatgccaattttcaattggcttttttcatttgtacattaaagattcttacagaagatcaagaaaattataaatatgaatacatcaacagaatatatcatcatgatgtaagacaatttgaattgctctggaacttcaaaagcattttgttgaattcacagaaataatttctcaatggtactttatatggtaagtaaaaatatttggctttgatatagcatttttctgtcactactgaaatattatatttttaacttctcattatattctagaactttaatggaatttttatctctagataacaaatggcaattttgtgttctattastctagtctgtgggcttttctttgtctctatagca

SEQ ID NO: 44466 - DNA, 616 bp, Homo sapiens
ttatatatatagtatatacagatgaatgatatgtaatccatatattcatgtgtaatatatagtattttttactatatattacacatactatataaaaatatatattagtatattatatatactatatataaaaatatagtatatttttatatatattacacatatgaatatatggattacataccattcatctgtatatatcattcatccagagtttttgtgccatattcagctatcttttttcctttcttctttgttttttaatagagacagggtcttcctctgtcacccaggctggagtgcagtggtgcaattgtagctcactgtagtctcatacgcctagactcaagtgatactctcacctcagcctcctgaagtgttaggattacaggcatgaggcaccacamctggccagtttgttttaattcagctattttacagtcaaaaaaatcatcttggtaaaagagatttgctaggctttacaaatgttttgaggtcatggaaacttcatttttttaacaaaaaaaaaccacatgaaattgaaaaagtacttaggataacgtacaggtgaatatatgtgtatatacacaggcaaaacatgtggcatataataaaa

SEQ ID NO: 44467 - DNA, 455 bp, Homo sapiens
tgtatgtgcatgcacactcacacgggcatgcttgcatgtgcacactcccttttgctcacaccatcactgcattcgtgtacgtgtctgaaaccacacctgcacacactccttttctctgcatcatcactgcatcctgtgtgtgtcagcattggtctgctcccaaggttggctctgcacttcctgctacttgctcctggcatgtgtcaccccggctgcggcccggcacccctggtgtttctgcttaggagggagccacataaggaatccactgtcccatcattccagtgctgtaatggtggaatctaaatacccacagcacctacctttatgattcccacactctttccctcycttctttcatccttcctcatcctctgtaggccaactgctaagttgaagctataatcttttttttaagctttcaattaatttttttaaaaaattccataagtttt

SEQ ID NO: 44468 - DNA, 577 bp, Homo sapiens
tgatgacttgtaaaggtgtgaatatgctatacacttgtggtaatttttaaaataaattttaagtcattgaaaaacacartaggccaggcatggtggcccacatctgtaattcctgcactttgggaggccgaggcaggaggattgtttgagctcaggagctcgagaccagcctgggcaacatggcaaaaccttgtctctacaaaaaatacaaaaaattagcccagcatgatgacacatgcctgtagtcccagctactcgggagggtgaggtgggagggtcacctgagcccaggtggtcaaggctgcaatgagccgtgctcgtgccactgcacttcagcctgggtaacagaatgagaccctgtctcaaaaaacaaaaaaagaaaaagaaaaaaataataataaaataaggcttttgccagcttaataaggaaggtttgagacacagaccagcaaaggaaggctcatgtcctctgcatggtagagtctggcttcttcgaaggcagccttttactgctctgtccctgtcacactacaaaggagcagatgttcagcctatgtaaatccataagaaggacaat

SEQ ID NO: 44469 - DNA, 490 bp, Homo sapiens
tgcaacaaaacactaagtgcatactagaaagactttagcttattaaaaatggctccgaattctaaaattgtctaaatgccttctaatgaggccacaggagattgcatttttaagaaacaatcttacgtacatttaaatgtaaattttccagaaatcctaatctttaataattataaccctcagctacaattatcaaagagggatgtatctgtccttagttgccattcttaaatttaaataaatgtaggggcaggaaaccatctatccaaccacttaatatagcagtcaggaaggaaatctttataagcagaacttagttctttgttaaccaaagtgaagytacactcacctaccggtttttatttgatattaaatacttcggataattttagtaaactcttttagaaaggcagactgaaaatacatagaatttttgctctgaatactgtagcaggaaagttagtataataacatttaagaaaatattttt

SEQ ID NO: 44470 - DNA, 588 bp, Homo sapiens
gctcacgcctgtaatcccagcagtttgggaggccaaggcgggtggatcactaggtcaggagttcaagaccagcctggccaagatggtgaaatcccgtctctactaaaaacacaaaaattagccaggcatggtggcaggtgcctgtaatcccagctactcaggaggctgaggcagataactgcttgaacctgcgaagcggaggttgcagtgagcctagattgcrccactgcactccagcctgggttacagagcaagactgtctcaaaaataaaaaattgtacaaggtgagatgtcatattaaaataattacacaaacactgctgtgaagactaagatgtcatgctgtggaggtggaactggagagtttacgaaaagtagaacatggaaaaaaatgcaggactaccagcacagggcaggaaggaagctcagcatgtgtcctggtccccggccagttcccattttcactcttaaccattttaagcaattggatcaccagttttcaagaggctgtttggacaggagtgcaatcctttcccaatcaaggcatttcctgcttaactcagttacgcagatcatcattaaagtctc

SEQ ID NO: 44471 - DNA, 588 bp, Homo sapiens
gctcacgcctgtaatcccagcagtttgggaggccaaggcgggtggatcactaggtcaggagttcaagaccagcctggccaagatggtgaaatcccgtctctactaaaaacacaaaaattagccaggcatggtggcaggtgcctgtaatcccagctactcaggaggctgaggcagataactgcttgaacctgcgaagcggaggttgcagtgagcctagattgcaccactgcactccagcctgggttacagagcaagactgtctcaaaaataaaaaattgtacaaggtgagatgtcatattaaaataattacacaaacactgctgtgaagactaagatgtcatgctgtggaggtggaactggagagtttacgaaaagtagaacatggaaaaaaatgcaggactaccagcacagggcaggaaggaagcycagcatgtgtcctggtccccggccagttcccattttcactcttaaccattttaagcaattggatcaccagttttcaagaggctgtttggacaggagtgcaatcctttcccaatcaaggcatttcctgcttaactcagttacgcagatcatcattaaagtctc

SEQ ID NO: 44472 - DNA, 1795 bp, Homo sapiens
atttacttttatgctaatgaagaaagaattcaatatgtgcctgaagcacagaggtcagaacactcagctggctaataaagtgagcagccttattcacacggtggggaaagagtcataaatactttcttacctgcggtgggaagctaagacaaatcttaaaatttatttaggctttgtttactctttggcccttagtcattatcaaaattgccttatccttcgacaacagaaagccagttaattattgctagtgtttggctgtagctttggtccaagttccttgctttctttctgaactactatgaaaagagcaatcaagtttgagtcagaaaatctgggtttatgtcttggttctgtgtaagcgttcagcctagtggcatttaaagaattaaataatgatacacatgtctgaaaccattctaaaaacaaatgtagttctgttatttttttctctcctgcttccttgttcttctccctttttctcaagtttcaaaacccccagggctaaaatcatgctgtaggtaaatacaagactgagtgattgattgaaaagagtcttttaatgaattgtactttttgaaaacttccccattgctctttaagggtaatttcaagaaagtgtggggaaaaaacagatatctgaatggcaaaacagatccaaaataaggcagatggaaagagatggaaaaaattttatacccatacagtttagctctggggaaaggcaaaatataaaggatgccttttttgcatgataagtaggaacagacccagcactgtcaccaggctttaaatgagttatttttaaatgtatttggcatattttcactttagccaggaaatctagatgaaaggggcatatatattctgtaattgcagataaattgcagatgggaattgtgaataccagaatctgcccaggtctggcatggagtaaggggaagatatgtgtcatctgacctttcctctggggctgctggctgaggctgacacagcgaaagcctccaaagggtagggggcatgacagtccgctcttctggagcttgtgcgattaagagtttctcagtgtcctttaacctgctcgcccttggctctcctagacactttctcttgaagtgctggagacaggacaaggcagggggaggtgtgatggcactacagtgtgagagaaagacaaagctgttctcttccttaggccaggactggtgaacctgggacattcacctatcaaagcattcacggcaaatagccctcattgcagggtttcttttagctcactagatgctgacaccttttatttatacaaatccaatcttatattttaagaaaacatctgaaagatgcctcattttgcccatgtctacaatatttggaagatgtcatgattttggaaaaaccaagactaattgtactttttatttatttctaaatgttgctgattttctactaatttttcatctgtcatatactcagcatcacaacaaatgttgattttyagtatcaacgtttatttttctgcttttacattcaaccgtgttttccaagtaatatgagatattttgtttctttccctttttttttttttttttttttttttttttttgggccaagagtcaatgaacttgaacttcaaaaggttggagtcttgtttaaaaaaaattttgaaatataaagtctaattaacgaaaaaaatccttggatggaaccatactcccaagattaatatagggaataaatagctttgtcacaaagctgcctgtcaccatatccaaagtaggataataaaagtacataa

SEQ ID NO: 44473 - DNA, 1795 bp, Homo sapiens
atttacttttatgctaatgaagaaagaattcaatatgtgcctgaagcacagaggtcagaacactcagctggctaataaagtgagcagccttattcacacggtggggaaagagtcataaatactttcttacctgcggtgggaagctaagacaaatcttaaaatttatttaggctttgtttactctttggcccttagtcattatcaaaattgccttatccttcgacaacagaaagccagttaattattgctagtgtttggctgtagctttggtccaagttccttgctttctttctgaactactatgaaaagagcaatcaagtttgagtcagaaaatctgggtttatgtcttggttctgtgtaagcgttcagcctagtggcatttaaagaattaaataatgatacacatgtctgaaaccattctaaaaacaaatgtagttctgttatttttttctctcctgcttccttgttcttctccctttttctcaagtttcaaaacccccagggctaaaatcatgctgtaggtaaatacaagactgagtgattgattgaaaagagtcttttaatgaattgtactttttgaaaacttccccattgctctttaagggtaatttcaagaaagtgtggggaaaaaacagatatctgaatggcaaaacagatccaaaataaggcagatggaaagagatggaaaaaattttatacccatacagtttagctctggggaaaggcaaaatataaaggatgccttttttgcatgataagtaggaacagacccagcactgtcaccaggctttaaatgagttatttttaaatgtatttggcatattttcactttagccaggaaatctagatgaaaggggcatatatattctgtaattgcagataaattgcagatgggaattgtgaataccagaatctgcccaggtctggcatggagtaaggggaagatatgtgtcatctgacctttcctctggggctgctggctgaggctgacacagcgaaagcctccaaagggtagggggcatgacagtccgctcttctggagcttgtgcgattaagagtttctcagtgtcctttaacctgctcgcccttggctctcctagacactttctcttgaagtgctggagacaggacaaggcagggggaggtgtgatggcactacagtgtgagagaaagacaaagctgttctcttccttaggccaggactggtgaacctgggacattcacctatcaaagcattcacggcaaatagccctcattgcagggtttcttttagctcactagatgctgacaccttttatttatacaaatccaatcttatattttaagaaaacatctgaaagatgcctcattttgcccatgtctacaatatttggaagatgtcatgattttggaaaaaccaagactaattgtactttttatttatttctaaatgttgctgattttctactaatttttcatctgtcatatactcagcatcacaacaaatgttgatttttagtatcaacgtttatttttctgcttttacattcaaccgtgttttccaagtratatgagatattttgtttctttccctttttttttttttttttttttttttttttttgggccaagagtcaatgaacttgaacttcaaaaggttggagtcttgtttaaaaaaaattttgaaatataaagtctaattaacgaaaaaaatccttggatggaaccatactcccaagattaatatagggaataaatagctttgtcacaaagctgcctgtcaccatatccaaagtaggataataaaagtacataa

SEQ ID NO: 44474 - DNA, 1795 bp, Homo sapiens
atttacttttatgctaatgaagaaagaattcaatatgtgcctgaagcacagaggtcagaacactcagctggctaataaagtgagcagccttattcacacggtggggaaagagtcataaatactttcttacctgcggtgggaagctaagacaaatcttaaaatttatttaggctttgtttactctttggcccttagtcattatcaaaattgccttatccttcgacaacagaaagccagttaattattgctagtgtttggctgtagctttggtccaagttccttgctttctttctgaactactatgaaaagagcaatcaagtttgagtcagaaaatctgggtttatgtcttggttctgtgtaagcgttcagcctagtggcatttaaagaattaaataatgatacacatgtctgaaaccattctaaaaacaaatgtagttctgttatttttttctctcctgcttccttgttcttctccctttttctcaagtttcaaaacccccagggctaaaatcatgctgtaggtaaatacaagactgagtgattgattgaaaagagtcttttaatgaattgtactttttgaaaacttccccattgctctttaagggtaatttcaagaaagtgtggggaaaaaacagatatctgaatggcaaaacagatccaaaataaggcagatggaaagagatggaaaaaattttatacccatacagtttagctctggggaaaggcaaaatataaaggatgccttttttgcatgataagtaggaacagacccagcactgtcaccaggctttaaatgagttatttttaaatgtatttggcatattttcactttagccaggaaatctagatgaaaggggcatatatattctgtaattgcagataaattgcagatgggaattgtgaataccagaatctgcccaggtctggcatggagtaaggggaagatatgtgtcatctgacctttcctctggggctgctggctgaggctgacacagcgaaagcctccaaagggtagggggcatgacagtccgctcttctggagcttgtgcgattaagagtttctcagtgtcctttaacctgctcgcccttggctctcctagacactttctcttgaagtgctggagacaggacaaggcagggggaggtgtgatggcactacagtgtgagagaaagacaaagctgttctcttccttaggccaggactggtgaacctgggacattcacctatcaaagcattcacggcaaatagccctcattgcagggtttcttttagctcactagatgctgacaccttttatttatacaaatccaatcttatattttaagaaaacatctgaaagatgcctcattttgcccatgtctacaatatttggaagatgtcatgattttggaaaaaccaagactaattgtactttttatttatttctaaatgttgctgattttctactaatttttcatctgtcatatactcagcatcacaacaaatgttgatttttagtatcaacgtttatttttctgcttttacattcaaccgtgttttccaagtaatatgagatattttgtttctttccctttttttttttttttttttttttttttttttkggccaagagtcaatgaacttgaacttcaaaaggttggagtcttgtttaaaaaaaattttgaaatataaagtctaattaacgaaaaaaatccttggatggaaccatactcccaagattaatatagggaataaatagctttgtcacaaagctgcctgtcaccatatccaaagtaggataataaaagtacataa

SEQ ID NO: 44475 - DNA, 1795 bp, Homo sapiens
atttacttttatgctaatgaagaaagaattcaatatgtgcctgaagcacagaggtcagaacactcagctggctaataaagtgagcagccttattcacacggtggggaaagagtcataaatactttcttacctgcggtgggaagctaagacaaatcttaaaatttatttaggctttgtttactctttggcccttagtcattatcaaaattgccttatccttcgacaacagaaagccagttaattattgctagtgtttggctgtagctttggtccaagttccttgctttctttctgaactactatgaaaagagcaatcaagtttgagtcagaaaatctgggtttatgtcttggttctgtgtaagcgttcagcctagtggcatttaaagaattaaataatgatacacatgtctgaaaccattctaaaaacaaatgtagttctgttatttttttctctcctgcttccttgttcttctccctttttctcaagtttcaaaacccccagggctaaaatcatgctgtaggtaaatacaagactgagtgattgattgaaaagagtcttttaatgaattgtactttttgaaaacttccccattgctctttaagggtaatttcaagaaagtgtggggaaaaaacagatatctgaatggcaaaacagatccaaaataaggcagatggaaagagatggaaaaaattttatacccatacagtttagctctggggaaaggcaaaatataaaggatgccttttttgcatgataagtaggaacagacccagcactgtcaccaggctttaaatgagttatttttaaatgtatttggcatattttcactttagccaggaaatctagatgaaaggggcatatatattctgtaattgcagataaattgcagatgggaattgtgaataccagaatctgcccaggtctggcatggagtaaggggaagatatgtgtcatctgacctttcctctggggctgctggctgaggctgacacagcgaaagcctccaaagggtagggggcatgacagtccgctcttctggagcttgtgcgattaagagtttctcagtgtcctttaacctgctcgcccttggctctcctagacactttctcttgaagtgctggagacaggacaaggcagggggaggtgtgatggcactacagtgtgagagaaagacaaagctgttctcttccttaggccaggactggtgaacctgggacattcacctatcaaagcattcacggcaaatagccctcattgcagggtttcttttagctcactagatgctgacaccttttatttatacaaatccaatcttatattttaagaaaacatctgaaagatgcctcattttgcccatgtctacaatatttggaagatgtcatgattttggaaaaaccaagactaattgtactttttatttatttctaaatgttgctgattttctactaatttttcatctgtcatatactcagcatcacaacaaatgttgatttttagtatcaacgtttatttttctgcttttacattcaaccgtgttttccaagtaatatgagatattttgtttctttccctttttttttttttttttttttttttttttttgggccaagagtcaatgaacttgaacttcaaaaggttggagtcttgtttaraaaaaattttgaaatataaagtctaattaacgaaaaaaatccttggatggaaccatactcccaagattaatatagggaataaatagctttgtcacaaagctgcctgtcaccatatccaaagtaggataataaaagtacataa

SEQ ID NO: 44476 - DNA, 587 bp, Homo sapiens
aagttagcacatctgsttgacatcttatttggttgggttagccccagttcttcacagattcattttttccatactagtgtcagacaaaatggttaagggtcaaggtgccctaggagaaacctacacataccaaagaggtaggtggcgtcggtcgaaaatcctaaagcaagtgactagcttaaacttagttcacagtgagagatgcaaagaggcaaacagaatcaggagagagttacttacattatcagagaacatcataatttggagctagatggatcagatctaacatcttaaattgtagaagaaactcaacctcagatttactgagacattagtgaagaagcaacggtgtagtaaaaagaacacttgaattttacttgctatgtggaataagtggattaaccttgagtaagttatttaaacttgcagagcctcagtcttcccatctccaaaatggggataataatatagacctaaactgaactatttataagtgaaaatgaaaccatgaaaccatgcaagaaaattcttaacattatgcctgatacatggtaggcacttatttatatttatttatttaagtgaca

SEQ ID NO: 44477 - DNA, 587 bp, Homo sapiens
aagttagcacatctggttgacatcttatttggttgggttagccccagttcttcacagattcattttttccatactagtgtcagacaaaatggttaagggtcaaggtgccctaggagaaacctacacataccaaagaggtaggtggcgtcggtcgaaaatcctaaagcaagtgactagcttaaacttagttcacagtgagagatgcaaagaggcaaacagaatcaggagagagttacttacattatcagagaacatcataatttggagctagatggatcagatctaacatcttaaattgtagaagaaactcaacctcagatttactgagacattagtgaagaagcaacggtgtagtaaaaagaacrcttgaattttacttgctatgtggaataagtggattaaccttgagtaagttatttaaacttgcagagcctcagtcttcccatctccaaaatggggataataatatagacctaaactgaactatttataagtgaaaatgaaaccatgaaaccatgcaagaaaattcttaacattatgcctgatacatggtaggcacttatttatatttatttatttaagtgaca

SEQ ID NO: 44478 - DNA, 603 bp, Homo sapiens
aagcttcaataaatatgcaaagcaaaaactaatttaaattggcatttgtgtcgggtggggcaagagagtccgttccaccataaagtgatttaggatatattacctcgggcatctgcattacaaatttacctctcattacagctatgttaacgggaaaaggcagcttctcaacaacatgcaaggcagagtttattagcataaatttgcataataattagctctgcagcaagcaaaggctgtcgtgtctttcaaacaggcaacttccaatgtcaattttctgtgcttcactgcttgtccctgttctgtctaaagctcccggaacccccttggcccttctgctagttggtaaattctcccaccctggtccatttaggctcaagatttcataatctctacccagcatcgcstgggagaaagtgaatgctgacttccacccagggatgtgatggccagaggcgggcccacaattctattgcctatggacgaaggggactggctacaagccctcactccctactttcagagcctatgaagagaggtaacgcaacggtgtggctaattccaaagaaggtgcaactgaaactatttagatgatttttggaa

SEQ ID NO: 44479 - DNA, 603 bp, Homo sapiens
aagcttcaataaatatgcaaagcaaaaactaatttaaattggcatttgtgtcgggtggggcaagagagtccgttccaccataaagtgatttaggatatattacctcgggcatctgcattacaaatttacctctcattacagctatgttaacgggaaaaggcagcttctcaacaacatgcaaggcagagtttattagcataaatttgcataataattagctctgcagcaagcaaaggctgtcgtgtctttcaaacaggcaacttccaatgtcaattttctgtgcttcactgcttgtccctgttctgtctaaagctcccggaacccccttggcccttctgctagttggtaaattctcccaccctggtccatttaggctcaagatttcataatctctacccagcatcgcctgggagaaagtgaatgctgacttccacccagggatgtgatggccagaggcgggcccacaattctattgcctatggacgaaggggactggctacaagccctcactccctactttcagagcctatgaagagaggtaaygcaacggtgtggctaattccaaagaaggtgcaactgaaactatttagatgatttttggaa

SEQ ID NO: 44480 - DNA, 561 bp, Homo sapiens
ctagtgctccttggagcccaatcctaggagtcaggagaagcaggtgggaacatcagccctggcgctccttggtgcccaatcctaggagtcagaagaagcaggtgggacctgctccctcmacctcagctggcctccctccccacccggcactagagcaggggcgagccattgggtatcctcccttgcgctccccaaccatctcctggggtgagctcagggagcctgcagctactgggacaggggcccactggcaccttgctggcccctactgccaggcagggtaccatcagccagctcgctcctcccagggaactgcctcttctccagcagcctggagtcccccacttcccagccccatcgtcctcatcccaagcctgatcccattgtgtcctgtgactccttgtcccttgttgggcacctgcatctgtcctccctcctcagcctcccatgccctctgcatcctgcactcctgctgaacgaatgacccaggcctccacttcccatcagaacatcctctgcaacacgtcccttaccggcaggcgtcactccctgagctcacca

SEQ ID NO: 44481 - DNA, 561 bp, Homo sapiens
ctagtgctccttggagcccaatcctaggagtcaggagaagcaggtgggaacatcagccctggcgctccttggtgcccaatcctaggagtcagaagaagcaggtgggacctgctccctccacctcagctggcctccctccccacccggcactagagcaggggcgagccattgggtatcctcccttgcrctccccaaccatctcctggggtgagctcagggagcctgcagctactgggacaggggcccactggcaccttgctggcccctactgccaggcagggtaccatcagccagctcgctcctcccagggaactgcctcttctccagcagcctggagtcccccacttcccagccccatcgtcctcatcccaagcctgatcccattgtgtcctgtgactccttgtcccttgttgggcacctgcatctgtcctccctcctcagcctcccatgccctctgcatcctgcactcctgctgaacgaatgacccaggcctccacttcccatcagaacatcctctgcaacacgtcccttaccggcaggcgtcactccctgagctcacca

SEQ ID NO: 44482 - DNA, 561 bp, Homo sapiens
ctagtgctccttggagcccaatcctaggagtcaggagaagcaggtgggaacatcagccctggcgctccttggtgcccaatcctaggagtcagaagaagcaggtgggacctgctccctccacctcagctggcctccctccccacccggcactagagcaggggcgagccattgggtatcctcccttgcgctccccaaccatctcctggggtgagctcagggagsctgcagctactgggacaggggcccactggcaccttgctggcccctactgccaggcagggtaccatcagccagctcgctcctcccagggaactgcctcttctccagcagcctggagtcccccacttcccagccccatcgtcctcatcccaagcctgatcccattgtgtcctgtgactccttgtcccttgttgggcacctgcatctgtcctccctcctcagcctcccatgccctctgcatcctgcactcctgctgaacgaatgacccaggcctccacttcccatcagaacatcctctgcaacacgtcccttaccggcaggcgtcactccctgagctcacca

SEQ ID NO: 44483 - DNA, 561 bp, Homo sapiens
ctagtgctccttggagcccaatcctaggagtcaggagaagcaggtgggaacatcagccctggcgctccttggtgcccaatcctaggagtcagaagaagcaggtgggacctgctccctccacctcagctggcctccctccccacccggcactagagcaggggcgagccattgggtatcctcccttgcgctccccaaccatctcctggggtgagctcagggagcctgcagctactgggacaggggcccactggcaccttgctggcccctactgccaggcagggtaccatcagccagctcgctcctcccagggaactgcctcttctccagcagcctggagtcccccacttcccagccccatcgtcctcatcccaagcctgatcccattgtgtcctgtgactccttgtcccttgttgggcacctgcatctgtcctccctcctcagcctcccatgccctctgcatcctgcactcctgctgaacgaatgacccaggcctccacttcccatcagaacrtcctctgcaacacgtcccttaccggcaggcgtcactccctgagctcacca

SEQ ID NO: 44484 - DNA, 533 bp, Homo sapiens
agttttgtaattctctgccaagcccatagattgaatgtcttctattatttagttggccttgtttacttagtggtaatcatttcctgagactgtacagaacattaaattggaatggatacaattctagcctagagtctatagcctagaattagttataagtagctcaagattacatagtgtatgcaattatatgtcacccatgaaaacaaacactacccagttttcaggatctcaaaataaatcacctcaaaggtcctgctttgatctgttttgtgattgggttgcatgggaaagcaaattataggactatgtgaccatgaaaatgcctcttttccctttaactagtgataaataaaaagtgaaaagaaaattacttatcagaaaggagtagcatccttcaatcttcattgrtagctgactgattaatgaaatgatgcatctgtgcaacataacacagtcatacactgcatgacagtttggtctttgatagctgtatatatgatggtggtctcacagattatatttttactgta

SEQ ID NO: 44485 - DNA, 502 bp, Homo sapiens
cctcctgggctccagcaatcctcccacctcagcctccygggctccagcaatcctcccacttcagcctcccaaggagacaggactacaggtgtataccttgcccagctaatatttttattttttgtcgagacagggttttgctatgctgcccaggctagtctcaagtgatcctcctgcctcagcctcccaaagtgttgggattacaggcatgagccactgcacccagcctcaaagttcttctgttttatgtttttcttggctttgtcttgtattatttaaataatgtcttctagctcactttgaaattgtatttctttttggtatacctttcagcatgctttcattgaaacaatgctgttttgtcttttattcccttttatcttttaattcggcacaggacttgaccttgatacttttctgttgttcattttaggggaaagtttgctttggatagctattctaacttcagaatcaacaaccttcttctgttgattttgtgatg

SEQ ID NO: 44486 - DNA, 576 bp, Homo sapiens
gtacaaaatgactttcctagaaatataatttcccagaagaagggtacacaagaaatgtgtggcttaaaattcaccttttagtcattgtataaaagttgaaggataactgctcagttattacacgggagcagctggtggaaaaaccacaggcccagtgatgatgatagatactggacatagaggaatgagatccattttcctaataggycagcaactttatgttctatctgtgggtgcctgtcctgaagcctgtgctcccactgaattcccgaattctgcccatctaatcccaatcacattttcacactggaccgactaagtcttttccagcaatttcattccttttcccctgccctctgcattcctttgtgatctcatttggtctaaatatcatgtgatggaattggaagagccaagtaggctagatttaaattctggctctgcctacacttgaccacctagaaaacctcatagagttcctgtaaagatttaaatacacctaccacacatttatatatagtatttaacatagtgtctagcacaaaagtgttaaagaaataattctctttctctcta

SEQ ID NO: 44487 - DNA, 570 bp, Homo sapiens
caaactgcagctggcattgagaaatctcatttctatttcatagattcttagaactttccatatggccattgacttaatttacaaatgaagaaactgagactcatttctctaggacacacaaagagctggtagcagagcctactattgtgtcacttatcaaaaaatcaatgtgacagtcagtatttcgttagcaagatgggaattttatttgcttcaccagagtgagttatagggattgattttgtcacagcttcaaagtgacattttgacaaaagaaatgtcattactgccctcgaaagaaagctctttaatggagccggtcttggaatggccagagccaggcaaagatctcaaatgtccagaggtgatctacagatccatggaggagaggtggaaggagagccatactgctgmactccagggggcatcaggaaggcaggctttgccctcaaggtgaataaactcagaagaggctactctttgatgtctttgttattacttttcttattccaagccttctaacaccttcctcactggtcttcctggctcacctttcctctcggattcttt

SEQ ID NO: 44488 - DNA, 582 bp, Homo sapiens
cagaccatcagaagatatgtagttatcaatggtttctgattgtaccttaagagctcatgacactggtgtggaggtgacaccctggcacctcaacataaagaatgaggaaaatctatcttaccaaccaatacaagagcaatmgttatctacacctttcctgttcaaactatgggtcactgatgagctgtggcgacttcatcgcagacctatggagccagaatctgcattttaacatgattccccagaaactcatgggcacattaaagtttgagaagtgcctataagatgaatctgatgagctagttctagtgttctgtcaaactactgtggatgacataaatcaagcaattaatagttaaggtgagggctaattacattgtatgcttttgaaatatattttcctttaggtgagcaaatgtaatatgggaaattatcatgagtagggagtgttcagcagggttctctgattctaaagcaagaagggaaacatacagggagggattcgtggtcttaccttatttggtaggtcacccacagatttccacaaggtaatacttacactatgtgctccttgaatggtgc

SEQ ID NO: 44489 - DNA, 582 bp, Homo sapiens
cagaccatcagaagatatgtagttatcaatggtttctgattgtaccttaagagctcatgacactggtgtggaggtgacaccctggcacctcaacataaagaatgaggaaaatctatcttaccaaccaatacaagagcaatcgttatctacacctttcctgttcaaactatgggtcactgatgagctgtggcgacttcatcgcagacctatggagccagaatctgcattttaacatgattccccagaaactcatgggcacattaaagtttgagaagtgcctataagatgaatctgatgagctagttctagtgttctgtcaaactactgtggatgacawaaatcaagcaattaatagttaaggtgagggctaattacattgtatgcttttgaaatatattttcctttaggtgagcaaatgtaatatgggaaattatcatgagtagggagtgttcagcagggttctctgattctaaagcaagaagggaaacatacagggagggattcgtggtcttaccttatttggtaggtcacccacagatttccacaaggtaatacttacactatgtgctccttgaatggtgc

SEQ ID NO: 44490 - DNA, 1894 bp, Homo sapiens
gagttgggtttgattaactctcgtacacaccagcatagtcattgctctagaacaggctgtgccatctctggaatggcctattgccatggatgactaatttaactctctcttctctcatacttgccctcttcaacttcactgttcatatacatgctaagaaataaattacagaactaatctgrccatggcattcttctagcaattcttgaaggtctccttagggtgtctctttggggaaaaaaatcccagttctttaacatggtgtaggaggctctctatcattgtatgcccttcctctctggtattctgaccactctgattcctgttttgcacccgagtagtgctgaaatatttgcagtttcccagaagcaccgcattgcccctacctctaggaaatttcacttgcacatgtggtcctttttatagggaatgctctgcgccttcttgctgggcttacttattccctgcaggatttccctacttctcttcctggcctcccttctcaaagtttcttaatgtgaggctgtctgtatgtaccacagtcactgaacctccatcttgtgtatctgtgtcactcctcttaggaatttctttgatgtcatgcactgtattgtattcatttttgcttagcacttaggaggcactccgtaaatactttgaaatgaatgaatccatgaataaagagttttatatcctgtcagtgaaaactcatagaagagaaatatgaacaaattattatgagcctagacaggagagagaggttactgctggctaggggaattgagttagttaacttttgatgagtgggtgagatttcaaaagacagaaataaggaggaatatagttctaagcagttggaactggcatgagaagaagcacagagccagacaatttggctggtttcaaattatctccaaacttagtggcttaaaaacaatttagaatgatccgtcatggttctgtgagttgatgtggctctgctggggtgtcttacacagttgtactcagaatagctggggctacatcacctgaaagctcagtggagcgggatgtctgagagggcgaacatttcactcatatatcgggggcctcagtattcctccaagtgcttatctgtcataggcttcttacaagggctccaagaggcaggagatggaagatgcctggccagttaaaggttataccaggaaggggcacagcattactttgctctattctatgaatcaaagccaccatagagcccaccaggtttagagagtagaggaatagaccctgcctcttgttggggagggtcaaaatcaaactgtgaaaggacaaaaagatggaggacattgctgcagctgtcttggaaaatacaccctaccatagaccttttcttgggaacaataaggagtttgtgtatgttacagaaagagcagtatgggctcttccacagtacagaaggttgacctgagcccagagagctttgagtgcacaatctcattggagttttactaaaaggtgtaacattctatcagtaggcagttcatggggtttttcatcctgctgaaatattgctgtctttggattccatgaaactttttgttttagtatgagtttgttctacattgacctattctgctgaaattgagtactgtatgatgggatatcaagatgtatttttatcagagtcattcatcttaagacaaaatggaaactgagcaaacttatcaaacaggcgtatcttctgtaatatttgatagatttcactgaaatttagtacacaggtaggggttatagaaataacagattggattgggtgatggttacagtttacttaactgctagggtagctgtctctgagtatcttccaaaaaatggcttgcagtaattgataccctgggagaagctaatg

SEQ ID NO: 44491 - DNA, 1894 bp, Homo sapiens
gagttgggtttgattaactctcgtacacaccagcatagtcattgctctagaacaggctgtgccatctctggaatggcctattgccatggatgactaatttaactctctcttctctcatacttgccctcttcaacttcactgttcatatacatgctaagaaataaattacagaactaatctggccatggcattcttctagcaattcttgaaggtctccttagggtgtctctttggggaaaaaaatcccagttctttaacatggtgtaggaggctctctatcattgtatgcccttcctctctggtattctgaccactctgattcctgttttgcacccgagtagtgctgaaatatttgcagtttcccagaagcaccgcattgcccctacctctaggaaatttcacttgcacatgtggtcctttttatagggaatgctctgcsccttcttgctgggcttacttattccctgcaggatttccctacttctcttcctggcctcccttctcaaagtttcttaatgtgaggctgtctgtatgtaccacagtcactgaacctccatcttgtgtatctgtgtcactcctcttaggaatttctttgatgtcatgcactgtattgtattcatttttgcttagcacttaggaggcactccgtaaatactttgaaatgaatgaatccatgaataaagagttttatatcctgtcagtgaaaactcatagaagagaaatatgaacaaattattatgagcctagacaggagagagaggttactgctggctaggggaattgagttagttaacttttgatgagtgggtgagatttcaaaagacagaaataaggaggaatatagttctaagcagttggaactggcatgagaagaagcacagagccagacaatttggctggtttcaaattatctccaaacttagtggcttaaaaacaatttagaatgatccgtcatggttctgtgagttgatgtggctctgctggggtgtcttacacagttgtactcagaatagctggggctacatcacctgaaagctcagtggagcgggatgtctgagagggcgaacatttcactcatatatcgggggcctcagtattcctccaagtgcttatctgtcataggcttcttacaagggctccaagaggcaggagatggaagatgcctggccagttaaaggttataccaggaaggggcacagcattactttgctctattctatgaatcaaagccaccatagagcccaccaggtttagagagtagaggaatagaccctgcctcttgttggggagggtcaaaatcaaactgtgaaaggacaaaaagatggaggacattgctgcagctgtcttggaaaatacaccctaccatagaccttttcttgggaacaataaggagtttgtgtatgttacagaaagagcagtatgggctcttccacagtacagaaggttgacctgagcccagagagctttgagtgcacaatctcattggagttttactaaaaggtgtaacattctatcagtaggcagttcatggggtttttcatcctgctgaaatattgctgtctttggattccatgaaactttttgttttagtatgagtttgttctacattgacctattctgctgaaattgagtactgtatgatgggatatcaagatgtatttttatcagagtcattcatcttaagacaaaatggaaactgagcaaacttatcaaacaggcgtatcttctgtaatatttgatagatttcactgaaatttagtacacaggtaggggttatagaaataacagattggattgggtgatggttacagtttacttaactgctagggtagctgtctctgagtatcttccaaaaaatggcttgcagtaattgataccctgggagaagctaatg

SEQ ID NO: 44492 - DNA, 1894 bp, Homo sapiens
gagttgggtttgattaactctcgtacacaccagcatagtcattgctctagaacaggctgtgccatctctggaatggcctattgccatggatgactaatttaactctctcttctctcatacttgccctcttcaacttcactgttcatatacatgctaagaaataaattacagaactaatctggccatggcattcttctagcaattcttgaaggtctccttagggtgtctctttggggaaaaaaatcccagttctttaacatggtgtaggaggctctctatcattgtatgcccttcctctctggtattctgaccactctgattcctgttttgcacccgagtagtgctgaaatatttgcagtttcccagaagcaccgcattgcccctacctctaggaaatttcacttgcacatgtggtcctttttatagggaatgctctgcgccttcttgctgggcttacttattccctgcaggatttccctacttctcttcctggcctcccttctcaaagtttcttaatgtgaggctgtctgtatgtaccacagtcactgaacctccatcttgtgtatctgtgtcactcctcttaggaatttctttgatgtcatgcactgtattgtattcatttttgcttagcacttaggaggcactccgtaaatactttgaaatgaatgaatccatgaataaagagttttatatcctgtcagtgaaaactcatagaagagaaatatgaacaaattattatgagcctagacaggagagagaggttactgctggctaggggaattgagttagttaacttttgatgagtgggtgagatttcaaaagacagaaataaggaggaatatagttctaagcagttggaactggcatgagaagaagcacagagccagacaatttggctggtttcaaattatctccaaacttagtggcttaaaaacaatttagaatgatccgtcatggttctgtgagttgatgtggctctgctggggtgtcttacacagttgtactcagaatagctggggctacatcacctgaaagctcagtggagcgggatgtctgagagggcgaacatttcactcatatatcgggggcctcagtattcctccaagtgcttatctgtcataggcttcttacaagggctccaagaggcaggagatggaagatgcctggccagttaaaggttataccaggaaggggcacagcattactttgctctattctatgaatcaaagccaccatagagcccaccaggtttagagagtagaggaatagaccctgcctcttgttggggagggtcaaaatcaaactgtgaaaggacaaaaagatggaggacattgctgcagctgtcttggaaaatacaccctaccatagaccttttcttgggaacaataaggagtttgtgtatgttacagaaagagcagtatgggctcttccacagtacagaaggttgacctgagcccagagagctttgagtgcacaatctcattggagttttactaaaaggtgtaacattctatcagtaggcagttcatggggtttttcatcctgctgaaatattgctgtctttggattccatgaaactttttgttttagtatgagtttgttctacattgacctattctgctgaaattgagtactgtatgatgggatatcaagatgtatttttatcagagtcattcatcttaagacaaaatggaaactgagcaaacttatcaaacaggcgtatcttctgtaatatttgatagatttcactgaaatttagtacacaggtaggggttatagaaataacagattggattgggtgatggttacagtttactkaactgctagggtagctgtctctgagtatcttccaaaaaatggcttgcagtaattgataccctgggagaagctaatg

SEQ ID NO: 44493 - DNA, 1894 bp, Homo sapiens
gagttgggtttgattaactctcgtacacaccagcatagtcattgctctagaacaggctgtgccatctctggaatggcctattgccatggatgactaatttaactctctcttctctcatacttgccctcttcaacttcactgttcatatacatgctaagaaataaattacagaactaatctggccatggcattcttctagcaattcttgaaggtctccttagggtgtctctttggggaaaaaaatcccagttctttaacatggtgtaggaggctctctatcattgtatgcccttcctctctggtattctgaccactctgattcctgttttgcacccgagtagtgctgaaatatttgcagtttcccagaagcaccgcattgcccctacctctaggaaatttcacttgcacatgtggtcctttttatagggaatgctctgcgccttcttgctgggcttacttattccctgcaggatttccctacttctcttcctggcctcccttctcaaagtttcttaatgtgaggctgtctgtatgtaccacagtcactgaacctccatcttgtgtatctgtgtcactcctcttaggaatttctttgatgtcatgcactgtattgtattcatttttgcttagcacttaggaggcactccgtaaatactttgaaatgaatgaatccatgaataaagagttttatatcctgtcagtgaaaactcatagaagagaaatatgaacaaattattatgagcctagacaggagagagaggttactgctggctaggggaattgagttagttaacttttgatgagtgggtgagatttcaaaagacagaaataaggaggaatatagttctaagcagttggaactggcatgagaagaagcacagagccagacaatttggctggtttcaaattatctccaaacttagtggcttaaaaacaatttagaatgatccgtcatggttctgtgagttgatgtggctctgctggggtgtcttacacagttgtactcagaatagctggggctacatcacctgaaagctcagtggagcgggatgtctgagagggcgaacatttcactcatatatcgggggcctcagtattcctccaagtgcttatctgtcataggcttcttacaagggctccaagaggcaggagatggaagatgcctggccagttaaaggttataccaggaaggggcacagcattactttgctctattctatgaatcaaagccaccatagagcccaccaggtttagagagtagaggaatagaccctgcctcttgttggggagggtcaaaatcaaactgtgaaaggacaaaaagatggaggacattgctgcagctgtcttggaaaatacaccctaccatagaccttttcttgggaacaataaggagtttgtgtatgttacagaaagagcagtatgggctcttccacagtacagaaggttgacctgagcccagagagctttgagtgcacaatctcattggagttttactaaaaggtgtaacattctatcagtaggcagttcatggggtttttcatcctgctgaaatattgctgtctttggattccatgaaactttttgttttagtatgagtttgttctacattgacctattctgctgaaattgagtactgtatgatgggatatcaagatgtatttttatcagagtcattcatcttaagacaaaatggaaactgagcaaacttatcaaacaggcgtatcttctgtaatatttgatagatttcactgaaatttagtacacaggtaggggttatagaaataacagattggattgggtgatggttacagtttacttaactgctaggrtagctgtctctgagtatcttccaaaaaatggcttgcagtaattgataccctgggagaagctaatg

SEQ ID NO: 44494 - DNA, 597 bp, Homo sapiens
aactctatccatatttactctcagggcagactgcagccctcatcttggctaatcatttgaaataaagtactgtttgtcacaagagtacgtatttcacaagaaattatgtgtttggttctcttcagatttgtctgtcctttcctagtttctggaaaaggaacttcaactcatgttagagggattcctttgtataccgrtgattatgataaatgaaatgaaaaatttcaaaaagtcatcttgatttctgctttctcacttgaataggcagcttaaatctatttaagcacagaatgggaaaaaaaactcacctaagaacctatgactaaggatattgaaagataactaatatgattccctcacaaaagtaggattagaaatgaactattaaaaatttctgaatcatatgccccaaaaggggcaacatttcttctgtacagacagctcttttttttttttttttttagagcaggagtttgtgaagtaagtccttaaaatcacatctgttcaccttatgtgatgggaaggagaggcaacttctgaagcagggtaattgaaatggaaatacattcaaataaatggactctggagttccacttt

SEQ ID NO: 44495 - DNA, 583 bp, Homo sapiens
atctgagacctgggaggccctccctgctccctccgcaccctgccctgccacatcaccaggggaaggtacatctcgccaggatgattctgtcctggcccctgactcacctgaccacagccctgcacctctccatgaaccatgggaaataatttaagagtttgggtctagggagtgccgatcaatccgtccttggtgggctgcagaacacgtgaggtagggccagcagctggcagggcagaggtcagacaggatctgggtggggctcacagacaggctctgtcrcagagacccctgcccccacaaacacatccctgtcccagttgagaaccaggaggatactacaaagtctaaggtgggaggattgcttgcttaaggccaggagtttgagaccagcctgggcaacatagcaagaccccatctctatgaaaattagaatattagctgggcatggtggctcgcacctctacaggtactctgcacctcttcccagctactctggaggccgaggtgggaagatggtttgagccaaggagttcgagactgcagtaagctatgattgtgctactgcactccagtttaggag

SEQ ID NO: 44496 - DNA, 677 bp, Homo sapiens
tgggattacaggcgcccgccaccacacccggctagttttttgtattttagtagaaacrgggtttcaccgtgttgcccaggctggtctcgaactcctgagctcaggcaatcagcccaccttggcccccaaaagtgctaggattacaggtgtgacccaccacaccaggcctaggtgatcctcctaccttagcctcccgagtagctgggattacaggcgcccaccaccacgcccaggtaattttttgtattttttgtagagatggggtttatgccatgttgcccaagcgggtcttctgagctcactctatctgcccacctcggcctcccaaagtgctgggattacaggtgtgagccactgcgcctggcccttcttcattatttataaaaaacactagtagcctcaaaaaaatgttaatgtcccagcctctgaagcttttgatatgtttacttccattcatcagagattgttggaccacatccatattagaagcaatctagtttatgcgtccaggcaatacccataccacacattctaggctaactgtgacctataaagaaaactcaggtgtcggatctgacaccttgggaaccttctccatgtaggtctttggcaacagtggaaatggcagcgtccatggggattttgttccattgattattctaggctagggaaccttg

SEQ ID NO: 44497 - DNA, 498 bp, Homo sapiens
attggccccttgggtgggagggcttctccagggcaaggtgaggggatgcccagtgctgggagtgctgcctggagaggagtcagttccagtggcgggggccctgggttttggctgaggactgcgtgttggcagctgctctgcctctcacagcccttcccagctgcacacgtcgtgagcgtcagtgtgcaatcacaggcctgcctcctttgggccactttgtgaccatgttttttgcttgtggggcagggtaatttcaggatctaaattggtgcagttggatgttctcagccccgagaggcagctcttcccgttstaggctttttgttttgttttgtagaaatggagtcctacgacgttgcccaggctggtctcaaactcctgggctcaagtgatcctcccaccttggcctcccaatgtgctgggattacaggcatgagccactgtgccgtgctgattttcttgatactattttttgtagagctggggtcttgctgtgtt

SEQ ID NO: 44498 - DNA, 498 bp, Homo sapiens
attggccccttgggtgggagggcttctccagggcaaggtgaggggatgcccagtgctgggagtgctgcctggagaggagtcagttccagtggcgggggccctgggttttggctgaggactgcgtgttggcagctgctctgcctctcacagcccttcccagctgcacacgtcgtgagcgtcagtgtgcaatcacaggcctgcctcctttgggccactttgtgaccatgttttttgcttgtggggcagggtaatttcaggatctaaattggtgcagttggatgttctcagccccgagaggcagctcttcccgttgtaggctttttgttttgttttgtagaaatggagtcctacgaygttgcccaggctggtctcaaactcctgggctcaagtgatcctcccaccttggcctcccaatgtgctgggattacaggcatgagccactgtgccgtgctgattttcttgatactattttttgtagagctggggtcttgctgtgtt

SEQ ID NO: 44499 - DNA, 546 bp, Homo sapiens
tgcagatattcacagcatatgaaagtatattaagagttctgataagacttatggtaaataaactatttacaattacatagctcagtgttcctcaaaatgatttaaacatagatggtttttccctactgggtcacttatatgcatcctactgtaaatgtgagagtagatatttatctgtcattagttcctaagttgttctgtggactgcagtaagcttttgaaaaaagccattacttgccagctgtcttggtttgtgctgctataacaaaatacccgagactaagtaacttgtaaagaacagaaatttgttttcatacagttatgaaggctgggagtccaagatcaaggtgctggcaggttgtgtgatgaaggccgctctctgcttctaagatggtgcctygttgctgcatcttctggaggggaggaacaccaggtcccaacagggcagcaggtggaaggacaagcaagctggaggtgctgtgaagccttctttataaaggctttaatctcattcatgagggaggagccctcatggcctaatcatct

SEQ ID NO: 44500 - DNA, 603 bp, Homo sapiens
aactattgcaatagaaaaaattgtccagtatagactgaactcagctttaatttgtatagaagaaaaagtctccagtgtagactgaactcagcttcaatttgtatagaaattagtgagtrtttaaattaagaatgagggaatagggagaggagagagttagggatcagttgaatcagggaagtgaaaaattacaaagggtcacccagagtaaatggtattaagctagctctgtctgccagcaagcaattatcaaagttagtattctatcctcacacagagacgggaagacagaggccctatcctcaggtgttggctgaaatcaactgtaaaattttggggccagacttgagtcttctcaggcaggcacgttaacgggggcttgaattatgttagggatgtggccttgagctgttagaacctatgttaatgttttttcaagtctttatagcaaacgtggaggcctagtcaagaaaagggctcagaagagcctggcttacgtttggtcaaggagagaaatttctcgcttaagagtacatatcataactagccagtgacaaatctactctcgaattaagtattaaggcactttccaaaatatatgca

SEQ ID NO: 44501 - DNA, 603 bp, Homo sapiens
aactattgcaatagaaaaaattgtccagtatagactgaactcagctttaatttgtatagaagaaaaagtctccagtgtagactgaactcagcttcaatttgtatagaaattagtgagtatttaaattaagaatgagggaatagggagaggagagagttagggatcagttgaatcagggaagtgaaaaattacaaagggtcacccagagtaaatggtattaagctagctctgtctgccagcaagcaattatcaaagttagtattctatcctcacacagagacgggaagacagaggccctatcctcaggtgttggctgaaatcaactgtaaaattttggggccagacttgagtcttctcaggcaggcacgttaacgggggcttgaattatgttagggatgtgrccttgagctgttagaacctatgttaatgttttttcaagtctttatagcaaacgtggaggcctagtcaagaaaagggctcagaagagcctggcttacgtttggtcaaggagagaaatttctcgcttaagagtacatatcataactagccagtgacaaatctactctcgaattaagtattaaggcactttccaaaatatatgca

SEQ ID NO: 44502 - DNA, 592 bp, Homo sapiens
cttgaaaaattgacctggtcaacttgagaaatagttcagtaaaattagagtttgaagaaaaagaaaaatctcccatgcttttaaacataaagagtaagtcacttataaagcaagaaaataatatttgacatcaaacatttctgtagcaaaatcgagtttcagcaaagagtgaagcactggttttttttttaaagatattcaagaaaaaaamaaagtatagtaccaggattttatacccaaccaaactatcacttcagtggtcaggtgtacacatacacatgactgttgaacatgtacctttcaaggaaaattttatgcatgagtattcttgaaaaatttacaaatgacttcccaataaaaagatgattggaaaattttacaaaagactggtggtcttttaattattaattacatttaaaaataaatgtattagtgaacagtgttggcataaggatgagaagctattatttttatgctgttgacttcttaatgttaaattattaagataaacctctaaaagaatgtctgtatatctttcagatgtatgaaaatgaagaggttttttagatatatatgaattaatggagcatgt

SEQ ID NO: 44503 - DNA, 592 bp, Homo sapiens
cttgaaaaattgacctggtcaacttgagaaatagttcagtaaaattagagtttgaagaaaaagaaaaatctcccatgcttttaaacataaagagtaagtcacttataaagcaagaaaataatatttgacatcaaacatttctgtagcaaaatcgagtttcagcaaagagtgaagcactggttttttttttaaagatattcaagaaaaaaacaaagtatagtaccaggattttatacccaaccaaactatcacttcagtggtcaggtgtacacatacacatgactgttgaacatgtacctttcaaggaaaattttatgcatgagtattcttgaaaaatttacaaatgacttcmcaataaaaagatgattggaaaattttacaaaagactggtggtcttttaattattaattacatttaaaaataaatgtattagtgaacagtgttggcataaggatgagaagctattatttttatgctgttgacttcttaatgttaaattattaagataaacctctaaaagaatgtctgtatatctttcagatgtatgaaaatgaagaggttttttagatatatatgaattaatggagcatgt

SEQ ID NO: 44504 - DNA, 588 bp, Homo sapiens
taatgcaaccgcaagtgagctacctgaaaacgaagagctgacaaattgttttactctcagtacaaactctttatcaaccttattaagagaaataatctactaagatcttacaagaagttgatcaataaaaagaaaataattatttcctgaaagaaacacaggctgtggaaagagcattttgaaaatggatgttttcattattatataattttgttgctgaaagtctacaaacttaaaaacatggaaaccaaattttctgacttgataaaaagtcttcaaaaggctttccttaggttctgaagcattgtttaaagctaattaacacctgattagtttacaagaaaaactgatgaacmctggggaagattaagatttgcttgaattttaacaaaaactagacactggatctgcatgtgcctttttttttcttttttctttctttctttttttttttttttttttttgagagagaaagagagtcttgctgtgttgcccaggatgaagtatagtggtgcaatcttggctcactgcaacctctgcctcccaggttcaagcaattcttatgcctcagcctcttgagtggctggg

SEQ ID NO: 44505 - DNA, 588 bp, Homo sapiens
taatgcaaccgcaagtgagctacctgaaaacgaagagctgacaaattgttttactctcagtacaaactctttatcaaccttattaagagaaataatctactaagatcttacaagaagttgatcaataaaaagaaaataattatttcctgaaagaaacacaggctgtggaaagagcattttgaaaatggatgttttcattattatataattttgttgctgaaagtctacaaacttaaaaacatggaaaccaaattttctgacttgataaaaagtcttcaaaaggctttccttaggttctgaagcattgtttaaagctaattaacacctgattagtttacaagaaaaactgatgaacactggggaagattaagatttgcttgaatttyaacaaaaactagacactggatctgcatgtgcctttttttttcttttttctttctttctttttttttttttttttttttgagagagaaagagagtcttgctgtgttgcccaggatgaagtatagtggtgcaatcttggctcactgcaacctctgcctcccaggttcaagcaattcttatgcctcagcctcttgagtggctggg

SEQ ID NO: 44506 - DNA, 588 bp, Homo sapiens
taatgcaaccgcaagtgagctacctgaaaacgaagagctgacaaattgttttactctcagtacaaactctttatcaaccttattaagagaaataatctactaagatcttacaagaagttgatcaataaaaagaaaataattatttcctgaaagaaacacaggctgtggaaagagcattttgaaaatggatgttttcattattatataattttgttgctgaaagtctacaaacttaaaaacatggaaaccaaattttctgacttgataaaaagtcttcaaaaggctttccttaggttctgaagcattgtttaaagctaattaacacctgattagtttacaagaaaaactgatgaacactggggaagattaagatttgcttgaattttaacaaaaactagacactggatctgcatgtgcctttttttttcttttttctttctttytttttttttttttttttttttgagagagaaagagagtcttgctgtgttgcccaggatgaagtatagtggtgcaatcttggctcactgcaacctctgcctcccaggttcaagcaattcttatgcctcagcctcttgagtggctggg

SEQ ID NO: 44507 - DNA, 2867 bp, Homo sapiens
atatacagttattgtttgttaattaaaaaataaaattttaaaaaggatatacttaggggttaaaattaggcagcagtcactgatggatagagtaagggatgtgagagtgagggaatggttaatgatgccacctagatttctgatgtgaccatgtctgatggagatattggctgagtgagtagcgtgttgagagagccctaatgtggagttggaagataatgaaactggattagacacatcctagatttttcagggaagaaccgtttccattttttttctctcttgtaaccagaaatgccagaaattcctatattataggaccaaaactgagctcacagactaccttttgaaccttgtactcagaacgacttaggcttctaagtcctgattcttcgtccagaaaacatcattactgaagaccatgcagagaaagtaaccctatagcttagaaaagggagaacatgagaaagcagccaagtgtcactactccatactttctcacaagtctgcagaaattgcttggaaaaataaatgtgcatttcataatgcagaaacctgatttctttttaatcattggctttttgggtgtttgctgatttttttcaggcttgttaatttgtgctgtgtctacccgtcatttgtgcaaattagcgtggcttaactataaatgaaaatgtcaaagttattacattatttaaaattgaagaataattagactggaggaaaacaggctaaaagaatgctgcaggatatgttaaaggtaggaaaggacagggaaacacaacaaaacaaaacaaaacaaaaaaacgaagaagggataagcatgagaggatggggaaccactcccgtaacctccagggacacgggcatgtgattactacattgtgtaactctaataatacggcgcatgcccagaagcctcacatacaccactaagtataggttcaaatgattttcttccaggcctttaaaaaaggtggtgggggaatattttacaaggttgtttgcattctgcagtagaattgtgcctcggtatgttttgttctcagcgtccatcaaagacacctgcttgtctgaacctatcagaaaactgccaaaacgaaacaaattaagaaaagtaaaagggaagcccaggtgtagggtacatgaggtgggaatggggattaattcttccagctcttagggttgttgactctgttagatcacaaatgcagtagggaaaagcgactgttacttctagggacttatacccacccaggtgataaaaggcctgtgttcatggttataacttgtaacattatctgtgggggcaatagcaaataaattccataaatgtctgtcaggagggaattgctaaattatggtccatccccaggatgagggacacccagggacatcactgcagagctgttaaaaaagaacgtacacctgtaggtactggtacagaaatatctccaatatatattaartgaccaagtgggtaaatagaatagtatttggatgaagtgggagaaaaagaaatatacatacaaaatacttatgtgattgtattgtgtacagaatatttttggaatagagagacaagaaactggcaacaatggatgcctttgggaagggaaactggtagttgccaggggctgtggaatttattcttgcttacctctttggtgctgtttaattatgtgtatatgagtataatatgcatttaaacgtagctctagaatggcaaagagcaaagtgttactacctaaaggggcaacaagccctgctacaattgatcagatactgaattttgataatctctcttttaaatccttgcttttaacaacagtgaaaatcagtaagattgctgattgattttagaaacccagtgataagaaactgttgattttgcccagatctacccagcctttacttccagcttctgactcctgactttcgattccgtatggcttgtctcctgtaatgctaaattattatctccacctccgtggatcactgtgttatcgaaaatacttttttagttgcatgccatataagacttagcccacactggctcaagcaaaaagagactttatttgataatataactgaataggtcaggtgtagccctggctagacaaccccatctttgcatttctcccctctgctctcttctgaatttaccccatttctaataggaccccctttcctggtggtgacgagctccagcaactccatccttgtcaccttgctgctccaaggggtgcagagaaggtctgagcctcttgtcctgactcttcaggggtagccttgggtcatgtgcttctaaggaccatatttcttcttaatgtccttagttaaggtggccaatcttgagggttgcctttcatttatctgtatcttctgtttcctgtttgcaacatagttaaaatggataaatccctgagctcctataggcctgggaacactaagatgaataaaacatgtctgcagatctcaggaaactcacagcatggtagacaaggcactggtgctagtatggaagtcctttttgatgtgaaatattcgacccaaggaattggaagggagggctccttcatttctacttgggaaaattagtggaagactcctgagggaggctaccctgcagtgaaggctcctgggaggagtaggacttcttcagtagacatgttagaggattgggtgaagccattccagtctgagaagagcatgagcagacaatttgaattatcagtaagttgtatttatctagcctcacatggcctttgcactgccctcttctcattttgtagccaccatccacgaccagacctttcaaggaaatcactcagtgctcagaatagtagagcatttgattccttcat

SEQ ID NO: 44508 - DNA, 577 bp, Homo sapiens
aagcgccaccaccacgcccagataattttttgtatttttagtagagacagggtttcaccatgttggccaggctggtcttgaactcctgacctcaagtgacccacctgccttggcctcccgatgtgtagggatttcaggcacgagctaccgcaccaggccaaattttctttttaaatatctgattttcatttaccttgcccactgtccaaaaaatgaccttcttgattctcttctactcttcttgcttctccctcccccactccccaccagctgattacaccaccccagtgtgtccttctgctgccccctccctcaaagatccaatatttggcgkaggctagtctcttgcataggcacggaaatataattaaaagtatgctgaggccaccagtgattatcgagatgaccttagacaggcagtgaacttctcagtactggagtttcatcgtctggaaactgcatgataatagtacccatctctcgggggtgtaaggagtaaatgggacaatagagtaagaagatagttctggcacctagtaaatgttcgatagaatgctaactgagctgtggttgctga

SEQ ID NO: 44509 - DNA, 577 bp, Homo sapiens
aagcgccaccaccacgcccagataattttttgtatttttagtagagacagggtttcaccatgttggccaggctggtcttgaactcctgacctcaagtgacccacctgccttggcctcccgatgtgtagggatttcaggcacgagctaccgcaccaggccaaattttctttttaaatatctgattttcatttaccttgcccactgtccaaaaaatgaccttcttgattctcttctactcttcttgcttctccctcccccactccccaccagctgattacaccaccccagtgtgtccttctgctgccccctccctcaaagatccaatatttggcggaggctagtctcttgcataggcacggaaatataattaaaagtatgctgaggccaccagtgattatcgagatgaccttagacaggcagtgaacttctcagtactggagtttcatcgtctggaaactgcatgataatagtacccatctctcgggggtgtaaggagtaaatgggacratagagtaagaagatagttctggcacctagtaaatgttcgatagaatgctaactgagctgtggttgctga

SEQ ID NO: 44510 - DNA, 578 bp, Homo sapiens
cttgagccagacaccctgaaggcacctcccaggcttttttgttccctcattctccaccccgagtggagacyaagtccatctgtgcttctccctcagtgtttcccaaatcctcccgctcctccctctgctctctgtgatggttttagtccagacccctggtccccatcagacggtgatgccactctctcctcactgtgtcgcctggtcccattccacgtatgggccacacagtggccagagcatctgtcctagatgcttgagggggccaggcgtggtggctcatacctgtaatcccagcactgcgggaggctgaggcaggaggatcccttgagcacaggagttggagatcagcctgggcaacatagtgagacctggactctacaaaaagattaacaaaattaaccgggcatggtggcatgtgtctgtaatcctggctactctggaggctgagggaggagaatcagttgagcctgggaggcagaggctgcagtgagccaagatggcaccactgcactccagcctgggccacagagtgaaaccctatctcaaaaaaagaaaaaaaaaaaggaggggggtca

SEQ ID NO: 44511 - DNA, 578 bp, Homo sapiens
cttgagccagacaccctgaaggcacctcccaggcttttttgttccctcattctccaccccgagtggagactaagtccatctgtgcttctccctcagtgtttcccaaatcctcccgctcctccctctgctctctgtgatggttttagtccagacccctggtccccatcagacrgtgatgccactctctcctcactgtgtcgcctggtcccattccacgtatgggccacacagtggccagagcatctgtcctagatgcttgagggggccaggcgtggtggctcatacctgtaatcccagcactgcgggaggctgaggcaggaggatcccttgagcacaggagttggagatcagcctgggcaacatagtgagacctggactctacaaaaagattaacaaaattaaccgggcatggtggcatgtgtctgtaatcctggctactctggaggctgagggaggagaatcagttgagcctgggaggcagaggctgcagtgagccaagatggcaccactgcactccagcctgggccacagagtgaaaccctatctcaaaaaaagaaaaaaaaaaaggaggggggtca

SEQ ID NO: 44512 - DNA, 578 bp, Homo sapiens
cttgagccagacaccctgaaggcacctcccaggcttttttgttccctcattctccaccccgagtggagactaagtccatctgtgcttctccctcagtgtttcccaaatcctcccgctcctccctctgctctctgtgatggttttagtccagacccctggtccccatcagacggtgatgccactctctcctcactgtgtcgcctggtcccattccacgtatgggccacacagtggccagagcatctgtcctagatgcttgagggggccaggcgtggtggctcatacctgtaatcccagcactgygggaggctgaggcaggaggatcccttgagcacaggagttggagatcagcctgggcaacatagtgagacctggactctacaaaaagattaacaaaattaaccgggcatggtggcatgtgtctgtaatcctggctactctggaggctgagggaggagaatcagttgagcctgggaggcagaggctgcagtgagccaagatggcaccactgcactccagcctgggccacagagtgaaaccctatctcaaaaaaagaaaaaaaaaaaggaggggggtca

SEQ ID NO: 44513 - DNA, 578 bp, Homo sapiens
cttgagccagacaccctgaaggcacctcccaggcttttttgttccctcattctccaccccgagtggagactaagtccatctgtgcttctccctcagtgtttcccaaatcctcccgctcctccctctgctctctgtgatggttttagtccagacccctggtccccatcagacggtgatgccactctctcctcactgtgtcgcctggtcccattccacgtatgggccacacagtggccagagcatctgtcctagatgcttgagggggccaggcgtggtggctcatacctgtaatcccagcactgcgggaggctgaggcrggaggatcccttgagcacaggagttggagatcagcctgggcaacatagtgagacctggactctacaaaaagattaacaaaattaaccgggcatggtggcatgtgtctgtaatcctggctactctggaggctgagggaggagaatcagttgagcctgggaggcagaggctgcagtgagccaagatggcaccactgcactccagcctgggccacagagtgaaaccctatctcaaaaaaagaaaaaaaaaaaggaggggggtca

SEQ ID NO: 44514 - DNA, 601 bp, Homo sapiens
tctctgtgcctgtatatgtacacatmctgttggataaaaacgtcctcagtagagatccctctaaagttaaagacattactgaagcatttttaaaaacggactcattttttgagccacacatttcaattttagttattatagattgtctcagtgttgtaaaatagtgttacaaaacataactcattgtttcgtttttccatttttcttagctctgcaatgccttctttcatcttctttattttataatttatcttagaggtattgttttacggaattcatattcttaatgagcttttctctctcggcaaatgtttcctgcaaagggtcaggtagtaaatattttaggctttgtgggctaaaagaacttggtcacaactgttcagctctgctattacagcgtgaaagcagccagagacaatacgtaaatgaatgaatgtagttgtgtttcaataaatgtttatttacaaaaacaggaagtgggccacatttggcccacaggctgtcatttgctgacccctgttacaaaagataagataattactgtttactcttcctttcatctcactcttttccaggttttgcttatattattttcactttg

SEQ ID NO: 44515 - DNA, 560 bp, Homo sapiens
ggtggtgamgcttactacacacctaggctatgtggtacagcctattgctcctaggatacaaacctgtacggtatcctactctactgaatactgtaggtgattgtaacacaatggtaagtatttgtgtatctaaacatagaaaaggtacagtaaaagtatggtattataattttatgagaccactctcatatatgcagtcccacactgaccaaaatgtcatgatgtgctacatgactgtatacgcatctttataccaatgccgtcatagaacataatttttaatttatgacttcataattatcacttataattgtttcatggaagaaggggcccacaaagactagaatgcttagagccctcaaaagtcatagtatgaccctggagaaatgaatatttgaaggaagaaaagggcttccagtggcctgggctttggggaagaaaaggaacaaagttggggatgtgaagaaagtgttttattattgagcttcctctgccaaaggcattcattcatttaatactcactgagggcctgccctgtgccaggcatctagagcagagaa

SEQ ID NO: 44516 - DNA, 560 bp, Homo sapiens
ggtggtgacgcttactacacacctaggctatgtggtacagcctattgctcctaggatacaaacctgtacggtatcctactctactgaatactgtaggtgattgtaacacaatggtaagtatttgtgtatctaaacatagaaaaggtacagtaaaagtatggtattataattttatgagaccactctcatatatgcagtcccacactgaccaaaatgtcatgatgtgctacatgactgtatacgcatctttataccaatgccgtcatagaacataatttttaatttatgacttcataattatcacttataattgtttcatggaagaaggggcccacaaagactagaatgcttagagccctcaaaagtcrtagtatgaccctggagaaatgaatatttgaaggaagaaaagggcttccagtggcctgggctttggggaagaaaaggaacaaagttggggatgtgaagaaagtgttttattattgagcttcctctgccaaaggcattcattcatttaatactcactgagggcctgccctgtgccaggcatctagagcagagaa

SEQ ID NO: 44517 - DNA, 567 bp, Homo sapiens
tccaatttggggctgctataactagtgctgctttgaatagtcttgtgatgaatcttttggtgaacatatgttcacacttatgttgacctaggagtggaaccgctgggtcatgaggtgtgcatatatgaatggaactctcttattttcaggttaagttctatttattacaagtagaacatggcttcccagggttcagtctctatctaggagatagaaagacctcaggaagatgaacagctgcctctggggttggagatgctgatgaacagaggcgtgtgcagacagtgatatgtgtaggctcagagacttccaggtgataaakttaggcatgaagctcagatctgttgctttccctctcccgtctgctcttctgtttgactttagcagtaatgttgtgtccactttgcttgagggccagtgttccccccaccaacagtcagcagaccacctacagaggaaatatgagtcccactttgagttccacagcagtcctcctgaaacaggctttttgaggaagaggttgcgatttttaacacagtgacgtttgagaatcacttctctagcctg

SEQ ID NO: 44518 - DNA, 1219 bp, Homo sapiens
tcgcaaggacaaaaaaacaaacactgcatgttctcactcataggtaggaattgaacaatgagaacactggagacacaggaaggggaacatcacacactggggcctgtcgtggggtggggggaggtggggggatagcattaggagatatacctaatgtaaatgacgagttaatgggtggagcataccaacatggcacatgtatacayatgtaacaaacctgcacattgtgcacatgtaccctagaacttaaagtataatttaaaaaaaaaatgagaaaaaaaaaaaaaaagatgctacttttcccctgtgttatcttcttatgcttttctaatttcagagattttgacaggatgctccagatggccgcctatggggaaaacctgactttctcagtaaaatcttataaaccccacagcatcaaggtccacaatgagggagagggacaggagggtggggctctatgtgaaaatcaaccatgagctagagaggaaggcagtgtgtccaagagtccaaaacaggactggagtggtgaaagcagtaagtaattctgaatgggatgaagaacaaggaaacaaaggtagtatttatggaggtctctccatgtaatcttttcattgctatcttgaagggacctaagagtttaaagcaagcaggtttcctcaggggaataaagaaagggggagcagtgactcagtacagcatcccctgagtttggtagttacaaagccgtcttgcaaggccacaatgtctgggttctaagagtggtaaggagaacaaatggctggaaacatgaaaggtggagcacggaaaggaatgaggaattaagtggaagagagatgggaagtcagtccccaccccatgtctccaggtactgcagaggaaacatatgagggatgtatatatggttttgttttgttttctgttttttgtggggtttttttgttttgttttgttttttaaatacggagtcttgctctgtcgccaggctggagtgcaacggtgtgatctcaaatcactgcaacttccacctcccggcttcaagcgattctcccgcctcagcctcccaagtagctgggactacgggcacacaccaccatgcccagctaatttttgtatttttagtagagacagggtttcaccatgttggccaggatggtctcgatctcttgaactcgtgatctgcccgcctcagcctcccacagtgttgggattacaggca

SEQ ID NO: 44519 - DNA, 1219 bp, Homo sapiens
tcgcaaggacaaaaaaacaaacactgcatgttctcactcataggtaggaattgaacaatgagaacactggagacacaggaaggggaacatcacacactggggcctgtcgtggggtggggggaggtggggggatagcattaggagatatacctaatgtaaatgacgagttaatgggtggagcataccaacatggcacatgtatacatatgtaacaaacctgcacattgtgcacatgtaccctagaacttaaagtataatttaaaaaaaaaatgagaaaaaaaaaaaaaaagatgctacttttcccctgtgttatcttcttatgcttttctaatttcagagattttgacaggatgctccagatggcygcctatggggaaaacctgactttctcagtaaaatcttataaaccccacagcatcaaggtccacaatgagggagagggacaggagggtggggctctatgtgaaaatcaaccatgagctagagaggaaggcagtgtgtccaagagtccaaaacaggactggagtggtgaaagcagtaagtaattctgaatgggatgaagaacaaggaaacaaaggtagtatttatggaggtctctccatgtaatcttttcattgctatcttgaagggacctaagagtttaaagcaagcaggtttcctcaggggaataaagaaagggggagcagtgactcagtacagcatcccctgagtttggtagttacaaagccgtcttgcaaggccacaatgtctgggttctaagagtggtaaggagaacaaatggctggaaacatgaaaggtggagcacggaaaggaatgaggaattaagtggaagagagatgggaagtcagtccccaccccatgtctccaggtactgcagaggaaacatatgagggatgtatatatggttttgttttgttttctgttttttgtggggtttttttgttttgttttgttttttaaatacggagtcttgctctgtcgccaggctggagtgcaacggtgtgatctcaaatcactgcaacttccacctcccggcttcaagcgattctcccgcctcagcctcccaagtagctgggactacgggcacacaccaccatgcccagctaatttttgtatttttagtagagacagggtttcaccatgttggccaggatggtctcgatctcttgaactcgtgatctgcccgcctcagcctcccacagtgttgggattacaggca

SEQ ID NO: 44520 - DNA, 581 bp, Homo sapiens
cgcctggctaattttttgtatttttagtagagacaaggttttgccatgttggccaggctgatctcgaactcctggcctcaagtgatccacctgccttggccacccagagtacagaaattgcatgtgtgagccactgtgcctgcccctcaaacactatttataaaagaacattttggccacatgcgcargtcacacctgtaatcctaacattttgggaggcccaggtgggagaattacttgagcccaggagtttgaggctgcactgaagtatgattgtgccattgcactccagtctggctgacagagtgagaccctgtctcttgaaaaattattggaattcaataaaattaagaatttcttttcatcaagaaaagagattaagagagtgaaatggcaagttgtagacagaagatattctcaactttatctggaatataaggaggtaaattcttttaaaaatttaaataacgagtttgaaaaatgggcaagggacatgaacagttatttcacaaagagaaagagagagagtaaaaagaaaatatctcaatggccagtaagaatataaaaaagtgggctgggca

SEQ ID NO: 44521 - DNA, 581 bp, Homo sapiens
cgcctggctaattttttgtatttttagtagagacaaggttttgccatgttggccaggctgatctcgaactcctggcctcaagtgatccacctgccttggccacccagagtacagaaattgcatgtgtgagccactgtgcctgcccctcaaacactatttataaaagaacattttggccacatgcgcaggtcacacctgtaatcctaacattttgggaggcccaggtgggagaattacttgagcccaggagtttgaggctgcactgaagtatgattgtgccattgcactccagtctggctgacagagtgagaccctgtctcttgaaaaattattggaattcaataaaattaagaatttcttttcatcaagaaaagagattaagagagtgaaatggcaagttgtagacagaagatattctcaactttatctggaatataaggaggtaaattcttttaaaaatttaaataacgagtttgaaaaatgggcaagggacatgaacagttatttyacaaagagaaagagagagagtaaaaagaaaatatctcaatggccagtaagaatataaaaaagtgggctgggca

SEQ ID NO: 44522 - DNA, 604 bp, Homo sapiens
cggtgctcccacacactcaaccggaagcagcattttcagatctgctcgtgctggttcttctgcattagttgatagtcagtttagatttcagatgtcactgtccctgaagggcctcccctggtgcctcataaaggccaagagaccacaaaagttgaatggccaagccaggctggcacgacgcagtgccctagctatctccttttctgctgcagaagcgcactaccggtgacgggcagtagtgagtgggagggccaccatctgaaatgtgctgctccttttgatgagtgggtactgtgtttttctctgcttttagctcctattctgaagaaatgatagtgattttcaccccatccccgatcaaacaggactgtgacttacgtttcccagtgttcattgctmatttcatgcaccattaagttttgtagtctcccatgtccattagaccttgcttctccctctgggatgttgggacattgtggggagcatattgtgatatgttggcatgctggggtgggggaggccacagctgacttgggagaacttgtcccttggtgacacccacccacactgagcttgaacttcagacaagggaaattgactctta

SEQ ID NO: 44523 - DNA, 646 bp, Homo sapiens
ctaagagaatatgcagagagcattctgacttaggtcttgtcttgccaagttccccccattctcctccttggtttacataatctccttaactcctggctatacatgcctcctccggcaaattgtgaaggcagctttcagatcttgtacaaagcctccagatttattaccagtttttctgcaaggagtgatcctactctcctagccaaatccctgctgagttttgtggatattcatgaaggataaatacagcatgtgcaggacaaagaaaatttgctcttccaatcaccaggctggattgctcagttactgctgacagaaggaggcagaactgatacgctcgtttgatgatgccaagctctctcatgcctctgcatggacttcacaggcccattgccatatattagcgctttaatcagaaagcagctctactgggggagttgaacaagagagtgcttccttttcctttgcatgtttacatccttttatctacttattatctaattctccttccraattgacatgtagagaatatgcaggaatccagatggctctggaaaagtcacggagacaaagattctattgcaaatgcttattgtccctcccacacccaaatgtccaaaaaaagctctaatagcattaagcatgc

SEQ ID NO: 44524 - DNA, 533 bp, Homo sapiens
cattagggatagtgtcattatggaagacagttgtacctaaaacaaacattttcaagagttctaaattatatactcaataacaaaaaacttatatcctcatatttaatgtttcccattatgtctgccatgatgtacccttcattcctcccatatatgcatcttctaaatccaacccatcattcaggactattattgtatagtgtaataattgttcccaccycataataattgctcccaactccatagccatgaagttgattttcataaaatgtaaatagcttcctcacaaatttggaataaaatccaaatccctctctcagcttcctcagaaatttagaataaaatctaagcccctgcaggatcttgcccagggctgtttttccagcatcatctcacagtgcacgctactttgctcacctggctggagtctttttaattaattttgagaacaagtcaaattcttccctgtgccagagacacttgcattatctgcccctttgcctggaaagttccatttctctcattttctcata

SEQ ID NO: 44525 - DNA, 569 bp, Homo sapiens
tccctggtccgcttccctcttctcacctctcgggtccgggccgctgcaggcaaccaggcgccgcggcacgcgtcttccaccgtggcctgactgaggtggacaccgcggcgccgacagagctatacctgcctgtccctttccccgcccatcgctcggactccgaaggaggcggggcccggctgccgggacctacgggcgcggcgaggacgcaccggcgaagagatgccggaggcagagccagtgtaaacgcccgcggccgaggccgtcacgtggtactgccgggcgagcgacgctaccaccagccaataactcggcccagaccggggagggtgccgccctctgactactctcctcctcgcgattggctgccctggacagaagagcacaagctggaaggattcttagagaggttccgccgctgcttccgtggcgttgactcctccgcggagagagcggatgaccggcctcggcggctagcmtgtggccagggtgaaatagcaggagaggcgcggaagcgctctgcccagagttttgaagtgctcagcgtttgcgatcggccacctctttat

SEQ ID NO: 44526 - DNA, 687 bp, Homo sapiens
gcatgagccaccacgcccggccgacagcacrtatttattatctaatagtctgtgggtcagaagttcagcatggtctcactggcctaaaatcaagggatcgacagggccccattgctttctttaggttccgaataggatctgtttccttgccttttccagatcctggaagccgccttggctcatggccctttcttccttcttcagcgccagcaatgttgcacctctctgtgtctttcctcaacagccacatctccccatgacttctgcctccttcttgcatattaaggacccctgggattacattaggcccacccagagaatctgggataaactccctattttaaggtcagcagattagcaaccttaattccctagtgccacgtaacttcatatatttacaggtttgagggattcgaacacagacatctttgtggggagggggtcattattctccctcccacaggccccatgcaggcctttctcattggggaatgtctgagccggggtgagaggcctctgaagcagatgctaaatctgcatctaggcctttacagtcaaacagccccgtgcacacgtcacagctctaccgcagccacgtgaacttggacaagtcggtttgcctctttgagcctcagtttcctcatgtgtgcagttgggatgataatgtgaagattgtatttaatgcaa

SEQ ID NO: 44527 - DNA, 687 bp, Homo sapiens
gcatgagccaccacgcccggccgacagcacatatttattatctaatagtctgtgggtcagaagttcagcatggtctcactggcctaaaatcaagggatcgacagggccccattgctttctttaggttccgaataggatctgtttccttgccttttccagatcctggaagccgccttggctcatggccctttcttccttcttcagcgccagcaatgttgcacctctctgtgtctttcctcaacagccacatctccccatgacttctgcctccttcttgcatattaaggacccctgggattacattaggcccacccagagaatctgggataaactccctattttaaggtcagcagattagcaaccttaattccctagtgccacgtaacttcatatatttacaggtttgagggattcgaacacagacatctttgtggggagggggtcattattctccctcccacaggccccatgcaggccyttctcattggggaatgtctgagccggggtgagaggcctctgaagcagatgctaaatctgcatctaggcctttacagtcaaacagccccgtgcacacgtcacagctctaccgcagccacgtgaacttggacaagtcggtttgcctctttgagcctcagtttcctcatgtgtgcagttgggatgataatgtgaagattgtatttaatgcaa

SEQ ID NO: 44528 - DNA, 1843 bp, Homo sapiens
catgtgtgaacaattaccagccagataaataagcacacgagttcatgggcaagctgtggccaggcctctggtttgcagtgcctgagcagagtggtgaatagtgcaacgtcttgagctggaaggaccaggttcattcatctcctgggtctgttacttcaaagctgcgtgtccttgggctttccctctctttatgtcggcttccttatctgtgaagtaagattagcaatacccacaacagaaggctgttgacatgacttagaatactggctagtaaatgctcggtacagggtttggaaggtcggttatgaataatagatggttattatmatcatgaacaaggagattacctctaattgaggtggaggctttgagctagaggcaaactaacctttgaggtcatatgttagaaggtcttagctacagagtggagtatatcagggagaataggcactatttgggtctgatatgtgatgctcttcttgggtacatatcattcattcattcactcattcatcatattttcatcaaatttacccactatccccacaaagccatttacccactaccctcccaaagccaccaaaatcagctgagatcttgtcacactgatctggctcagattcttacaggtcaggcaggggctgagaagttttattagtgcagctggctgcccaccagatgcagacagatggaacctacttgacacccatagcattgttcttggcaacgccaggaggctctgaagaggatgccaactgcctgatggggcgactgagcccactgtgaattcagggttagcacgcagatgtctgggcaggagaagaattgtcatgccttccaacccaaactctttaaatatccattcaacatattgagcagactgtgttccctgtgtcgtggaaggcagggcccttctggtggctgccatagcctctcctgtactgtggttggcatttgggctccagctcccacttggacacccagccacaaaacaaagccccattgttcacctgctgtccctggtcccttcagaaagcctctctgtggttacagaggctctcatcttgaggacctaggctagatggggtctaacctccaaccagaggagtttgtagaaggattcttcccaatccttccagtccctgcctgagaggaggtctgtgctcccctgtccccatctcatcacatccccagggctgcctgagcaccccttggagaccagcgcctcagggcccagcctctcaacctttcctacctgacctggggcccctgagcatttacagggcagcctggtgcctgggaggggtggttgggctcgatggacctgcaagttcctttcctctcggctgttctgaggttctaaacacccaccctctgcccttgtctgggcttcttggtgggaattcagggagggaccaggcttgagcctgcccgtgggaaaagcacagcatcgtgtgcccttagcccacagcggaactgtccccgcttcaattttcatcatctgtaacatgaggatgaccacaatagcgcctgccttccagagctgtgctgaggattaaatgagttaattcatgggcagggcatagactagtcctgccacatggggccaggacgtagagctaacacagctgttagctctccacctggtctgggattgagcccatccaggaaccagcggtggagcaagatgggggcggtaacattccaaatcctattggcgattgcattttcaccttcggattgagatcttccagccaacgtgctgggggagttttgggatcaacacagtatacaatggctagagttcaatcctttcagagcttgagactctgggtcacacaga

SEQ ID NO: 44529 - DNA, 644 bp, Homo sapiens
gaggagaaaggcgtaactgcactttcatttcaatgtctgagtttgataaccaaaaggacttgcatttttagataaaaattttctatttcccaaatctcaagacctagatacaaaatgtagagctgcagatttagggcccgaatggctggagtagcagcaggtgttacctgcacatttgtgaacattttaccaagagaaaaaaggggaaagtgaagattctcatgtctgaatgtgtactcaatgaaaacgttactctgattaggtttgtgggccccatggtctctgaatcagtttaaggtctgaagatacaagagtcattgagataaaactattgattgttgccctgtgaagttggtagaaatttggtttagtctctctagaagtgactgtagaggactatagataccaaataggcagaaacacagttctgcttgcatatttaggggacagcatgcactttgttgcacaagtgtgagttgactggaagtctgagagggaaagtcccctctagagtaaattccagttggcaccttatgtgtttatatcatgtctggtaattatagacagtgtttggaaataacaaaagaatgttctccagccccagaaaaactccacaatagaacagaaaraaaactgttttatgt

SEQ ID NO: 44530 - DNA, 552 bp, Homo sapiens
acatgagggttggggatatggggacccggggaccctcatgcactggtagtgagtagccattccgagggctacccagcactacttacacaaatggtgcgcatggatatgtcacccagcaattagcttctgggtacgcacaataaaacattctccytcagcttcctgggggaccaatacacagatgttccctccagcattatttcgggagagctggaggcagcctgggtgtccgctcccagtaggggtaggtggaaaaacagaagggatcagtcaccagagaatcctgcaaagccaccactgtcacacaccaggtgtccacagagcaacaagggtaggtcttaaaacacataatgatgactgacaaaaataagaaacactattaatatcttatgatataatgctcaatgacacagaatcattttacatttacataaagttttagggaaaaacaatatttaatatacaactatgcgttggataatgtataacagatacaacatagaattgtattgtactgtataattatattagcctaaatatataattatataa

SEQ ID NO: 44531 - DNA, 552 bp, Homo sapiens
acatgagggttggggatatggggacccggggaccctcatgcactggtagtgagtagccattccgagggctacccagcactacttacacaaatggtgcgcatggatatgtcacccagcaattagcttctgggtacgcacaataaaacattctccctcagcttcctgggggaccaatacacagatgttccctccagcattatttcgggagagctggaggcagcctgggtgtccgctcmcagtaggggtaggtggaaaaacagaagggatcagtcaccagagaatcctgcaaagccaccactgtcacacaccaggtgtccacagagcaacaagggtaggtcttaaaacacataatgatgactgacaaaaataagaaacactattaatatcttatgatataatgctcaatgacacagaatcattttacatttacataaagttttagggaaaaacaatatttaatatacaactatgcgttggataatgtataacagatacaacatagaattgtattgtactgtataattatattagcctaaatatataattatataa

SEQ ID NO: 44532 - DNA, 637 bp, Homo sapiens
tttttttttttttgagacacagtcgtcactccgttgcccaggctggagtgcagtggcatratctcggctcactgcaacctctgcctcccggattcaagtgattctcctgcctcagtctcctgagtagctgggattacaggcatgtgccatgacgcctggctaattttttgtatttctagtagagacggggtttctccatgttggccaggctggtctcgatctcttgacctcaggtgatccacccacctcagcctcccaaagtgctgggatcacagccatgagtcactgcatccagcccacacctgtatttgtagggccaattcaagggctcagtcaagggatttgttttcagtctacagttggagagattctctagataaaaaagaactgctattttctaaatgacctttctcctaagtaccctaaaataatcatagaatctgatccgaattcttgctgcactacggacaccaatagcccaagaaagtccaagcctcagatgagcacctggaacctcagtccttcatcccacggccaagcacgagactcgcaccaaaccactaccaatgttatcaaccaatgaggttcttagccacttcctatgcattacacattattgaacttttgcaatggcaca

SEQ ID NO: 44533 - DNA, 547 bp, Homo sapiens
tgcacatgcacacacccacccacacacccatgtacacacactcatacacgtccatactcatccctcacctacctgtgtacaaacacacacacaaacacacccgtgtacacacacacccccacactcatacactcagacttacacacacacctatgtacatatacacacccactcacatccacacacctgtacacatacacactcacatgcacactcagactcacgcacacagagaactgttttggcaggacaaacattgcttatcatggagaggatttcaattccttgtaatctgcatatatcaccttggctttgtcatcaaaagaaaaacttttttttttttaaggcttaggtaaaacagcaccatgtgggctgaaaacctctgaccaggagtcagaggactcctggatgctgaagcggctcagcactggctcactgkgtgaccctggacgggctgctgcacctctctgagcctcagagagaggcaggaatcaaacaggaaagaggcagaaaggccaccggtgcctctggctgggaggacagtgtg

SEQ ID NO: 44534 - DNA, 555 bp, Homo sapiens
gagttctattgtgcggccatagagacccaggctgttcctggcctttgtcagccgtccctccgtggtcctgtacacaccgttgagggcctggcccagctgcagggtcccrtggaagagcagggtcagctcctcatgctgtgccagttctgggccgcccatgggggccgctgaggcaggccgggtcaccattgccagggcccagagcaggcacagagcaggcactggcatgactgagggtctaaggtatagccacagcactgtcactgaagccttttatgcctcatacccccactgatccccagtcaatcgttaactggccgacctggtgccccgcattgcacaagggcctggcagtggtgcgatagttgcatcaggcgaatgtccggctaggccacgccgggatcacgcttcctggggctcagggccaggtgtgggtggggggcattgggagaggacgggccccagaccctgctgggagttcctgagactcaccatgctgagcctgtttctccatctatgaataggcatcgcaatgatgatggtaataacagtaaa

SEQ ID NO: 44535 - DNA, 555 bp, Homo sapiens
gagttctattgtgcggccatagagacccaggctgttcctggcctttgtcagccgtccctccgtggtcctgtacacaccgttgagggcctggcccagctgcagggtcccatggaagagcagggtcagctcctcatgctgtgccagttctgggccgcccatgggggccgctgaggcaggccgggtcaccattgccagggcccasagcaggcacagagcaggcactggcatgactgagggtctaaggtatagccacagcactgtcactgaagccttttatgcctcatacccccactgatccccagtcaatcgttaactggccgacctggtgccccgcattgcacaagggcctggcagtggtgcgatagttgcatcaggcgaatgtccggctaggccacgccgggatcacgcttcctggggctcagggccaggtgtgggtggggggcattgggagaggacgggccccagaccctgctgggagttcctgagactcaccatgctgagcctgtttctccatctatgaataggcatcgcaatgatgatggtaataacagtaaa

SEQ ID NO: 44536 - DNA, 555 bp, Homo sapiens
gagttctattgtgcggccatagagacccaggctgttcctggcctttgtcagccgtccctccgtggtcctgtacacaccgttgagggcctggcccagctgcagggtcccatggaagagcagggtcagctcctcatgctgtgccagttctgggccgcccatgggggccgctgaggcaggccgggtcaccattgccagggcccagagcaggcacagagcaggcactggcatgactgagggtctaaggtatrgccacagcactgtcactgaagccttttatgcctcatacccccactgatccccagtcaatcgttaactggccgacctggtgccccgcattgcacaagggcctggcagtggtgcgatagttgcatcaggcgaatgtccggctaggccacgccgggatcacgcttcctggggctcagggccaggtgtgggtggggggcattgggagaggacgggccccagaccctgctgggagttcctgagactcaccatgctgagcctgtttctccatctatgaataggcatcgcaatgatgatggtaataacagtaaa

SEQ ID NO: 44537 - DNA, 555 bp, Homo sapiens
gagttctattgtgcggccatagagacccaggctgttcctggcctttgtcagccgtccctccgtggtcctgtacacaccgttgagggcctggcccagctgcagggtcccatggaagagcagggtcagctcctcatgctgtgccagttctgggccgcccatgggggccgctgaggcaggccgggtcaccattgccagggcccagagcaggcacagagcaggcactggcatgactgagggtctaaggtatagccacagcactgtcactgaagccttttatgcctcatacccccactgatccccagtcaatcgttaactggccgacctggtgccccgcattgcacaagggcctggcrgtggtgcgatagttgcatcaggcgaatgtccggctaggccacgccgggatcacgcttcctggggctcagggccaggtgtgggtggggggcattgggagaggacgggccccagaccctgctgggagttcctgagactcaccatgctgagcctgtttctccatctatgaataggcatcgcaatgatgatggtaataacagtaaa

SEQ ID NO: 44538 - DNA, 455 bp, Homo sapiens
tgtagtggatacgggtagatgaaacctcagatacgtgggagctaccgtgggtgtattaggctctctgatgttggatgaacagggacctgggttaatcttgccctactctctctaattcaggtaccagccagacgagaatttcagcaagaacgagaagccgaaggaggaagtagttgagatgaattctgtacccaaagcagaatccccagcatgtgttcctgaagcgtccagcactccggcgagtctgtggagccctgtcagcaccatccccaccccgagatggggccgcatcgtctatggatgtgcctttctgcttggtgagcagtggcgtttctccgcggggtgttttgaacctgatagcatgcggcagggggcygagtagggagtgtggggctttggtagttgagaggagttgtgaagatgtggtggcccttcttagtaggcgcacttttggc

SEQ ID NO: 44539 - DNA, 611 bp, Homo sapiens
tgcatctgctcagatttccgtctgggcccagctccacctcctgctgctggagttggcaagtagaccctgccactgagcagccacgtgactttggcgattgttctctctgcctcgatttttctgtgtctaaaatgcagcagtatgtcctcatagggtgattgggaggattaagtgagataacacagtgcctgatccatagtaaatgcccagcaaatgcctcccttgttattcctgtcatcaccactcctctgcccccacctatagccctaacattttgtttctgtttcctgcccgtgttgtgtatttgtactcctctttcccctatagtgtcccacgtcagcgtccctgctttccctcrgaggcccactcctccaggctgggtgccccagcagtccctgacctccaggcctgactctgtctctgccaagctgtgtgaccgtggacaatttgtccaatctctctgagctaaaactaaatcagcctgtctcagcccactagtagaagaggcagcaggggtaccaagattccacactggccatgttagttccagcttctgcctactctggctgatgactttggacaagttgcagctcctccctgagcctgagtct

SEQ ID NO: 44540 - DNA, 604 bp, Homo sapiens
aaccgtggggccaaatgccctgtgttggacggactgcagctggagcagtcactgagcacggaggccagaaacctgtttttacaaaagctccccaggtggttctgacaacctcgcttggctgtctgtgtgctttgctccrccatccatcactcagtcccaagcctgccttcagacctcagttcaggggtggctggcattgacctcaaagccttttttggagcaaattaacaggtgagcattgaaatactgcagaaattcaagctgagccggccacctgctgcagtagggcatgggggcaggtgggttaaattcttgccttctggctgaccttagtcatcaccagtcattgccttccatgtgcctgtaccaggcactggtctcagtgccttttgtgtattatcgcatttagatatcacagccaccccaggaggtaggtgccgtttgccccaatttgtagatgaggaaatggagcccatagaggtaaagtaattttcctgaggtcacacagtgggtaagtggtggagctgggattcaaatccaggcagccagcctggcgccgaagcctgcgcagtaataacccctgtgcggcggctgagtgcttgga

SEQ ID NO: 44541 - DNA, 1407 bp, Homo sapiens
ccagagccacccatggggtctgccctctcacccccaataacacagggctaggaaccctgtctcaggggcaggtaggagggggacacagcccagggtgggcgttacggccattcctctgcccacccacccacagacagcccagcacataggctgggctcagcacgaaggtyctgggtctgggtttgaatcccgtcctcaccacttcctggaacaggagggtctgggtttgaatcccatcctcaccacttctggaacaggacgcctcctccagggagcctccctgggttggcccaagccccccaggctgggtttccactcctagggtgcccccagcttggctggtgctccatcttggtctgcgttttggcccaagtcccttccggagagtgatgggctcccctccacactgaggacaccccctgctccttgccgagaccccgagaccccgcttctgcctgggtaacgcgaaggcagcatttgttcagtgcatgacctcatctcacagaggctcacaaccactctctgtgttgctccattgagccaaacgtgtattaagcgccaaatgtatgccaggcactgttctgtgggcggaagagggtgccctgtgggaacctgcagggaaggtgttccaggcagagggcacagcccgtgcagaggccctaaggcaggaccgtgccaggtgcgctggaggcatagcgaggaggcctgtgtggctgggatgaagcaagcgaaggaggaagctgggggagatgagagcagagaagaagctggatgttacgggacgtggtgcggagtacgagagagaaacctgaagcaaaaagatggtaactggccaaggcatcctggtgcagcagagatttgaactacacccacctcgtggatggaactggaggctcaggggcccgggaggggagcccatctggcctgtgagccactcagcctgatgcaagctgtgggcaggaaacaggggaaaggtgctgggcctgggcccatgctgggctgggcaggtagccatgtgaccgtccaggccacctcccccgggcccattggccgcctgccgctgctggctgggcctgcgcctgccccggaccctataaggccagggagctgagggtagagccagctgccagccgggccggtccgtcctccaggggaccccgcgcagtccaggtgagcggggccgcgtctgcttcggtgacaccagggtgaggccaggcctgcaggtgggtgtcgggctgctcaggctttcagtggggagtgggtgtgggatgggaggctagggaacccccattcacgcaccttctctgcccccttccagcttctcacgttctcactatgtctgctccagacgaagggagacgggatccccccaaaccgaagggcaaggtaaagaggggaaatggggca

SEQ ID NO: 44542 - DNA, 1795 bp, Homo sapiens
ataagcacatgggtgtgtgtgtgctggggggagggagtgactggcatatagtccggcagagataatgtattcaaattttgttatgctttcaatgtgctgctatgatgaggcatttgtatagagcgggattaatccagctaggagcccttatgcaacaacccagtgattaggcgtgtctggggacctggataacagagacccacttggacagcatgcagggaagcctgtatcacacagcactgcaamataccttcatgctaatgtctcactccctacaatgggaacacctgctaaaaacacccaagattaggacaatgcaccgtcctacaacaagtctccctggctaccagaatgctgaccaaaagtagcattcctgatcactcttaagccacaaacactgcttcgtgtttcttcctggccccctatgttacttgaccttctgctacgcattgttgcttgcgttgtcatctcaatccttcactccaacctgcatctgtgccctttgccccttggccttgggtttagccatgcaacttctgtgacaaatgaaatgaagcagaagggatggggtaccagttataagctcaggtcccaagagaccctctgtgttttagcttactctcgcaaaagctcctactgatgccttgaaaagagcatttgtgggctatcccgccggtcctaggaggaaatatgagcccctcatgggcccacagatgcttgcccagccaaatttgcccagctcagctgatcagcaggtatgtgacctgaaaataaacaattgctttatattttgaggtaatttgttttgtagcaataattaatgagtgattacatctgttggcttgttgtctgtctcttcctctggaatgtaagctcatttctgtatttttactgctgcgtgctcagaacagggtctggagcacggcaggtgcttagaagacttggtttgagcgggtgaattaattggcttttgtgttgaaaaatgtgtgatgctgagaggcccatcacatgtagctccctacgatgcaaggtcttctcacaatagtccagaccaggactagacacagtgaagaacatgtgtgagcctgtgggtgtctgaagatcttttgtggaggacacacagggtgtgatatccttctgaatttcctcgatgtaggcagagcccacacatctaagaataagacaaaaaatactccttcatctttttaggttctgccctaatacagtgtcctctgtgaatatgtttaatacaagcatgacttccacactagcaatggagatgaaaccaggggtgacttttaggccatctcagttaaattggcccaattgtctttagtacttcagtccctcatgagaagcaaaactgggcattcagacaccaatttttattctctgaacaagaagcagttaaaacccccctctaggtgtctcccttacccaaaattagtggctggggttatttttacacagagaatcatctcagtgccaatttagtatgacaatgacgtttacagtgtggcccaagactggcagcatcagtatcacctggaaacttgtcagcaatgaaaaattcccaggcagatcaggcccctagttctactagtttggaaattcaggggtggagtccagcattctgtgttttacaagcccttggaatgtacactttgaaaaccaatgctccagagagttctccactactcactcacaaatatttatttattcatttaaaaagtatccctaaagtgcctattgcatattagcccctgagttaagcaacagggaaataaattatgat

SEQ ID NO: 44543 - DNA, 536 bp, Homo sapiens
aggttaaaagttcatttccttggtcttcattgccttatcaaatttaagcagtagtgtggcccaagtagaggaggataattgaatcatcatcatgtctgcaaaaccagattgtgaagtctttaaccctggctttgggagttactgcaaatggccatctgccttcctttcggttggttgttaccgtaggctggttccaggagggagacgcaggatcctttaagcttcttcttattccttggctcccctgcaggttatcacagaggtctctctgccttcactttctctaggaatctttcctggctctgcttcctgagtctacggtcttgttccttcttcttccattcttcccattggcctgctctggacatctgggctctttctttctccctaggccaacctctgccaggatatarattatagaagccctgcccctcccacatctacaagtcctacctagatcaagtcccaggctcccacttgcccagaaaggggaggtgaggcattcacaggaaaaatgcaagatacactgtgcatcc

SEQ ID NO: 44544 - DNA, 536 bp, Homo sapiens
  misc_feature (1)...(536): n = A,T,C or G
tgcaactacaaaaccccccaaaggaaacagtaaaccagccgcanagttgcagcgtccttagatgccactgctgggcagggggggtggtggtggaggagaagcctcgtcacccaggatgaaataagagcctggtggtttagatgggggaggagggaagggaagaaaagtctktctgggccatttcactcctctttaagtacagaagcttaggctaaaagagcatttcacggggctgagctgtggccccgggggaccccggctgcccccggaagggctctcgccccgcggcgtcccctcccgagtcccatgcagggacgtcaaagtgaagccttcaccatcatcacccaaaaagaacgtgtgcaagatgtgaccgtttgtcaccgagatggagtatatgatatgaaccatggcaaacaccgtaatgactaatttcaaacatttattacaattcttgagagacttgaaagctgtccccgctcttgattttaataaatgcagtcttgaagcagccgcttatcaaagtgacacaaattgtg

SEQ ID NO: 44545 - DNA, 536 bp, Homo sapiens
  misc_feature (1)...(536): n = A,T,C or G
tgcaactacaaaaccccccaaaggaaacagtaaaccagccgcanagttgcagcgtccttagatgccactgctgggcagggggggtggtggtggaggagaagcctcgtcacccaggatgaaataagagcctggtggtttagatgggggaggagggaagggaagaaaagtctttctgggccatttcactcctctttaagtacagaagcttaggctaaaagagcatttcacggggctgagctgtggccccgggggaccccggctgcccccggaagggctctcgccccgcggcgtcccctcccgagtcccatgcagggacgtcaaagtgaagccttcaccatcatcacccaaaaagaacgtgtgcaagatgtgaccgtttgtcaccgagatggagtatatgatatgaaccatggcaaacaccgtaatgactaatttcaaacrtttattacaattcttgagagacttgaaagctgtccccgctcttgattttaataaatgcagtcttgaagcagccgcttatcaaagtgacacaaattgtg

SEQ ID NO: 44546 - DNA, 1385 bp, Homo sapiens
tgtggctaaactatggtcaatgacatctgaatgaaaatgagctatgacattttgggctgtgctttaacagcatgtgatacggtcttgttctccattcccagggtagaaactggaaccactgtcttgaatcaaaagatggaagaagcttctcttgaagattaaagggacacaagacagaagttgtctgtgtccctgagggcttagcagaggagacttgacctactttcttgggcttgttgtgacatctattttgtttaaggtaaacattgtttgttttaggattccctaaggagtccaaagcaacatttgaacaatcaccagccttagtacagtgtctggaaatgggatgccttaacagaacctaaaacttgatgcatagtctcagtggtcgggtggcaatagcaagggtgccgatattgcaggtttgccagcaggtgacacttgcyatgtcataccagtatgtgtggcaaatccattatctgtgatatcttggaagtcagtttgtatgcctacagagcacatgttaagaaaaatgcagaaatttgatgtatgttggttatttttaccttttatagtaaagtcctattagtgaaatgaatttgggctgtaatacatcattttgctcgctgagatgaaaaggttgtcaacagaatgaaatctaataatggagcctctgggttttaaaatccagtgttgaaaaagccaactgcttttattccaaaatgaagcctttgtatgagatggctctgaacagatactgtcgctggagacaagatttctaagcccaaactcctcacaagcagcttccctgaatttttctttgacagaccacagacaccatccagaaactaacaaatacttttctaagggatattcttttttccttattgtaaacgacatgtcaaaatgactgccactaaattgaaagggataagagtagtaagaacacagaggccagtaaataaatgatcagagctttcgggtttaaaaatgatcccagttgagaacttcagctgtggtaacgtgaatatgtaaccatctagaggcaaatagaacagaaacttttgaggggttggcgccaaagaaatgaaaagtctggcttgtagtagcctctcgttacttgacttctgaagccatggctaagcttcaaaaccagattaatagaaagcagtcgccaagacgtgacttcaaagtctatggcatatgtgaccatggaggaaaatggacaagaaagactatcatggacagtaaagtccagaacaacaaaaaagaacaggtaagggggctcctttcatagaataaaccgagaactgagtatattccaactccaagccaggacactttgtcacagttttctcttttctactccataattgtattttggg

SEQ ID NO: 44547 - DNA, 1385 bp, Homo sapiens
tgtggctaaactatggtcaatgacatctgaatgaaaatgagctatgacattttgggctgtgctttaacagcatgtgatacggtcttgttctccattcccagggtagaaactggaaccactgtcttgaatcaaaagatggaagaagcttctcttgaagattaaagggacacaagacagaagttgtctgtgtccctgagggcttagcagaggagacttgacctactttcttgggcttgttgtgacatctattttgtttaaggtaaacattgtttgttttaggattccctaaggagtccaaagcaacatttgaacaatcaccagccttagtacagtgtctggaaatgggatgccttaacagaacctaaaacttgatgcatagtctcagtggtcgggtggcaatagcaagggtgccgatattgcaggtttgccagcaggtgacacttgccatgtcataccagtatgtgtggcaaatccattatctgtgataycttggaagtcagtttgtatgcctacagagcacatgttaagaaaaatgcagaaatttgatgtatgttggttatttttaccttttatagtaaagtcctattagtgaaatgaatttgggctgtaatacatcattttgctcgctgagatgaaaaggttgtcaacagaatgaaatctaataatggagcctctgggttttaaaatccagtgttgaaaaagccaactgcttttattccaaaatgaagcctttgtatgagatggctctgaacagatactgtcgctggagacaagatttctaagcccaaactcctcacaagcagcttccctgaatttttctttgacagaccacagacaccatccagaaactaacaaatacttttctaagggatattcttttttccttattgtaaacgacatgtcaaaatgactgccactaaattgaaagggataagagtagtaagaacacagaggccagtaaataaatgatcagagctttcgggtttaaaaatgatcccagttgagaacttcagctgtggtaacgtgaatatgtaaccatctagaggcaaatagaacagaaacttttgaggggttggcgccaaagaaatgaaaagtctggcttgtagtagcctctcgttacttgacttctgaagccatggctaagcttcaaaaccagattaatagaaagcagtcgccaagacgtgacttcaaagtctatggcatatgtgaccatggaggaaaatggacaagaaagactatcatggacagtaaagtccagaacaacaaaaaagaacaggtaagggggctcctttcatagaataaaccgagaactgagtatattccaactccaagccaggacactttgtcacagttttctcttttctactccataattgtattttggg

SEQ ID NO: 44548 - DNA, 539 bp, Homo sapiens
caatacatattctttcccagaagagactctaaaagcagatatgtgatttgttcattttctgcctcttgcttcagcaattatggaggcattgagacagagcttccctcagtttgcatccttgagtcaggataaggtagagcagcggtcacagctgaccagcaatggatgcacagactaagccatgaatcaatctatattattactattgctatgaacaataaaacctagagaatttttatttacatagcatgagctacctattctgacttaaaccgtactatttataggactttagcattatttagactgttttgactctgtctctatactaacccacttgaagaaaaacccaatttctctttttgttttatctgatataaaatttggaaacatctatataaaattctaataaaaaatgaaaatattccatttcatttyccccaaattatttggttaatttgacctttgattatgccacattattctactcagcttaaaatgggaatgctttattaaatccttcttttccaatatagaaa

SEQ ID NO: 44549 - DNA, 588 bp, Homo sapiens
cagcagggccaggctccctccaaaggcacgaggggaccacccgtttgttgcctcttttggtttctggtggctcagctgttccttgcagctccagtgctctaatccctgcctcctgcttcatatgtttccttcctgtgtgtctgtgtcttctcctcttctgtctcttgtaaggacacttgtcattggatttagggtccacttaggtaatccagaatgatctcatctcaagatccttgattgaattatgtctgcaaaggtctccttccaaataagatcatattcacaggctctgggggatatttaaggggccacccttcaacttgctacagttacttgggtgtcagattttacccagggatgcatgcatgaacttttctgactgtatgtcttatatccataaggattttttttaaggagttagtttacaacttctcagaaatatacttgttattcaccataaggcatcttgcacatctttttttttttwaaaaaaaaagaaaaaaaaaggaagaccgctcgtgattgctggcatttcactggcacaatgccagcagagtttttggcttctcccaacaccccacctcattt

SEQ ID NO: 44550 - DNA, 595 bp, Homo sapiens
tttaattacatggtatatagtaaaaatattcaaaatgtttagatatgttttttgaaatctgaaattaatgttatattaatgacaatttcaggaaaggactgagttttttcctatctgcaaagaataaacattgaactatgagtaagcctcataaaattacttatcttgatgtatgtatttattcagtgtaataaacattttggataaatatgtaactctgatactttttagatatattaaaacattttaaatctcacatatttcctgcagaaaagatggaaattacagaaaactatattgagaaaccatatatatatatatttgtatatatatatacacatccaaaattgatattaaatgataaattttctctatgctagctttcttacttagcattatatcatgacagcatttgtacttcaaaaacatgattttcattggttgcttaataatatatagatatgttgtaattaatttaagtaatccctcatagttgtacatttaatttgcttccactttgccattacygtaaaacatctgtaagatgatacgtttttgccttcactttgaaatatttcctcaggatacaactaag

SEQ ID NO: 44551 - DNA, 518 bp, Homo sapiens
ttttttttttgagacaggatttcactctgttgcccaggttggagtgtagtggtgcaaacacagctcactacagccttgacctcctgggctcaagcaacccttcaacctcagcctcctgagcatctgggactacaggcctgtgccaccacatctggctaatttttgtatttttggtagagacagggtttcaccatgttgcccaggctggtctcgaactcctgaactcrggtgatccaaccgccttggcttcccaaagtgctgggattacaggcatgagccaccatgcccagccttgtttctacttctgaggaggtttgagtaaggacatatttgctctataccttagtccagcctgacctttgtcaataagacatatcacatatcatccaatggaccctttatatgaattgaccaaaatattgtggtcatcccctgtttcctacttactgtgtcactgcttaggcttctgtgtgtgccagttttcaaaatcttgaactcttgttggatgaatctcactg

SEQ ID NO: 44552 - DNA, 609 bp, Homo sapiens
ggttcggtgaattagataattayagctgcaaaatgtcactggggaagagtcagagagcaaggtacagaggtgggcattattcctgggaaagggcacaagaaggctgaaagttggagaaatgttgcaggggacctgtggggaaattcagattcagagacttgaaatcctaggtcaagggagccaaaaattacactctgaaataaaattacttactttactcctgcccacttggctagcccacaaaggaaaggtttcttgcaatccaggtggttacagtaacttccacgtgtctgtgtgtccaagttcaccagaaatgttctgcttgctatctgtgcaatctagctcacacacttccatccattccttcaaccacagatgggagactcccactgcgctgcagacacgatgagcctgagagcatttatggctcctaagaaagtcccagtggagtgacctctgggacttgtttcctgcccctgtctccagctaaacagcacacagggacaagtgagcaaagaagaaaacagtaaacttcttttctgtttaactggcaataacaccttgagtgtctgtgtactgagcagtgagccccatagaggtgcctaggat

SEQ ID NO: 44553 - DNA, 609 bp, Homo sapiens
ggttcggtgaattagataattacagctgcaaaatgtcactggggaagaktcagagagcaaggtacagaggtgggcattattcctgggaaagggcacaagaaggctgaaagttggagaaatgttgcaggggacctgtggggaaattcagattcagagacttgaaatcctaggtcaagggagccaaaaattacactctgaaataaaattacttactttactcctgcccacttggctagcccacaaaggaaaggtttcttgcaatccaggtggttacagtaacttccacgtgtctgtgtgtccaagttcaccagaaatgttctgcttgctatctgtgcaatctagctcacacacttccatccattccttcaaccacagatgggagactcccactgcgctgcagacacgatgagcctgagagcatttatggctcctaagaaagtcccagtggagtgacctctgggacttgtttcctgcccctgtctccagctaaacagcacacagggacaagtgagcaaagaagaaaacagtaaacttcttttctgtttaactggcaataacaccttgagtgtctgtgtactgagcagtgagccccatagaggtgcctaggat

SEQ ID NO: 44554 - DNA, 609 bp, Homo sapiens
ggttcggtgaattagataattacagctgcaaaatgtcactggggaagagtcagagagcaaggtacagaggtgggcattattcctgggaaagggcacaagaaggctgaaagttggagaaatgttgcaggggacctgtggggaaattcagattcagagacttgaaatcctrggtcaagggagccaaaaattacactctgaaataaaattacttactttactcctgcccacttggctagcccacaaaggaaaggtttcttgcaatccaggtggttacagtaacttccacgtgtctgtgtgtccaagttcaccagaaatgttctgcttgctatctgtgcaatctagctcacacacttccatccattccttcaaccacagatgggagactcccactgcgctgcagacacgatgagcctgagagcatttatggctcctaagaaagtcccagtggagtgacctctgggacttgtttcctgcccctgtctccagctaaacagcacacagggacaagtgagcaaagaagaaaacagtaaacttcttttctgtttaactggcaataacaccttgagtgtctgtgtactgagcagtgagccccatagaggtgcctaggat

SEQ ID NO: 44555 - DNA, 609 bp, Homo sapiens
ggttcggtgaattagataattacagctgcaaaatgtcactggggaagagtcagagagcaaggtacagaggtgggcattattcctgggaaagggcacaagaaggctgaaagttggagaaatgttgcaggggacctgtggggaaattcagattcagagacttgaaatcctaggtmaagggagccaaaaattacactctgaaataaaattacttactttactcctgcccacttggctagcccacaaaggaaaggtttcttgcaatccaggtggttacagtaacttccacgtgtctgtgtgtccaagttcaccagaaatgttctgcttgctatctgtgcaatctagctcacacacttccatccattccttcaaccacagatgggagactcccactgcgctgcagacacgatgagcctgagagcatttatggctcctaagaaagtcccagtggagtgacctctgggacttgtttcctgcccctgtctccagctaaacagcacacagggacaagtgagcaaagaagaaaacagtaaacttcttttctgtttaactggcaataacaccttgagtgtctgtgtactgagcagtgagccccatagaggtgcctaggat

SEQ ID NO: 44556 - DNA, 609 bp, Homo sapiens
ggttcggtgaattagataattacagctgcaaaatgtcactggggaagagtcagagagcaaggtacagaggtgggcattattcctgggaaagggcacaagaaggctgaaagttggagaaatgttgcaggggacctgtggggaaattcagattcagagacttgaaatcctaggtcaaggkagccaaaaattacactctgaaataaaattacttactttactcctgcccacttggctagcccacaaaggaaaggtttcttgcaatccaggtggttacagtaacttccacgtgtctgtgtgtccaagttcaccagaaatgttctgcttgctatctgtgcaatctagctcacacacttccatccattccttcaaccacagatgggagactcccactgcgctgcagacacgatgagcctgagagcatttatggctcctaagaaagtcccagtggagtgacctctgggacttgtttcctgcccctgtctccagctaaacagcacacagggacaagtgagcaaagaagaaaacagtaaacttcttttctgtttaactggcaataacaccttgagtgtctgtgtactgagcagtgagccccatagaggtgcctaggat

SEQ ID NO: 44557 - DNA, 609 bp, Homo sapiens
ggttcggtgaattagataattacagctgcaaaatgtcactggggaagagtcagagagcaaggtacagaggtgggcattattcctgggaaagggcacaagaaggctgaaagttggagaaatgttgcaggggacctgtggggaaattcagattcagagacttgaaatcctaggtcaagggagccaaaaattacactctgaaataaaattacttactttactcctgcccacttggctagcccacaaaggaaaggtttcttgcaatcyaggtggttacagtaacttccacgtgtctgtgtgtccaagttcaccagaaatgttctgcttgctatctgtgcaatctagctcacacacttccatccattccttcaaccacagatgggagactcccactgcgctgcagacacgatgagcctgagagcatttatggctcctaagaaagtcccagtggagtgacctctgggacttgtttcctgcccctgtctccagctaaacagcacacagggacaagtgagcaaagaagaaaacagtaaacttcttttctgtttaactggcaataacaccttgagtgtctgtgtactgagcagtgagccccatagaggtgcctaggat

SEQ ID NO: 44558 - DNA, 757 bp, Homo sapiens
  misc_feature (1)...(757): n = A,T,C or G
cnnnnnnnnnnnnnnnnnnnnnnnnnnnnnnnnnnnnnnnnnnnnnnnnnnnnnnnnnnnnnnnnnnnnnnnnnnnnnnnnnnnnnnnnnnnnnnnnnnnnaattgcatagtatcttctctgtgcccacacagatccttgtgctttttraggttacatattatttgtcactctgcagtggaattgcctccttctgtgtgtatttccctactaatccgtgatctccttgaggacagttaaaaaaaaaagtcttattcttatctacatccacagtgcttgttacgcggtggaataaaatacaaaattaaattatnccttaaaaaaagatcactatgtaatgtcctaaacaatgtgcaaagtgcattgcttataacattgcaatcaatcctcaaaccctgtgaggtagcttagatcttcatacacacatgaggaaacagaatcttggagtggttaaataaatttcccaatttcatctaaagagaactgatggagttggtgtatggcagccaggagtgtctggcctccagctctttcctcgtaaccgtctatactgtcctgtagactgcctcaacaaatggtggttggacaaatgcataaatataagaatagcaaactgggacagggtgcatccttttatgctggttatacttagggtttatggcataaccaatgcatccagatgaatgccacctttccagatgaatgtctcttgaagaggctaggtgcctgctaaaaatgtttcctatttttcataattt

SEQ ID NO: 44559 - DNA, 757 bp, Homo sapiens
  misc_feature (1)...(757): n = A,T,C or G
cnnnnnnnnnnnnnnnnnnnnnnnnnnnnnnnnnnnnnnnnnnnnnnnnnnnnnnnnnnnnnnnnnnnnnnnnnnnnnnnnnnnnnnnnnnnnnnnnnnnnaattgcatagtatcttctctgtgcccacacagatccttgtgctttttaaggttacatattatttgtcactctgcagtggaattgcctccttctgtgtgtatttccctactaatccgtgatctccttgaggacagttaaaaaaaaaagtcttattcttatctacatccacagtgcttgttacgcggtggaataaaatacaaaattaaattatnccttaaaaaaagatcactatgtaatgtcctaaacaatgtrcaaagtgcattgcttataacattgcaatcaatcctcaaaccctgtgaggtagcttagatcttcatacacacatgaggaaacagaatcttggagtggttaaataaatttcccaatttcatctaaagagaactgatggagttggtgtatggcagccaggagtgtctggcctccagctctttcctcgtaaccgtctatactgtcctgtagactgcctcaacaaatggtggttggacaaatgcataaatataagaatagcaaactgggacagggtgcatccttttatgctggttatacttagggtttatggcataaccaatgcatccagatgaatgccacctttccagatgaatgtctcttgaagaggctaggtgcctgctaaaaatgtttcctatttttcataattt

SEQ ID NO: 44560 - DNA, 567 bp, Homo sapiens
gaaatgtatagaatttaagggacaaggaggattatgtaattacttctgtagttgatgaaatgtaaatgcctaaagctaacaaagtaattacaaggcaattatggaaagaagagctgttttgttcattcttatttcaggkactataaaaaaaaaagttagcgtgtcaaatgattaaatttgagtaagttaacagccattcctaaagctaaaataagatattctggtgtcttgccaaaaaaaacaaagaaagaaagaaaaaactacaggaactacaattcttctaaatttcagttaaaccagtctcttgtaacagttgctttccatggtgaaatagaactgataaatgcagtattggcaatgttaagtagataaaaagtaagtgaatctttgtttcttcaggatgattcttaagtaaatacatacttcatcacctaaggaagtacggagaaagatggttcttgaaattgccgaagaagattccaggggaggacagaaaatcacttcaaatcatttgtgattaaaacaattatataataatcctaatctttaaaattgctttatgatgca

SEQ ID NO: 44561 - DNA, 1853 bp, Homo sapiens
gcatggataagaaagactgttctttcaaaagcatgctagtgtgtatttagttttggggtttgtgctggtggggttgattggttggtacargctactgagctgtgaatgggatcggaatttaagtggttgaagcacagaatactgaaaaatatttttcctaccttataattttccatcttttctctggtgacatcaaacagccatttgtctagactgtgacttaaggtctgtcacaatctacagaggacaatcttggtcttatgtatgttgagaattggggcagaattcctcccctgagccagagagtttcttttccaccagaggcattattgtgaagctgctaagggagcttcgactgctcatttcctctaaggttaaaaaaaaagaaaaaggaaaaaacagaaaaacaagaaaccagtagaggtgagttattacctaactacagatattatctgagggtaaaatctggagctgtagggaatacttgatcttaaatttttatctcaaacttttgaagaataaaaaagaaatctgaacagtataggtacttatttctgtaaaaaaatttttttttgtgagaagattacaatcaacacattttcccttttactgaacttggatgtctgcttgaggctattgtgtggtgtttagctagtgtcttctaaattgttcatgaattttccaccaactcattctttatatgggaagttgtcatttgaaaaagaaaaacttgagttacaaatgtatcctttgccgtcctggctggagtagactgggtagtagggtgaagtgtctgcctctaattatggagagagaaatactgacacagggagggagagcaccatagagagcttcctctctaagagtttaaatcactatcatgacttacattacagagttcacatagtaggaaattaacactagcatttgaatatatgaaatcagaaaaatgtattgatatatttttattcttgctattaaggaattattattaaattgataaaagcaagggaagaaggaagaagcagtactagagatgagttggtaacaacctgggccacaaaatgatgactagatgcatctaccagaatagaagcccagaaaatatgaaaggtgtcaatagaaggaaactgaggtgattaggtgtcaacatcagagagatatcatgcaagcaatgggaaaatagttcaacacctaggtaaagaaaataatttgaaaggattggtgggaggtggtaagtagatatttaaagagatacatggttggaaccagagagacctgatggtggaaaagagagaccagaacccagccatgtcccagtctacaggaaattatcaatgtcacttaggacacggggttcaaacccaaagttagtgtcaaacagggaaactactgagttattaaaattggacacacagtaggagttattatgagatataagacaaaaaatatcagttgctgaaaactaagcatgactaacatcctgctaattaaatgatgagcctccaggctgcagacacaccattttttatatttcatcttttttttgtattttttattttattttttatttttattgagacagtctagctctgtcgcccaggctggagtagagtggcacgatttctgctcactgcaacctccacctcctggattcaagagattctcgtgcctcagcctcctgagtatctgggattacaggcacgtgccaccacacccagctaatttttgtatttttagtacagacagggtttcatcatgttggtcaggctggtctcaaactcctgaccttgtgatccacctgcctcggccatatttcatctttttatgaaccaacaggccccactgtctgc

SEQ ID NO: 44562 - DNA, 1853 bp, Homo sapiens
gcatggataagaaagactgttctttcaaaagcatgctagtgtgtatttagttttggggtttgtgctggtggggttgattggttggtacaggctactgagctgtgaatgggatcggaatttaagtggttgaagcacagaatactgaaaaatatttttcctaccttataattttccatcttttctctggtgacatcaaacagccatttgtctagactgtgacttaaggtctgtcacaatctacagaggacaatcttggtcttatktatgttgagaattggggcagaattcctcccctgagccagagagtttcttttccaccagaggcattattgtgaagctgctaagggagcttcgactgctcatttcctctaaggttaaaaaaaaagaaaaaggaaaaaacagaaaaacaagaaaccagtagaggtgagttattacctaactacagatattatctgagggtaaaatctggagctgtagggaatacttgatcttaaatttttatctcaaacttttgaagaataaaaaagaaatctgaacagtataggtacttatttctgtaaaaaaatttttttttgtgagaagattacaatcaacacattttcccttttactgaacttggatgtctgcttgaggctattgtgtggtgtttagctagtgtcttctaaattgttcatgaattttccaccaactcattctttatatgggaagttgtcatttgaaaaagaaaaacttgagttacaaatgtatcctttgccgtcctggctggagtagactgggtagtagggtgaagtgtctgcctctaattatggagagagaaatactgacacagggagggagagcaccatagagagcttcctctctaagagtttaaatcactatcatgacttacattacagagttcacatagtaggaaattaacactagcatttgaatatatgaaatcagaaaaatgtattgatatatttttattcttgctattaaggaattattattaaattgataaaagcaagggaagaaggaagaagcagtactagagatgagttggtaacaacctgggccacaaaatgatgactagatgcatctaccagaatagaagcccagaaaatatgaaaggtgtcaatagaaggaaactgaggtgattaggtgtcaacatcagagagatatcatgcaagcaatgggaaaatagttcaacacctaggtaaagaaaataatttgaaaggattggtgggaggtggtaagtagatatttaaagagatacatggttggaaccagagagacctgatggtggaaaagagagaccagaacccagccatgtcccagtctacaggaaattatcaatgtcacttaggacacggggttcaaacccaaagttagtgtcaaacagggaaactactgagttattaaaattggacacacagtaggagttattatgagatataagacaaaaaatatcagttgctgaaaactaagcatgactaacatcctgctaattaaatgatgagcctccaggctgcagacacaccattttttatatttcatcttttttttgtattttttattttattttttatttttattgagacagtctagctctgtcgcccaggctggagtagagtggcacgatttctgctcactgcaacctccacctcctggattcaagagattctcgtgcctcagcctcctgagtatctgggattacaggcacgtgccaccacacccagctaatttttgtatttttagtacagacagggtttcatcatgttggtcaggctggtctcaaactcctgaccttgtgatccacctgcctcggccatatttcatctttttatgaaccaacaggccccactgtctgc

SEQ ID NO: 44563 - DNA, 562 bp, Homo sapiens
aattgcagattggcgtgactataagtttatcgtaaccaacctttattgggctctcaaaactgcccagaaatcttggtacattccagtggaaactgggcttcgacaaacagctgtgagccacatttagagtcctcagtgcatcctggagaggtaccagttttggaaagactcaaatgatgaggggcctctgggargatcaatcagaaaaattctgacatttctactatatactcctttcaccttgaaatcccctactaaacttaaaaagtagtgtgggtagtctgataaatgctttccacaagagcccgggtcatgcctgcttagagtcaagtggcatttgggactgtggaagagtcagaaatgaaacaccacaggtcctatcctggatgtcatattctgttgaaagagaaaagtgcccctaaaaaagcaggaagaaaaagaaggcagagggacctgaattttattctgcttccaatatactaagaacgtcacataccgaagataaaggaaataaacaacaaaaagaaataaagaaaaatgatttgcaaagaatgaaatcatg

SEQ ID NO: 44564 - DNA, 350 bp, Homo sapiens
ttcaggcttttaaaaaatccaaatatcttgtgctctaccatggtgagccttggtccttatcattccctgtgttctcccaacactgaggccaagttatttttgccattgatcaaggtggttgtactattatttttcttaaaacttttttttttttttgagacarggtctcactctgccacccaggctggcgtgcagtgacacaatcacagcttactgcaacctccatctcttgggttcacgctatcttcccacctcagcctcctgagtagctgggactacaggcacgtgccaccataccagctaaggttcatattttttgtagaggcaggggtctccctatgttgcccagg

SEQ ID NO: 44565 - DNA, 580 bp, Homo sapiens
gggcttaatatctaggtgactggtggataggtgcagcaaaccaccacggcacacatttacctacgtaacaaaccygcacatgtaccccagaattaaaaataaaaaaaatttaaattaaaaaagtagagactcttcaaagtgagaaggtatgtcaggcagctactattatttttcctccaaattaataagtgtaaggtacctgtttaatcagctggaggttagaaaaaaaataatataaatatttttcatggaaacaaacaagacaaaacaacaacaacaaaagtaagttgaaagccatatgtgttaaggtcactcttagcatttttaccttacatgacaagcagagaccaggaaaagacaaggacatgaatttaaggtactcaagttccaaatacacgaatccattgctagttgtttctttttctctcttttctcaacaagttggggaacacatgcagaggcaacaacagccaccgactgagttgactatattctccatggggctgagtatggacaaggcgtatttcccggacgccatgggcagggggtctccatcaatgacgtggatattcaacactac

SEQ ID NO: 44566 - DNA, 1720 bp, Homo sapiens
atgctgtgtgtgtgtgtgggcacacgtgtgtatatgtgtatgtgcatgcacgtgtgtatgagagagtgatggtgaattggattcctcattcctacttttattccactaagaaatgtgaatttaatggttgatttattctgaattccttgtatccatctttggcaggcatttgtacaaatacaacctgggacttagttctatgactataaagtgggatttatttagttatctggggtcagtggacatgtaacatgcttttataaactgatattgagcaaggaagaaactgtattagaatggaaactgaataacaacaagctgaactcagaggtggctatctcaggctcctgttcattttgtttgtccaagtaggaaatagcattgattttaactctttgcctagcctgaacttcacaatggatgttagacacagagttacagcttatggagagaaggttttttttctcttagggttttaatgtattttataaaattgatggcatctgtcctataatgatccccaaaagaccgtagtaaagttgagggacttagggaattttccctacccaaatagaagtgctagtgaacagacatataccctattaaccaggccaggtgggaaaaaaaacaaaaataaatataaccaaacaaaaaaatataatcagttttggtaaatttatgaatttatgaaatgagtaggcttcaagaacagaatctcaatttataatcctgcgctgtatccataggaggtaaaaccatcttctgttggctcatttttttaaccattatccaaaaactaattcactcatcaaaagaggatcactgctatttttattcggaaactcgaaaattgcaaataaggtataggattccaaatacttgctttagccattgaaactgggatattcaaataatttccttagctttaaaacaatacaagtcatcagaaataaaaagatctacaaatttaatcattcacaaagtaagaacttctatacaatgaaaattagcacaactaaaattggaggaggtcaatggtcacagaaaaaatatatcaaaagtaacacatttgtgtctgttatacagggaaccactctagggtagatgaaagagccttagtttggcgtctaagagacacaggtcatagtgaagattaaatcatacaatgcatggagataagtttcttttaggattcatatgaaaaacatcaatagtcaaaagaggtttacataaattatactattgatatggtttggcggtgtccccactgaaatctcaccttgaactgtagttcccataatccccatgtgtcatgggaaagacccagtgggaggtaattgaatcatgggggcagttatctccatgccattctcgtgatagtaaatgagttctcatgaggactgatggttttataaggggcttttccccttttgcttggcacttcttcttgccaccatgtgaagaaggacatttctgcttccctttctgccatgattataagttttctgaggcctccccagccctgcagaactgtgagtcaattaaacytctttgctttataactacccagtcttcagcagttctttatagcagcatgagaatggactactacaactatacagacttaattgattaaaattgtgcactttttttttttttttttttgagacagagtattgctctgtcgcccaggctggagtgcagtggtgtgacctcagct

SEQ ID NO: 44567 - DNA, 534 bp, Homo sapiens
taagaactaaattcttcagggtggttacatcagtattggagatgaaatcgcagtgagccttctctcattttatttatttttttctcattattgaatttttaataatgaacatgtactacttatataatcagaattatatagtattacaaatgtgtttccatggttattatggtttctatttactggagaatactatatctcaaagaagtcacagggtttgtgaatastgaaacaaaacaagatttgaacacaagccctaattgcagagcctgaactattagtcactatgtgatattgcctttggaacctgagctttctgggacaaggatggtattttatttatggccatattccccacactatctagtgcagcacttagcatgtcctaagcaattgatatgtgtctatcaactgcaattgaattccagtatgaacattctgtttctaacacaaatgtaatagactttccatttataagagcataactatgtacagctgatttctaatatgcttcttgattgcacttaggaacaa

SEQ ID NO: 44568 - DNA, 579 bp, Homo sapiens
tccaacttaggttttttttttttttgagttggagtctcgctctgtcacccatgctggagtgcaatggcgcaatctcggttcactgcaacctctgcctcccgggttcacaccattctcctgcctcagcctcccaagtagctgggactacaggtgcttgccaccacacctgactaatttttgtatttttagtaaagacggggtttcaccatgttggccaggctcgtctcgaactcctgacttaaggtgatccatctgcctcggcctcccaaagcactgggattacaggtatgagccactgtgcttggccaaacttaggggttttgtagagrtagttaatagaatttcgcctcaaaatgtctattctgtatgacaagtctttatagggcatgtaaattacacatctcaggcagtttatccatttgaatttaagttcttttcttcttttctctcctattaatctaattatctatctccatctgtctctccatccattatacctccaccctcctccagctttccacaaagttgattggtcactataatttgctctccttttcatcttcccctcttttggggact

SEQ ID NO: 44569 - DNA, 617 bp, Homo sapiens
caaaagaaaaagccattctcttgaaggttggggaaagattgtcttgcaattctgctgactcaactgtaaagttacaatgagtacatctcatacaattgagtagtggccagtagtaaggaatttggtgtttgacatgtttaatataactyacatacatttgcaatttcaaggaaacacaatattgtttatagaagccctctaattttcataagttgctaccttcatttggtacctactgattatcatgtgctaactaggagaaaacacctacaagcaaacaatattatagtgctgcgattgattctgctttaatgttgcttgttcaggtagcaaagccattagctacttcttgatagtttttatgaatagacttagcacctagtattgagcaaccactgaagaatgcatcttccgttaaaaggttgatttattagtttatatgtaaaagaacactggaggttataaaggtaacaaagaccttaaacattacattgatttttttttctcagagctttttttcttcttgttgtattgcagggtaataaaatttcactaggcccattggatctataaaatctgaagtacaaccaccaactgatacaaatgaaattgtttga

SEQ ID NO: 44570 - DNA, 1189 bp, Homo sapiens
ggatggaaagatttagacaaaaatcacaaaacagagaggacaaaaggtcacaatcagtgtctatggcatggtagaaagcctgcttgcctctgagtccagaaagctgcactggaatcctgcaacatacctgcttatttccgaggtctacgctgagcctcagtgtcttcctcaggacgaggttggggctagtggagcaccctgccgtgtcctccctcccaacttctgcacgctgattctggttccctgactgttcctcctkttcccgcccaacaaggtactcttcacacaggggtcttgctacagaatgaatcctgccttgttacccacctactccaaaatcaccactggtcactcccttcgagagcttagcctgtcagaagcactcctgcccacagggtcagctccacactcctcagtcctttgggacgtggcctggcctgaggtcctggccttaatgctcatcatagcagccagaccaggtgggcgcagctcttcaatgccccctgcctgttcctgccttgccctttctctctgcttcaacaacctacctaggctcaaactgccaagtaagagcaatcacctccaaaggctgttgtgagtaaggagtgcataagggaagccatctgacgcatttaccacagtccctggcatggccagtattatctgcttacctgtcatcactgttagaattattattagaattgcccatcatggccaggcatggtggctcacaattgcccatcatggccaggcatggtggctcacacttgttatcccagcattttggaaggccaagacagacagatcacttgagcacaggaactcaaagcctgggcaacatagcaagaccctgtgtctacaaaaaaatctaaaaattagatgggcatggcagcacatgcctgtagccccagctattggggaggctaaggcaggaggattgctttagcccagaaggtcaagcctgcagtgagttgtgattgcaccactgcactgtagcctgggcaacagagtgagacccagtctcaaaaaaaaaaatgaatgaattgcccaacacacctaccatctcctaagactcgtcttccccaggaggtcttatcccatcgcccataccagtgctccccaggttgggttaggcctgggccccaggcttcctggcacccaagcttgcctcttatcttaggactcgcca

SEQ ID NO: 44571 - DNA, 1189 bp, Homo sapiens
ggatggaaagatttagacaaaaatcacaaaacagagaggacaaaaggtcacaatcagtgtctatggcatggtagaaagcctgcttgcctctgagtccagaaagctgcactggaatcctgcaacatacctgcttatttccgaggtctacgctgagcctcagtgtcttcctcaggacgaggttggggctagtggagcaccctgccgtgtcctccctcccaacttctgcacgctgattctggttccctgactgttcctcctgttcccgcccracaaggtactcttcacacaggggtcttgctacagaatgaatcctgccttgttacccacctactccaaaatcaccactggtcactcccttcgagagcttagcctgtcagaagcactcctgcccacagggtcagctccacactcctcagtcctttgggacgtggcctggcctgaggtcctggccttaatgctcatcatagcagccagaccaggtgggcgcagctcttcaatgccccctgcctgttcctgccttgccctttctctctgcttcaacaacctacctaggctcaaactgccaagtaagagcaatcacctccaaaggctgttgtgagtaaggagtgcataagggaagccatctgacgcatttaccacagtccctggcatggccagtattatctgcttacctgtcatcactgttagaattattattagaattgcccatcatggccaggcatggtggctcacaattgcccatcatggccaggcatggtggctcacacttgttatcccagcattttggaaggccaagacagacagatcacttgagcacaggaactcaaagcctgggcaacatagcaagaccctgtgtctacaaaaaaatctaaaaattagatgggcatggcagcacatgcctgtagccccagctattggggaggctaaggcaggaggattgctttagcccagaaggtcaagcctgcagtgagttgtgattgcaccactgcactgtagcctgggcaacagagtgagacccagtctcaaaaaaaaaaatgaatgaattgcccaacacacctaccatctcctaagactcgtcttccccaggaggtcttatcccatcgcccataccagtgctccccaggttgggttaggcctgggccccaggcttcctggcacccaagcttgcctcttatcttaggactcgcca

SEQ ID NO: 44572 - DNA, 1189 bp, Homo sapiens
ggatggaaagatttagacaaaaatcacaaaacagagaggacaaaaggtcacaatcagtgtctatggcatggtagaaagcctgcttgcctctgagtccagaaagctgcactggaatcctgcaacatacctgcttatttccgaggtctacgctgagcctcagtgtcttcctcaggacgaggttggggctagtggagcaccctgccgtgtcctccctcccaacttctgcacgctgattctggttccctgactgttcctcctgttcccgcccaacaaggtactcttcacacaggggtcttgctacagaatgaatcctgccttgttacccacctactccaaaatcaccactggtcactcccttcgagagcttagcctgtcagaagcactcctgcccacagggtcagctccacactcctcagtcctttgggacgtggcctggcctgaggtcctggccttaatgctcatcatagcagccagaccaggtgggcgcagctcttcaatgccccctgcctgttcctgccttgccctttctctctgcttcaacaacctacctaggctcaaactgccaagtaagagcaatcacctccaaaggctgttgtgagtaaggagtgcataagggaagccatctgacgcatttaccacagtccctggcatggccagtattatctgcttacctgtcatcactgttagaattattattagaattgcccatcatggccaggcatggtggctcacaattgcccatcatggccaggcatggtggctcacacttgttatcccagcattttggaaggccaagacagacagatcacttgagcacaggaactcaaagcctgggcaacatagcaagaccctgtgtctacaaaaaaatctaaaaattagatgggcatggcagcacatgcctgtagccccagctattggggaggctaaggcaggaggattgctttagcccagaaggtcaagcctgcagtgagttgtgattgcaccactgcactgtagcctgggcaacagagtgagacccagtctcaaaaaaaaaaatgaatgaattgcccaacacacctaccatctcctaagactcgtcttccccaggaggtcttatcccatcgcccataccagtgctccccaggttgggttaggcctgggccccaggcttcctggcrcccaagcttgcctcttatcttaggactcgcca

SEQ ID NO: 44573 - DNA, 537 bp, Homo sapiens
ctgctgctgctcgaagccagtggggtgcatagcatttccatgggaatcctgagcatggcagggcccccacacctgctgtgggtccagggcctgtgccctcttcctctgtgttgcagagacagcctgggatctctgggcatggagttgggggaatcacaaggggacagggccctgtgggtggaggcatcaggaatggcaaccrcacttcggtttgggggtggctgggtctgagtttctgctgctcctgctccccaaggagtgcagcctcagtgggcccagtggttcctgtggcttggggagctgggcactatggtgtctccaatccccaccccaggccccagtgcctggccagcttgggccaaaaggagaggctggacttcggagggtgggtgtgagtgccttcgctgaaactggcccctgccacccagtggacagcatgacaaggtgatgctgtaacgctaccacttcctgcaacctggtctaggtttttctggctttgcccacactgctgcttcctaccaggagaaggaggatcca

SEQ ID NO: 44574 - DNA, 566 bp, Homo sapiens
tgcccccccattactcccatttttgaaagctgtcttgcttattatcaactgtttttttttttagtggactttaatttggttgagagctggcagtgaaatccacttcactgtgatggaaaacccatgcttttaatcactatataggcttaataccaattcctagttctcttctctcagcatttaataaagagaaagtaagggtggagcatgttaacattagggtaatacatgttataaagcctttccttagtgccactgtcatggaagcatattctcatttgcttattctggagacccaggttctgggagtgtggcttaggacagcctaacttctctgtctcaatttctcaatctgtgaacaaaggtggctagtcagatgaattgtaaggttcctcataggcctgatatatgctctaattccatatacccataaatagaagacagggagatgggatgcttctgctcctgggcttggmctggtcaaagagggtgagttatctctgtgcagtgttggaatatttgctgaagttaatgagaaatgagctctgaatacattgaaaaacaca

SEQ ID NO: 44575 - DNA, 559 bp, Homo sapiens
catttggaaaatgaggatcatgataataatagttaattgtttgaaagtttcaagattaaatgagataaaatgttattgcacagtggctggcacaaagagtgtgctcagaaaatgttagttgatatgatattattttatttgtaatacatcattcatatgaaaagcacacaaactacaaaaagataaacgtatttactcatggaataagrtgaggttctggatctatttcgaagtaatctgatctaggaggataagcggagatgacacaagactgaccgtaagttaaagattgtttcagccgctgatacgtggacgttcactttactctcctttttgcctttgtatatgtttgaaaatgtccatagtaaaagttaagaataatccatgtgacacacatatacacaaccaaaaatagcatgctgaagtttctggcttctaagcaacctgatgcaactagatgccactatgttctccctattccacaccaagcactgtgcccaatcaacaccagaaaacagagaactgaaacagaaaacacttaaggataacccaggtttca

SEQ ID NO: 44576 - DNA, 353 bp, Homo sapiens
cacacagaaacacgaggcaggacagggcaggctgcggttacctcccaggcaattctaatgcacagtcagccaaagaatataaagaagagggctggaaacagaatcttaggaaatagccagcttgagggggtagagactggaacccagagaaagaaagaggcagcagcaataaatcacgtaaacggagaatcaggaaagttaaagaaagtttccaacagaaaaggggatgggtgatttccaatgttacacaaaggtaaacaagatgaggttggataaagggttacagtcagcagtttgggctwaagggtactcattcaaccacatatgtgttttgaattcttggatagtaggca

SEQ ID NO: 44577 - DNA, 1350 bp, Homo sapiens
acttaggtttcagttattaaatccaatgctgtcttcagtacactggtaaatcatcagagaatttagtgtctaaataaattaaacctctatgttcttaatagctgaagcttcctcatatatataatatatatatagtatatatatattgtgtgtgtgtatgtatatatatatatataaaattagagaattatttacatctggttttatcctcttacaagagcatttggatttgagagcagcaagtggcaccctgccagtgacaaatggaggcactgtggttgccttcccatcatccgctaccttttatggtgtcaagggatttctagctctcctttgtgacccagctgcaaaacagctgttgtttaggctcctgccttttcactctcacaagacagcttttcttaccatccccacagggtttaaacttctgcagtacaagtgtcaactccgttttgtgagctcaggcctcccgtttgggagccaaacagcatagcacttctcatgctatcgctaagcagtttggaaggaattatccagtgaatgcttatagtgctggtgataacaaatgagaaacacccattgtagttacagctgaatggttggagtcatggctaatagctaatatttcagggttttctaattgcactaattccctaaatggagatcacattgaccactttatccatctaaagtaaagtttcctattggaaaccagtttttcatgaacttttggtgtcatcttatgcatcatagaatgctaataaaatttgcgggttttttttttttyccttatgaggaggaggtgttaccaattatggcaatggcatgaagctctgagtatcactcaggtctcaagatttagtcagatttaccacggaaactatgccatccatcatttaggcaacaacacttcataaggagagtacgcatttaagaaaagtgttttgagtgtttgcttttgcaagatgtttagcattcttcgtgcatctttgaccacctactacgcatctggtccttggataagtgttgattaaacaattctactaaattggtttacaatgagcaaaagagattacaaatggtaattagagtacatatggtaagtgtcacaacaaaagtaggaatcaagtgttgttagagcacccaggaggaaaaagactcagcttaaagaattctgggcaggcttaatttggtcatggccatagttggcaagttatctaagacaaatagattttggggttatttcctcttctaattttaaactaaactaaaaaaaaaaaacatacacattaatttttatgcccccttatcatttatgttttatgttattttttaaaaaccctcattgtg

SEQ ID NO: 44578 - DNA, 1350 bp, Homo sapiens
acttaggtttcagttattaaatccaatgctgtcttcagtacactggtaaatcatcagagaatttagtgtctaaataaattaaacctctatgttcttaatagctgaagcttcctcatatatataatatatatatagtatatatatattgtgtgtgtgtatgtatatatatatatataaaattagagaattatttacatctggttttatcctcttacaagagcatttggatttgagagcagcaagtggcaccctgccagtgacaaatggaggcactgtggttgccttcccatcatccgctaccttttatggtgtcaagggatttctagctctcctttgtgacccagctgcaaaacagctgttgtttaggctcctgccttttcactctcacaagacagcttttcttaccatccccacagggtttaaacttctgcagtacaagtgtcaactccgttttgtgagctcaggcctcccgtttgggagccaaacagcatagcacttctcatgctatcgctaagcagtttggaaggaattatccagtgaatgcttatagtgctggtgataacaaatgagaaacacccattgtagttacagctgaatggttggagtcatggctaatagctaatatttcagggttttctaattgcactaattccctaaatggagatcacattgaccactttatccatctaaagtaaagtttcctattggaaaccagtttttcatgaacttttggtgtcatcttatgcatcatagaatgctaataaaatttgcgggttttttttttttcccttatgaggaggaggtgttaccaattatggcaatggcatgaagctctgagtatcactcaggtctcaagatttagtcagatttaccacggaaactatgccatccatcatttaggcaacaacacttcataaggagagtacgcatttaagaaaagtgttttgagtgtttgcttttgcaagatgtttagcattcttcgtgcatctttgaccacctactacgcatctggtccttggataagtgttgattaaacaattctactaaattggtttacaatgagcaaaagagattacaaatggtaattagagtacatatggtaagtgtcacaacaaaagtaggaatcaagtgttgttagagcacccaggaggaaaaagactcagcttaaagaattctgggcaggcttaatttggtcatggccatagttggcaagttatctaagacaaatagattttggggttatttcctcttctaattttaaactaaactaaamaaaaaaaacatacacattaatttttatgcccccttatcatttatgttttatgttattttttaaaaaccctcattgtg

SEQ ID NO: 44579 - DNA, 597 bp, Homo sapiens
tgcctacggggtttagttgatcgcaaacttaacatgaacttttaaaaggcagtcatgtcagagcatgcctttgctctgctttgcattggagagctgtaatagaaccaataatctggaaaaaaaaaaagcagattttttatttcattgtgaaacaggctgacttgtaaggaagtgaaagaatgcaaccaaaccattgttaaagtggatgttgatgggattcttgcattgaggagactggaccagatgatccctaaggtccctcccaatgaatttcttatgaatttccatatctcattcacactacatcccactgccaggtatgcaaaatgtgtagatctactaacgttgcctcaattttaaawgctcacaaaaaccaaactctagcattttttcttcccattttaagaatgtagctttcttcttctgggtggttcatcatgccagcctctatgttcccagggcaccttgtgcttgtctctctctctctttctctcagcccttatcacactgaatggtaaagagtcattcttaatctgctttctaccaccaaactaggagctccctaaaaggcagagcctagcttccatgagtgcttca

SEQ ID NO: 44580 - DNA, 597 bp, Homo sapiens
tgcctacggggtttagttgatcgcaaacttaacatgaacttttaaaaggcagtcatgtcagagcatgcctttgctctgctttgcattggagagctgtaatagaaccaataatctggaaaaaaaaaaagcagattttttatttcattgtgaaacaggctgacttgtaaggaagtgaaagaatgcaaccaaaccattgttaaagtggatgttgatgggattcttgcattgaggagactggaccagatgatccctaaggtccctcccaatgaatttcttatgaatttccatatctcattcacactacatcccactgccaggtatgcaaaatgtgtagatctactaacgttgcctcaattttaaatgctcacaaaaaccaaactctagcattttttcttcccattttaagaatgtasctttcttcttctgggtggttcatcatgccagcctctatgttcccagggcaccttgtgcttgtctctctctctctttctctcagcccttatcacactgaatggtaaagagtcattcttaatctgctttctaccaccaaactaggagctccctaaaaggcagagcctagcttccatgagtgcttca

SEQ ID NO: 44581 - DNA, 633 bp, Homo sapiens
  misc_feature (1)...(633): n = A,T,C or G
tgcataaatatatatatacatgtatatatatatatatatgacaggaaaaaatatatatcgtgtgtgtgtgtgtaaaatttttttttatctggcccactattccaagctctggcattggaggtttgaagatcacattcctgaaagccgaagggcatgagcctttcttccaacctaaatngggttggaagaaagtgcagctcactcacggctggcttctagatcacagatactatccatcccagttccccacccccaatttttgagcccctttcaaatacacgtgtgcccaggcacagcaggatgtcatgccttcgaggcggcatcactaagcatttttctgcttctagctgcttctcctccccagcccactcaccccaagaatctgcaactaaacccctaaacgtattcactgcatgaggtgaatggagtagtggggttatggacttccgggtaaagtgatggaatgataggttccaaattaagaatgttcttggccytgttcaatcttcaagtttccttctcgcaagcaaaagtgagcctccatcctcccaaatccacatatcttcctgggtctcatccctctccccatctcttttccttttcccctcccttcatatctctctcctctgcttt

SEQ ID NO: 44582 - DNA, 445 bp, Homo sapiens
caaaaaagaaaggcaagtcagagcagctgggaaactttttcaaggacaactgggtaacaatagtaacaacaacaataataagacccattataaaaggcttagaatggcacaaagttctaaggacgttacatatattaactctttacacaccacaaccctataagatgggtagagttataacccttatttttcaaatgaggaaatgaaacagaaagacatgaagtaagcttcctgaggtcccaccagtagtaagtgacagagctaggaaaaagccctaggctctctaacttagagtcagtgctcttaaccagtgggttgtaaactataggtaatattagtacaatttgaaatagctttgcaaatattattttttactcccaaagtacatagggaatacccagagaaaytggcattataattattttgattttctttaccagcaatc

SEQ ID NO: 44583 - DNA, 394 bp, Homo sapiens
catatgaagaggtggaaacggattctgtgcatgatactggttaggatcgggaactgttttttttaaaggagatttttaaaatttgttttccttgtacacatagccttaatattgtgttgctaactgctctctgggaacaawgtcataccaatcacaaatacattgcctaaagtgggagggttattactctgctgtgaattccatctcctattatgttttaaagatgctacaaacttgagacattattatgtagatgacattcccagcaaatccccaaacaacacttaatgagatttcaaataccaggatcatgaaacagtaaaagatataaggaaataaagaaaagcacagtatatgtgtagaaggcattaaaacacaaattttataattatga

SEQ ID NO: 44584 - DNA, 2014 bp, Homo sapiens
tggaagtcctgcatagggataatgtggagaacatgcaaaagaaatacacatcaccagctcctcaactcagagctccaagggaatggccaaggaagctgtattgtcctaagaaatttgaggctgtcttgacttacaataaatcctgctcaatcatatrcatgtatacacacacacacacacacacacacacacagacggtgttgtcagtgaagcctctaacaatgcatcttgactggacagatttgacaattaaaatggctggaagaaaatagtcttcataagtggcacttactattcacattacgcattaaaaggacatctcctaaattaaatcttgtctacgataaaaaggcagaaaatcatgacccaaggctcatttataactgcagaaatgttcaagatagaccaatgcttgctatgtttaggaactgacaagaaagtacaggtctttataatctaccattttgcctcatttgataccaagtgaccttcataatgcaggctatagagaattgcaagatttgtcagagatttcaggtctttggaaagctatgctctttcacaagaacagccatggaaacaggaagaaagtcaattcccacttaaggtaatcagaatttacaaatattcctttcttcattgaaatctcaataggcacttcaatattatatttaattaattcttttgttacagtcatgcatcacataacaacattttggtcaaggatagtgcacttgtatgacagtggtgcaataaaatcataacactatttttactgtacctcttgtatgtttagacatgtatagatacacttactgtatatatataagtatagatatacttaactgttgtgttacaattgcctacagtattcagtacagtaacatgctgcacaggtttgtagcctaggaggaataggttataccacctaacctaggtatgtaatcagctatagcatctaggtttgtgtaagtaaactctgtgatgttcatacaataataaaattgtccagcaatgcatttctcagacacacccctctcattaagtgacacacgactgtattagttaacactatgggaacttcatgggaaatggacactctagctccaccataaatagaaactgtttatgtcaaaaaacacataaaagcatagttgcaagattacaattccttccagatatttcatttagtatctccacagatcactaacttcctgaataacattcttgtgtctccactgcctcacatttgatttcaggtcattccatcaattgtcaaagacgcatccaacattaactttccaactactggtttggattgtgtcaacattgtcatcctgggccacaacaacacaaaaggctaactcggtgaggtaacatagacactgatcagtgagattttgctgatgggtggtaccattttttactaagatcaagggtattcataccttcaggcatctagacaacattgaaaagggcaggttcatagataaaaaaggaaagaggaagggtttttgcactatacatcagctaccgtgtctcctgtttaacctgagtctgaagagattcaaagtgcaggtgccatgaatgcctctttaatagcttcatgtcgattgattttctgggctacacttcccagcattcaaattgctaagtgcatataaactactagtgaatatttattacctggatttgtgcttttgagtgaccttatctatagttatgtgcttcagtggtctaacttggggtgcactccaaactttgataaattaaagaccctgcttattccttgagtaatgctacactgacaactgatttagtgaatgccactgtgaaaataataaacctcttggtgaatatatttagacatgtcttgtaacctgtacacatcttaaccagggatgttacttggtctttctatgttcaggagtgtgtggagatagaaaagcatacaggattgtaattgtttcctgtgagactaacagaaaattcaagctagtgaagtatgcttatg

SEQ ID NO: 44585 - DNA, 636 bp, Homo sapiens
tgtctgctcttatttgttggtgtctttgcccacgctgttccctggaacacccaaatgcccttcgtcctggcatgcttagctctgggaggaccttctgcaggaggccttcctcacccactcatacaaagacagagccccaaaccacatttgcgtgtagttcaatcgccacacctaccacagtgaacttcagtggttttctcttctggctttcccattggactgtgagtttcttgaagcctgtgactttgtcttaattctggggttcctaggttatttttttgcatgccaccacacccagctacggggtctccctgtgttgcccaggctggtcttgaactcctgggcttaagtaatccacccacctcggccttccaaaatgcaggggttacaggtgcgagccatcacacttggcccttgatcctatttctatcctgtgcatctagaatagcgcctgtacagtttgagcacattatcstgtttattgaatagttgcatgaaggctggagagtgtggatgaatgaatatataaaaagatcagaaaaatgttaccccccaaattgaagctaataaaagaaaaagagtgtcaatgactttacatatatgcagaatttgtacctataatggttttttccacat

SEQ ID NO: 44586 - DNA, 550 bp, Homo sapiens
agctatgaacaaatcattcagcaacatggcatatcacttggaaacagggcatcttcacttggttcaagtctattttatagttctaatcgaaagattgcttaactccagcaaattgctcaatcaacatagggacatccatagtctgagcacatcaggttgactaagaagcagggttctaaacttcaagatgggatggaatatggcatctcattctgtaagtttagggagggaagagttgacttgacttcactacagttactgctagagtttgattgatctgacccctccaaatcttgtgttgaaattsgatctccattgtgggaggtagagcttaatgggagaatttgggacatggggccagatccctcattaatagattaatctcttccttgagactggggttaggtgagttctcactctattagttcccaagataatagttgttaaaaagagccagacacctcccctttctctcttgccatgtgatccctgtatatgccagctcccctttaccttctgccatgagtggaagtagcaaggtcttaggcta

SEQ ID NO: 44587 - DNA, 542 bp, Homo sapiens
tcagcatggtcaggttctggtgaagactcttttccagtttgcagatagctaccttctcactgtgtcctcacaaggactttccctggtgcaggcaagtagagaaagaaaaagagaaaactcttccccttcttataaggccactaatcctattgaattaagaccctacatttatgacttcatttaactttacctcctaaaggccctctctcctcacacagttgcctcaacatttgaatttggggggaacacaaatctgtccatagcagtaagaatcactatccaagaatgattacataactttctcaaggtcacacagtggtgaatgatggagtttcaatttgaatcatggcaggctggctcaagagaccatacttagcygcgatcttatgcttcctctaaggatcaatgaaaagagggcatattaggtatgacatagctgtctccattaacggtttctctctactcaatactttattgtgatttcttgtttaacaacgtgcttttattccaatctaatttcctcccaaattatctgttttcta

SEQ ID NO: 44588 - DNA, 601 bp, Homo sapiens
tgaggcctcccaaggtctgtggaactgtgtcaattarccctcttttctttataaattacccagtctcaggtatgtctttatagcagtgtgaaaactgactaatgcagcccctttatatccacagtccgtaaaattctcaccccatccaaccctgctccctctttctcgtcacttcaagctctaagctttcatgtcccacttaataaaaccctaacctggcattagctaaacctgtgtccactcctcccatagcatattatattttccaaagattaatatacagatcttcttatgttactttacgttgtgactggtagaatctatgagttggatttacgttcttttcctttgaatattgaaggatacttgttgttgatccaacccatgaagtgtggttgaagtgatgctctgtggtttccaagccaaagcataaaaaggacacagattctaacaggttcttactctctctggggatgcttgcccttggatatcagctattatgctatgaggaagttcaaactaaccctcaaggagagaactcatggagatgaactgaagtctctagcccacagccagcatcaaccaccagacatgaacaact

SEQ ID NO: 44589 - DNA, 606 bp, Homo sapiens
ttaacgtcaaagtttactaggttttgctgacaaaactaatcttatgtattactggctttctgatgagcttcygtcatccttccctcatttttctgccctgctctgtccgccattcccgagaaatagactaggagtcaagggatctgtgtacaagtttaagcttggcttgtagttagttgtatgactaaagatgataaagatgagccagctcaactctctcttctgttgacctgaaagtgttgggatgggggaaaatagatgaacaataaatgaaaataaagttcttgagaaaagttacaagggcagaacaaatacatgacagtaatgttacaaaacagtcttgaaacctcagaggaatctaggcaactcttaaaaagcctcaagccctttccaaagtatgaacctgcttatgatttagagtctgggccaaaagatttataggatttgagaaatgagaaataagtttttctctcttagacaactcctatataaaagcagtggttttcgagatagttatgttctaaggcttggtggatgagaataccctgattaattatgcatcaatatggaatagggtccatatataccacttctgtcattagtccc

SEQ ID NO: 44590 - DNA, 606 bp, Homo sapiens
ttaacgtcaaagtttactaggttttgctgacaaaactaatcttatgtattactggctttctgatgagcttctgtcatccttccctcatttttctgccctgctctgtccgccattcccgagaaatagactaggagtcaagggatctgtgtacaagtttaagcttggcttgtagttagttgtatgactaaagatgataaagatgagccagctcaactctctcttctgttgacctgaaagtgttgggatgggggaaaatagatgaacaataaatgaaaataaagttcttgagaaaagttacaagggcagaacaaatacatgacagtaatgttacaaaacagtcttgaaacctcagaggaatctaggcaactcttaaaaagcctcaagccctttccaaagtatgaacctgcttatgatttagagtytgggccaaaagatttataggatttgagaaatgagaaataagtttttctctcttagacaactcctatataaaagcagtggttttcgagatagttatgttctaaggcttggtggatgagaataccctgattaattatgcatcaatatggaatagggtccatatataccacttctgtcattagtccc

SEQ ID NO: 44591 - DNA, 1617 bp, Homo sapiens
tcacactcctcattttctcaggcttgcatcatatacatcatctaatctgggagggtccatcattgtgcatccatagtgctccctgcatacttctgggactacatttattaccttttaccttaaccgctgtttcgcttgtctgcctcctccatccttggagatggcaactgtgtctgactcatctccgtgccgaggataaggcctagcagagaggatatgttcggtaaatgcttaatgactggatgatggatggagtttcgcttggccagggtcttaagtttaaactcagcatgttaccgccaatatactcacaggttagcttctagtttttattttttagcccaggctactgtatggggaaagtaggtagaaagaaaaggtcagtgttacctgcagtgggataacagtcaggtttaaacagttttacaagcaagcaccttaactgcctcctctggccagttactttagtttggggatactcagtcagagtgccgttagtccttcttagtcttcaatttctctctttactggatgctccatgtcaacagaagccatgttttccaatactacagcatcttcgcaaaactttgtcaagtgagcctcccacctcacaaatcactgaaggaacagaccagaaggatagcctccagcctcacgcagaattcttatgatgtctgcttagattctgagctattgccaattttcaggtccagtaccactgtccaagcctcaacctggcaagaattcaacaattcttcattcaaaacaagtcaatcatttacccgctggatcctaggaaaggacccaatgaaaagaaaaggctgtgtttgactcactgttcctctccaacagagtcaaagggttaatcatttgtgtgcagtctgggttccttgattgtaaattaacttttttttcatatgaaaacacaggaagacattagtattatttccctaatacttcttttagaaaaaacatccttatttttctttccatagaaaaatcaggaaactgcgtggcaactgttgcagaaacacaaagacgatgcaactccacatgcatattttccaagtataccaggatttgtggtacaatggacagttaacatttgtatacagatatacattctttgggagaatcatcactatattacagcagytgttcctttttgcaccaaacctacagaactgttgtaggtcttattttatatttctgcttttttatggataagcaatcaatatataagactttctcacccaggcaatcatggaagcaaatgttgtttcctttagccacatacaatggtaggaatattatgcagagattgttctagaatacacaaaagtccccaagcagctaaagtacttttaaagctgaaaaatgctggtaaaatcaactacatctgggccagaatcagaggtaaatcgacatagaatgcctaaaagccatctgaatagtaattaaggtttattttttttctacaaatcttactttaatatagcacttaacctttcaaatgttcttaagccaacaaatggatgatttaataaaggtcttagtttattttgagctttgagatagaacttgttgcttgactatattccattttgaagctttggc

SEQ ID NO: 44592 - DNA, 1647 bp, Homo sapiens
tacatactatacaattcttttttgtagtcatggaagttagcacatcctactcagctttgtcacttgactaaatttttcatttctttgccttttcagaatcctgaggaatagaaataggaattctctttaactttaaagatctttgaatttgatgaaatatttttattcctacctataatttcaggatccttgaattcttatggatatttttatcagctgaatcctacatatttcttatgttcttgagtaacttataataacaacctataaggtcagtctactgatataattgctattatgccacawtgcaggagacactcaagtatatgaactccttcttttctaagggatcattctcaagaagaaaacatacaatgttatttttaggtatatatgacatatgccagtggctctcaaatatatatctttaaccccaattactttcctgaattctagagttttatttccagtcttctactagacatttctacttacatatctaataagtatctcaagcaatcacggacaaaattgaactattgaattttgcacccacttctttaatctcttcctccttacatctttctcatgacagtaccaaagcatgaatattcattcatgtactcaggccaataatctaggagttattcttgattcctctctttggcttgcccattcctcctgttccatctaccccatcattaagttctgttgcctctgcctataaaagtaccctgagtcactccatccaactcaccatcatctctcagcaggacaatttcaatatatcttcaactgatcttgctgcttccgctcctgctcttctgtcatccattcttcatgaagtgattttgttaaaattgaaatcagatgttcttccctccccaaaactctctaaaattttcttaccactcagaataaaatccaaacttattacctattttttttttacaagatatgatctttgtgaattatttgacctcatcacctagccccttccttactcactagacactggtcagagagcttttttatttcaaactcactgagcttatttctgtcacagggattttgctctagcccttccctctgaatagaacaccgtttcctctaattgtaggaaggctgactctttttgaataattaaaatttcagtgtaaggtaccccttgctgccctgtatcatttcacattattttaattctgtccattgcatttctcaatacttatatattttttgtgatcactatatggcttttccaataatatgtacagatcatgcctattttgttcactactgtatttccagggcttatgggatatgatatatttaatgtatttttataaaagaacaaacattcagaatataatctagctctccaaatatctattgataatttcatccacatgtcccataggcacctcattatttaattccataattactcttttttctgtatcccctatgacaaagactatcatcacccatccatgtgattttttttaatgctctcataggtgacttacaggtccagaaaagattattcagagactacattttctttgatgtgtgaatttgatttgatcctatgaatttgataatatttattaatatgccaagttaagtcacctttaaatttgttttaac

SEQ ID NO: 44593 - DNA, 596 bp, Homo sapiens
cagttttcatatccttttgaattgggtattcatggtagactttgcattttacctaaaatatgaatttagactgtcacattttcacattcgtttaaacagatttaccaagcatttaatatgtcaggaactatgctgagtagcctcctacttctaatcttaagtcattatgtgaggacaattatccttcttttagaagggaggaaattgatatttaatagagaaattaggctaagaaagagctggttagcaacatgtcaggcatttgaacctatatctcaattctgcaagttccttaacttttacaaatacaaaattatttttaaattataacattaattccagttcactgtagaacrtttgaagaatacagaatataaaaggagaaaatgaaaatagctataatctcaccccctggaaatagtatttttagatattttcgtctagtctttttgacatattttacataactgggaacagttatgttctttcttccagaaagtaggaagttttcagatttacctgttaggacaaaagaaagcttgagaatttctctctagaatttacactcagtttacactctagaatttacactctct

SEQ ID NO: 44594 - DNA, 641 bp, Homo sapiens
ggtggcctctggttgcctgggttcaaattccagctcagccattcactttatcaccatgagcaaaaatcaataaaaacctactccagtgtccttgctgtattatgctggactatgctatttcacatttattacttccagcccttacaatgacctataaggtaggatttattaatatcctcattttacaggtgggagaatgattcactttcccaaggccctacaactaacgcaagagagctgggattcaaacccaggtctaactcctaaaatctttactgctcttcctccttacttcccaactcctgctgtgagcctcaaaaatggaggtgagactaacaccttcctcacaggattacagcatctacttgacataatgggtgtatgacctgaaattttaaggtcaaagtattttttagagatgtagcattgttctaaggcttccaaataaacagatcattacgtttcccayggtagagtgacattaggataaaaccccagctcacaagcaccactacaatgaaccaggaagaccccaccgtcagcaataaaccagtctccattacatgtaattacacaaaaaaccaagaggccaaattcaagtcattcgttatgaaatgcttttttctttacaaagtaaacat

SEQ ID NO: 44595 - DNA, 549 bp, Homo sapiens
gtaaattggattttttggccgggcrtggtggctcacgcatgtacccaatgctttgggaggccaaagtgagtgaatcacccgaggtcaggagttcaagatcagcctggccaacatagtgaaaccctgactctactaaaaacaaatacaaaagttagctgggcatggtggcacgtgccattaatcacagctacacgggaggctgaggcgtgagaattgcttgaacctgggaggcggaggttgcagtgagccgagatcacgccactgtactccagcctgggtgacagagtgagactccatctcaaaaataaatttgtttttttttaagtttgggagttatgtaggaaaaaaaatatgttaatcttctttgagaaaaaaagttgaaaacttctgttaaatctttatgaacatatcaccattgtcttcatgcttataaaatgaacttatatagccatttaattagaaatttttaaaataaaagtttacctttaaaaacaaggtttttatttttcctggatgtaaaataaatacacaatagcaaaagagaatgta

SEQ ID NO: 44596 - DNA, 600 bp, Homo sapiens
gtaataaaactgaagggtaatgaccataacctttctttgatgggttatgctgctacagtgggtttttaatcataatattgaaatacatttttcaataaacactcatgggagggtcttctaagaaagatggcacagcacggaggaaaaagcacatgctttcacttctaaagaatctggatgtgaatcccagatctgccttatggaagggtctcctaagaaggcaactctactggctctgcaactttggacaagtgtcttaattcctctgagccttgtttctcatacataaaatgggcacagtgtttatttaccatgaggttkaaagattcgcacaaaaggccgagtgtggtggctcatgcttataatcctagagctttgataggctggggtggaaagatcacttgaagccaggagttagagacccgtagcaggacccatattctacaaaaaaatttaaaaaattagctgggcatgatggtgcatgcttgtagtgtcagctactcaggaggcggaggcaggaggactgcttgagcccagaagttcaagcctgcagtaggccatgactgggctactgcactccagcctgggcaacagagcaac

SEQ ID NO: 44597 - DNA, 526 bp, Homo sapiens
ctcaattatattatgtcccaataaaataaaatcttaatacggccacctttcatatctaaactttgcactatagcaaatttggaggaaatgaataactacataatactatggtttcaaattttcaaattaaaatgtagaaaaagattacttcattgtatttattacaagtaaatactatatagtagcaccaaccactttgaaaaataagactagctaaaaggttaactttgagtatcagatttggagaggaagatatttaactttttatcatgacatgaaaagtattacatagcgtacacttttatttataaattttatctcaaatagttaatagagtagattttttaaagtgtcaaatgttttcaggtttaaacatatagaagaacatggtaaaaccttgaaaaaaagtgttgcaaatatttattgatctggcagttagaaattggagacacatagaaaagaartttgtatcatttattggaaagaataaaatgccatccaaaatgacttaagattttcattaata

SEQ ID NO: 44598 - DNA, 588 bp, Homo sapiens
ctcgaggttcttaaccttaaccacatctgaaaagcctcttttcctgtgtaaggaatctatgttcataggttctggggattaagacagaaacatcattgagggagaggcatataattcttcctaacatattggtttatacaatgaagctatttaattaaataaattgtaccctttgtatgaagcatcaatttgcatacctcwcttagagacctttttgtcttcagaccggaaagcacatgactgattcagataagaaaaactctggagccagcatttgtttcccaaatcttgcctaccttcgtacacgcctcttaactgtttgtctttgaaattattataaagctttgtcttggataagacctctaatttgtcagagtctgatttctcaatttcattatttttgttagttgagatcccagagagcagaattgcctttgagacccacctatcacaatgactaatatgtgttttggtcagaaaaagaaaagcatgaaaaaatataagaatttgaagccagattgagtgcctacacatccttgggaaaaagtgacaaaatcttaaataaattgtcagagacaactcttgcaa

SEQ ID NO: 44599 - DNA, 588 bp, Homo sapiens
ctcgaggttcttaaccttaaccacatctgaaaagcctcttttcctgtgtaaggaatctatgttcataggttctggggattaagacagaaacatcattgagggagaggcatataattcttcctaacatattggtttatacaatgaagctatttaattaaataaattgtaccctttgtatgaagcatcaatttgcatacctcacttagagacctttttgtcttcagaccggaaagcacatgactgattcagataagaaaaactctggagccagcatttgtttcccaaatcttgcctaccttcgtacaygcctcttaactgtttgtctttgaaattattataaagctttgtcttggataagacctctaatttgtcagagtctgatttctcaatttcattatttttgttagttgagatcccagagagcagaattgcctttgagacccacctatcacaatgactaatatgtgttttggtcagaaaaagaaaagcatgaaaaaatataagaatttgaagccagattgagtgcctacacatccttgggaaaaagtgacaaaatcttaaataaattgtcagagacaactcttgcaa

SEQ ID NO: 44600 - DNA, 560 bp, Homo sapiens
ggcatagatcctatttctaaaactcaactcagaatgctctatagaatttttccggtactaattagcttttgacatctgtgcctctcctctcaatttaatgtgaatagtctttgtcaaatgattccactaaagkgtctcgttaacactaaaatagtggtgaaatgattaatttctaggtactgacttgaataacattaatcttgttgaaatcatttggtatgaatgtgactgtcatatatattttaaaaaacagaaagcaactgattgtttttgatctgtcatgtcactgcatttgatgtttgaaggaactgtggggtctgctctcttgggaggcatatcccacatgtttgacacactgatagcagttgtaattgtcgtgcagagggagggaaatcagaatttttaactgcaatcaagaagttctctcccaaccttcctcccccataggaactgagatgtatattcagaacataaattgcaataatctcctgctattaacctcaggcaactgttccaaaatgcagcttaaataatggaaatatttaacatatgatactaag

SEQ ID NO: 44601 - DNA, 612 bp, Homo sapiens
tttgtctcacaggagcagagggatggctctgaattctttctgtcctttgtctacaagaaatttccttgtgggaaagttgtgagggaggtatacagcctttttatctttgtagctattttatttaggaatacaatgggaggcagttttacctgacagcttgacttttccctttggcttagtgaatctggggtctgaagatatattttccttcacaggacttagagatatttgttttattctttaggttataatccagtacagttattactaattttgttgttcaaattactctcgttttggccttttgaagatcaggttggttcttgcatctttttgacatgtccccaaccatttttgtyttttggtagcacttcacttttgagcacaactttctcattcatggtcagtttactacaggaaaatttacaatgacaaaaaatggtgggtgtggtgcagtggctcacacctgtaatcccagcactttgagaggctgaggcagggagatcccttgagctcaggaccagccttggcaatgtggtgaaaccccatctctacaaaaaatacaaaaattagctgggtgtagtggcatgcacctgtagtcccagatacttg

SEQ ID NO: 44602 - DNA, 578 bp, Homo sapiens
tttcgattgtgccattatagcccagtcctacaataaatgagtattaggtaaattctggatgaattaaaaaatacacgaggttgaggctaaaagtcttatctatgaaaaatacgacaaagtctttccagcctccagtgcccttccatggcgctcagtaaccatttttttttttttttttccgagacggagtctcagtctgttgcccaggctggagtgcagtggctcgatctcggctcactgcgacttccgcctcccgggttcaagcagttctcctgcctcagcctcctaggtagctgggactaatggcgcccgccaccatgccgggctaattttcatattttagtagagacggggtttcactgtgttgcccaggctggtctcgaactcctgagctcaggcaatccgcccgtctcggcctcccaaagtgctaggattacaagcgtgagccaccgccccggccaccattytgaacatttctttgatacaaatatatggagtttaagatcttcggggtgagcatttccgggtaattataaattcacaatactgtcatgtgtgtgtgagtgcctgaggtcaaa

SEQ ID NO: 44603 - DNA, 499 bp, Homo sapiens
aaactaaaacatgagctaccagttaaaatggtgattcattctgggagaaagttaagtgtagggatggagtcaggaaatttctggggtgctggtatgcttgatattttgatatgggtcttggttacacaatcttatcttgtgaaatttcattaaactgcacatctgtgatttgtgcaatttgctgaatctattttatactaattaaaataagaaactttaccaataaaacaatgagtgctctatttctaaagatttcagatcccatcgagcattctttgaaacacgaaaaaccagtgttgtcactattagctctcagcagcacaatctgttacttttttctgcttctttatcttttcttccatcccagctctatgraatagtttattatgtgttagacaagtccccacttaagtctctttaaaaaaaatttaatagtgtcttcactaagggaaaatccatctacatatattttaaaagctggtaattggtttatctgata

SEQ ID NO: 44604 - DNA, 562 bp, Homo sapiens
catatttctactagaatccttaaagagatgtgtataaaatagatgtgttaagaatttcacctatcagtaataccaaactaatttactttaaaatgataaattttcattatgatttgtgaaacttctttatccactccagtatatcaaagcatcttgcattctcttttgtttytgaacgccctcttgaacattttgtatatggctaaaaatgtaacaacaacaaaaacagaaaacttggctttttaattttattatctgttttctaccactgtcatataatgagtaatttagaaatggtaatgatttgcatgaaagacacttgtttaaagttttttctagaaaagcaataactgtatgttattctcattttaataagctccatgatttcttcctctgatgactttaaaaattagtcataattcaatatcagagaaaaaaagaaagtcaagggtcatcattcacaagaaaacaaagaaaaacaaaaaaataaaatattgaaatcactaagatacagatctggaagaaagtttatttttaatattacatttttatatatatgtca

SEQ ID NO: 44605 - DNA, 562 bp, Homo sapiens
catatttctactagaatccttaaagagatgtgtataaaatagatgtgttaagaatttcacctatcagtaataccaaactaatttactttaaaatgataaattttcattatgatttgtgaaacttctttatccactccagtatatcaaagcatcttgcattctcttttgtttttgaacgccctcttgaacattttgtatatggctaaaaatgtaacaacaacaaaaacagaaaacttggctttttaattttattatctgttttctaccactgtcatataatgagtaatttagaaatggtaatgatttgcatgaaagacacttgtttaaagttttttctagaaaagcaataactgtatgttattctcattttaataagctccatgatttcttcctctgatgactttaaaaattagtcataattcaatatcagagaaaaaaagaaagtcaagggtcatcattcacaagaaaacaaagaaaaacmaaaaaataaaatattgaaatcactaagatacagatctggaagaaagtttatttttaatattacatttttatatatatgtca

SEQ ID NO: 44606 - DNA, 609 bp, Homo sapiens
attattttcttattagacaatttcaatcatattcccaaaacagcattgtctaaaagcatttgagatgctatgattatatagacttctatattcttattccaatgagattagaattttcaaaatttcttcatgtttgccttatacctatttggtactttctcaacttcttgaacttttctcttgtcaaaaacttaatctcttttattcaatttaaatatatttaaatatattttatcacctgaaaattagctaatcttaataggtggcaaatgattcctgtaaataattcagtactgttatggtcttcattttcaggaaaaaaaaaattcactaacaggtattttaagaatctttcagcttcaaggttattttttagatagaaaacaatgactgaatttatcaaagtaatatcacagtcttttttcccataaagacctctgcagtaatttttaataaaccagttatattagtttaaaaacaaaaagcaaatgggatcaggtttaaataagaataaaaaactgcttggaggtamaaatggaagaattcatagaaaaaaaatgctggtttttggaaatatcaaatacgtttccagtttatttaggcaaatgc

SEQ ID NO: 44607 - DNA, 551 bp, Homo sapiens
tggcctaagaaaacctaaaagagaacagcatgaggaaagcaggcagaacccccattcatgatacaagtcaaagccaggctgcagctgcagttataaaaagaaagaaaaagactaatgggattgccccctccttccgccttctcccacccaaggcagtaatgaagattcacagctacacattaattaggaatccatagacgtgcctggttacaatattggtatagggaaacagataatagaaaaggcacagattcccccacaagctaatagagtgttgtaagcaatatttaaatcttcacgcctttcttttcaaaaacactacttctttctcaatgccaagagctggctgcgtttctacatttggggaatttgagatattttctcgcatggaagtcacaccaatatcctaaatcgtgtaactaaaatcatttggaaatgcacagtttttctacacgaaaggatattgcttttaatccaaataytggattaccaaaaccctgaaatatctttcagtcctaatgtagacaggaagacagaaatgtggcctcacc

SEQ ID NO: 44608 - DNA, 616 bp, Homo sapiens
gttgtattttcggcagtaagcacatttcctgacatacagtaagtgcttaatacatccactattgattaaatttaatgttactattttttaaccgatttttttatatgaccaggtaatcagaatataatgcttttatgatttaaataacaaawttccattttgcaaatgcctacttatgagttaaggtccagatcaaacaaatgccatctctcccatgaggcctttccctacttcccgagggctcgtcacccttgcctttgtgttctctggcccatcactttgctttcgaagcattaagtagtaataaaatgtatttctgaccagctgggcaatatagcgagacccccatatctacaaaaaattttaaacattaggccaggtgtggtggctcacgcctgtaatcacagcattttgggaggccgaggtgggcggatcacttgaggccaggagttcgagaccagcctggcaaacatggtggaaccctgtctctactaaaaatacaaaattagccgggcgtggtggcacgtgcctgtaatcccagttgctcaggaggctgaggcaggagaatcacttgaacttgggaggcagaggttgcagtgagctgagatcacaccgc

SEQ ID NO: 44609 - DNA, 616 bp, Homo sapiens
gttgtattttcggcagtaagcacatttcctgacatacagtaagtgcttaatacatccactattgattaaatttaatgttactattttttaaccgatttttttatatgaccaggtaatcagaatataatgcttttatgatttaaataacaaatttccattttgcaaatgcctacttatgagttaaggtccagatcaaacaaatgccatctctcccatgaggcctttccctacttcccgagggctcgtcacccttgcctttgtgttctctggcccatcactttgctttcgaagcattaagtagtaataaaaygtatttctgaccagctgggcaatatagcgagacccccatatctacaaaaaattttaaacattaggccaggtgtggtggctcacgcctgtaatcacagcattttgggaggccgaggtgggcggatcacttgaggccaggagttcgagaccagcctggcaaacatggtggaaccctgtctctactaaaaatacaaaattagccgggcgtggtggcacgtgcctgtaatcccagttgctcaggaggctgaggcaggagaatcacttgaacttgggaggcagaggttgcagtgagctgagatcacaccgc

SEQ ID NO: 44610 - DNA, 590 bp, Homo sapiens
tgccaccatgcccagctcattttttttaaatagagatggggggtcttgctgtgttacccaggctagtctcgaactctggtgtcaagtaatcctcctgccttggcctcccaaagtgctgagattacaggcataagccacagcgctgggccaactatgtgtttttttaaatgagaactgctggtggttatcagtgtgtcatgagggataaagaacctaatggcagagttctatgctacaggtcctgtttctggggctctggggggccctatctagtgtttccagcaagtccccaggcccatctctctagcagccataggactgtgtgtgttactcagagcamctcagaagggagtaggtctttcaggttagacctggcctgacagcccagaactgtctcagagaaaggctggggcatccttcccagtgactgcacataggaaaagccagcccatcaggtataggcaacaggttcatcatgcccagggtcacagaaaagaacatgacactgtgttctcttattgctatttggtcaaaggcatgaagtacatcttacttatttttcttttattacaaagcacagcacttgataa

SEQ ID NO: 44611 - DNA, 657 bp, Homo sapiens
catggatcctgagaatccttacacacacgttgatttggagagaaatggagagagtgatcatgcttatctcttctctcttcctactgtcaagaggatggtatgtgaggtgagaagtaagaacaaaaagctctgctggggagaaataagtgaaattaaggataccaacaatagaaaattattctttctgatagaaacatgggattcraggttctccaaaaatgaggaaaatatttgaattcatgagacttgcccccataaaagcagaatgaccagacatcactaggataaaggatcccttcccataagagataaataaacatttactacaatttgctttatttggggtaagaactatcctcctctacctgtctcaccaacttactattatgccacaaagaagataatcaaataacatacctaagtcctcaatccacagtgtaatgaaataaataataaccatacatcatgctaacaagtaaataaaggaacctaccctatgtgttaagaaaatctagactgagttgctagcattaagcgttatcaatagtaaagaaaaaggcacaacaactcagtatacattttacaagaaaaaaataaataactattttaaaaagaaatactacctcagttaaaaatatagccctaggaacaaaatgc

SEQ ID NO: 44612 - DNA, 657 bp, Homo sapiens
catggatcctgagaatccttacacacacgttgatttggagagaaatggagagagtgatcatgcttatctcttctctcttcctactgtcaagaggatggtatgtgaggtgagaagtaagaacaaaaagctctgctggggagaaataagtgaaattaaggataccaacaatagaaaattattctttctgatagaaacatgggattcaaggttctccaaaaatgaggaaaatatttgaattcatgagacttgcccccataaaagcagaatgaccagacatcactaggataaaggatcccttcccataagagataaataaacatttactacaatttgctttatttggggtaagaactatcctcctctacctgtctcaccaacttactattatgccacaaagaagataatcaaataacatacctaagtcctcaatccacagtgtaatgaaataaataataaccatacatcatgctaacaagtaaataaaggaacctaccctatgtgttaagaaaatctagactgagttgctagcattaagcgttatcaatagtaaagaaaaaggcacaacaactcagtatacattttacaagaaaaaaataartaactattttaaaaagaaatactacctcagttaaaaatatagccctaggaacaaaatgc

SEQ ID NO: 44613 - DNA, 1323 bp, Homo sapiens
atcataagtaagttaaagtttataatctttactccatttatgccttctgatttaattttgattactcatttcacagcttttaattaaatttctcgaaaatattgcacagccgccctcggttctcctaattattcctggaaatatttctatactttacaatcaatgttcaaaaatagactgatggagattcctggcatccctatattttatttttgtttatgacttccctgtttaataattcaatgaatttatgcttacaaacccttgataatagccataatctttttttcaaatgtactttctatacattatctacatatggaatctcagaacaccaaagcaaagttagtctgtatctttcaaaatgactacagttgctattgataagaatatgctatttctccgagaaagkcccctcaaatcaggcattttgaggggaaataatggtgacctttccagttcatacatattttaagtgcttcaacggacaaatgtttaacatttgacgtgggatggcgcctgtcactgaaataaactcagaggaaaatggttaacataggtgccatattttttggttgaaagtaatgataagaaactaaaaggcataggcaagttgttgatgggaattccaaggcttctctcgtagaggtgctaaataatcccacttcaaggactgaggaaaagtaagggatcatgagagaagacaagaaaaatggtagtaactcaggcaaatacaaggtggagtttaccctaagtgatccactaagaatacaatcacaatgtattattattattattattacagacaaggtctcactctgacactcatgctggagtacagtggcacactcatagctcactggagcctaaaattcctgggctcaggtgatcttactgcctcagccttctgagcagctagaattgtaggcacgtgccaccacacccagctaattttttaatgttttgtaaagacgaagtctctccatgttgtccaggttggtcttgaaactcctagcctcaaactatcctcctgccttggtctccctaggcgctgagagtgctgagattacaggtatgagccagcataccttccatagtgtatttttaaaataaagaatgtcataatgtatagcaaagagttacaaaaatcttaggtatattctggtatcaaaaaagaaacacaagtacagaagaatgtaagtaatctattcatcagtgcagaccacaatcctggcaccttcacaaattaaaataatttctcagcaatacgtctgtttattttcttttttaaactgtgattgaaattaggataatctaacttca

SEQ ID NO: 44614 - DNA, 577 bp, Homo sapiens
atcctggctaacgcggtgaaaccccgcctctactaaaaaaaatacaaaaaattagccgggcgtggtggcgggcgcctgtggtcccggctactcgggaggytgaggcaggagaatggcgtgaacccgggaggcggagcttgcagtgagccgaggtcgcgccactgcactccagcctgggcgacagagcgagactccgtctcaaaaaaaaaaaaaaaaaaaaaaaaaaagaaaatgtaagtttcaatgggatttgccttagtatttcaataaatcaaaatcctgtccctttatgaaataataaaaatagtaataataataataatatcagctaaaacttactgaatgctcactataacccaagtactatgctaagtgatttaaattaaatatctcacttttatttcacaaagccctaggaggtaactactactgccagtccaattttaagagtttaaaaaaataattgagctatggacagtttacgtaacttacaaatgataagaaaaagagctagaaatcgagtctggatttcagttgtcccacacaaaggccatatttctaagctaacagaggggat

SEQ ID NO: 44615 - DNA, 577 bp, Homo sapiens
atcctggctaacgcggtgaaaccccgcctctactaaaaaaaatacaaaaaattagccgggcgtggtggcgggcgcctgtggtcccggctactcgggaggctgaggcaggaraatggcgtgaacccgggaggcggagcttgcagtgagccgaggtcgcgccactgcactccagcctgggcgacagagcgagactccgtctcaaaaaaaaaaaaaaaaaaaaaaaaaaagaaaatgtaagtttcaatgggatttgccttagtatttcaataaatcaaaatcctgtccctttatgaaataataaaaatagtaataataataataatatcagctaaaacttactgaatgctcactataacccaagtactatgctaagtgatttaaattaaatatctcacttttatttcacaaagccctaggaggtaactactactgccagtccaattttaagagtttaaaaaaataattgagctatggacagtttacgtaacttacaaatgataagaaaaagagctagaaatcgagtctggatttcagttgtcccacacaaaggccatatttctaagctaacagaggggat

SEQ ID NO: 44616 - DNA, 577 bp, Homo sapiens
atcctggctaacgcggtgaaaccccgcctctactaaaaaaaatacaaaaaattagccgggcgtggtggcgggcgcctgtggtcccggctactcgggaggctgaggcaggagaatggcgtgaacccgggaggcggagcttgcagtgagccgaggtcgcgccactgcactccagcctgggsgacagagcgagactccgtctcaaaaaaaaaaaaaaaaaaaaaaaaaaagaaaatgtaagtttcaatgggatttgccttagtatttcaataaatcaaaatcctgtccctttatgaaataataaaaatagtaataataataataatatcagctaaaacttactgaatgctcactataacccaagtactatgctaagtgatttaaattaaatatctcacttttatttcacaaagccctaggaggtaactactactgccagtccaattttaagagtttaaaaaaataattgagctatggacagtttacgtaacttacaaatgataagaaaaagagctagaaatcgagtctggatttcagttgtcccacacaaaggccatatttctaagctaacagaggggat

SEQ ID NO: 44617 - DNA, 562 bp, Homo sapiens
ctgggaattcattttattttattatttttatttgtttcgggatggaggctcgctctgtcacccaggctggagtgcagtggcgcagtctcagttcactgcagcctctctctcccgggttcaagcgattctcgtgtttcagcctcctgagcagctggtattacaggtgcccgccacgaagccctgctaatttttgtatttttagtagggatggggtttcaccatgtggcccaggctggtcttgaactcttgaccttaagtgatccgcccacctcagcctcccaaagtgctgggattacaggcgtgatccaccatgcccaggctgggaattcattttaaatctaacagcatctcaaatggtaggtgtcccccttctamcccccgcaacattggtacattgtgtctctcccattctgttctcctgcatttggtttgggagtctcaggtacagactatgacctctatcctttttgaatttcatcctgtatgttgcaccagatttcagcagaacaaaagccacgagccacttgtcccagtgacacgccagccacacatttctaaatac

SEQ ID NO: 44618 - DNA, 535 bp, Homo sapiens
gggagagcccagggcagactgcacagggtctagggtagaaagccatccccatcttcacccttgggatcctggggagacagctgaggtggacgctgggtgggtttccattcaggtcttgggggactgcacagagacacagctgcctctccccacctctccttctgctttaacccacktgcagggtcacctgttactagggatggtgtttttccttcatgccggtcttacagggaagaaccgcccattgaccacaagcgtcaggcccctctcctgggagccccggagcttgggacactgggaggctgccatttcctaagcttggattgtatctcttgcttttctgaatgttcttcctctgtaacctttgcccaagcctggtcactgtttcccccaagaccttttgctattaggacaaggtgtcatcaaccctgagccctgttcttataggcgcttggtaggggagaggggagtcagagccagaggccagttgcctcttggcctggggttgggcttctagtgccaagccccaccatgc

SEQ ID NO: 44619 - DNA, 535 bp, Homo sapiens
gggagagcccagggcagactgcacagggtctagggtagaaagccatccccatcttcacccttgggatcctggggagacagctgaggtggacgctgggtgggtttccattcaggtcttgggggactgcacagagacacagctgcctctccccacctctccttctgctttaacccacgtgcagggtcacctgttactagggatggtgtttttccttcakgccggtcttacagggaagaaccgcccattgaccacaagcgtcaggcccctctcctgggagccccggagcttgggacactgggaggctgccatttcctaagcttggattgtatctcttgcttttctgaatgttcttcctctgtaacctttgcccaagcctggtcactgtttcccccaagaccttttgctattaggacaaggtgtcatcaaccctgagccctgttcttataggcgcttggtaggggagaggggagtcagagccagaggccagttgcctcttggcctggggttgggcttctagtgccaagccccaccatgc

SEQ ID NO: 44620 - DNA, 535 bp, Homo sapiens
gggagagcccagggcagactgcacagggtctagggtagaaagccatccccatcttcacccttgggatcctggggagacagctgaggtggacgctgggtgggtttccattcaggtcttgggggactgcacagagacacagctgcctctccccacctctccttctgctttaacccacgtgcagggtcacctgttactagggatggtgtttttccttcatgccggtcttacagggaagaaccgcccattgaccacaagcgtcaggcccctctcctgggagccccggagcttgggacactgggaggctgccatttcctaagcttggattgtatctcttgcttttctgaatgttcttcctctgtaacctttgcccaagcctggtcactgtttcccycaagaccttttgctattaggacaaggtgtcatcaaccctgagccctgttcttataggcgcttggtaggggagaggggagtcagagccagaggccagttgcctcttggcctggggttgggcttctagtgccaagccccaccatgc

SEQ ID NO: 44621 - DNA, 517 bp, Homo sapiens
ttttcttaaataactcttttgactaaaataattaacataaatacacacacagagggctgggtgtggtggctcacgcccgtaatcccagtagtttgggaggctgaggcagttggatcacctgaggccaggagttcaagaccagcctggccaacatggcaaaaccccatctctactaaacatataaaaattagccgggcgtggtggcgtgtgcctgtaatcccagctactcaggaggctgaggcaggagtattgcttgaacccaggaggcagaggtttcagtgagctgagatcacgccactgcactccagccggggtgataagagtgagactctgtctcaaaaataaaaatawaaaaaaaaaataaacaaatacacacacagatgaggaacttgcagggctttagagacaaagacagagacagtcaaacatacagtgttccagggtaagaaccaattataccactaactccggggattcttgaacatgtttaatctcactgaatcccagttttcccacc

SEQ ID NO: 44622 - DNA, 549 bp, Homo sapiens
gaagatgtgatatggaaacacttgctttttcttaacctcccttgactctgtttcacaaagatagaggggcagagaactgaactggcaaaaattaaaaattgaaaaaaaaaagtaattgaaagttggcttgcaaatttttaacaaagttagagaatcaaggttctctggggtttctgataagagtgatagaactattccggttcagtgggccccagacttcgtggttgctattttttaaatactggttaaaaaaaatgaatacwgataataagaccacttttactatttttgctccatggacctcatattttgacatatgtctgaatacctgatcagcatgacatagccagctaactttaggaagacctggtaagatcccagtggaaaaagcaaaagtattttcattcctagtctgggctcgttacagttaaatgtatctttaggctttttgaaatattagacatagctggcttttgaggaccactggaattcactgcttggattgtccttacaaaattaaatactccacatgtctgaacaaaatgtatc

SEQ ID NO: 44623 - DNA, 609 bp, Homo sapiens
tttaatttttccttcctttctactttctttatttttcaagttttctatggtaagcacacactatttttatactgaaaaaaaacttagaaaaaaawaataatctcccagatttttttcaggttaagtaagaactttccagaaatctaacaatcaagttgtccaatatctccagccaactatttttttatggctttggtttctaaacttgggacaatttaaactacactaggctgatcaatctttgttatcagtcaacagtcaccatcttggtcatctaaaagcccttttaggcaccttcacctacggggcaggggagaggggtgaacctgacccaggatgaaagctcacttcacaaccatgaccaagctccactgaagaagaatacaggcaaacagaaagtaaagttagagcaggaagacagcatcaagcttcacaacatggagcggaacaagaaaaagaggttcagtgaaagatatagaaaaagaaagcaggggccaagcacagtggctcaggcctgtgatcccaacactctgaaaggtcaaggtgggaggatcccttgaggccaggagttcaacaccagtctaagcaacatagcaagaccctgtctct

SEQ ID NO: 44624 - DNA, 589 bp, Homo sapiens
catgtttacgttatgtcatggttgataaactttgctagctgtcatattgtgtggcttttttctcttagataagtagggtgtttggaggctttccatctagagtttgttractctagattgtttagtcaatcagcttggtgagacattggactcttaggatatttcagggatttatagttggtatgaacagagggcttgcagtcagtactatctcagaacctccattagtagtgtttctcttcttcagagtaattgatgctaattcttttaggctttccacctggtaccaccttcccaaatggagccagtgagtgggcattccaaggcgcccagcaccatattaattgagaatggaacttacgtttcattttcaggtaggtatcagtatcgggaaagttgtaaaaaccagaatgtaagtactcacagaagagcaaagtcaatcaggctcttcatgactcggagtagcgtcagcctaaaatcctcatcggcaagcaggtctaagttagcttctcctatccatactagggtaagcctgtgttatgagccttcaggtctcttttatttccctgatttagccaatcatgggatg

SEQ ID NO: 44625 - DNA, 589 bp, Homo sapiens
catgtttacgttatgtcatggttgataaactttgctagctgtcatattgtgtggcttttttctcttagataagtagggtgtttggaggctttccatctagagtttgttaactctagattgtttagtcaatcagcttggtgagacattggactcttaggatatttcagggatttatwgttggtatgaacagagggcttgcagtcagtactatctcagaacctccattagtagtgtttctcttcttcagagtaattgatgctaattcttttaggctttccacctggtaccaccttcccaaatggagccagtgagtgggcattccaaggcgcccagcaccatattaattgagaatggaacttacgtttcattttcaggtaggtatcagtatcgggaaagttgtaaaaaccagaatgtaagtactcacagaagagcaaagtcaatcaggctcttcatgactcggagtagcgtcagcctaaaatcctcatcggcaagcaggtctaagttagcttctcctatccatactagggtaagcctgtgttatgagccttcaggtctcttttatttccctgatttagccaatcatgggatg

SEQ ID NO: 44626 - DNA, 620 bp, Homo sapiens
tgttgacatactttatataagtagagatttaaattagataaggatcatttcttcaagaaaattagattccagagggatgatacatttacaaaatcattataatacaattgtattttgcacaaaaactgacaagcacaaatagagaggatactgatgggtagagataggaaggaggcattctcagtaaagggcagcatgagtggaaacaggttaaaaaggccagggagatagaaggaatacgatgcttcagtttctttggccagaatatatgaaaatggagtaatgataaaggacttaagagactggtgaaagatatgaaatgtcatactgattttacgcttgaacctgggaggcagaggttgcagtgagccgagatcaygccattgcactccagcctggatgacagagtgagactctgtctcaataaaataaagaaataaatgtcatactaattttgaatgtcactcttagtcaaagagaagactaaacatttcagagtagctttcgtcacaaatagaggtggtgttctttcatgacagccgaatttctcaaacaagcgtgacagcagaaacccctgagactgtgtcagaatcccaaaggagagcagatagataatgaaa

SEQ ID NO: 44627 - DNA, 595 bp, Homo sapiens
ttcttcatcttttgataatctgattatgatgtgtctaggtatggatctctttgagtgtatcctacttggaattcattgagctcctaaaatatgtatgcaagttaatgyttttttgccaaacatgggaagctttgagaaattatttctccaaacattctctctccctgtcctctcacttttctccttctaggagtcccattatgcatatattagtatgcttgatggtatcccctgtctctaaggctctatttctttttcttcattctgtcttctttctgtttttcagagtagatcatttcaattgacctatctttgagttcactgattacttctttttgctgctcaaatttgctgttaaagccctctagtaatttttttttcttacagatgagatatcatgctgtcgttcaggctggagtgaccatgatcctcttactgggatcacagatcacgcatgctccagtctgagcagcagcatgagctccagcttgctccagcctgaacagcagcaatacattctttcacacacaaaagggttattggatctcacacaagaaggaatttggggctagtccatacagtaaagtgaaaacaa

SEQ ID NO: 44628 - DNA, 595 bp, Homo sapiens
ttcttcatcttttgataatctgattatgatgtgtctaggtatggatctctttgagtgtatcctacttggaattcattgagctcctaaaatatgtatgcaagttaatgcttttttgccaaacatgggaagctttgagaaattatttctccaaacattctctctccctgtcctctcacttttctccttctaggagtcccattatgcatatattagtatgcttgatggtatcccctgtctctaaggctctatttctttttcttcattctgtcttctttctgtttttcagagtagatcatttcaattgacctatctttgagttcactgattacttctttttgctgctcaaatttgctgttaaagccctctagtaatttttttttcttacagatgagatatcatgctgtcgttcaggctggagtgaccatgatcctcttactgggatcacagatcacgcatgctccagtctgagcagcagcatgagctccagcttgctccagcctgaacagcagcaatamattctttcacacacaaaagggttattggatctcacacaagaaggaatttggggctagtccatacagtaaagtgaaaacaa

SEQ ID NO: 44629 - DNA, 595 bp, Homo sapiens
aggctggtcttgaactcccgacctcaggtgatccacccgcctacggcctcccaaagtgctgggattataggcgtgagccaccgtgcctggccacctttcctttctttctrcaggatcttgctctgttgcccaggctgtagtgcagtggtgtgatcacagctcactgcagccttgatccccagggctcaagcaatcctcccacctcagcctcttcagtagctggggctacaggtacatgccactacacctggcgatttttttagaatttttattttttggtagagacagggtctcactatgtggtccaggctggtcttaaactcctgagatgaagcaacactcctgccttggcctcccaaactgctgggattacaggtgtgagccactgcgcccagcccccctttctttttaagcttaccttatcaccacacttaccatgtgatcatgaaattatagactttgtgcttgtcatgtcgtgccttgaccctggactccttgcctttagggattgaaccttattcacccttttagtgagacccagattctcctctaatagggactgcagcctagtaggagagagaaggcagcatgatct

SEQ ID NO: 44630 - DNA, 1292 bp, Homo sapiens
aaatgacaccttagatactaaatgttacttgcaaccaccacctatatttctcatccttccttccctttatggttgttttttctttagttattaggaaaccatcactgttccactataacagttgttagagctttaccttatctgcttactgtcttccaggagcttattatttcattgtttagtgcttactagcatgtggattacayatttatcctttctctcctagacaagccataacatagtctctgcaactggcatctagtaaaagcatgaggtgaaaaattcagggaagagtatcttcccaggatttgtagaaagtaaaataccctttaaacctgccaatctggttctcttaacagtatctcagcaatgactgtagaaacactaattatagggttcttttaatgtaaaggaaaaaaaaaaaagattctacatcgtgaagcccttaactttacttcctaaatctcacaaagaagagattctcctttggctgccatcatctcctgtggattacaatttgctacattgcaaaagtacattgtggttccttgaaaggcttgagctttcccatgctgttttgtgaatgggttctcaactatcagccttgtgtgagtctgatgatgtcacaccatgcactactgaaaatgtgttacaattcacatccttagggaatctgtgcaatgtgtttagagaaagccttgtggaagaatactatcagcctttaaatcaaagaaaagaaagactatggagattttcctcgatggaatgccaactctgtgtaaaactaatagacaaaagtgctctatgaaatgtagggtactgggttgaaaagctttgctagtatcactggaagctatcaaatttgtgatggtcttttaataagattttaaaatcatgaaaatctagaattgcccatcttacatatggtcacaatctcaatcaacacagccagccacttattcctggtacttactcctgtctaatataaaacatattatgtatattaattcactacatttgaactattccttggtagaggcataatcttagttctagaagcactaaatctgctcataccagaaaaaaagatctcaatctttcttacttataatgaacatggtaaataatatgccgattaaagctcatttagcagatcatgtctcagtgatcttttcaaccctgtccatcaactccatgaaatgccgatgtcatacggaaggtgctttctatatattttggaaagaattgattaaagtaccagattaagaagtgtaactatatataagtataag

SEQ ID NO: 44631 - DNA, 597 bp, Homo sapiens
atggcatgattttctactataaactatatttttccatccaggattctgaatttttttttccttactgtaactactgtccaaatcacattttctcaaatagttcctgtgttggaatgtgagatatatatttgcatattcatatatttcaataactcaatcttagctgacattataatcaaaaaagtctttatgtttagttgttagtctttattatgttaagactttgatcttcaaattttgtgctgtaatctagactatcctctaaaacatattttaattttgttcttagtttaatctctttggaagcttctcataattccagcagacgtctgcactgaaactgctcaagcaaaaagtatgcagaggatgtacattatttatttatacagatgacttttaagttgaggccaacattaattcgactaggtcactggttttggagagctgaaagccatgtaaatagctagggagtcaaggctttttcattagcatwctaaagcctacagtttctgaataatatatattcacttaaaaattatttttttgatgaaaatatatttttgttatatatcttcattagtcagattctatcatgtt

SEQ ID NO: 44632 - DNA, 553 bp, Homo sapiens
ggaaattataaaaaccatatattttcttgaacctatgagatagctgaggttacagggcaaccagctaggctgaactctaaagaaaagcagaaactgccaaggagaaatgtggaaacatgcactaagttacctaggacagagcaagagacaaatacatgactttcataaaagtggatacaattttagcgcaatttattmacaaatttctgcaagtttgatgtcagctaccaccaatagtaaagaacctgtctaggagctgcagacactcacatacaactcagatatttggactataagccagagaatagaaaattactatgattaatgtgttaaaagctctactataaaaggaagacaacatgtatgaaccaatggagaatttcagcagaaatataggacctataaaaaaaaatcaaatggaggctggaagtggtggctcacgcttgtaatcccagtactttgggaggccaaggtgggcagatcacgaggtcaggagatcgagactatcccggctaacacagtgaaaccccatctcacctaaaaatacaaaaaa

SEQ ID NO: 44633 - DNA, 553 bp, Homo sapiens
ggaaattataaaaaccatatattttcttgaacctatgagatagctgaggttacagggcaaccagctaggctgaactctaaagaaaagcagaaactgccaaggagaaatgtggaaacatgcactaagttacctaggacagagcaagagacaaatacatgactttcataaaagtggatacaattttagcgcaatttattcacaaatttctgmaagtttgatgtcagctaccaccaatagtaaagaacctgtctaggagctgcagacactcacatacaactcagatatttggactataagccagagaatagaaaattactatgattaatgtgttaaaagctctactataaaaggaagacaacatgtatgaaccaatggagaatttcagcagaaatataggacctataaaaaaaaatcaaatggaggctggaagtggtggctcacgcttgtaatcccagtactttgggaggccaaggtgggcagatcacgaggtcaggagatcgagactatcccggctaacacagtgaaaccccatctcacctaaaaatacaaaaaa

SEQ ID NO: 44634 - DNA, 553 bp, Homo sapiens
ggaaattataaaaaccatatattttcttgaacctatgagatagctgaggttacagggcaaccagctaggctgaactctaaagaaaagcagaaactgccaaggagaaatgtggaaacatgcactaagttacctaggacagagcaagagacaaatacatgactttcataaaagtggatacaattttagcgcaatttattcacaaatttctgcaagtttgatgtcagctaccaccaatagtaaagaacctgtctaggagctgcagacactcacatacaactcagatatttggactataagccagagaatagaaaattactatgattaatgtgttaaamgctctactataaaaggaagacaacatgtatgaaccaatggagaatttcagcagaaatataggacctataaaaaaaaatcaaatggaggctggaagtggtggctcacgcttgtaatcccagtactttgggaggccaaggtgggcagatcacgaggtcaggagatcgagactatcccggctaacacagtgaaaccccatctcacctaaaaatacaaaaaa

SEQ ID NO: 44635 - DNA, 300 bp, Homo sapiens
ggagagtccagttctcacatctaaaaatccattagcttccacaacatgtcacagaataggagtggtgtagggaaaaaaaaaaagaaaaaaaagaaaaaaaaaaagctgcttgccttactattgacctttgtgttgaatgtaaggataatctaattttatcttttctcatcatgtacattttacatgacagaagttcactagtatkttacttttacattttcaaaataaagattttgaatttgacctgtattttctgccatagagacaacctttcttacaacaacaatttagggcaattta

SEQ ID NO: 44636 - DNA, 554 bp, Homo sapiens
gcattttgcagttttgaatttcacatgaagatgaccttaaaaacagtgaccattaaaacagttgttagaaaaatgtattatttacacaccatgcacttttgaaatagaggttacaggaagacataatcgtactatacaatgtaacctactttgaaaggtgtaggcagcatagcaaaaaacgtccttacatcacacttgtcaagaaacagaagttttattaccaaggaatttcactttttgctgcttattcttaacactagcccagggactgagaggatttgttgatctaatatagatagcgatgtcttgggtttgttcagatttatatggacagcatctggggatcaggaattacatttaaaatgtaataaaatgttcctgtgcactttaacttacaaatactatacttaaaaaagtaaacatcaaataatctcaggtatctttcaagaaaatgttgacatagctgaaggagctcacacagatatctttgaatcatttmtaagtaaacttaataaactcattttcgtattctgtcgctgtacaataaaccatca

SEQ ID NO: 44637 - DNA, 580 bp, Homo sapiens
gctcactccacaaacacttccatctcctaaaaagctcattttgcagagagcaaatcaactttcctttttcctttttgatacctgacatacgtgttagagttcaaggatgtgcagcatttattaacaggcattttgttcataagaagcttactttttttcttttttttttgagatggagtctcgctctgtcgcccaggctggagtgcaatggcatgatcttggctcactgcaacctctgcctcctgggttcaagcgattctcctgcctcagcctcccragtagctgggattacatgcgcgcagcaccaggcctggctaattttttgtatttttagtagagatggggtttcaccttgttggtcaggctggtctcgaactcctgacctcgtcatctgccaacctcagcctcccaaagtgctgggattacaggcatgagccaccgcacccggccaaaaagtttgcttttaatacaaagtggcaggttcaaaacaaagatcactcggtagcaggtgggttataatcctaccatttatgaatgctgttcaagggagactattctggaggataaaagagaaggcttc

SEQ ID NO: 44638 - DNA, 568 bp, Homo sapiens
gcagaaaatgttgcttttatgtagaaatgctgttctttaaattatctaaatttataggagaatcccacttcatttataaatattttgagtgcctactatgagccaccgtgttctcacacctgaggatacaatgaggaaacccttgtccagagtgctcagctagtggccgcctggtagagaatgagttcccaagagtttttcaaccctgcagcccttgttttttactgttgactgccacttttttctcttaacccgtgcatcacagatgggctggaaagaaaagcttttgtcattgattaaagccattcttttctgaatgtttcttttcttctctcacattttttctttttcttttccttttcccttaagtctygctctgtcgcccaggctggagtgcagtggcaggatcttggctcactgcagcctctgcctcccaggttccagagattttcctgcctcagtctccctgagtagctggggttacaggcatgtgccaccatgcctggctaaattttgtatttttagtagagacagggtttcaccatgttggccaggctggtctcaaact

SEQ ID NO: 44639 - DNA, 1824 bp, Homo sapiens
ttatttgtgatccacaggtagaaatatctataaattattattacatattatttatcttatttctagcatttaatctacatcttctgttacatttaacaaggcagttagaccatcttaatcaccgtcttttaaaaatttgctttttctttaattaaaaaaataacatttattggcattgccaggcacaagcctaggtgtcaaagagacagaaataaaacagagtccagactttaagaagactctaataagggagacaacaggtaattacaataaaatgtgccctaacataaaaacacagcatattgtggaaacatttgttgagggtgaatattaaatttagcctgcagaggtgaaggaagtcttccaggaggagcttagaaggagttcagaatttgttgagcttcatgaatgcagaaaaattgaggcctcattcccctctgcatccacactacctgctataacggccagaatatagtgggccctcgatacatatttaatgattattgaaaaagcagagatgtcagagctgaattttgaaggaaggttttggagtcagttgagtgaaagaacgctgttttagacagagggaacagcgtgtgcaaaggcacgtgtccttggtaaaatcctttcctgagcctgagaccctcagactttaccaaggaaaatcaatctcaatcagtttctccctctttctctctaggatcagcggactgtgactactgtctgttgtttccaagcaaattgctgcaaggaattctgtggctcctcccagaagctagataataaaacatatagtatttgtttaaatctctgtgaaaaggctcccttgggctaaaaatattgcttgtttcttttgttaaaaatgtttttatcaaagaataggggaaaaatagaaacttgctcttttcagagctgaagagcctaagaatgatataattggattcaccattgactcttaattaatgatatgtgagtattctgattggttaacatccttagcttacaatttcttgcctgggaaaaaaagaggttgagtattcgtcatccttcccagtggtcccactggcagagactcagtttcacttatcaggtagtccttttgctatacatccccaaatgccaattctgctgtggggttcagggcccttagatgatttaagactgttacttttcccagaattataaaggcagtgatggtaatactaggttattgcttcatactgcactaaagaataaaggcagagtcagattttttgcatttttcacaggagaggaattagtttttttaaattaagaatcaaagtggggtctagcccagagggaagcatatctgggtttggtaaatcataaaccattatagaatgaagactaagtatgccattttaaaggttgtcttgctgcttgacatggctagaacaaaaggtatgagggagaatgctgtgagataagactggatgaacaggcagagcctggatcagagaggatttgaggacccaattaagaagttttgattttccttcagggcaaatgggaacagatagggattttgactgcacagagggagcaacatgatcagatttgtgctttataaaaatccactccagtatcaataagaagggtgggttggaggaagcaaaactagaggtaaggatgtgtatagatcattgttctactttatgtttgcataacgaattatccccaaacagtaatgatataaagtaatcatttattgtgcttatgggttctttggtccagatattcagacagggtgtagtagggaasgcttgtctcttctccatgatatttgattcttctatatttctt

SEQ ID NO: 44640 - DNA, 575 bp, Homo sapiens
atgtcctgaaggccaagagccacatctactaaaatcatttgtttaaggagcccggccactggctctgcgtctgtatgcttgatgcaytgttgtcagcacaagcaaatatttccaccccaggaaatcaaatttaaatagtatagtaagcaatgtcttttcacaagacagactttaaagaaatcatttctttttttaatggagagtttttgtttacaaatcactctgacagaaaaatcaggagatttattttgctggggaattaaaagtgacaatatgacattcatttcttggtttctgtctttaaatctttcaagatcatgccttcagcaacaaaagtaagtaagtcctgcatttagacactttattactcctgtcccatcccatctataagacacatcctctcttgtcattgaaggctttggctcctgtcaatggtctactgaagtttttagcacagacaagcaaattctactcaggaactttattgtggtaccatacaaatgtttccaagcacaatgggtgttattagcccaaaatatccctgatggaccactcagctctaagatccagcccct

SEQ ID NO: 44641 - DNA, 506 bp, Homo sapiens
gtatgtggtttcctcacacttcctgagtttatgtgctacatttctggctaaacaaacagattcaaaccactctttgttctagtttcagattttgtagcagaggatcctaatggtcttgggtcaggcataacttgtgactacacagataatttctctaaggccaaccagcagctaattttgtgtgcagttggtaatttyatttccttcagatggtggaacaattcgactataaaatgtacttgtaactgggattataaggtgtgtgctcttcctcctccatgatctcatttttaccatgataaatgagaactcatccatcaataacatcatggttatttgccaattctctctctctctgtttttcactgtttatctaatcagatgaatcagttactgatatgtggccatcagctgtagataaatgacacatgttggggaatgtactattattgtgacagtcattcattgtagaaatagaacacatggcatgtgagctggattgtatg

SEQ ID NO: 44642 - DNA, 506 bp, Homo sapiens
gtatgtggtttcctcacacttcctgagtttatgtgctacatttctggctaaacaaacagattcaaaccactctttgttctagtttcagattttgtagcagaggatcctaatggtcttgggtcaggcataacttgtgactacacagataatttctctaaggccaaccagcagctaattttgtgtgcagttggtaatttcatttccttcagatggtggaacaattcgactataaaatgtacttgtaactgggrttataaggtgtgtgctcttcctcctccatgatctcatttttaccatgataaatgagaactcatccatcaataacatcatggttatttgccaattctctctctctctgtttttcactgtttatctaatcagatgaatcagttactgatatgtggccatcagctgtagataaatgacacatgttggggaatgtactattattgtgacagtcattcattgtagaaatagaacacatggcatgtgagctggattgtatg

SEQ ID NO: 44643 - DNA, 506 bp, Homo sapiens
gtatgtggtttcctcacacttcctgagtttatgtgctacatttctggctaaacaaacagattcaaaccactctttgttctagtttcagattttgtagcagaggatcctaatggtcttgggtcaggcataacttgtgactacacagataatttctctaaggccaaccagcagctaattttgtgtgcagttggtaatttcatttccttcagatggtggaacaattcgactataaaatgtacttgtaactgggattataaggtrtgtgctcttcctcctccatgatctcatttttaccatgataaatgagaactcatccatcaataacatcatggttatttgccaattctctctctctctgtttttcactgtttatctaatcagatgaatcagttactgatatgtggccatcagctgtagataaatgacacatgttggggaatgtactattattgtgacagtcattcattgtagaaatagaacacatggcatgtgagctggattgtatg

SEQ ID NO: 44644 - DNA, 572 bp, Homo sapiens
caactgctttactagatacctatttgtgccaggctctctgctaattacaaggcaatatagaaatagaaatagagcagtaaaggaatctcaattgatttttaatttactcaaccccatcaaaacgtaattatttggcattaagtaatgaatttccctgtggatgaaggataaatttgttttctataataacacagctgtttcttacagaacttatctacaaggaagtaatgaattcagaagaaaagactaaaaatggtgtagtaaaaggacagccttctccttcaggtactcactctccgtgaataaccaataaactagtacttgtgtaatttcttggcctttgtgtaggggttgcaagaaataacataacattgcttaaagagcagatggacaaatatcacatggttgtgtccttataatgattttagttttatttcttttgatattcagtgtggcattcattctgattattctgatggtaatgatccagyacaaaaactttttcataaataattttaatagtaatgaatcctgaagaaaatgttaacatgggctaaagggtaaatgtgcct

SEQ ID NO: 44645 - DNA, 554 bp, Homo sapiens
tctctttcaggcacattgtgtgtgtttgatcctaagccatgttccaattatggttctagagacaatgagaggtgatgagtggatgttgaagggattggccactctgtgagataactgcttcagacaagataggaaaggatttgtcctctgactcaaggaagaaggggctgcttcctccaggacacacagtgggacttagaggttcaagtttaacagatttatctgtcagctgaaatatgccacatccagctccctgtgtcttattccctttattcaatgcaaaaaaaattcaaataagagacctattaatattctgaattcaatttacattgtaatttttcaaacccacagagttaaattttgtatctggtctttgccatattggccatcctatctcttgtaaataagagagaagagattattttagggyggtaattgaaatactctggttctctgctcataactcgacaagaagaatttaaagcactgaactcaaaattttctttatgtcattttccagtgtagccagggtccaccacagagccctggcagtc

SEQ ID NO: 44646 - DNA, 603 bp, Homo sapiens
tgggtccttagaaaggttcctttcttctctggtcatcacttatgccctctcctactttgatctacccttgggaaagtatatctcaaagtacacaaaatcacagatttggtttttacaaataaaacaagttgtgttcatagcagtaagagataagcctggtcaacatggtgaaaccccatctctactaaaaataccaaaataaccgsgtgtggtggtgcacatctgtagtcccagctacttgggaggctggggcaggagaatcgcttgaacctgggaggcacctgacctcaggtgatccgcccaccttggcttttagtttagtttaactttgaagcaaggatgataattgtccctccctaaaactggtcctctccctgttgggggatgaaaaccacctttgtaagactaatgaaaggccacaagattagaattttgggagagtcctgaattctgcaaagatgtaggcatcattaaaggacaaccagccactgtcccccagcttacctttctacaattcccttactgttcagggaacacaagttgtgtctattgctttctaatttttccaaaggaaattaggcaacaaattcaactctaagtggt

SEQ ID NO: 44647 - DNA, 595 bp, Homo sapiens
tgtttttctgtttttgttttgcatgtgtgtgtgttatgttttgctattatggaacaggaaataggatgaagtcaaatgactttgtattctgctaatcctctcctctcagcttgtactgggtccctgaaaggaaggataaatcaatcactacaccacatagtccaactattccaagtaggaggagaaaagtggctagatgacttatggttcagagcagatttaaggaaggtagcaagatacatgacagaaagagagagatgtttgattcatttaaataaaaatagaattatattaaaatstgtgttcatttaacatattcatttaatcatatataaaatatgtatgaacacataaggtatacactatatgagaatatatagtacatagtaaaatacacaaataggatatatgttcactctacagacatatggatatgcctgtgtacagaacaatgagatggagtttcacagattggcttctaaagatgtctggggagaggaggcatgggatgaggggtgctgaggagcaggtggagtatgaggaaccactagtctgagcagtttcattttatccatctataaattaaggctcccgg

SEQ ID NO: 44648 - DNA, 571 bp, Homo sapiens
ccagatgatggttccttattcctctacaattttctagtccttgttacaatattgaataatgcctgayaggcactctcatctccctgcaagggaaggtgagtgaagcaaaaataaaatgccaaccttagctcttctcagtatttaaatgcaatattatattatagtatcaatccattcattggtaatgaaatgacaaaaaacgtcacttcatttccccccatcaataatgacaacttttcttcttcccaaaaagctgtttcaggaggttttagtgggatgaataaatgtattcctttttaacacttttgttgtttaaaaatgctattgtttcatttgaggtgtgaggaaatgtgctaaccctgtcattgttggtgcagcagtgcagaaatgataactgtatatagttttttctttttacaaaaatagagaggagcaagaaggagacaacttatttaaatcccgaatacagtcagacctcatatgcattgttaaaaaaaaaagccctgaagaattgcatatggattagagggatgaatattctattatttcagtctgttctgctgatcttctt

SEQ ID NO: 44649 - DNA, 503 bp, Homo sapiens
ggtcagtgttttctaatgagaatatctggttactgaaagtttaaggaatgttttctctaaaccttgagtaggataatgaaaccgtgatagatgccccacattgtttgaatcacttatttgggaagatatttttctttattagcaaatcttcaatgtttgccttctttgaaagccttctttttagggggacttgtttcaaaacatcttaaaagtcgtatgtatgattcgtttatttctcttcccttcaatgagattttagtggatacaaagcatctcttaactcagtttagatcttttaaatgtgcaaatattgatctagcaactgcatgtcaaaactcttgaatttcaggaaacttaggcatgcaccatttgcaacyctattccagatatgttaaagtactcgggtgtgtttcttagagtgtgattcttttactgtagcttaatgcttatttgcttttggcctagccacaaaaggcattatgttagtattcactgtttaacca

SEQ ID NO: 44650 - DNA, 1825 bp, Homo sapiens
cttgagaaagcaatcagagatctaggccaggggttgggttggcaaactgctgccctcaggccaaattctgtccggtgcctgtttttgtgaataaaattttatcggaacgtagtcacagccatttatctactcattgtatctaactacagcagaaatgagtagttgaaacagagaccatatggctcataaagcctaaaatactgactatccggacctctacagaaaagtttgccaactcctctagacaaagacatatgtttattgtttccttgtttataagtaaaaataacctagtaatttcttatagggcattgttaactaaatggcaataaatccctatagtgaaatacgctctcctgtccaaaatggtgatcaagaatacgtaaagaygtggaaatattttcacaatataataagtgggggaaaactaaatatagtgtacgatattgaccatgtaaagatgtccaaagagaagagaccaaaaagaaacaaactatgaagttgttatttagggatttataggttaaattttgttctttttacatgatttaaatttgctactgtgtttttagaaaattatttttacgatcaggaatgaatacggttaagtggttactgtgacaaaggaaagaaagacaagagacactgggagccttctgtagacgatttccttcttggtgcaatagaaacgcagctttctttcccttcctctcaaagaggagtggagtggagacatcctgagtggagggtgtatcactcttccaggaaagtggggtcctgttcattattattgccagctgatgctttttaagtccagaggtttgccaggttagcttaagcctaagagtagcgactgggagaatatgatgcctgaatctggatgttttggaagaaagacaaggataggatgagttagaaagttccagagtaggaatgttttcaggggaggggaaaactgagtcaggtactgacatgaaggccactggatgcttcagagtctagaggggataaaacagtatagcttacaagccaggaaagggcacagaacaggagagatgggggcacagcttgacaggcaacacctgttttccaattttgtccagaagtagcttttctctaagccagacttttcttcagagctcttctgtgtctccttaccaaagccgatgataactaccatgaccagctttgtttttctacagtaggtggaataaattataccctatcaatgttatctttataccaggtgaagagagtttgtgtcatctataaccctattttgataaaggctcttgcacgtttgactccctctggttcaattaattgcatacacatttaacaaatatttatggtactccttctacatgccaagtgctgttcttaacactaaaaacaccaaattgaacaagacagaaaaacattttccaaccctcattaactttaagtaataagataaagaaatagacattaaacatatgcaaacatacaaacatatgtacgtacattggtatttcagatgttggttgtcttactaaaaaatagtaagacaataaaacaaggtaataagggagaggatagggaaagtgctactttaaataagagtcatctggggtcctctgtgagaaaatattggatctgagaccagaataatgaggcagaattagccatgcaaaaactcagttcaatccaactaaataaatatttgaattgtgccaggtactattctggttacttgtgttctggtagtgaatgaaacaaagttcctacttgtacagtcattgtttttgagtgtgtgtgtgtggtgcatatattactaatttgcatg

SEQ ID NO: 44651 - DNA, 1825 bp, Homo sapiens
cttgagaaagcaatcagagatctaggccaggggttgggttggcaaactgctgccctcaggccaaattctgtccggtgcctgtttttgtgaataaaattttatcggaacgtagtcacagccatttatctactcattgtatctaactacagcagaaatgagtagttgaaacagagaccatatggctcataaagcctaaaatactgactatccggacctctacagaaaagtttgccaactcctctagacaaagacatatgtttattgtttccttgtttataagtaaaaataacctagtaatttcttatagggcattgttaactaaatggcaataaatccctatagtgaaatacgctctcctgtccaaaatggtgatcaagaatacgtaaagacgtggaaatrttttcacaatataataagtgggggaaaactaaatatagtgtacgatattgaccatgtaaagatgtccaaagagaagagaccaaaaagaaacaaactatgaagttgttatttagggatttataggttaaattttgttctttttacatgatttaaatttgctactgtgtttttagaaaattatttttacgatcaggaatgaatacggttaagtggttactgtgacaaaggaaagaaagacaagagacactgggagccttctgtagacgatttccttcttggtgcaatagaaacgcagctttctttcccttcctctcaaagaggagtggagtggagacatcctgagtggagggtgtatcactcttccaggaaagtggggtcctgttcattattattgccagctgatgctttttaagtccagaggtttgccaggttagcttaagcctaagagtagcgactgggagaatatgatgcctgaatctggatgttttggaagaaagacaaggataggatgagttagaaagttccagagtaggaatgttttcaggggaggggaaaactgagtcaggtactgacatgaaggccactggatgcttcagagtctagaggggataaaacagtatagcttacaagccaggaaagggcacagaacaggagagatgggggcacagcttgacaggcaacacctgttttccaattttgtccagaagtagcttttctctaagccagacttttcttcagagctcttctgtgtctccttaccaaagccgatgataactaccatgaccagctttgtttttctacagtaggtggaataaattataccctatcaatgttatctttataccaggtgaagagagtttgtgtcatctataaccctattttgataaaggctcttgcacgtttgactccctctggttcaattaattgcatacacatttaacaaatatttatggtactccttctacatgccaagtgctgttcttaacactaaaaacaccaaattgaacaagacagaaaaacattttccaaccctcattaactttaagtaataagataaagaaatagacattaaacatatgcaaacatacaaacatatgtacgtacattggtatttcagatgttggttgtcttactaaaaaatagtaagacaataaaacaaggtaataagggagaggatagggaaagtgctactttaaataagagtcatctggggtcctctgtgagaaaatattggatctgagaccagaataatgaggcagaattagccatgcaaaaactcagttcaatccaactaaataaatatttgaattgtgccaggtactattctggttacttgtgttctggtagtgaatgaaacaaagttcctacttgtacagtcattgtttttgagtgtgtgtgtgtggtgcatatattactaatttgcatg

SEQ ID NO: 44652 - DNA, 706 bp, Homo sapiens
atgcatacatgcaggtatgtttaaaggggagacttccagatacagttttgtgctgtggtagaatacctgctttttcctgcttttttctggtgctgattagagaggatcttaagacacagtctccagtgaaagaataaaattgtgctttgcaatatccataaatacagggcaagagactcaaatgtatgctctacacattttccctttatccccactaattcaagtggaggctctgcctatagaataaataaacagagatggaaaaatacagagtttttcttcaagtttaatattctcaytctagtcagtgtatttaaaagaaagtctgtggctttataaaattatggtaggtaactcatgggtttagatatttatttttctcttggttacctatttatagtaataatttaatatacatctggtaaaaagaatatttgaattcaaattagaattcactttcactcgaatatggtaccctcattcagaatatgactaattccactaagcagtagacaaattcccagaatcacaacctacctcaacctatgtgaaagcaaattttttctatcctctttatttggacacagacacacatgtgtgcgcacacacacatacagagagcgacagggacatacacaaataatttattactatcccttgttctggaccccaataccttattgctttttatgatctttcaattctt

SEQ ID NO: 44653 - DNA, 545 bp, Homo sapiens
gctaccattaaatatttactctttatggcatcctattgaatgagagaataattattatcctcattttgagataaggccattaagatacaatatttaatgaactttaattgctaatgtagttagaggcatagatagtgagttctaaccttcctcctgaagcattctgtgaaaacccataatgtagtgaaaccccagttatccacattgatgggaggaargaatgacactgatgcgtaattcaaaagccatacttagttttgtaacgtatcttatacttttttgaacatagatgaatcttttatgggagttacactttacatatattgaaatcacatgtcaaagacgaagctgaaggactctgaagattaatgagaagcctagattaggctagtgttacgttgtgcccttgggtaagctatgtatccctctgggttgcagaattctcttgcataaaataaaaggcaggagctattctgactttaaaacttcttttggtccaaatagtcttctgctcctgaagggaaatacaaagcatttcaggaaat

SEQ ID NO: 44654 - DNA, 545 bp, Homo sapiens
gctaccattaaatatttactctttatggcatcctattgaatgagagaataattattatcctcattttgagataaggccattaagatacaatatttaatgaactttaattgctaatgtagttagaggcatagatagtgagttctaaccttcctcctgaagcattctgtgaaaacccataatgtagtgaaaccccagttatccacattgatgggaggaaggaatgacactgatgcgtaattsaaaagccatacttagttttgtaacgtatcttatacttttttgaacatagatgaatcttttatgggagttacactttacatatattgaaatcacatgtcaaagacgaagctgaaggactctgaagattaatgagaagcctagattaggctagtgttacgttgtgcccttgggtaagctatgtatccctctgggttgcagaattctcttgcataaaataaaaggcaggagctattctgactttaaaacttcttttggtccaaatagtcttctgctcctgaagggaaatacaaagcatttcaggaaat

SEQ ID NO: 44655 - DNA, 545 bp, Homo sapiens
gctaccattaaatatttactctttatggcatcctattgaatgagagaataattattatcctcattttgagataaggccattaagatacaatatttaatgaactttaattgctaatgtagttagaggcatagatagtgagttctaaccttcctcctgaagcattctgtgaaaacccataatgtagtgaaaccccagttatccacattgatgggaggaaggaatgacactgatgcgtaattcaaaagccatacttagttttgtaacgtatcttatacttttttgaacatagrtgaatcttttatgggagttacactttacatatattgaaatcacatgtcaaagacgaagctgaaggactctgaagattaatgagaagcctagattaggctagtgttacgttgtgcccttgggtaagctatgtatccctctgggttgcagaattctcttgcataaaataaaaggcaggagctattctgactttaaaacttcttttggtccaaatagtcttctgctcctgaagggaaatacaaagcatttcaggaaat

SEQ ID NO: 44656 - DNA, 1793 bp, Homo sapiens
atgaaggtgctcactccaggaaacataaaggatatccattaatttttagctttttttgtgtgaagcaaagggtattgctaatatacaacctctggaatagacctgatcagttacccagtctctggaagagggtggtaattgaaaaactaataagggcaggccctagtctaagaaactaaatctaagacagccacctgaagtgtgaagatggaaattgcagagttgagtctggagtgttttataggcttatagctctaacttgcctaattgaacttttacaattgaacttttacaaagaaagtggggatttatttatactcctactctagggggccacaaaaaaaaaagaggaaatgagagtataggagatttctctaggttatcataagaaagaagtctgacaatacaatccttgttccatttatctttttataataaaccacaaaatatttaagagctgttggaattctttgtttcttccccatgctggctattttgccattctcttcatctcaatactttgctgagtaaaagtcttgaaaccaaaaatatccctacaattcatgaccttgagtgacttcaaaattcagttagacaaaacagacagctgagttctgtggttctcaatctttgtacttttaaaagtattcatgctttggttctacccacaaagatcctgatttcactggggctgaagtgttgaaagattttatagccaccaaatcaccctaatgtgcaatcaagggtgagaaccttattttctcatatcccccttccttatatccactgatcttgacttcagttttaccttggcaattcacctccatggccacactctgaactttgtcatcagccagaactgctccaaccaacctcaaaatcttaaactcaaatatcccacactctaagcatagttttctttctttctagctcctcttattacgttaaagacctaatagtcttatttctcaactgctttcttgctaacccttcattgttctcctcataaacccaaacaggagataacaagccaggattaatccacctgtgtgatctccccatttttaacccttgtgtttccagagaaaaacacaaccacttacactggtgccacagcaagttcatactctccagacccaattggatggagcctcaatactgccaaaatcccattcatttctctagtcagccttgtgtccttttttcccaataaaaactctgtctcttggtcacatggacatttccatcctatttctgtttgaggtagaaatctgctcctgtaccttgagtcccacctgcttctgccttttcagttgacttgctccttcacctgccacttgtcttggatcaccagctttagccatggactaagtctttaacatgggcatttaaacatacttaaaacacttccttcaaaaagcaaagcataacagtgctaaagcaaattttcatgggtcctcctctgcctactgccttcctccctctaacagccaaataattttgcatctactctcaattttgcactttcctacaccaaatatactgacatttttagtgctaaatccaggaaattttttcttagtctttgttttactcagattctcttcagtatttgaagagtgtaggccactctctgtgcataaaacagtctattcctccatgggctcctagctaacagcctgcagtttgtcagttttcttggggtctcttgatctctctgcctaccactgaaatggcagtgttcttttgtcagcactttctgctgtwaccccatattccagaggtatttagcc

SEQ ID NO: 44657 - DNA, 544 bp, Homo sapiens
tacatgggtgctcagcaaatgagtgtccgtctgtcctcctctgtctgcaggtgtgtttctgagtaggagcagcaagctgtccttccagggcatctgtggggcaggcatacctccttgaggtctcccatgggaggaggcaccaaacaaaataagcaaactggccaggtgcggtggctcatgcctgtaatcccagcactttgggaggccaaagcaggtggatcgcttgaggtcaggagttcgagaccagcctggccaacwtggtgaaaccccgctctactaaaaatagaaaatttagccaggcatggtggcaggtgcctataattccagatatttgggaggctgaggcaggagaattatttgaacccaggaggcagaggttgcagtgggctgagatcgctgccactgcactccagcctgggcgacagagcgagactccgtctcaaaaaataaaataaaataagcaaacagaggggagcagaaagagtcctgtgaaaactcagttaaatagcacagctctggatacttgattatttttttaaggagg

SEQ ID NO: 44658 - DNA, 538 bp, Homo sapiens
tttctgtttctacttgaaagatttaggggagctgaggtcaggagttcaagatcagcctggccaacatggcaaaaccctgtctctactaaaactacaaaaattagctgggcatggtggcaggcacccgtagttccagctactcaggaggctgaggcaggagcttcgcaggaacccgggaggcaggggttgcagtgagcygagactgcaccaatgcattccagcctgggtgacagagtgagactccatctaaaaaaaaaaatagaaagatttaggggaaagcaggaaaaataaagatcatttagagaagccaagccaagagactctatctttccctaaacatcctttaggcaaactgcaagggaagaatgtttaggagccttaataaccatcttcaaaatcaaacccaagacaccgcaggccttgatagaacgatctaaatagtaaccggaaaataagagctgcagttgcaatgaaaggtctacgggaataagttggaacatgagagaggtgagcaggtcctgaggtggcgctacccttc

SEQ ID NO: 44659 - DNA, 454 bp, Homo sapiens
ttggtaaactgcaaagcaattttgcaatcttttggttcataaagtgttttttactgttatttttcaaaaaatgcagtttttattctgcataaaaaatttaagattttttgaatgaaatataaaatataaaatatatcttggctttttgtaatgcacagtttagaaaaaaattgctcaaccaggtaacctcttcttttttaaaaaatcagggacttgtgacaggctatttattctgctagaaacactaccaccccaaccctagctctgtcttctcactaccttcagttgtcctttaagtctcrgggtagaagtcagtacttttgagaggcttctgttgacagcctccacttaaatttggctttgtgtacacatatttttgtagacggtatttttttcttatatcattcatcagaatttacaatgatttgagaggtgtttacagtatttaaggtta

SEQ ID NO: 44660 - DNA, 557 bp, Homo sapiens
tatgacaaatactatacaatttttaaatgcaaataattctagacattcatgacaaatgactgatcccttaatttctgccctgcgcatttcctagtataccttaatgtgtgaagcaaagccaaaacttgaatcctagatggacactgtatttcactgtcacaaaatgtttttttttaataatggaacaagcattaaagtaacctaattttctagatggattttttaccttataaaatattaactcargttcaaagataggacttataatggaaaagatatgggaagcagagagaccaatgtcataaaagagagcaatggtatcaaaataatcttttcatggggaaagtttcagaaatctttatcataggatttagccatttaggattaaaaatcagactgttatagtcggtatataatatgcactgcgataaaaaagcatcaagtttgaaatcaatgaactaatcacatccttgtaggattatcccccagtattttaaccattcagttgggattcaatggtcgctgtactataatttcaattatatttaaaatgtggg

SEQ ID NO: 44661 - DNA, 603 bp, Homo sapiens
caaaccacagacagacagacagacagacagacagacacacacacagaatattattcaaccataaaaagaaggaaatcctgccatttgcaacaacatggatgaacctagaagacattatgttaagtgaaatagccagagacagaaaaataaatactgtgtgatctcatttacatgtgaaatctaaaaaagttgaaattatagaaacagaaaacagtggttgccaagagctgggagtagggatggggggaatagggagacagcgatyaaagggtacaaattgtcagttataaatgaacagtttctgggatctaatgtacagcatgagtggtcatggatgtgttaattaatttgattgtagtaatcattatacaatgtatatgtacatcaaatccattgcacacctttaatatattcagtctttgttcatatttaaaaataaaaaaacctaaaaaatgactatatagtgggttttctgcatttgctagtaaagtgttgttttttgatttagtgtaaagattagagaaaaaagagaagagaaagagagaaggagaaacagggaaaggtaattatattgaaagtaggttgttatgtcagaatttgttg

SEQ ID NO: 44662 - DNA, 603 bp, Homo sapiens
caaaccacagacagacagacagacagacagacagacacacacacagaatattattcaaccataaaaagaaggaaatcctgccatttgcaacaacatggatgaacctagaagacattatgttaagtgaaatagccagagacagaaaaataaatactgtgtgatctcatttacatgtgaaatctaaaaaagttgaaattatagaaacagaaaacagtggttgccaagagctgggagtagggatggggggaatagggagacagcgatcaaagggtacaaattgtcagttataaatgaacagtttctgggatctaatgtacagcatgagtggtcatggatgtgttaattaatttgattgtartaatcattatacaatgtatatgtacatcaaatccattgcacacctttaatatattcagtctttgttcatatttaaaaataaaaaaacctaaaaaatgactatatagtgggttttctgcatttgctagtaaagtgttgttttttgatttagtgtaaagattagagaaaaaagagaagagaaagagagaaggagaaacagggaaaggtaattatattgaaagtaggttgttatgtcagaatttgttg

SEQ ID NO: 44663 - DNA, 549 bp, Homo sapiens
gaagaagagagggaaagaactctaaaatgtgcactttattaaaaaataatttttgtaagtaaatagaatgtctgaattactggttcatgtcaagtttactgaatggaatgaaaataatttagttgtataggtagattatatcaaatcaataaaaatgacatttcttctatacatctgaagatggtatgtaaatatkttacttcatataggttagcactaacttcataggcttgctggaaagaataaataaaataatatgtaaaaggcatattacaaagcgtctggcagagggtaagaactcagtaatccagaaggaaacttgttttctgttttaatatgtgtggcagacagactttctgaaatgatgccccaaagatagcccctctagtccccaaaacctgtgaatataatgagatattactcctataattattgtatgttgtatgggacagttgacttgaacatatggagatcacctgagtattccttatctaaccacataagcatgcaaaagcagagagttttctctggctcatggcagagaaggca

SEQ ID NO: 44664 - DNA, 549 bp, Homo sapiens
gaagaagagagggaaagaactctaaaatgtgcactttattaaaaaataatttttgtaagtaaatagaatgtctgaattactggttcatgtcaagtttactgaatggaatgaaaataatttagttgtataggtagattatatcaaatcaataaaaatgacatttcttctatacatctgaagatggtatgtaaatattttacttcatataggttagcactaacttcataggcttgctggaaagaataaatraaataatatgtaaaaggcatattacaaagcgtctggcagagggtaagaactcagtaatccagaaggaaacttgttttctgttttaatatgtgtggcagacagactttctgaaatgatgccccaaagatagcccctctagtccccaaaacctgtgaatataatgagatattactcctataattattgtatgttgtatgggacagttgacttgaacatatggagatcacctgagtattccttatctaaccacataagcatgcaaaagcagagagttttctctggctcatggcagagaaggca

SEQ ID NO: 44665 - DNA, 557 bp, Homo sapiens
ggaaagttgttcccaggagcatccccttcccgggccctaaatcctaacaaacaccacaagtctgattataagtctttctaccttgcccccaaggctgtctttgaaaatagtaaaaatgtgtaggcctcagctataaaactgtcagaggcaattgtttgaatttggacatcaacgttatgatcaaaatgaaaatgtgtcactgactttgttgatgcatttttaaaagatgaacaggcttcktttgttgacctgatgctccccagtttctgaatgtctggtcacctcaatggccctgagcagccccgtttctgaacatctggctatgcccccatgattagcctgcctggccccagcttgccctagaaaagggaaagctcagtagaaaaggcattctgggtggtttccatcttcttggagaagcagaagcaaaattattaacagagaatgagactggctgtagcaatgtgtaggtttcagtagagttgagaaaagctgtatcagagattagggtaggactttcatttaaaattaaaattgctggataatgtggcagtaac

SEQ ID NO: 44666 - DNA, 454 bp, Homo sapiens
cctaagactagaggcagaggcttgctcatacaaagattgggtcatagacagtaggcagagggtttcaatagagccagacagtcagaaatgagtagagatggcagctgtcaggagggccgcccactcagtgcagattgcagttggggctcactctcgtatatgatcacatacatcatttcaggtagtcttctcaaccaccccctcggcctagcaaggcasgtgttatcaatctcccctttgtagattaaaaagctgaagatctgaattgtttgatattttattactcttattaataagatccattcaaaataaaacttgctgtcacaaatgtaattgcagcgaacatgtgcaaagatttagaccaagtaaaaaaagctgtagtagatttacacattcatatttcacttatcagagtctgttttctaagcattatcgcttggagccccattcattt

SEQ ID NO: 44667 - DNA, 454 bp, Homo sapiens
cctaagactagaggcagaggcttgctcatacaaagattgggtcatagacagtaggcagagggtttcaatagagccagacagtcagaaatgagtagagatggcagctgtcaggagggccgcccactcagtgcagattgcagttggggctcactctcgtatatgatcacatacatcatttcaggtagtcttctcaaccaccccctcggcctagcaaggcaggtgttatcaatctcccctttgtagattaaaaagctgaagatctgaattgtttgatatkttattactcttattaataagatccattcaaaataaaacttgctgtcacaaatgtaattgcagcgaacatgtgcaaagatttagaccaagtaaaaaaagctgtagtagatttacacattcatatttcacttatcagagtctgttttctaagcattatcgcttggagccccattcattt

SEQ ID NO: 44668 - DNA, 454 bp, Homo sapiens
cctaagactagaggcagaggcttgctcatacaaagattgggtcatagacagtaggcagagggtttcaatagagccagacagtcagaaatgagtagagatggcagctgtcaggagggccgcccactcagtgcagattgcagttggggctcactctcgtatatgatcacatacatcatttcaggtagtcttctcaaccaccccctcggcctagcaaggcaggtgttatcaatctcccctttgtagattaaaaagctgaagatctgaattgtttgatattttattactcttattaataagatccattcaaaataaaacttgctgtcacraatgtaattgcagcgaacatgtgcaaagatttagaccaagtaaaaaaagctgtagtagatttacacattcatatttcacttatcagagtctgttttctaagcattatcgcttggagccccattcattt

SEQ ID NO: 44669 - DNA, 1081 bp, Homo sapiens
tggctatttgggccaagttttctccagttctttgaagaatgtcaatggtagtttaatgggaatagcattgaatctataaattgctttaggcagtatggccattttaatgatattgattcttcctctccgtgaacaaatccatgggttgtttaaaagcttattgtttaatttcaacataggtagtctttaggtaactttattttgtttaattttagcttagttcagctatgtcagaggatacactctctatgattttattctttcagtacttgtggtgaattgctttatggcttaacatatagttaatcttggtaatgttacacatgcgcttgaaaatagtgtatattttgtcatttgagggaacagtcaagtttgttaatgatggaattcatatgttctacattttgctatttttttgtctatttgtcttattctttattgagagagatagattttaaaatctccattagagcatgtatctatttattttatggattataaaggtttaaggatctgttattaagagcacagtttcttcaacttattttctttcatcttcacacttttaggttgtctttatatttctgtaagtagcataaagatggattttattttttataaagtctgccaatacctgtcttttaactgatgcatttyatctatttatgttattataattaattctattttgagtttatatatattattctacattctatttttcatttgtttctcttctgttctttttctctttttgcaaatatttttagattaattgattattttttagtattacattttcccatctatttctggtacatttctaccaaaaatcctgcttatattttgacagatattgaatttgatttatagagaagaagagattgagaagtcaataagagcaaacgtagtatcttcaaatatattggcccctaaaccacaaacacaaaatgtctctgtgtttacttaatctttaatttctgtcaacaatattttatagtttaagtgaacaagtttaacacttttttgttaaatttatttctatgcattttatactattgtaatgggataattttcttta

SEQ ID NO: 44670 - DNA, 1081 bp, Homo sapiens
tggctatttgggccaagttttctccagttctttgaagaatgtcaatggtagtttaatgggaatagcattgaatctataaattgctttaggcagtatggccattttaatgatattgattcttcctctccgtgaacaaatccatgggttgtttaaaagcttattgtttaatttcaacataggtagtctttaggtaactttattttgtttaattttagcttagttcagctatgtcagaggatacactctctatgattttattctttcagtacttgtggtgaattgctttatggcttaacatatagttaatcttggtaatgttacacatgcgcttgaaaatagtgtatattttgtcatttgagggaacagtcaagtttgttaatgatggaattcatatgttctacattttgctatttttttgtctatttgtcttattctttattgagagagatagattttaaaatctccattagagcatgtatctatttattttatggattataaaggtttaaggatctgttattaagagcacagtttcttcaacttattttctttcatcttcacacttttaggttgtctttatatttctgtaagtagcataaagatggattttattttttataaagtctgccaatacctgtcttttaactgatgcatttcatctatttatgttattataattaattctattttgagtttatatatattattctacattctatttttcatttgtttctcttctgttctttttctctttttgcaaatatttttagattaattgattattttttagtattacattttcccatctatttctggtacatttctaccaaaaatcctgcttatattttgacagatattgaatttgatttatagagaagaagrgattgagaagtcaataagagcaaacgtagtatcttcaaatatattggcccctaaaccacaaacacaaaatgtctctgtgtttacttaatctttaatttctgtcaacaatattttatagtttaagtgaacaagtttaacacttttttgttaaatttatttctatgcattttatactattgtaatgggataattttcttta

SEQ ID NO: 44671 - DNA, 1081 bp, Homo sapiens
tggctatttgggccaagttttctccagttctttgaagaatgtcaatggtagtttaatgggaatagcattgaatctataaattgctttaggcagtatggccattttaatgatattgattcttcctctccgtgaacaaatccatgggttgtttaaaagcttattgtttaatttcaacataggtagtctttaggtaactttattttgtttaattttagcttagttcagctatgtcagaggatacactctctatgattttattctttcagtacttgtggtgaattgctttatggcttaacatatagttaatcttggtaatgttacacatgcgcttgaaaatagtgtatattttgtcatttgagggaacagtcaagtttgttaatgatggaattcatatgttctacattttgctatttttttgtctatttgtcttattctttattgagagagatagattttaaaatctccattagagcatgtatctatttattttatggattataaaggtttaaggatctgttattaagagcacagtttcttcaacttattttctttcatcttcacacttttaggttgtctttatatttctgtaagtagcataaagatggattttattttttataaagtctgccaatacctgtcttttaactgatgcatttcatctatttatgttattataattaattctattttgagtttatatatattattctacattctatttttcatttgtttctcttctgttctttttctctttttgcaaatatttttagattaattgattattttttagtattacattttcccatctatttctggtacatttctaccaaaaatcctgcttatattttgacagatattgaatttgatttatagagaagaagagattgagaagtcaataagagcaaacrtagtatcttcaaatatattggcccctaaaccacaaacacaaaatgtctctgtgtttacttaatctttaatttctgtcaacaatattttatagtttaagtgaacaagtttaacacttttttgttaaatttatttctatgcattttatactattgtaatgggataattttcttta

SEQ ID NO: 44672 - DNA, 549 bp, Homo sapiens
ctaggaaggaatgaaggccctagtgtatacagtagagatctcaatgattcacccttactctgttttcctccttcctttttaaattttctctgcttcttagaatcagaatttatttatctaaaataaattaactacctggacacaagttatttttccacatgggctttgcctcagggagtacctaaactgagttattcttccaaattctattgacacaaaatgctggcttagaaggcttttctttaagaatgaggactgcagggggaatttatgtgagagaattgcaaaccagttaaggctgaataattagacactcctgttcttaaaatcacccggactcctccatgactggagactctcaactggcagtatcttaccacasgctctacccttctgccaagatgtatggctcactctgctcctccctagacttggtctctttcatctcccaccttcatcccctaatccctcttaaacttacaaattagcagtttatctattattggttttcttggtttattgtagtgttggtctgcgaaatattttccc

SEQ ID NO: 44673 - DNA, 549 bp, Homo sapiens
ctaggaaggaatgaaggccctagtgtatacagtagagatctcaatgattcacccttactctgttttcctccttcctttttaaattttctctgcttcttagaatcagaatttatttatctaaaataaattaactacctggacacaagttatttttccacatgggctttgcctcagggagtacctaaactgagttattcttccaaattctattgacacaaaatgctggcttagaaggcttttctttaagaatgaggactgcagggggaatttatgtgagagaattgcaaaccagttaaggctgaataattagacactcctgttcttaaaatcacccggactcctccatgactggagactctcaactggcagtatcttaccacaggctctacccttctgccaagatgtatggctcactctgctcctcccyagacttggtctctttcatctcccaccttcatcccctaatccctcttaaacttacaaattagcagtttatctattattggttttcttggtttattgtagtgttggtctgcgaaatattttccc

SEQ ID NO: 44674 - DNA, 511 bp, Homo sapiens
gacctggtttgggtgtgtctgactcgtcaaacctgaatcatatgctacaagtcctgctgcaagggagtcctgaacagcctgtgtctggcttttgttgttgtgttgatgatgatgatgattatgatgatggtggcttcttagtgagaggtaacctagacagactcataaggtgaggaattacccaaactcaggaagtgcattttgagctaggcggccaaaagaatgacaaaggttcatttcagtattttatgcaactttactacaataattacttttattttatttaatagaaaccagttaaataagctgtgctgggtgatggatagctaatcattataacagcagcagataatatttattaagggcttatcttgtcctagacactgtgtcaagccctttaaatgcctttttagttctcaaaatgatcctatgtggtaggtaccatyatttcctttttaaagttgaggaaattgtccccacctttctgggtggaaccaagaaagcaccaaaa

SEQ ID NO: 44675 - DNA, 560 bp, Homo sapiens
gattaagttgtggaggaagagtgtgtagaggcacaagaagagtagaaggtagaatcacggtgaacatcaatgaatggaggaaagatgaaaaggcagcaagagaggcagtgagaggtagaaggagacacgtgggagggctgagggaggaatgatggttgggaagggactgccaacctggtcttaagcagcaggaagacctgagtgagaacagtcctggggtttgacagttaaggagtcattccttttgcagcagagaggatgcagagatgagaatagacagttctttgaggatcaagaaagaagtaacaatagctacaggggaatgaggttggagggrgggtttgtatttgtgaaaggaaaatcttggggcctcaaaattactaagctaaagggaaaagtcaaggtggaaactgctcaggacaaaactttcctcccactctattcaaagtcatccctctgctcactgagataaatgtacattctgattgcctccttcagaaaagcctatcagaaactcaaaagaatgcaaccatttgtctctcatttacctgtgacctgga

SEQ ID NO: 44676 - DNA, 525 bp, Homo sapiens
atgaactatatgaaactgcaatgttgtcaacaaaatagttctttcctatgtttcaaaaacaaggattcagaagcaagaaaggtgtaaaagtaatcaggggtcatgtcatgcccttctcattgtaatacgagataatcagtgacagagtttctagtcaaaacgtctgatattctgaacttttttcacctttcgagagctttcgcaacattcagacttgtgttactcatcttgtaaatacagatgcttgctatggagacttagctgacttctggtttcacattcctaatgcaagaactaaagaacaacacaattgttctcattttagttaagtttttaatttaacctccttcatcatgggtggaaaacccttgtttaaaaggattatttcattygggcatttaaaaatggaatatccttccaattccttcagataattttagaaacgaaattataaattgtgttttttaacattattctaattttttaaaggccattgggatttttatattcttctagtagaagatg

SEQ ID NO: 44677 - DNA, 574 bp, Homo sapiens
taaatattactgtgaaagatactyattttatgattaagacaaaacaagttactcccaccaggatgtacttatttttacagaaaggggaagccagcatgtagagtaatttttacagtaagcaggttcaagttcaacagcaggagaaagagaccagaagttaaagaaacaatatatgttcactttcacactagagaaacgatctaaatctataatttaacacttttaacattttttaaataaaataaacttttttggaggaataattatcacatggtacaaatttcgaaaggtaaaaagtgtgaacagtgaaaagtctctcttctatcctgacaactactttcagaagttatttttctaattatatgtcatcagagatatgttttatttcatttgccttttcctcttgatttgaagagttcaaggtcctcaatttacaaatgaatttttagagtataatctgcttgcaagtcatttggaattcagattgcatcgcaaatttctgtttcgggtttcttaaggtagttcactaacagtacccctaggcattggaggacacagcactcatgggtcctac

SEQ ID NO: 44678 - DNA, 527 bp, Homo sapiens
tgtatagaatagtttaacaatgcaggctgagtgcggtggctcacacctgtaatcctagcactttgggaggctgagatgggcggatcatttgaggtcaggagttccagacgagcctaaccaaattggtgaaactccatctytacccaaaatacaaaaaattagccgggtgtggtgacgcatgcgtggaatctcggctacttggaaggctgaggcacaagaactgcttgaactcgggaggcggaggttgcagtgagccgagatcatgccactgcactccagcctgggccacagagtgagattgcagagagaacagaacaaacagaacaacaaaacagaacaatgtgaatattacatcaattttgatcctagtgttttattttacctttttaaccagctctaattcttgcatggttttctgaagctgtttcttttgcttttgaagttgtacctgaagttcttcaagttcatttacagtagtggcatgttcctgaaattaaaaataaaaacaacccacaccacccaaccaa

SEQ ID NO: 44679 - DNA, 343 bp, Homo sapiens
  misc_feature (1)...(343): n = A,T,C or G
cacaggcggggtgasaaaaagcgatggtagtcacttaatgagctgagggcagaatgcttatccatttgatctcattagaacatgattattaaaaactactttgcaggacaaaccacgtacattttatcaagttacctatgaaccgatgtatttcgttcacttaataccattcactaaattcagttattgacctagtcaataactgcccaacttcacatttcacatacagtgaagaaactcttgtttcagcattcttttttgggttggttggtttgtttgtttttgttttcttttttacacaangggcaatccaaactgcccaatctactccatccgtgcctgt

SEQ ID NO: 44680 - DNA, 1833 bp, Homo sapiens
taatcacttcaaatctgctctgtcagtagacaggtaagctcttgsttctctgtgccagatacttggacaggcaccagaacagccttcttactctaaagctccatggcttctttaaacatcactgagccttcctctcttctcagaggctaccatgacacctacgctcagaaagccattccaggaataagtctcccttggttaagaccttcagctagatgtttttaagcattgggaaaagaatgtgctgaaaccgtattgcatcaaacagtatgaaattcgagtacttagggccaaggcagaagcaattctcctttatattcatgaagagattttgttttatagcattttgcagatatgataacatctgtctgcataaccttcccacaagggatggcagtgggaggacgattatacagattttttacattggtaatggcaaacaaagccaccagagaagagagcagggttatatttctagtccctggagagctggtgaaataactcaggtcttttgagtcttaggaaaatctgctttctggtagctagtgagctggtttcgctactcattaaagagcttgttttaagggaatacacttttaaaagcccattaaatgcttttatatcaatttgaaggattagaatcagaaacgaaggcaggctattagaaagtacatgctgtgtctatagcatggggaaagagattgtggttaccctgtcagatctaaaatttgcttaacttttaaattctctagtactagagctctctgcacactttggaatcgacaaattgagtcaatttattgtagctgtgatttcaaattggagtcacgatatttaagtctcccgtggacagggatacaacaatacccaatcattcagtttcttagcgctattctaggccttatacgatattcaaaatacaataagtcatccaccaagtttttgatacttagaacaacatgctattctaacacaaacacatgtgccaaagctaaaacagaaacacattatttccacccatcctattgtggtttctcagctttttatgcaacttagcatataacctcatatcaaaattattttccataatttattcatgctcctcagagaatagtcagaggaaaccacaggtagagacacagactgtatctctaattaaagatactttcctgacaaaggacaagccctagccaaaattaaaaggcttaagtagaatttactttttactttctcttcccaattaacaaccttccttacctaaattgtatgactttttctaaatgcttcaaagccatatgtaaataaagaaaaagaggtgatgagcatttatagaatgtaaaagaatctcaattcgtgcattattcctcccacccagcttttcctaacacctaccccccgccctgcacagggctgagccaagactaggctgccccagcaagagtccatgccgcatctacccacacacatctccccatttccatcccatcagccactacatcctgtagtgcatgcctgtaaaatatttctcaattttatctcttttttgctggttttacttcatgtctttagctaatgctattttcatttctggcctggaaaactgcaacatttttctaacagaagcccctgactccagtctcatccttcaaatcaatgaattttctaaaataaatttgttggccaggcatgaaggctcacagctgtaattccagcactttgggaggccaagatggaaggatcacttgaggccaagaatttgagataatctggccttgcaacatagcaaaaccctcatataaaaatgttaaaaatagctaggcatggtggcatgca

SEQ ID NO: 44681 - DNA, 1833 bp, Homo sapiens
taatcacttcaaatctgctctgtcagtagacaggtaagctcttgcttctctgtgccagatacttggacaggcaccagaacagccttcttactctaaagctccatggcttctttaaacatcactgagccttcctctcttctcagaggctaccatgacacctacgctcagaaagccattccaggaataagtctcccttggttaagaccttcagctagatgtttttaagcattgggaaaagaatgtgctgaaaccgtattgcatcaaacagtatgaaattcgagtacttagggccaaggcagaagcaattctcctttatattcatgaagagattttgttttatagcattttgcagatatgataacatctgtctgcataaccttcccacaagggatggcagtgggaggacgattatacagattttttacattggtaatggcaaacaaagccaccagagaagagagcagggttatatttctagtccctggagagctggtgaaataactcaggtcttttgagtcttaggaaaatctgctttctggtagctagtgagctggtttcgctactcattaaagagcttgttttaagggaatacacttttaaaagcccattaaatgcttttatatcaatttgaaggattagaatcagaaacgaaggcaggctattagaaagtacatgctgtgtctatagcatggggaaagagattgtggttaccctgtcagatctaaaatttgcttaacttttaaattctctagtactagagctctctgcacactttggaatcgacaaattgagtcaatttattgtagctgtgatttcaaattggagtcacgatatttaagtctcccgtggacagggatacaacaatacccaatcattcagtttcttagcgctattctaggccttatacgatattcaaaatacaataagtcatccaccaagtttttgatacttagaacaacatgctattctaacacaaacacatgtgccaaagctaaaacagaaacacattatttccacccatcctattgtggtttctcagctttttatgcaacttagcatataacctcatatcaaaattattttccataatttattcatgctcctcagagaatagtcagaggaaaccacaggtagagacacagactgtatctctaattaaagatactttcctgacaaaggacaagccctagccaaaattaaaaggcttaagtagaatttactttttactttctcttcccaattaacaaccttccttacctaaattgtatgactttttctaaatgcttcaaagccatatgtaaataaagaaaaagaggtgatgagcatttatagaatgtaaaagaatctcaattcgtgyattattcctcccacccagcttttcctaacacctaccccccgccctgcacagggctgagccaagactaggctgccccagcaagagtccatgccgcatctacccacacacatctccccatttccatcccatcagccactacatcctgtagtgcatgcctgtaaaatatttctcaattttatctcttttttgctggttttacttcatgtctttagctaatgctattttcatttctggcctggaaaactgcaacatttttctaacagaagcccctgactccagtctcatccttcaaatcaatgaattttctaaaataaatttgttggccaggcatgaaggctcacagctgtaattccagcactttgggaggccaagatggaaggatcacttgaggccaagaatttgagataatctggccttgcaacatagcaaaaccctcatataaaaatgttaaaaatagctaggcatggtggcatgca

SEQ ID NO: 44682 - DNA, 1833 bp, Homo sapiens
taatcacttcaaatctgctctgtcagtagacaggtaagctcttgcttctctgtgccagatacttggacaggcaccagaacagccttcttactctaaagctccatggcttctttaaacatcactgagccttcctctcttctcagaggctaccatgacacctacgctcagaaagccattccaggaataagtctcccttggttaagaccttcagctagatgtttttaagcattgggaaaagaatgtgctgaaaccgtattgcatcaaacagtatgaaattcgagtacttagggccaaggcagaagcaattctcctttatattcatgaagagattttgttttatagcattttgcagatatgataacatctgtctgcataaccttcccacaagggatggcagtgggaggacgattatacagattttttacattggtaatggcaaacaaagccaccagagaagagagcagggttatatttctagtccctggagagctggtgaaataactcaggtcttttgagtcttaggaaaatctgctttctggtagctagtgagctggtttcgctactcattaaagagcttgttttaagggaatacacttttaaaagcccattaaatgcttttatatcaatttgaaggattagaatcagaaacgaaggcaggctattagaaagtacatgctgtgtctatagcatggggaaagagattgtggttaccctgtcagatctaaaatttgcttaacttttaaattctctagtactagagctctctgcacactttggaatcgacaaattgagtcaatttattgtagctgtgatttcaaattggagtcacgatatttaagtctcccgtggacagggatacaacaatacccaatcattcagtttcttagcgctattctaggccttatacgatattcaaaatacaataagtcatccaccaagtttttgatacttagaacaacatgctattctaacacaaacacatgtgccaaagctaaaacagaaacacattatttccacccatcctattgtggtttctcagctttttatgcaacttagcatataacctcatatcaaaattattttccataatttattcatgctcctcagagaatagtcagaggaaaccacaggtagagacacagactgtatctctaattaaagatactttcctgacaaaggacaagccctagccaaaattaaaaggcttaagtagaatttactttttactttctcttcccaattaacaaccttccttacctaaattgtatgactttttctaaatgcttcaaagccatatgtaaataaagaaaaagaggtgatgagcatttatagaatgtaaaagaatctcaattcgtgcattattcctcccacccagcttttcctaacacctaccccccgccctgcacagggctgagccaagactaggctgccccagcaagagtccatgccgcatctacccacacacatctccccatttccatcccatcagccactacatcctgtagtgcatgcctgtaaaatatttctcaattttatctcttttttgctggttttayttcatgtctttagctaatgctattttcatttctggcctggaaaactgcaacatttttctaacagaagcccctgactccagtctcatccttcaaatcaatgaattttctaaaataaatttgttggccaggcatgaaggctcacagctgtaattccagcactttgggaggccaagatggaaggatcacttgaggccaagaatttgagataatctggccttgcaacatagcaaaaccctcatataaaaatgttaaaaatagctaggcatggtggcatgca

SEQ ID NO: 44683 - DNA, 577 bp, Homo sapiens
ttgtttccgtttggcagcttgtagaattcttgttccttccaccttagatgtgatakcagaatatgcctgagtatgggtcattttcattgtttctacagactctggtctttccttggtttagggaaatggcttattttggtttgtttagttatttcatttcctcaataggttccttttttttcttctggaatttctggtgtttgttccgtttcctcccagatctatccgccaagtattttgtgttttccctccagatttccaaatttttgtatctttctatgcttcagtatatttcttccacttaatcttccaactcactacttcagatctcaacaagaaccatcttgttcaatttacctacgaattttttttagaaagtctcatttttagacccatttttcctgctttaacccttagatgtgatgatgattatgatgatatgcaaattgtcttctgtctaccccagcagctctatttctgtctggtggctgggttcttcctatgccttgttattttcctttgttcattgaggctcaggtctgactcctgggagacttcaagggcagcagtccaagga

SEQ ID NO: 44684 - DNA, 577 bp, Homo sapiens
ttgtttccgtttggcagcttgtagaattcttgttccttccaccttagatgtgatatcagaatatgcctgagtatgggtcattttcattgtttctacagactctggtctttccttggtttagggaaatggcttattttggtttgtttagttatttcatttcctcaataggttccttttttttcttctggaatttctggtgtttgttccgtttcctcccagatctatccgccaagtattttgtgttttccctccagatttccaaatttttrtatctttctatgcttcagtatatttcttccacttaatcttccaactcactacttcagatctcaacaagaaccatcttgttcaatttacctacgaattttttttagaaagtctcatttttagacccatttttcctgctttaacccttagatgtgatgatgattatgatgatatgcaaattgtcttctgtctaccccagcagctctatttctgtctggtggctgggttcttcctatgccttgttattttcctttgttcattgaggctcaggtctgactcctgggagacttcaagggcagcagtccaagga

SEQ ID NO: 44685 - DNA, 592 bp, Homo sapiens
gacctaaaataattgtttgacctctctgttcctctctcttctcattagtaaaatgacagcagtaaaaagacctgcctcatgaaattgttgtaaaaagctcactccctgcaagttatccctggcgcaaggcacatactcagcaaatgttggctgccactgttgatgactgtacagtacctgcttaacacgtattaatagcgtgaacaggccgggcgtggtggctyatgcctgtaatcccagcacttcgggaggctgaggtgggtggatcaactgatgttaggatttcgagcccagcttggccaacgtggtgaaaccctgtctctactaaaaatgcaaaaattagctgggcggggtggcgggtgcctgtaatcccagctactcgggaggctgaggcgggagaatcgcttgaacccgggaggtggaggttgcagtgagccgaggttgcaccattgcactccagcctgggtgacagagcgagactctgtctcaaaaaataaaaataaataaataaataaatagagtgaacaataaattagttttattattcaaggaacacttctgctctgtcatggaacatttttgggaatatgca

SEQ ID NO: 44686 - DNA, 592 bp, Homo sapiens
gacctaaaataattgtttgacctctctgttcctctctcttctcattagtaaaatgacagcagtaaaaagacctgcctcatgaaattgttgtaaaaagctcactccctgcaagttatccctggcgcaaggcacatactcagcaaatgttggctgccactgttgatgactgtacagtacctgcttaacacgtattaatagcgtgaacaggccgggcgtggtggcttatgcctgtaatcccagcacttcgggaggctgaggtgggtggatcaactgatgttaggatttcgagcccagcttggccaacgtggtgaaaccctgtctctactaaaaatgcaaaaattagctgggcggggtggcgggtgcctgtaatcccagctactcgggaggctgaggcgggagaatcgcttgaacccgggaggyggaggttgcagtgagccgaggttgcaccattgcactccagcctgggtgacagagcgagactctgtctcaaaaaataaaaataaataaataaataaatagagtgaacaataaattagttttattattcaaggaacacttctgctctgtcatggaacatttttgggaatatgca

SEQ ID NO: 44687 - DNA, 1460 bp, Homo sapiens
caaagaacttaataaccatatgcaaaaactctcagtctcactagtatccagataggcaaaaccaaaggaattctctctctctctccatatctttctgtctcattctctgtgtctctgtctgtctctctyggtctgaatctctctttgtctctgtctctctctggatttatcagatgaacaaaactaatactcagtttttgggaggcaagtagaaaaagatccttacatgttttttctgattataaaagtgatgttcactcactatgaactactttaagcatgaaatgaaagtttctcccaaccccacactcagagctgctcctgttccccccgcacagggttttttgtgcagggcttggtttgttctacatggcatcttcagcaagcccagatttacactctgtctcagcaagcccagatttacactctgtcctcagtgctctgatatcaagtgtgggcctcccaagcagactgtgagccacaggcttgttacatacagggtacaggctggttgagtgaagggtgatgtttgtgcctttgtaaggctgtctttgaagccccccagctgagaatcctgcgagctctgccagggctcgtgtcgcatgtatagcagcagtgtgaggtctgggccgaaggctggcccaacagaagttccgacaacagaggggtaatggtggcagccatcctttgagaccatgggccactgactgtgatgtccccacacagaggcccctgcacctttcctcatcgccacccactctaggcaacctgggcaaactgcggggaagggtttaatatcacaaggggcttcactgaggcccttcagggatggcctggacaccctgaacaactgatggcagctatagttcctgcctagtagcgtctgtgtggacggtgacatgcctcaccactgagaaagtctgtggctattgcaagcacttagtgataatcaagaaacttggtccctgtatgtaactttaacccaggcaagcgatgcaactcatgtgtagcaatgttgctttgtttgataaagcagcgcctacctcatggtgcccttgtggggaggaaaggtatttgtacacagaaagtgccagaaaggtgcctggagggaaacagagccttggggaccactggctctagtggtggttatgttgggctctgacaccgctgactctagtggtggtcgtcattgctgctgggctcttgcatggctggctgtggtcgtcatggttatggggactgttgatgcttctgttctaggtgttcttgaggatgctattgggagaggcacagcgaaggagtcagatgggctctcgctgttcctttcaggggagtggtgcagcagtgaggagagtcagactcacaggtggcacctgtgtgcaaagcctgactctttccagctgtgcaacttgggccagtttcttaacacttgagccttagtttcctcacctgtgaaacat

SEQ ID NO: 44688 - DNA, 542 bp, Homo sapiens
gggaatgtcttttattattgttattgttttacagatgctctctaggtcgtggtctgaggaatgttgctcccgtcgtaaggatgaggccactcccctaagmgagctctaacccaaagggcaggtcacagcaggctgtattaatcacctcagtctggcctctaaaaagagcactgaaggggaggcagcattttggaaactaaagtttgtcatttgtcaacctcggttaggtgtctggacaatggatacttaatctggctgatgataagatacaagatccgtggtcccaccccagatattaaaatacaccaggagggaaggcaatgaacaatttccctcatgcagttcacattctgttggaatgagacatcgaaagatgaagagtcaggcaaagtagcagaagcaagtgtgggccgttaggtgcaatgatgtcgttctgtccagaggaagaagacacacaggagatagtgaagtcaccagctgtcaagtgtattgtccatgcaatggtcagaaaccagtaaccagtaagccagacaaaatgtatt

SEQ ID NO: 44689 - DNA, 591 bp, Homo sapiens
tcttctggtcagcctctccccgcgtctctgcctgggtcgtgtggccggttggcagtcgtcgtcccggcggttccagtttgggggtctgtgaaggcctgggcaacgtgggcatcggcgtcggacccgcaggggttttcatcccctccccatccggagcagcctctttgctaggctggatccagacgagcgctccccaaccaaggacaacggcctcccaggcgctcatcgtccacccgcaggagggtgcccgcagagcttcaagaaggtggttgtcacgcctgtcgccctctgccctcatcgagaaatgtagccacagctcgacgcagggacggagaaggaagccggcaaggggatggggcaagcatgtctgtctctcaaaggctggccttccyggccgagtcacccgtttgacactcctccccggatgccggtggtggtggcatggcccccccgtatcctgcctgggctctggcctctgctctgacctccctcttgctgtgtctgccccgtctctgagaagcctggcggcttcttagtgtggctcagtgtcttccacaaagaagacttccccgtccatcagggagaaacctc

SEQ ID NO: 44690 - DNA, 738 bp, Homo sapiens
tgcagaattacccccaagtggtggtgtcatgtggcagtagttactaattttccaccaaaatattttcgtcccctcaataacagaaattaagtgaggtacatgactctttagctagagaccagattcctcagcctccctagaagctatgcaactcagtttggaccagtgagatatgagtagaagtaactatgtgccacttctgggtctgggccttaaaacacttggaataagcaattccactcttttttttgcaaattgaaatgcagaaatgccagcaacccaagtacaaccatgcagatgagaaccctctagagaaagggttaacaagctatcacccatagagcagccacttggttttgtaaataaagttttattggaacacagctatgtccatttgtttacaaagtatatatagctgcctytgcaccacaatgacagagaacttaagtaattgcaacaaagaccgtgttgggctgcaagccttaaatatttgctatctagtgttttcagaaaaagtttaccaaccactgcactagagcaaaaagataaaaggaacttggggccctacatagctgtaacagaaaaataagtaatcatctagtttactgtcattgtattttggagcctctcttctacctctgtttagcatttactgtaactattgtatcttatgaattggatttctgttttcttctatctgattgctagaaataggggcttatgatggctaggggaaag

SEQ ID NO: 44691 - DNA, 552 bp, Homo sapiens
tgcactccagcctgagcgacagagcgagactccacctcaaaaaaaaaaattgagcttttattccgttttttttttctcatttttcagaataagttggctgaacaactttaaattttccgatgacatggtctatcgtgtgggtccttggggaaaatgttatttagacatttctctaaatatatttctggcatgagatagctctctgtatatattcaactggtctgtttgtctttttaaaataccacaggtagcagatgtacttcagttttccatggaaacgggtggctatcttccaaactgcatcactactttgcaggagagtttaatcaaacaccttcaagtagccccyaaatatctctcctttctagaaaagagacaaaaactaattcaggtgagtgttaaaggatgtcctgtatgacattattttttttcaagtgttttctgagcagtattatcagcctgttatgtagaaaaatgacagctgccatgttatcatatgaacattgccaaaatcttaactgtaccaaatgggaatggtttatatctggtctc

SEQ ID NO: 44692 - DNA, 1034 bp, Homo sapiens
cggtgaaacattcctacaatggaacactactctcaataaacagaaatgaacccttgatacacacaacttagatgtcttcaaaggcaatatgctgagctaaagcagctagtcytaaaatggtaaatattatgtgatttcatttatatgatattctcaaaaagtcaaaatacatcacttgaagggggttgattacaaaggggtaaatgagggaatattttgttgtgatgaaactgttttgtattttaattatgttaatggttatatgaaactattgtgtaaaaattcagacaaattaaaaattatatttttattgtatttattttgaacaatgtaattgttttagtattaaaattgtattgggaatagtaaagttaaaatgtgaaagaaactttgagttagaaggtattcattctagatcagtctctaataagtcatcttcatcaagagaattcatttttaattgctttagttcccaatctataacatggatgttataataactgacccaactttctctacagcaatggttctcaatgttttttgtctcagttttcatctattttcttaaaagttactaaaaatgccaaagaattgttgtttatgggttatgcctatcagtatttacaatattagaaattaaaactgagaacaaatatatttaattcaatttaaatttaaattgacaataataaaccaattatatatgattccttatgtagaaatcatgaatatattttaagatggtgtgaatatattttaagacagtcataagcagagctgaaagttacttatttccatgtgtatgaaaacataaaaaaattattgccctagcaaaaacttagaatcaacatctcttgactccaaatcctgtattctgtcactacgtcatgttgctctccaaataaatgtcttgttagggacattacaaatcctgtttatttctacctcccttccctctggactatattggaaagcatattaaacaattctggaatcattaggtatttttacagtctaaaaatgctattctgatt

SEQ ID NO: 44693 - DNA, 546 bp, Homo sapiens
caggcagaagcactggagtttaggctggccggttcattccatacccccacatgacatgacacaaggcagaggctgtgggacaaaggcattgccttttcttctggcatgaggaacggcttaggaagcaggggatggtggggctggggttgagtgatgggctgtgggccacaaggagtgggtgggcactgagcaagtgtcctggttgtctgtccacagacccagaacgagtggcatcccaggagcctgtgaggggctggcagagacttactggttccagtaaaagccccatgtggatgcagtaatgctgcctgctgstccttggctgtaattacaaacaggtacaagaggtacccatgcttcttgaagctctcagggagtgggttccagctgctcatggtaggcacttttagtcactgaacgtgcttcaggtatgtccaagtttgattaagccaggcatcttgctgtgaggccctccacttcactaaggacactcttcctttctccccctggaagttggaccttccagttctggttctggagacacga

SEQ ID NO: 44694 - DNA, 546 bp, Homo sapiens
caggcagaagcactggagtttaggctggccggttcattccatacccccacatgacatgacacaaggcagaggctgtgggacaaaggcattgccttttcttctggcatgaggaacggcttaggaagcaggggatggtggggctggggttgagtgatgggctgtgggccacaaggagtgggtgggcactgagcaagtgtcctggttgtctgtccacagacccagaacgagtggcatcccaggagcctgtgaggggctggcagagacttactggttccagtaaaagccccatgtggatgcagtaatgctgcctgctggtccttggctgtaattacaaacaggtacaagaggtacccatgcwtcttgaagctctcagggagtgggttccagctgctcatggtaggcacttttagtcactgaacgtgcttcaggtatgtccaagtttgattaagccaggcatcttgctgtgaggccctccacttcactaaggacactcttcctttctccccctggaagttggaccttccagttctggttctggagacacga

SEQ ID NO: 44695 - DNA, 580 bp, Homo sapiens
gtagacaacacatgcttgcaaattccttttcagtataaaaccccaaaagaatggcagtgaagcttttagaattacttgagtactgcaatgaatatggatgtgggtttttgcaatgggggtcattttagaatgaataatactgtataattgctttcagtaaattgtatcatcagtatgtatattagtttgtatatagatagtgtatattagaatgtactaggattggtattctgaaggtgtttggagttttcacattaggcaaaattctgaagtgactgactgaggggaaaatagtaacgataaagaggcaacagyccttttctaagaactcaagtgctatgtgttcattgttttgttgatcctcctaattcttatctagcattaggaaagaatcacaattctcttttaaggagaaaaaaaaaaacaggggcagatggaagaaaagtgcaagcccaggattttacaagaattaaaggtagagccagcatctctttatctctgatagaattctgactgccaactgagtttccttcctttaagagttaatggcctctaatggcagtttgatttggaggtgatt

SEQ ID NO: 44696 - DNA, 582 bp, Homo sapiens
ttagagataattactaaattgtctaagctcatatatccagagaaaagcagagttaggatttgaatttaggatgagaaagccaagaaatatcactgaatccaaaaggtggtacctattctgaagaatcagtacaaatgagaggatgaagaaaactaaaattaggaaaatgtctaacgtatgttctttagaagacactatgcttataaagttaaacaagaaataagaataatctaaaatctgaaaggcctgaatgcagattttaaaagaataaaagcatggttwaaaaaagtacagtaaataaaatgcacaataaagaaaattaaattagcaatatagaacatcagcttgagaattcttgcaatatttggaaaaagaagtaagataatgagagaaaagataagagacaatgaacagatgagggaaatgtaacatacaaataatagaaattcgagcagtaaataactgagtagatatattaaaaaaattttttttcagaataaatatttgtgttttgggggcaaagtaactacatataaggaaaagaaatacagagatctgcattcatattttttaaagttataa

SEQ ID NO: 44697 - DNA, 582 bp, Homo sapiens
ttagagataattactaaattgtctaagctcatatatccagagaaaagcagagttaggatttgaatttaggatgagaaagccaagaaatatcactgaatccaaaaggtggtacctattctgaagaatcagtacaaatgagaggatgaagaaaactaaaattaggaaaatgtctaacgtatgttctttagaagacactatgcttataaagttaaacaagaaataagaataatctaaaatctgaaaggcctgaatgcagattttaaaagaataaaagcatggtttaaaaaagtacagtaaataaaatgcacaataaagaaaattaaattagcaatatagaacatcagcttgagaattcttgcaatatttggaaaaagaagtaagataatgagagaaaagataagagacaatgaacagatgagggaaatgtaacatacaaataatagaaattcgagcagtaaataactgagtagatatattaaaaaawttttttttcagaataaatatttgtgttttgggggcaaagtaactacatataaggaaaagaaatacagagatctgcattcatattttttaaagttataa

SEQ ID NO: 44698 - DNA, 592 bp, Homo sapiens
ttttccctaaagtccttaaaaattactaaataaccatgtctgaacaacattaagttacatcttgagtttatatgataagctatygcatcttgcttctgtgagtcttacattgcccaagaattattagtccagttcacatggaaaaagacatatttttatttacttggattcaaaagattctttaatgttataaacaaataacacactcaaaaataaagcttaatattcagattttacagtcctagccatttttctctttaactttaatattaattgctttctgaatgtatcattacttttaagatagaaacatataatttcaaatatttagacacaggagacacactcatcttatgtgcttccacagatataaattagatatatgcttatcataacaggttgtaattgccattttatttgtctaacagctcaagagactacaagttctatggagacaaagatcataactcttttagtcactattgtagctacagtgctgatattatatagctggcatataagtgatgatcaatatatttttgttgaatttttattcattcattaaatacttatcagacaccttctatgagca

SEQ ID NO: 44699 - DNA, 592 bp, Homo sapiens
ttttccctaaagtccttaaaaattactaaataaccatgtctgaacaacattaagttacatcttgagtttatatgataagctatcgcatcttgcttctgtgagtcttayattgcccaagaattattagtccagttcacatggaaaaagacatatttttatttacttggattcaaaagattctttaatgttataaacaaataacacactcaaaaataaagcttaatattcagattttacagtcctagccatttttctctttaactttaatattaattgctttctgaatgtatcattacttttaagatagaaacatataatttcaaatatttagacacaggagacacactcatcttatgtgcttccacagatataaattagatatatgcttatcataacaggttgtaattgccattttatttgtctaacagctcaagagactacaagttctatggagacaaagatcataactcttttagtcactattgtagctacagtgctgatattatatagctggcatataagtgatgatcaatatatttttgttgaatttttattcattcattaaatacttatcagacaccttctatgagca

SEQ ID NO: 44700 - DNA, 592 bp, Homo sapiens
ttttccctaaagtccttaaaaattactaaataaccatgtctgaacaacattaagttacatcttgagtttatatgataagctatcgcatcttgcttctgtgagtcttacattgcccaagaattattagtccagttcacatggaaaaagacatatttttatttacttggattcaaaagattctttaatgttataaacaaataacacactcaaaaataaagcttaatattcagattttacagtcctagccatttttctctttaactttaatattaattgctttctgaatgtatcattacttttaagatagaaacatataatttcaaatatttagacacaggagacacactcatcttatgtgcttccacagatataaattagatatatgcttatcataacaggttgtaattgccattttatttgtctaacagctcaagagactacaagttctatggagacaaagatcataactcttttagtcactattgtagctacagtgctgatrttatatagctggcatataagtgatgatcaatatatttttgttgaatttttattcattcattaaatacttatcagacaccttctatgagca

SEQ ID NO: 44701 - DNA, 526 bp, Homo sapiens
agagacagagagagagagagagagcgagacagagagagagagagagagagagaggtctctgtcacccaagctggagtgcagtggcgtgatcatggctcactgtagccttaaactcctggactcaagtatcctcccatctctgcctcgctagtagctgggactacagacatgcacctccatgtgtggctaattttaatttgctttttgtagtgacagggtcttgctatgttgcccaggttggtcttgaactcctggcctcaagtgatcctcccacctcagctkcccaaagtgttgggattagaggggtgagcgactgtgcctggcccagggatagtttcttagtccaaaagatctcaggaaagcagcctctgtcagacaagagtcttccaccctggctgcaatactgtggttgcttccataggactggtgttgtaacctgggcagtctttccaagaaaatatagtgcaggaaggtcaggtgtttcctaggggaccatgtatagtaacttggtacacactaagcccaa

SEQ ID NO: 44702 - DNA, 543 bp, Homo sapiens
tgcccatattaatataatttgccttccatctcactaactgcaatctataggaatacataaatagttttgtctattatgactttggtgagtagccttgaataatgtgtatctcaagactaataaaatcatgaagactgagtaaatcgttgtgatcttttcttttaccaataaatttggcttgtttcacaaaatgtcacttgaattggtcctatttctcttcctatgctctaatcccactacccctattctaggctaagaaaaaaaatagatgattttaaatgagtttaaattgygagttattagatgcttaagaaaatatgtgctgtcatattcacaaatataagcaataaaatcaagtgttgttcacaaaagaaaccaaattatgggtgttcagataagaaggaaaaggatcaagaaagctactgacatagatttaaaacaaactttcatctcttgaatatgtagaacattttatgaagctacttatagtcattattataaaaacagtaggtaatttataaaaccacatattctgaaaaattt

SEQ ID NO: 44703 - DNA, 1833 bp, Homo sapiens
aacagaggttgttaatagcaacgaggtaactagagatgtcatatatactgtagttcactctaaagtggaacaggctcttcaatgaaaactaaaatttggaattcattaaccacataagtgaaccttttttcatttattctaagtctgattttataaacacctaaataagtggcatgataaagatataataagagatctgrgactaaatggaaaaaaaggagatttggagattatataaaaacattttaaaaactaagagcagatcattgcttgaggataaaacatttgctaagtgagaacagtattgattaagcatgtattaaatcattccctttcacattgcagggtactaaaaaaggtcttctagagactctggaaagacagatcccttcttttacaatatggtatgaagactcagaggaggataatcagttctctcgggctatcttaatatggatgaaatttcccaccattataagaataatatgaatatctggccttccctaaaagaatcacaactcaattttcaacccatggttaggaaacaaactgaacaagtaatattttcccccttaagtagtataagcatattgtagttaatcaacaggtactaagtgctaagaattttttgacaggtgataaatcgtataaagtccaagtttcagaagtccagtacctctggccctggtcactacatacactcaatatgtaacagtcattacagttattcatgcctagaaaatgttctattcagtacaaaaaagtttgcaacatatttacaatttaaactagtaacctttgaagaaatacaatgggaatataagaattttattattaaattttatattctgaaagtgctctttatccttatgttactggcaaaaagcaagagtgagattttgaacggcaaatttaacatacctgttttttaaccaaaaagaggatattttctttaaaacacatttattcattgaaattgacaaaacatacgaatgttcatactgaaatgatctagaatcatgttttcttaccatcctctagagtattctgtgtcacatggtcagacatctggctggctcccattggcatatatgctacaatgtagaaagtataattgctggcaggctctaagtcatcaataatataatgagttgtgtcatttccgatgactacttgatactcttcattatttaaacctaaattaaagaatccatgttttaaaatgacagatattcaaaataaaattaacaagaccattttcctgcactgtgaaacactggtccttgggtctaatctcaatctcttatcttctgtgcccctttacaaaatgtgaacaggaaggtctttattttctaaaagtaaccatatttcactacaaattattagaggacatttttcctgaataaatcaaactgaaaagaattcatcttctctaaacttcatttaccatctagtcaaaacccacagcagagacaatgtacagtagtaacataacagagcttaacacaacagaatattgtaattcataacagtgtaaactttacttgcttcaactcatggggttttttttcttttaaacataaatggagagacagtagggaatgtaatggctccactctttagaaaaacaaaccaaaccagaagttgtcctgcgaaagatctcattttgcccctagagattctattaaatttgactgacataagttgttcttttatttataatactgagggcaaaaaaactgggagtcacagaatgtgcctcaaaatgctttgtcccacagtgagtttttttttttaagagaaaaaaattctcagcaactcttaatcaaatat

SEQ ID NO: 44704 - DNA, 1638 bp, Homo sapiens
cagtacagggggttggtaccactaacccctgcactgttcaagggtcaaccacataccaagcatccaagagaccaaygaagactgagacccactaaaaaggctgagattagaattcttatccagtgctggaggagataaattggtgtaaattcaatggagggcaatttggcaatgtctttaagaccgaagatacacgttatttacccctgttgtactctttaatccagcaaccttatttcctgtacatgtcttcagacatctttgcacatgtgcacaatgagagacacacaaaggtattcacaatggcagagtttatagaaaggggcagtacatttccttgggtaaggggtgggcctgcagcaggctgtctatgttcagtatttaactctgccgtccgctatctgtgtggacttagacactctatgtgtcctctcccggcctgagcttcctcatatgtaagatgagacaaaacacagtaatgacttcacagggttgtggtgaagatcaaatgagtcaaaatacgtaacacatttagagtggtgccaggaagcagggccaatgctaagattttcattattactaccaccatcaggagattggaaacaacctaacagcccatcaataggagaatggctaagtgaatattacatgcatataatgagacaccacatattaaaagaaacaaagtagaaccatagtagtgattcctaactgggggtaattttgccccctatgggaaaactgcaatgtctgaggctatttttggttgtcacatctgggagtaggggtgcccctggcatctagtgagtggaggccagggatgctgctcaccatcctgcaatgcacaggacagccctccagagcagagaaggatctggttcaaaacatcaactgcgccaaggctgaaaaacctccaagataaaatggtattataagggcaaaaacatagaaaagtcatttagaaaaaaacaaaatatagtatacaaatacatgactttgaaaaggctctggaaagataaacaaaaagtttgtagcagtgactgtccctgaagaaaggaaccaggttatatgtgtgagtatggaaaaatccaaaacccgctttggcattttgtgtcatgaacgtataattacatcttcaaaacaacaaatgaaataaaagaaggctggatcgcacataccacatcaaggcagggctgtaaacctggctcgtcttccgagtccctgatgatagatgagaaagggctttgaaaggcacaaagctatgtcctcctgaggtgaggacggctggaacctggatgggaacatgcttcaaagagttactgaaccgtggttgtgcctcccttctgaggcaaataactgaggggccttcccctcctgccctggcacccctttgagccttgggggctgtgctgggtattgaattgggggagggtcctgatatactgaaaaccagccattaaatgcactgccacagcctcattgcctcctttgggccagtcagcttttgctgtaccagctgtcaaatattcaaaaatcactcctggcctgaacctgccagccccagaggccagggacatacgtaggcaatttctccaaagacgtcagcacagctgtcacaggaagaacacaggctatgca

SEQ ID NO: 44705 - DNA, 1638 bp, Homo sapiens
cagtacagggggttggtaccactaacccctgcactgttcaagggtcaaccacataccaagcatccaagagaccaacgaagactgagacccactaaaaaggctgagattagaattcttatccagtgctggaggagataaattggtgtaaattcaatggagggcaatttggcaaygtctttaagaccgaagatacacgttatttacccctgttgtactctttaatccagcaaccttatttcctgtacatgtcttcagacatctttgcacatgtgcacaatgagagacacacaaaggtattcacaatggcagagtttatagaaaggggcagtacatttccttgggtaaggggtgggcctgcagcaggctgtctatgttcagtatttaactctgccgtccgctatctgtgtggacttagacactctatgtgtcctctcccggcctgagcttcctcatatgtaagatgagacaaaacacagtaatgacttcacagggttgtggtgaagatcaaatgagtcaaaatacgtaacacatttagagtggtgccaggaagcagggccaatgctaagattttcattattactaccaccatcaggagattggaaacaacctaacagcccatcaataggagaatggctaagtgaatattacatgcatataatgagacaccacatattaaaagaaacaaagtagaaccatagtagtgattcctaactgggggtaattttgccccctatgggaaaactgcaatgtctgaggctatttttggttgtcacatctgggagtaggggtgcccctggcatctagtgagtggaggccagggatgctgctcaccatcctgcaatgcacaggacagccctccagagcagagaaggatctggttcaaaacatcaactgcgccaaggctgaaaaacctccaagataaaatggtattataagggcaaaaacatagaaaagtcatttagaaaaaaacaaaatatagtatacaaatacatgactttgaaaaggctctggaaagataaacaaaaagtttgtagcagtgactgtccctgaagaaaggaaccaggttatatgtgtgagtatggaaaaatccaaaacccgctttggcattttgtgtcatgaacgtataattacatcttcaaaacaacaaatgaaataaaagaaggctggatcgcacataccacatcaaggcagggctgtaaacctggctcgtcttccgagtccctgatgatagatgagaaagggctttgaaaggcacaaagctatgtcctcctgaggtgaggacggctggaacctggatgggaacatgcttcaaagagttactgaaccgtggttgtgcctcccttctgaggcaaataactgaggggccttcccctcctgccctggcacccctttgagccttgggggctgtgctgggtattgaattgggggagggtcctgatatactgaaaaccagccattaaatgcactgccacagcctcattgcctcctttgggccagtcagcttttgctgtaccagctgtcaaatattcaaaaatcactcctggcctgaacctgccagccccagaggccagggacatacgtaggcaatttctccaaagacgtcagcacagctgtcacaggaagaacacaggctatgca

SEQ ID NO: 44706 - DNA, 2318 bp, Homo sapiens
cttattccttaaaaataactcaaatgcagttttaaaacagctgactctgaagccagattaggtggatcccaattttggctcttgtgtttgctaactttaggacaccctagacaattttattaagcttctgtgtttttcatttttatataagaataaaggaacagcattttctaactcataggagagctatgttacagattaaatgagttaattagcatttacacattaaatgctctaattaccacctatgtcaaccctttggaatacatgaggctggctattgtctttgcatttcattctaggactgcatatgatataatccacactgttacataatccacattattgcaaacatacattaattttcttctttcatgaaattaaagtaggaactccttaagcttagcaaatagtgctttttccactctgcctaccagcctttgtcacaaaggcctctttttcatagtttactaaataacggacaggctagcccaggatgtcatagacacatgttgctttgctggggatatatgtcataggctgttttcattcagaaaattcaaaactcattgcgtaatcttgccttttttgaccaacctttaaataattaatgaaaatcaattatttcattatactattaaggtctctcacttggcggaataatatcttcaaagctttgattatctaatcacaactctacattttagtggagcaagcctggtatgcaacacagcagggtttttaaagacttcaatatgatgtccttccacaggagaagattgttttatttttctggttttawttttgtaattcttaattgattactcatttgaatgttgtacataataatttcttactatgtgggctgttttgtccaattaaaatcattcaagtctctgctttggaataagcttcaacaaaaggtagagggaaggtttatcattaattttacaatttgtgtctttgaagatgtaattacctaaattgtttggtttaaaaattcctatgtgtttgatgcacagaaaatatttccatatatatgtatatatatatacacacatatatatatatatacacaaattttgttttatattcagaatataaatgtttttgaaataaaatagtataggagacatcagacaaacacaagaatatgacataaattatagaagtcatttgtctgaataagaaagaacattttgatttaggagataattttaaattaagagtctactttccattcagagaataattataataaagttacattaagattcttatgtcaaaatcatagtggcaatgttagattcctggaatgtctcttctatgactcattatcttctcaagaaataaatggagatgtaacaagtagtgaaatctatctgaagtaagccactaagatattttattcatcctgaagttcatatgtttgacagccgttagattatcattactgtgagaaaaattggaaagtgtgggatctttggtagtttgtctttttcccggctccagagattatgctggtatcccatcagtcagcataattccattgaatttttgttctaggtacaggcttcactatacacagggttttgtagaagagtgtgtaaggttttatttgttcatgtgtttgcctgttttggtttccaaagctatcaggccacgatcaagcagaaggcagaagagaaacacccagattagtaatccatgatttttgtggctactgttgctcttcgctatttgccaatgcagaagtagaactgagagattggatttttacaacgtcatccgcttggggtataaatgttgtcattcaaggcacacctgtgtggtgttttagtaaaaccctcatatcctgagtagagatccaaactattaacatcattgggacaataattaaatagcaataagcaggcacttgtgcaaactttggcttaatatcgagtaacttgtttctaggccaccgtagaaatagttcaatcttcaaaactggattaaggcattctgtaaggttttagcacccctgggcaccaaaaaggagcaaataaaagttctcaatagaccaggtgtggtggctcacgcctgtaatcccagcaccttgggaggctgaggcggttggatcatgaggtcaggagttcgagcccagcctggccaacatagtgaaaccctgtctctactaaaaatacaaaaagttagctgggcatggtggcaggtgcctgtaatcccagctattcgggaggctgaggcaggagaatcacttgaacccgggaggtggaggttgcagtgagccgagatcccaccattgcagtccagcccag

SEQ ID NO: 44707 - DNA, 533 bp, Homo sapiens
ggtgttgagcaatgaataaaacaaagattcaccgtatgatctgtgctggagtcacttttgttttttttatgttttttttttttttgagacagattctcgctctgtccyccaggctggagtacagtggcgcgatctcggctcactgcaagctccacctcccgggttcatgccattcttctgccttagcctccagagtagctggaactacaggtgcctgtcaccacgcccagctaattttttgtgtttttagtagcgatggggtttcaccgtgttagccaggatggtctctatctcctgaccttgtggtccgcccaccttggcctcccaaagtgctgggattacaggcgtgagccaccgcgcccggcatctttttttttttttttttttctgagacagagtctcactctgtcacccaggctggaatgcagtggcgcgatcttggctcactgcaacctccgcctcccggattcaagtgattctcctgcctcagcctcaccaccacacccagctaatttttgtatttttagtagaga

SEQ ID NO: 44708 - DNA, 497 bp, Homo sapiens
tgcctgatgatctgtcactgtctcactttgcccccagaagggaccatctagttgcagaaaaataagctcagagcttccactgattctacattatggtaagtygtataattattttattatatattacaatgtaataataatataaagtagcacaataagtgtaatgtgaccgaacaatcctgaaaccatccccaccttcccccagcccatggaaagattgtcttccacaaaaccggtccctggtgtcaaaaagattgtggacaactgacctaaagtaattcactatcacaagtcttacctgggttgctgttttcagaagagtattttggcatctgtttttctttgtagtcagaaactaattcgcaaattctatgtataaaaatataacaaataaaattactgttttaaaatactgatctggaaacttaccaaatgtaaaattcttagagtatttcaaacaatatcagaatatcagaacttaacagtattatcccatc

SEQ ID NO: 44709 - DNA, 497 bp, Homo sapiens
tgcctgatgatctgtcactgtctcactttgcccccagaagggaccatctagttgcagaaaaataagctcagagcttccactgattctacattatggtaagtcgtataattattttattatatattacaatgtaataataatataaagtagcacaataagtgtaatgtgacygaacaatcctgaaaccatccccaccttcccccagcccatggaaagattgtcttccacaaaaccggtccctggtgtcaaaaagattgtggacaactgacctaaagtaattcactatcacaagtcttacctgggttgctgttttcagaagagtattttggcatctgtttttctttgtagtcagaaactaattcgcaaattctatgtataaaaatataacaaataaaattactgttttaaaatactgatctggaaacttaccaaatgtaaaattcttagagtatttcaaacaatatcagaatatcagaacttaacagtattatcccatc

SEQ ID NO: 44710 - DNA, 497 bp, Homo sapiens
tgcctgatgatctgtcactgtctcactttgcccccagaagggaccatctagttgcagaaaaataagctcagagcttccactgattctacattatggtaagtcgtataattattttattatatattacaatgtaataataatataaagtagcacaataagtgtaatgtgaccgaacaatcctgaaaccatccccaccttcccccagcccatggaaagattgtcttccacaaaaccggtccctggtgycaaaaagattgtggacaactgacctaaagtaattcactatcacaagtcttacctgggttgctgttttcagaagagtattttggcatctgtttttctttgtagtcagaaactaattcgcaaattctatgtataaaaatataacaaataaaattactgttttaaaatactgatctggaaacttaccaaatgtaaaattcttagagtatttcaaacaatatcagaatatcagaacttaacagtattatcccatc

SEQ ID NO: 44711 - DNA, 542 bp, Homo sapiens
ttaggtgaaataccactcctctgggtctctagagcaggaagggtttacatctgtcttcatatttactgactataataactacctcagtttgtacatctaacattcaccaagtattgaaattctgagggcaaaatctgtcatattcacctgtaccctattgtccagcacagcacctgcacaggctgtgtcaaaaagtgacagttggcattgtgtatcagaccctgggtatggcaccttgaatccagttctaatctcagtataacctacgagtttgagattatcgagccgtatgtactagttcattctcgcattgccataaagaaatatctgaaactgggcaatttatgaagaaaagaggtttgattggctcacagttctgcaggctgtataggaagaatggcagcatctgcttccagtgagacctaagggagcttttactcatggagggaggcagaagaggggcaggcaccttacgtggcaggaacaggaccaagagaacaaggcrgggggcagggggtgccacacacttttcaaaaaccaga

SEQ ID NO: 44712 - DNA, 555 bp, Homo sapiens
aaacaaagtgaatgctttatttgctatagaaggaaagggaagaagacatggaaacaagaatacaagttcattagaagaagagtattcagttctaagaagaggggcactcaccctacactccaaatctccctctctcctctccctcacatcttatccattactaccttctcaagactttcatcaccgaaaagaaacagaccccggatagttcagtctacaccccaatcaatacagccctgaaaaggtaaacagaatgttttgrttataatgttttattacaaaggtaatatatgatcattatagaaaaataaaataggtcatcaataattgcatcaccttgaaacaatcacttttaatttgttgttagaggttagtctattttaacatttctgaagtcatatagacttacatgattgctctcatgtaacctgtaacataagcgtttctcatgttgctacatctgttaataacagtggtttgactaattgtattggctgtgtggatgtggaacagaagattcttgatgtcaagaacggctgaggcacagaaggtgca

SEQ ID NO: 44713 - DNA, 576 bp, Homo sapiens
aatgtttatgactgcgagcttgcaaggctggatgcctgctgcactggtcctttagaggttagagtagtaggctgcttaggtcaacaatggaagttcagaagtaaccctatgtacaaggagtgcttattgaaaatcaggccaagaaactatttattgtggggatccaggctgtgtctgtatgcacaaaatatcctggccaactctgattagcctaacctgcctggcaaactaacatggtcttggctcataggatcgaagtactggctctccaggatcaacaaggttaattagtcattttccactgtggtaactttttggatattacaacctatgcaaggcatatattttcacattagattttcctacttgctcataggatctgcaggctcagtccaggagaaaacaagcctatggccacactggtgtgcaaagactgcaaaatcatctagggatggtggrctggctactttttctgtggtcacaggcctgagtgtgaacatccctattcataccaagagccatttggtcacaatagggctttgaggtcacttgaattctgacattctacccagcaat

SEQ ID NO: 44714 - DNA, 591 bp, Homo sapiens
acacacacacacacacatacatgcttctgctctctctaaaatcacattactattttgttcttaaattttattttattcataaggtgagcaatcayattactataattctgcaaattacgggagaaacaagacaaaaaaatctctttcaaaggatagggctaattctaaaaagatttttgaaatatggaagtattatgcaatttgatttctgatttattttggtgttattgtgtctttcaactaccactgtttacttactatatgccaccatgttgctaaacatttttaagtattattgcatttaatattgataatgtaatgagatagctactatacctatttatcaatcatgggaattgaggcacaaataatttaagtcatgtgttcaagggcatatatcctccaagtggcaaacctgcaatctgaaactaggttctctgattctaaaattttcacttgcacttcatcattatattttaagtgttccctgtatatcttgaaagtctcttacttctccctttacccttatttttcatcccctgcatttttctctgtcaccaatttgcattactcacacattacaatcctgac

SEQ ID NO: 44715 - DNA, 1861 bp, Homo sapiens
atttcttgttctacatatgtttctagagtcaagatataaacaacacttcgcttacctgcgatatagacaggagacagggaaatactaggtagaaaatggtgaggtctctcgtgagggctccaccctcaagcctggaccatggctgtaaataagaacatgmatttctgttttcccacctgaatgttaccttttccaaagccaccctggcctgccctgccccctactctgtacccataaaaaccccaagctccactggcagaagtgcagagcgagaggcagagaaggagagaagagaagcagctcgatgttagagaaaagcagcttgacttcagagggatggcttgaccgcgggacttctgagaagagttcggccaggggcagatgaactccaggggaagattatcttcccactccatctgccttctagctccccttcccactgagagccacttccactgcttagtaaaatcctccgcatttaccaccctccaattgatttgcagacatcattactcctggacaccggacaaagagccgggtgtgggcgcaagaggctgtcacactgactctgcactgagctgtttaacacttaagccatccacagatgacaaagctaaaggagcacactgtaacacatgccctctggggctccagaggtcacaggcaacccctagacgctgtcgtgggaaagtatggggtttgtttctgccggcgcccaaaggcccttgccctggctcctgcacccactcactcacctgtgtgatccccccactctcaaggggtttgagcactgtggactgagtaagcaagctacccatttacaagttctgtgaaggggtcaagggaactatctcatctcacttgcatctgtactgaatgaaagtcaggtattttaataatttgtcttaaaattaaatatagaggagaggaaacagcgatgagaatgaatcctgctaccaatctacccaacaactattatgaaatccaaatggacaacagtatactccctaagaataggctacataaatgtcaaataggatttttaaagtcaaatatgtttattattttttctaaatgattggtgatagactctccaggaatacataatacacgctctaaacactgattatgagctaaaatacttcactagctttaatttcttcaaactgtgacagcataaagcaataagcatgctaaacaatatcatcaacattaacattattataaacaccaccaccagcatattgaagatggcagatgatgaaagtgtctggtccttgatttatagttgaactcctgccctcacatttgcctgcctacttctgtatattttttgtgagataattttctgtctactaaaccactattattttgatatgtgcaaaaatacaaaatgtagcctaaggattttttaagtaagtcctttacatttttattttttatttgtttgcattataaattccccactagaatggagactgaagaagggcagagaaaagcactatttggtttatcgttacatccctggtgcatacaacagtgcctagaatgtgtgaggcactcaataaaccttaatattgttcattacttaacaatatattgtaactctataataagaaatttgaaaatataaaataattagaatatttcttgtaaagcatcaattatcaacattttcccaggaagtatgaacttaaatagatgaattagtatagaagaaactattttaagagtttaaatatttactaatactcaaataaaaacttctaattccagcagcctgttaacttgacagccagaaacacttcccatggcaaatacgtagaaatattacatacaattttaatattttttaaatgca

SEQ ID NO: 44716 - DNA, 1861 bp, Homo sapiens
atttcttgttctacatatgtttctagagtcaagatataaacaacacttcgcttacctgcgatatagacaggagacagggaaatactaggtagaaaatggtgaggtctctcgtgagggctccaccctcaagcctggaccatggctgtaaataagaacatgcatttctgttttcccacctgaatgttaccttttccaaagccaccctggmctgccctgccccctactctgtacccataaaaaccccaagctccactggcagaagtgcagagcgagaggcagagaaggagagaagagaagcagctcgatgttagagaaaagcagcttgacttcagagggatggcttgaccgcgggacttctgagaagagttcggccaggggcagatgaactccaggggaagattatcttcccactccatctgccttctagctccccttcccactgagagccacttccactgcttagtaaaatcctccgcatttaccaccctccaattgatttgcagacatcattactcctggacaccggacaaagagccgggtgtgggcgcaagaggctgtcacactgactctgcactgagctgtttaacacttaagccatccacagatgacaaagctaaaggagcacactgtaacacatgccctctggggctccagaggtcacaggcaacccctagacgctgtcgtgggaaagtatggggtttgtttctgccggcgcccaaaggcccttgccctggctcctgcacccactcactcacctgtgtgatccccccactctcaaggggtttgagcactgtggactgagtaagcaagctacccatttacaagttctgtgaaggggtcaagggaactatctcatctcacttgcatctgtactgaatgaaagtcaggtattttaataatttgtcttaaaattaaatatagaggagaggaaacagcgatgagaatgaatcctgctaccaatctacccaacaactattatgaaatccaaatggacaacagtatactccctaagaataggctacataaatgtcaaataggatttttaaagtcaaatatgtttattattttttctaaatgattggtgatagactctccaggaatacataatacacgctctaaacactgattatgagctaaaatacttcactagctttaatttcttcaaactgtgacagcataaagcaataagcatgctaaacaatatcatcaacattaacattattataaacaccaccaccagcatattgaagatggcagatgatgaaagtgtctggtccttgatttatagttgaactcctgccctcacatttgcctgcctacttctgtatattttttgtgagataattttctgtctactaaaccactattattttgatatgtgcaaaaatacaaaatgtagcctaaggattttttaagtaagtcctttacatttttattttttatttgtttgcattataaattccccactagaatggagactgaagaagggcagagaaaagcactatttggtttatcgttacatccctggtgcatacaacagtgcctagaatgtgtgaggcactcaataaaccttaatattgttcattacttaacaatatattgtaactctataataagaaatttgaaaatataaaataattagaatatttcttgtaaagcatcaattatcaacattttcccaggaagtatgaacttaaatagatgaattagtatagaagaaactattttaagagtttaaatatttactaatactcaaataaaaacttctaattccagcagcctgttaacttgacagccagaaacacttcccatggcaaatacgtagaaatattacatacaattttaatattttttaaatgca

SEQ ID NO: 44717 - DNA, 1861 bp, Homo sapiens
atttcttgttctacatatgtttctagagtcaagatataaacaacacttcgcttacctgcgatatagacaggagacagggaaatactaggtagaaaatggtgaggtctctcgtgagggctccaccctcaagcctggaccatggctgtaaataagaacatgcatttctgttttcccacctgaatgttaccttttccaaagccaccctggcctgccctgccccctactctgtacccataaaaaccccaagctccactggcagaagtgcagagcgagaggcagagaaggagagaagagaagcagctcratgttagagaaaagcagcttgacttcagagggatggcttgaccgcgggacttctgagaagagttcggccaggggcagatgaactccaggggaagattatcttcccactccatctgccttctagctccccttcccactgagagccacttccactgcttagtaaaatcctccgcatttaccaccctccaattgatttgcagacatcattactcctggacaccggacaaagagccgggtgtgggcgcaagaggctgtcacactgactctgcactgagctgtttaacacttaagccatccacagatgacaaagctaaaggagcacactgtaacacatgccctctggggctccagaggtcacaggcaacccctagacgctgtcgtgggaaagtatggggtttgtttctgccggcgcccaaaggcccttgccctggctcctgcacccactcactcacctgtgtgatccccccactctcaaggggtttgagcactgtggactgagtaagcaagctacccatttacaagttctgtgaaggggtcaagggaactatctcatctcacttgcatctgtactgaatgaaagtcaggtattttaataatttgtcttaaaattaaatatagaggagaggaaacagcgatgagaatgaatcctgctaccaatctacccaacaactattatgaaatccaaatggacaacagtatactccctaagaataggctacataaatgtcaaataggatttttaaagtcaaatatgtttattattttttctaaatgattggtgatagactctccaggaatacataatacacgctctaaacactgattatgagctaaaatacttcactagctttaatttcttcaaactgtgacagcataaagcaataagcatgctaaacaatatcatcaacattaacattattataaacaccaccaccagcatattgaagatggcagatgatgaaagtgtctggtccttgatttatagttgaactcctgccctcacatttgcctgcctacttctgtatattttttgtgagataattttctgtctactaaaccactattattttgatatgtgcaaaaatacaaaatgtagcctaaggattttttaagtaagtcctttacatttttattttttatttgtttgcattataaattccccactagaatggagactgaagaagggcagagaaaagcactatttggtttatcgttacatccctggtgcatacaacagtgcctagaatgtgtgaggcactcaataaaccttaatattgttcattacttaacaatatattgtaactctataataagaaatttgaaaatataaaataattagaatatttcttgtaaagcatcaattatcaacattttcccaggaagtatgaacttaaatagatgaattagtatagaagaaactattttaagagtttaaatatttactaatactcaaataaaaacttctaattccagcagcctgttaacttgacagccagaaacacttcccatggcaaatacgtagaaatattacatacaattttaatattttttaaatgca

SEQ ID NO: 44718 - DNA, 1861 bp, Homo sapiens
atttcttgttctacatatgtttctagagtcaagatataaacaacacttcgcttacctgcgatatagacaggagacagggaaatactaggtagaaaatggtgaggtctctcgtgagggctccaccctcaagcctggaccatggctgtaaataagaacatgcatttctgttttcccacctgaatgttaccttttccaaagccaccctggcctgccctgccccctactctgtacccataaaaaccccaagctccactggcagaagtgcagagcgagaggcagagaaggagagaagagaagcagctcgatgttagagaaaagcagcttgacttcagagggatggcttgaccgcgggacttctgagaagagttcggccaggggcagatgaactccaggggaagattatcttcccactccatctgccttctagctccccttcccactgagagccacttccactgcttagtaaaatcctccgcatttaccaccctccaattgatttgcagacatcattactcctggacaccggacaaagagccgggtgtgggcgcaagaggctgtcacactgactctgcactgagctgtttaacacttaagccatccacagatgacaaagctaaaggagcacactgtaacacatgccctctggggctccagaggtcacaggcaacccctagacgctgtcgtgggaaagtatggggtttgtttctgccggcgcccaaaggcccttgccctggctcctgcacccactcactcacctgtgtgatccccccactctcaaggggtttgagcactgtggactgagtaagcaagctacccatttacaagttctgtgaaggggtcaagggaactatctcatctcacttgcatctgtactgaatgaaagtcaggtattttaataatttgtcttaaaattaaatatagaggagaggaaacagcgatgagaatgaatcctgctaccaatctacccaacaactattatgaaatccaaatggacaacagtatactccctaagaataggctacataaatgtcaaataggatttttaaagtcaaatatgtttattattttttctaaatgattggtgatagactctccaggaatacataatacacgctctaaacactgattatgagctaaaatacttcactagctttaatttcttcaaactgtgacagcataaagcaataagcatgctaaacaatatcatcaacattaacattattataaacaccaccaccagcatattgaagatggcagatgatgaaagtgtctggtccttgatttatagttgaactcctgccctcacatttgcctgcctacttctgtatattttttgtgagataattttctgtctactaaaccactattattttgatatgtgcaaaaatacaaaatgtagcctaaggattttttaagtaagtcctttacatttttattttttatttgtttgcattataaattccccactagaatggagactgaagaagggcagagaaaagcactatttggtttatcgttacatccctggtgcatacaacagtgcctagaatgtgtgaggcactcaataaaccttaatattgttcattacttaacaatatattgtaactctataataagaaatttgaaaatataaaataatkagaatatttcttgtaaagcatcaattatcaacattttcccaggaagtatgaacttaaatagatgaattagtatagaagaaactattttaagagtttaaatatttactaatactcaaataaaaacttctaattccagcagcctgttaacttgacagccagaaacacttcccatggcaaatacgtagaaatattacatacaattttaatattttttaaatgca

SEQ ID NO: 44719 - DNA, 624 bp, Homo sapiens
tgcatataatatacctaacctactgagcatcacagcttagcccagtctaccctaagtgcactcagaacacttacattagcataaagttggccaaaataatctaacataatacatattctataataaggtggtggatatttcatataagtttgttgaatacagtacactgtatagtattatttgtttaccattgggattatttggctggctgggaactgtggctcattgccactgcccagcaacatgggagagtatcatactgcatatcactagcccaggaaaagataaaaaattcaattttgaggcagggtttcgctgtcacccagctggagtgcagtggcatgatcatggctcactgcagcctcaactttctggccccaagtgatccttccatctcagcctcctgagtagctaggaccacaggttcatgccatcatgcctggctaattaaaaaaaatttttttgtagagacgagttcctgctatgttgcccaggctggtcttgagctcctaaaccaagctatcctcccatctctgcctcccaaagtgttagaattacaggcatgagacactgcrcacatacaaaatttcaaaatttgaagtatttgaagatcctgaagtagct

SEQ ID NO: 44720 - DNA, 626 bp, Homo sapiens
aggtgagagaaggatgctctatagtggcatgatctctgaacttaatgtgggagaatcaaggaaaatattgtttacgtgaagttccttccacagagttgggcaggggagggtggctctgttggccatttgactagagaatgagctcaaaaccatgttcaaggggagagggagcatcaaggggagatgtttggagaatacttgggcactgtaacaaccatcctcacatagccagggcccactcagaatggaagagactgtcttgtcctgtataggcccaaagggcagaacgcaatacaagttttagggaaagtgattttggcttcacacagggaagaacatttaacccttgctgctgttcagaaatagaatagatcaccttggaggcagtaaatcctctgtcattgtgggtgtccaaggaggaatcacatgatcacttgagagggatattgggaaagagatttaaacattgactaagaggagaaaggcattgggttaaatgagtatctcctttgtgtctcctgtattctatgattctataatcctttatttgaaatttgtgaatatggcattmaaaaatgaatgtatttaaaaggaaactaagtagtaggttacgtccaattgtgtga

SEQ ID NO: 44721 - DNA, 537 bp, Homo sapiens
tcgcctaggctggagtgcaatggcacgatctcagctcactacaacttctgcctccctggttcaagtgattctcctgcctcagcctcctgaatagctgggattagaggcgcccgccacctcgcccagctaatttttgtatttttagtagagatggggtttcgccatgttggccaggctggtcttgaactcctgacctcaggtgatamgcctgcctcagtctcccaaagtgctaggattacaggcataagccaccattcccggccaaaggaaaagttttaaaaagatcccaactttccctagtcaggaattggaagtttgtaaagctcaaacctattgatgttgcccccttgcctaaatccctttggttgtttcccattgctgttaggataaagttcaaaattttaaacttgaccagcaaggccccacatgccatgaaggctgccaacctcaccaacatcctgtcacatcattcttcttggatctcttcacactccagccccacaagtaatttctttgtttctcatgggcaccacacgt

SEQ ID NO: 44722 - DNA, 537 bp, Homo sapiens
tcgcctaggctggagtgcaatggcacgatctcagctcactacaacttctgcctccctggttcaagtgattctcctgcctcagcctcctgaatagctgggattagaggcgcccgccacctcgcccagctaatttttgtatttttagtagagatggggtttcgccatgttggccaggctggtcttgaactcctgacctcaggtgatacgcctgcctcagtctcccaaagtgctaggattacaggcataagccaccattcccggccaaaggaaaagttttaaaaagatcccaactttccctagtcaggaattggaagtttgtaaagctcaaacctattgatgttgmccccttgcctaaatccctttggttgtttcccattgctgttaggataaagttcaaaattttaaacttgaccagcaaggccccacatgccatgaaggctgccaacctcaccaacatcctgtcacatcattcttcttggatctcttcacactccagccccacaagtaatttctttgtttctcatgggcaccacacgt

SEQ ID NO: 44723 - DNA, 622 bp, Homo sapiens
ataaatacctactatgagtcagagactatgctgggaagaggatataattcaatttaaatacatttcatctttaggtgattctgtgaattttctcttcttcctttttttcccttctctctccaacactaataatatagctcctatgccccaacttccagaaaaatatagttcctataccccaacttttatatttggtatatcggcagatgagctttacacaggcaaaaaatgatggtgaaggggttttattaaaaagtgatggcttcagtgactcacgcctgtaaacctagcactttgggaggctgaggcaggcggatcacctaaggtcaggcacttgagacacacctggccaacatggtgaaaggctgtctctactaaaaatacaaaaattagctgggtgtggtgacggatgcctgtaatcccagctactctggaagctaaggcaggagaatyacttgaacacaggaggcagaggttgcagtgagctgagatcatgccactgcacttcagcctgggcaacagggcgagtctgcttctcaaaaaaaaaaaaaagaaagaaagaaagaaagtgatggctttatggtctgagcaaagaaaaataccccactatattgctctatgc

SEQ ID NO: 44724 - DNA, 622 bp, Homo sapiens
ataaatacctactatgagtcagagactatgctgggaagaggatataattcaatttaaatacatttcatctttaggtgattctgtgaattttctcttcttcctttttttcccttctctctccaacactaataatatagctcctatgccccaacttccagaaaaatatagttcctataccccaacttttatatttggtatatcggcagatgagctttacacaggcaaaaaatgatggtgaaggggttttattaaaaagtgatggcttcagtgactcacgcctgtaaacctagcactttgggaggctgaggcaggcggatcacctaaggtcaggcacttgagacacacctggccaacatggtgaaaggctgtctctactaaaaatacaaaaattagctgggtgtggtgacggatgcctgtaatcccagctactctggaagctaaggcaggagaattacttgaacacaggaggcagaggttgcagtgagctgagatcatgccactgcacttcagcctgggcaacagggcgagtctgcttctcaaaaaaaaaaaaaagaaagaaagaaaraaagtgatggctttatggtctgagcaaagaaaaataccccactatattgctctatgc

SEQ ID NO: 44725 - DNA, 1212 bp, Homo sapiens
cagaatcctttacatggcatgaatttttccagtaacacttttgcgtagagctttttagtcttataaatgctatttctgtagtgcaggggcatctgttgtcagatgccaggaaggaggaggcatgtcagaaaccctagtctgcagctaaggcctgtcctaggatgttgggcattggtggggatgatgacccacagagtcagctccccattctctccttctcccatctagagttgagcttgcatacattagctgctgttgcaatactcctgctttcagaaccctgaaatggcctggcttggttgctatatagtgatttaaccacagtaagcctcagtgagtggcaggttgtatttttattgttgaattttgttataatgacaaccccagataaacctgaaaatgaaagaggattctctttaactctcaattcttctcatgtttatgaaatagcgcttaattaaataatgtcattttatccttatgagtcttcttcctcctaaccacctcacagccctgtagggtgtgtttaaccgttgaattgggagtcaagaactgagaactctcacccagaccttggaagtcggaatgtcagccgtctttctactgcacagccaagcctattgatgtggtcagatctgccctctggaccaccttccttttctgccaagccttggggctgtccatggtgtgctcatgtgccttctccttcccacagcagtgttgtgacttaggctaccatgcaagtctgaaccgggctctacgcaccttcctctctgctgagttaaacctggaacagtcgaagcatgagggtctggatgccatcgagaatgcagtagaaaacctggatgccaccagtgacaagcagcgcctcatggagatgtacaacaacgtcttctgcccccctatgaagtttgagtttcagccccacatgggggatatggtgaggccctttccctatacccccaccctcaaggggcttgagtggacttgtctagattaattacacagaaggcacattattctggggtgggagaggcctgggcccggctttttgtcaggtgggtgaggcacattccmcttattgagcaaacagttagtgagtgcctgctgtcagacactcgggcttgggtgcagacatgggggattaaagccctcggggagcttacagtctggggaataaggtcgctaaggcttgaggagggttcgaactat

SEQ ID NO: 44726 - DNA, 505 bp, Homo sapiens
tgctctgacttcacagggaatagagaagggaagaaggaaagtgcccctcggtggggtcattgctttgtgtgtgtgtgtgtgtgtgtgtgtgtgtgtgcrcgcgtgcatgttttctgtattttttttttcactctggtatttttgctaaaggggagaggaaggctgacagtgtttaccatggaaattctttattcctcctgcacgtcctcattacagaagcagctacaataaagtctactttttgccgtgcagacactcagcagttcattcgttcctcagatatttttaaactgagtgctggctcattggcagcgtggcctcagccttgcctccctacgactcatgctcccagagcttccagtggatcctctacaacacacatcccgagcccctgctccttcaccccaaccctgtccattcctccagtggctctccctgtcctacagcagatgtggcaaatctctagtgaccggtctccaccctgcagtcagaggggatgctccca

SEQ ID NO: 44727 - DNA, 605 bp, Homo sapiens
gctgtgatggaagatcacaagaacaaaatgggatatatatcagaccctaataccctgtttgggtacaacaaaagtgtaaatacttcagataataaattagagatgtgaatacagtaytgaccatagtctctctgtatcaaagttatctgagaatgagttaggggaactgaaagcagaaattctgcattccagaaacatactggccacatgagccccagaagtgagggctgagctatggcaaacagggccaggggaaagggtactggcctgagagagagagcccctaggtcctgtcctgcctgtgtcagcaactttctgtaacctcatttgtttctcttagttgtaatatcagccagttggagtatggaagcctaaggatcttttccccctcttcaattctgtggtaattcccagaaccacaaggccttctgcattgtcaccacccaagcacactagctgctttgtccctttggtcatggttctcatgttagaacatatactcctcaaacagccggtttacaccatggactgttgcatgccatgccatttttgctgccaattccaaaaatggagggcagatgctatggtgccttaagagtgatatg

SEQ ID NO: 44728 - DNA, 606 bp, Homo sapiens
tttctttaaaaagaccatttctcctaaaaatatctacaatayctaaagaaatataatttcttaatatcaaatattcatcagtgctcaaatgttcattttctcattaattaaatgtaatagattttaaaaatagagcttgttttactcagtcaaaaatggttcacactctgtgacttgtataaggtccttttaatatgggctgacttctctctctctctctctctcccttcctccctcattctttcttccattttccatcctctctccccctttacctcccccctccccccttcatccgtgtacgtctgtgtcttgctttaatgtatttccttaagaaactggagtttcattgataagcaacttcggcaaagtctaaggatataaaatgaatgtgcaaaagtcacaagcattcctatacaccaacaacaggcaagcagagagccaaatcatgaatgaattcccatccacaattgctacaaagagaataaaatacctaggaatagagctaacaggggaagggaaggacctcttcaaggagaactacaaaccattgttcaaggaaatcagagaggtcacaaacaaatggaacatattccatgcttatag

SEQ ID NO: 44729 - DNA, 606 bp, Homo sapiens
tttctttaaaaagaccatttctcctaaaaatatctacaatacctaaagaaatataatttcttaatatcaaatattcatcagtgctcaaatgttcattttctcattaattaaatgtaatagattttaaaartagagcttgttttactcagtcaaaaatggttcacactctgtgacttgtataaggtccttttaatatgggctgacttctctctctctctctctctcccttcctccctcattctttcttccattttccatcctctctccccctttacctcccccctccccccttcatccgtgtacgtctgtgtcttgctttaatgtatttccttaagaaactggagtttcattgataagcaacttcggcaaagtctaaggatataaaatgaatgtgcaaaagtcacaagcattcctatacaccaacaacaggcaagcagagagccaaatcatgaatgaattcccatccacaattgctacaaagagaataaaatacctaggaatagagctaacaggggaagggaaggacctcttcaaggagaactacaaaccattgttcaaggaaatcagagaggtcacaaacaaatggaacatattccatgcttatag

SEQ ID NO: 44730 - DNA, 606 bp, Homo sapiens
tttctttaaaaagaccatttctcctaaaaatatctacaatacctaaagaaatataatttcttaatatcaaatattcatcagtgctcaaatgttcattttctcattaattaaatgtaatagattttaaaaatagagcttgttttactcagtcaaaaatggttcacactctgtgacttgtataaggtccttttaatatgggctgacttctctctctctctctctctcccttcctccctcattctttcttccattttccatcctctctccccctttacctcccccctccccscttcatccgtgtacgtctgtgtcttgctttaatgtatttccttaagaaactggagtttcattgataagcaacttcggcaaagtctaaggatataaaatgaatgtgcaaaagtcacaagcattcctatacaccaacaacaggcaagcagagagccaaatcatgaatgaattcccatccacaattgctacaaagagaataaaatacctaggaatagagctaacaggggaagggaaggacctcttcaaggagaactacaaaccattgttcaaggaaatcagagaggtcacaaacaaatggaacatattccatgcttatag

SEQ ID NO: 44731 - DNA, 547 bp, Homo sapiens
ggaaactaaatctttctctttggtgggaggcatcgtaacttaaaatatgtgtagtaggctgggcgtggtggctcatgcctgtaatcccagtacttcgggaggccaaggcgggcagatcacgaggtcaggagatcgagaccatcttggctaacacagtgaaatcctgtctctaccaaaaatacaaacaattagcmgggcgtggtggcacatgcctgtagtcccaggtactcgggaggctgaggcaggagaattgcttgaacccgggaggcggaagttgcagtgagccaagatcgcgccactgtactccagcctgggtgacagagtgagactccgtttccaaaaaaaaaaaaaaacaaatgtgtagtaatttccatggagctgtctgggacagactggatatctcctggccttccaagtgaggtgagctgttaataatagcacccactcatatatctgaagagtatatctatggatgaagtctagggtatttggaaatatataaactatgaaaggtgtaaatatgttttattgtagataatgtataaga

SEQ ID NO: 44732 - DNA, 594 bp, Homo sapiens
atctgcattcagatgatcaagctgtagaatggctagccgaaaaacacaatgctgaaagttcagggttgcagaaagtcagaggcacacatcagcttcaaagagaaggctgtcaatggagacgggaagtggggaaggagkgggtagccttctctctgccacacagaaatggctccaaggctatgatgcaaggtggccccagctctgtgaaaaggcactttcacctttaaagcactttgctgagagggaaaatcaatgctgatgtcctccttgaataaagcactcaggtctactggggagtccaaaaataaaagcatgacgttaagtatttctctacctgtagctactcctcacccttaagaggaggggcaaggtggagctgttaagggagcaggtagagggagaggcaggtgggggaccgtggttgaagcactagaaaagggcatctgggaagactcgcaaatgggagtgggggaagggacaggcttccagaggaagtggttttggttgaggctggctgagagcaacaatgaggctaggaacaccgaggacaccgtgggaaggtgagtgacccagaactcatcacatgtgcttctc

SEQ ID NO: 44733 - DNA, 594 bp, Homo sapiens
atctgcattcagatgatcaagctgtagaatggctagccgaaaaacacaatgctgaaagttcagggttgcagaaagtcagaggcacacatcagcttcaaagagaaggctgtcaatggagacgggaagtggggaaggagtgggtagccttctctctgccacacagaaatggctccaaggctatgatgcaaggtggccccagctctgtgaaaaggcactttcacctttaaagcactttgctgagagggaaaatcaatgctgatgtcckccttgaataaagcactcaggtctactggggagtccaaaaataaaagcatgacgttaagtatttctctacctgtagctactcctcacccttaagaggaggggcaaggtggagctgttaagggagcaggtagagggagaggcaggtgggggaccgtggttgaagcactagaaaagggcatctgggaagactcgcaaatgggagtgggggaagggacaggcttccagaggaagtggttttggttgaggctggctgagagcaacaatgaggctaggaacaccgaggacaccgtgggaaggtgagtgacccagaactcatcacatgtgcttctc

SEQ ID NO: 44734 - DNA, 603 bp, Homo sapiens
agctggagagcacacatgctcagtctaaagggggccccgattattggcatgtgggactgttaggcttcctgacagcaacatgaaaaagcaggatattctttaaaacttcaaaactgcaaacataccaaataaagcatgtcagtgtgcagcacctcatctcaaggcctccagtttgcaacctctgcagaagcacttgggaggaaccagcctggtctgaagtctagtctctgagcagccatctctcaaacctggtgaggaaggcaagttcagactcacagtggtggctgctttggatatctgccatcacactctctctttccaagggccctagttagccagttagccagtcacctaggatgaggctgaagctccccttgctcctcttgcacaaggtggtgtggtgtcagggcctccgatacccsccctccctagtccatcctgaaaggcaggcctcccaactggggctgaggtcattccctcttcctcaaagtctctcagctgtaccttaaaatcccagtggacttttccaggccatgttgctctgtctgtgttatagctggtcacattctgtctgctctaatcatgaacctgaaggagaggagt

SEQ ID NO: 44735 - DNA, 499 bp, Homo sapiens
ggaccagtcaaattttaattaaaaaccctgtttaatatgctgtgtttattatgaaatgtaaaaaataaatgtacaatctctagtctttgaycatgagaaacttacagtttactcacagacccgaaagtatccatagaaaattcagaggagatgataacaaatataaactgcattaaatatactgggaaaataaaaacaggcagtgactatattgtggttaatcagtgcaagaaaatatgtcctgtggaaataaggaataacttttgtcttcctgatacagtaatacagaaatggagacaaatttagcagctttcctccaaaagaactctcagaattccacttgtgattttgctaattgcccaaattcaatatcaggtttagaactaagacattgttagtagaccagtggcagtttcttctgctgatgtagactcatagtaatcaaagtatgaaattgatatgcaaaaatccagaataccataacactaatctatagtaa

SEQ ID NO: 44736 - DNA, 499 bp, Homo sapiens
ggaccagtcaaattttaattaaaaaccctgtttaatatgctgtgtttattatgaaatgtaaaaaataaatgtacaatctctagtctttgatcatgagaaacttacagtttactcacagacccgaaagtatccatagaaaattcagaggagatgataacaaatataaactgcattaaatatactgggaaaataaaaacaggcagtgactatattgtggttaatcagtgcaagaaaatatgtcctgtggaaataaggaataacttttgtcttcctgatacagtaatacagaaatggagacaaatttagcagctttcctccaaaagaactctcagaattccacttgtgattttgytaattgcccaaattcaatatcaggtttagaactaagacattgttagtagaccagtggcagtttcttctgctgatgtagactcatagtaatcaaagtatgaaattgatatgcaaaaatccagaataccataacactaatctatagtaa

SEQ ID NO: 44737 - DNA, 571 bp, Homo sapiens
tgtaacaaacctgcacattgtgcacatgtaccctaaaattaaagtataataataaaaataaataaataaatttaaaaaaatactgctcatctaaaaaaaraaaaaaaaacactactgcagaaaaacctcaactatcctaaactatccttcagtaagataaatagcagaagcaggagattttcttccttctcttggtttctgcttttcaaatcttgtgttagtttatctgtttggctgaatcgaaatcaaatccagaactctagttacatgggaatctgaaaaatgatattaagcttctgggcgccacagaaaagaatctatattcagaatctgggggcataggagctgagaaccattctagcaaattcttccttgtgcattgatttttaacatagtaaaaataagatctgttccaaagaaactacacaattcaaaaaatctcaatgattttcaacaggtcttttttttaaattaagtggctattaagcagcaataaaaagtgtttcactgagatctctactcatttcatgatgccatcctgatactcctaatttggggaggtaggtttgaa

SEQ ID NO: 44738 - DNA, 594 bp, Homo sapiens
cctttggaagggttatggggaaaacaaagggattgcagggtaactcatacaaggccaaattacaaatgtgaaaggccctatgatctaagaaaaatatggcattctacatcctgtaatccaaaataaaatccgcatttaataaaacagcattgattataaaataaatgtaaagaactccaacaggccgggmgcagtggctcacacctgtaatcctagcactttgggaagccaaggcaggaggatcacttgagctaaggagttcgagaccagcctgggcaatatagtattatttatatatactattatatattatatctaatatatataactgttaaaatatatattttaaaaatataactccaacaagtcctgatttttctcatgctttgtgtttagtatcagattccttcaaaaaggaatgccctttctcattcagccctggcactgaagacacgattcatacccacctgttaaggggcaaaggaaccaagctgcagagagtccacagggttactcatggtcattttcaatgactgacacttggtccactgtgttaaagtacaggattcacacaagaccaagcagctatttcgc

SEQ ID NO: 44739 - DNA, 540 bp, Homo sapiens
taaaaagcaaacaactttccataccagttcagattttcctcttcttgtgactaatctaagcatccttctcaactgcaaatatattaaatgataatcatgactgaggtacatagctaatttgggtttattgcctgtttatatatataacaaatgtaagcttccgcagttagcatgattatgtttcaaaactcataaaataggctttaatttattgtaactatattgtcattttgagttaatttatttaagaaaattcagctcactgctattaagaaatctttttcaaagtcgagcatgaaaaaggcyattaattaactctttattgatggatcgatcagaggaggagactttgccattcatgggccctgctggatactcaacacaatataaaagtcttttttttttatttttattatactttaaattttagggtacatgtgcacattgtgcaggttagttacatatgtatacatgtgccatgctggtgcactgcacccactaactcatcatctagcattaggtatatctcccagtgctatc

SEQ ID NO: 44740 - DNA, 540 bp, Homo sapiens
taaaaagcaaacaactttccataccagttcagattttcctcttcttgtgactaatctaagcatccttctcaactgcaaatatattaaatgataatcatgactgaggtacatagctaatttgggtttattgcctgtttatatatataacaaatgtaagcttccgcagttagcatgattatgtttcaaaactcataaaataggctttaatttattgtaactatattgtcattttgagttaatttatttaagaaaattcagctcactgctattaagaaatctttttcaaagtcgagcatgaaaaaggctattaattaactctttattgatggatcgatcagaggaggagactttgccattcatgggccctgctggatactcaacacaatataaaagtcttttttttttatttttattatactttaarttttagggtacatgtgcacattgtgcaggttagttacatatgtatacatgtgccatgctggtgcactgcacccactaactcatcatctagcattaggtatatctcccagtgctatc

SEQ ID NO: 44741 - DNA, 553 bp, Homo sapiens
cctatctgtatatttttaaactcaaaatactttaattcagtyttaaaatcactcagaaactgcatccttctcaggaaaataaatggcttttatttgctgccctgcagaggaaaactcacacatggggagctcaccatcttcctaaattttcaaatcatggaactgacttcaatagcaccgttagcccggtagcacctaacagttttgagtctcagacctgggaaagcatcaagccgtttgtcggataaatccacagaagttccctgatttcccgagttgccctgtctttactgagcacctgctgcatgtgagtttctgtgcacacgaagatgagtaacaatgtctctgtttttaagagcctcagattaacttcccgactctctgagtgggtgcctgttgtcttttgctgctcacggtaattctccaaagcatctcttagggcctccaagcggtttgcagttgtgcactgtcagtggtgaaagaaagttggggcaggcacttcctgtatttttttattaataaatcacatacatgttcttctttacaacttcat

SEQ ID NO: 44742 - DNA, 553 bp, Homo sapiens
cctatctgtatatttttaaactcaaaatactttaattcagtcttaaaatcactcagaaactgcatccttctcaggaaaataaatggcttttatttgctgccctgcagaggaaaactcacacatggggagctcaccatyttcctaaattttcaaatcatggaactgacttcaatagcaccgttagcccggtagcacctaacagttttgagtctcagacctgggaaagcatcaagccgtttgtcggataaatccacagaagttccctgatttcccgagttgccctgtctttactgagcacctgctgcatgtgagtttctgtgcacacgaagatgagtaacaatgtctctgtttttaagagcctcagattaacttcccgactctctgagtgggtgcctgttgtcttttgctgctcacggtaattctccaaagcatctcttagggcctccaagcggtttgcagttgtgcactgtcagtggtgaaagaaagttggggcaggcacttcctgtatttttttattaataaatcacatacatgttcttctttacaacttcat

SEQ ID NO: 44743 - DNA, 553 bp, Homo sapiens
cctatctgtatatttttaaactcaaaatactttaattcagtcttaaaatcactcagaaactgcatccttctcaggaaaataaatggcttttatttgctgccctgcagaggaaaactcacacatggggagctcaccatcttcctaaattttcaaatcatggaactgacttcaatagcaccgttagcccggtagcacctaacagttttgagtctcagacctgggaaagcatcaagccgtttgtcggataaatccacagaagttccctgatttcccgagttgccctgtctttactgagcacctgctgcatgtgagtttctgtgcacacgaagatgagtaacaatgtctctgtttttaagagcctcagattaasttcccgactctctgagtgggtgcctgttgtcttttgctgctcacggtaattctccaaagcatctcttagggcctccaagcggtttgcagttgtgcactgtcagtggtgaaagaaagttggggcaggcacttcctgtatttttttattaataaatcacatacatgttcttctttacaacttcat

SEQ ID NO: 44744 - DNA, 589 bp, Homo sapiens
gtaaaataattttamctgacaaagtgaaaatctgctgctgtgttacccatggaagacggcagagagaagtgagaaaagtctgtttagtgatcaaggggaaaaacaatagctttcttagataggttcacaggtctgagttcaccaggcacacagtctcatgcaggcagggctgatttttttaaactgcctagcatcacgtgtatttgtgtggcccgtcatctaccccacccacaggacagcgtcagccttagacatttttaaacgaaggggcagtggtgcggcgtgaactcgtagggctggagggtatcctcagatttctgggtttctttgggtgtctaaggcatttgaatttccaaaagttttctattaaagtgctctccagggatggcataaatgatctccaggggagtcctaaggtttacaagcagatcctttagttatcaatcactgtcctggttgatatcatgcagaggctgtgatctgagaacatccgacccaggatcggtgctgtgggctgggcaggaggatgggcaggtatccacggagggggcagccagaatcacactctcggcttctcgagtgtgcaggt

SEQ ID NO: 44745 - DNA, 589 bp, Homo sapiens
gtaaaataattttacctgacaaagtgaaaatctgctgctgtgttacccatggaagacggcagagagaagtgagaaaagtctgtttagtgatcaaggggaaaaacaatagytttcttagataggttcacaggtctgagttcaccaggcacacagtctcatgcaggcagggctgatttttttaaactgcctagcatcacgtgtatttgtgtggcccgtcatctaccccacccacaggacagcgtcagccttagacatttttaaacgaaggggcagtggtgcggcgtgaactcgtagggctggagggtatcctcagatttctgggtttctttgggtgtctaaggcatttgaatttccaaaagttttctattaaagtgctctccagggatggcataaatgatctccaggggagtcctaaggtttacaagcagatcctttagttatcaatcactgtcctggttgatatcatgcagaggctgtgatctgagaacatccgacccaggatcggtgctgtgggctgggcaggaggatgggcaggtatccacggagggggcagccagaatcacactctcggcttctcgagtgtgcaggt

SEQ ID NO: 44746 - DNA, 589 bp, Homo sapiens
gtaaaataattttacctgacaaagtgaaaatctgctgctgtgttacccatggaagacggcagagagaagtgagaaaagtctgtttagtgatcaaggggaaaaacaatagctttcttagataggttcacaggtctgagttcaccaggcacacagtctcatgcaggcagggctgatttttttaaactgcctagcatcacgtgtatttgtgtggcccgtcatctaccccacccacaggacagcgtcagccttagacatttttaaacgaaggggcagtggtgcggcgtgaactcgtagggctggakggtatcctcagatttctgggtttctttgggtgtctaaggcatttgaatttccaaaagttttctattaaagtgctctccagggatggcataaatgatctccaggggagtcctaaggtttacaagcagatcctttagttatcaatcactgtcctggttgatatcatgcagaggctgtgatctgagaacatccgacccaggatcggtgctgtgggctgggcaggaggatgggcaggtatccacggagggggcagccagaatcacactctcggcttctcgagtgtgcaggt

SEQ ID NO: 44747 - DNA, 530 bp, Homo sapiens
accaacttaactataaagtccaagccagagggaaacctgaaaaataaggaccaaaattcagacggtcccccacccaccacccactccccagatgccaagcaaatctactgggtctctttcaaatgaaacaattgcagaccagaaaaagtttatcagggtttggatgctgtattagggctctccagagaagcaaaccgtgtgtgtgtgtgtgtgtgtgtgtgtgtgtgtgtacagagagagagagagagagaggktttttttttaattattttttttgagacagagtcttcctctgttgtccgggctggagtgcaatggtgcatcctcagctcattgtaacctctgcctcccaggttcaagctattctcctgcctcagcctcctgagtagctgggattacaggtgcgcaccaccatgcccagctaatttttgtatttttagtagagacaggtttcaccatattggccaggctggtcttgaactcctggcctcaagtgatccacccacctcggcctcccaaagtgctggaat

SEQ ID NO: 44748 - DNA, 608 bp, Homo sapiens
attacaggctttgcttaatttgaagaaaatctatttgacattaatacatttatcttcatttgcagtattattctgaatatgaatgtcttggagctaggtacagtggctcacacctgtaatctcaacaatttgggaggccgaaggcaggcagatcacctgaggtcaggaattccagactagcctggccaatgtggtgaaaccccatctctactaaaaatacaaaaattagctgggcatggtggcaggcacctgtaatcccatgtaatacgagctactcgggaggctgaggcaggtgaatcacttgagccttgggcggaggttgcagtgagytgagattgcaccactgcactccagcctgggcaacaaaggcaaaactctatctcaaaaaaaaaataataataatataataataataataattaatgtagttgaatgaatacaaggataaagccagtcctcaggcacattgtgtgtacatttaaatactagttaaaaggcagtctacttttctttatattctttggtgtgtatgtgcattaagttgcaaaatcaaggactccagttcagtgtattccttttctgcataaataaataacaaaatgatagta

SEQ ID NO: 44749 - DNA, 487 bp, Homo sapiens
ggaatgggctcggaagggagacacacttgatcckagtcccagctccgcactgtccccgggctcctgcctctgagaccctcggggctctgtggaaacaaggggtgatgcccaggtgggaccagtgccctggaatgtcctctgtactgaataaatgtcggctccccttgaagcctacacggcactggcaaatgagttctgtagccgactgtaagttaattagtacaactcttgctctcttattattcttagacacaaagttaatttggaaagatacatgtttcttttaaagttgcatggttaaaagcatgtgggagctgagcttaattaagagagagtggctcctagcgtgcaagggttgcagttggagaaaaacatcattagattaagggtttcgctgccttacccagcacagctgccccaggccgctggcctctccatgcagtggatggtggattgacccggcgtgaactctgtgcagctcccggag

SEQ ID NO: 44750 - DNA, 581 bp, Homo sapiens
tgcccgggctctgagtggctctgaggagagtcctgggagaaggggctgcagaggccggattccatccacttggaggcctgacttccaggcagggagcccctcatacacttgcacattgcgactgggcaggcaacccrgttaacctgtggcttcagacactagcaccctcccctcagtcacttataaaatgtgtgtgggtgtgggaaggggatcccagactgagggaggtgcagggggctgtctggggcactgggctgatggctggggtctctaggaaaggcctggtataaagggtcattcattgtgacaggtgtgcagtgggtactggcctggtcatggccagctggagctttcagcaggatgtagtcagggctgaggtgcagccctccctcctgagctcgagctgtgctcttggcagaagtcactgtttcagactggaacactgtgttggtaacagaagggcagcctggcctggccaactaaccatacagctagaaggtgacctcggtgaccagctggtgcagcctcccatggtacagatgggcaaatggaggccactggtggagggagaaactgaagac

SEQ ID NO: 44751 - DNA, 561 bp, Homo sapiens
cttgtaagaggctctgagtcagaattgccagctaagccatcccccaaatcttgacccatagagactgtgagtaataaatattgatcactttaagccaataagttttggggtaatttattgtgaaacaagagatgactgatacacctagactcaagaagtcatrtagcatcattggctgcattctattggctaagagtgagtttctaaggccagcccagattcaagagaaggagacactgatgtaactactcaatagaatgagtgtcaaaaacatgtgcagtcatggtttgaactaccacaaaatgttaaggttagtgtacctttaatataactggggagtatggttccaaatatatagaaatgcaagatttttgccactcatgaaacatttataattaaataattgttcatgtaatttcttactgaatttctattattcccctaggctgtgatttgcagaggatagcaggatttgcagatctgctttgctcatttttgtgtttcaagagccatgtagtgtttaacagacactatatgctcatgaggtatctgtttaacaaa

SEQ ID NO: 44752 - DNA, 561 bp, Homo sapiens
cttgtaagaggctctgagtcagaattgccagctaagccatcccccaaatcttgacccatagagactgtgagtaataaatattgatcactttaagccaataagttttggggtaatttattgtgaaacaagagatgactgatacacctagactcaagaagtcatgtagcatcattggctgcattctattggctaagagtgagtttctaaggccagcccagattcaagagaaggagacactgatgtaactactcaatagaatgagtgtcaaaaacatgtgcagtcatggtttgaactaccacaaaatgttaaggttagtgtacctttaatataactggggagtatggttccaaatatatagaaatgcaagatttttgccactcatgaaacatttataattaaataattgttcatgtaatttcttactgaatttctattattccmctaggctgtgatttgcagaggatagcaggatttgcagatctgctttgctcatttttgtgtttcaagagccatgtagtgtttaacagacactatatgctcatgaggtatctgtttaacaaa

SEQ ID NO: 44753 - DNA, 561 bp, Homo sapiens
cttgtaagaggctctgagtcagaattgccagctaagccatcccccaaatcttgacccatagagactgtgagtaataaatattgatcactttaagccaataagttttggggtaatttattgtgaaacaagagatgactgatacacctagactcaagaagtcatgtagcatcattggctgcattctattggctaagagtgagtttctaaggccagcccagattcaagagaaggagacactgatgtaactactcaatagaatgagtgtcaaaaacatgtgcagtcatggtttgaactaccacaaaatgttaaggttagtgtacctttaatataactggggagtatggttccaaatatatagaaatgcaagatttttgccactcatgaaacatttataattaaataattgttcatgtaatttcttactgaatttctattattcccctaggctgtgatttgcagaggatagcaggatttgcagatctgctttgytcatttttgtgtttcaagagccatgtagtgtttaacagacactatatgctcatgaggtatctgtttaacaaa

SEQ ID NO: 44754 - DNA, 492 bp, Homo sapiens
gtaatgagcacagatctattctgcrtgaaatttctgtatttagataaatctatgcatggttgctaatttttttttttttttgagacagagtctcgctctgttgcccaggctggagtgcagtggcatgatcatagctcactgcaacctccacctcccaggttcaagtgattctccagcctcagcctccctagtagctgggactacaggcacacgtcaccatgcccagctaatttttgtatttttagtacagacggggtttcaccatgttggacagaatggtatcaatctcttgacctcgtgatctgccagaactcggcctcccaaagtgctgggattacaggtgtgagccatgcccagccagatgctaatttttttatttggatgtctttctcccttttgggtttgaaaactgacctagggtaatgtatctgaaagagaatggaaggctatattgcctttcctgaatgagctttaaaatatacactaataaaa

SEQ ID NO: 44755 - DNA, 547 bp, Homo sapiens
gaagctagatgaccagcactctccacacraattcatattcatgaggagtcgatggaaagagctctacattagaagaaatgtacttgatttcaataaataaaaggcattagataaacatctgccatatttcttcaatcatatttggatacaaaaggagtcagtactttcaaagtgttgaatagactacagagtagacaacagcaacggatttcatttccatatcatcattacctttatctgtattagaaagtcaacattaataattcatttatcagaaagcttagtatactctgaaaggtccaccaggtttgtaatatattctagtgttgtattcctaatacagaaaaacatatagcacactcctcattttagaaaatgcacatgctaaatatgatattgaaatacatcacaaatatttctatagcaattcaggaatccctgcaatgtcaacacaattctgacataagcgatattctacaaaatgattgtaaaccttgattataaactttactgtttaaacatatttttcaagcttggtcaacttaag

SEQ ID NO: 44756 - DNA, 594 bp, Homo sapiens
aacaaaaagggaagaaaaaatgttwtgtcttcagaatctcaaaaattttattacttatatcgataaaaatagcatattttagtacacttagttaaaatatgagaaaatctaggaatatgtcccatgatcaacattaaaagcattaccatataaacaaatctgttgttattataggcatttattttaacggtagaatctcttttcaaattttcccttaactgtaatctttatggctgtaccaaataccaaatgctctagtgttcatacacatttcaaaaaacttttaatatattaatttttcacttttgttataaacatttctattttatagtaatatttgttcttattagttttatcatttttcaaattatactagtgtgatataaaatactgctgcttcccagacaataaatgtagcagattttattttccaaagtgcccactgcaataatttccggtcccttgtgctcttccagaactttgccacccagttttcaagaggggaatatgattgctcttctcttgcccgagagagacaattcattttccgttcaggggaagcgacacagtgtgacttccaaggctaggttataa

SEQ ID NO: 44757 - DNA, 284 bp, Homo sapiens
cccattgatttctaaaatataacagtggccccaggatccctggggccatacttttaaattggacccctacaagacagaagaatgccatcttttctttatcttggttagtcctatatgcatttgataatacccatgtcttaaaacagtcacctaaaacacctggcttcctagcatttagtcgggaatatccttgacttgtagcttttttttttttttttttaacacagatctattttggtgcatctrttcagaatgccatagttcatattacattgaaattttgc

SEQ ID NO: 44758 - DNA, 605 bp, Homo sapiens
tcctgtgagtattttcttattcattatacttgcctacaagtaataaagcacagatcctgttcttcaaatttatctcttgaaagactttaaattctagttgattgaaactacatagtgggaaatacttttttctaaggatcatgtttcaaaatcaagaagcaaaaagaaaaaagaaaaaaaaaacaggtgctttattcacagtcataaggatctgaaagaytgtttttatcagcactcttatcctaaggaatctccttgagggagaaagaacgagaacacagagcttcatagcagagctataatgcagaatctgaagaatatttacggttataatttgcacagatcacttagtgctctaacacggtgctcctgatcacagcataagtcacactttaattttaacctttgcagttcatcaatagattcaatatcaaaaataattcaggactgacactactggtttacaggtaagtttaacaagaatggggaggcttagtaatgtattagttggcttgtcaagtgaggcataaagattcatgactcttaacctatgtttccatcgcaaactcagtgccataaataatgcaagcagctaatcaggcata

SEQ ID NO: 44759 - DNA, 605 bp, Homo sapiens
tcctgtgagtattttcttattcattatacttgcctacaagtaataaagcacagatcctgttcttcaaatttatctcttgaaagactttaaattctagttgattgaaactacatagtgggaaatacttttttctaaggatcatgtttcaaaatcaagaagcaaaaagaaaaaagaaaaaaaaaacaggtgctttattcacagtcataaggatctgaaagattgtttttatcagcactcttatcctaaggaatctccttgagggagaaagaacgagaacacagagcttcatagcagagctataatgcagaatctgaagaatatttacggttataatttgcacagatcacttagtgctctaacayggtgctcctgatcacagcataagtcacactttaattttaacctttgcagttcatcaatagattcaatatcaaaaataattcaggactgacactactggtttacaggtaagtttaacaagaatggggaggcttagtaatgtattagttggcttgtcaagtgaggcataaagattcatgactcttaacctatgtttccatcgcaaactcagtgccataaataatgcaagcagctaatcaggcata

SEQ ID NO: 44760 - DNA, 605 bp, Homo sapiens
tcctgtgagtattttcttattcattatacttgcctacaagtaataaagcacagatcctgttcttcaaatttatctcttgaaagactttaaattctagttgattgaaactacatagtgggaaatacttttttctaaggatcatgtttcaaaatcaagaagcaaaaagaaaaaagaaaaaaaaaacaggtgctttattcacagtcataaggatctgaaagattgtttttatcagcactcttatcctaaggaatctccttgagggagaaagaacgagaacacagagcttcatagcagagctataatgcagaatctgaagaatatttacggttataatttgcacagatcacttagtgctctaacacggtgctcctgatcacagcataartcacactttaattttaacctttgcagttcatcaatagattcaatatcaaaaataattcaggactgacactactggtttacaggtaagtttaacaagaatggggaggcttagtaatgtattagttggcttgtcaagtgaggcataaagattcatgactcttaacctatgtttccatcgcaaactcagtgccataaataatgcaagcagctaatcaggcata

SEQ ID NO: 44761 - DNA, 605 bp, Homo sapiens
tcctgtgagtattttcttattcattatacttgcctacaagtaataaagcacagatcctgttcttcaaatttatctcttgaaagactttaaattctagttgattgaaactacatagtgggaaatacttttttctaaggatcatgtttcaaaatcaagaagcaaaaagaaaaaagaaaaaaaaaacaggtgctttattcacagtcataaggatctgaaagattgtttttatcagcactcttatcctaaggaatctccttgagggagaaagaacgagaacacagagcttcatagcagagctataatgcagaatctgaagaatatttacggttataatttgcacagatcacttagtgctctaacacggtgctcctgatcacagcataagtcacactttaattttaacctttgcagttcatcaatagattcaatatcaaaaataattcaggactgacactactggtttacaggtaagtttaacaagaatggggaggcttagtaatgtattagtyggcttgtcaagtgaggcataaagattcatgactcttaacctatgtttccatcgcaaactcagtgccataaataatgcaagcagctaatcaggcata

SEQ ID NO: 44762 - DNA, 523 bp, Homo sapiens
tgcctttgagtgacagagatgcttgccccatccccttgacggcttccttctccgtccctgcgtcgagctgtggctagatttcgcgatgagggcagagggcgagaggcgtgagaagcatcttctggaaggtctgccgacaccctcctgcgggtggacaatgagcgcttggaggccgttgtccttggttggggagcggtcgtctggatctaggctagcaaagaggctgctccgggtggggagggaatgaaaacccctgyggctccgacacagatgcccacattgcccaggccttcacagacccccaaaccggaaccgccgggaaaacgattgccaactggccacaacacccaggcagagacgcggggagaggctgaccagaagaaaggccgacgtgcaagaaacccagcctccggcgcacagggaacatgtgtcccaaggcgcatgcacacacagacggacagagacagaaagagagggcgacggaaagagcgagaagggagagagagagagacagagacgtaag

SEQ ID NO: 44763 - DNA, 523 bp, Homo sapiens
tgcctttgagtgacagagatgcttgccccatccccttgacggcttccttctccgtccctgcgtcgagctgtggctagatttcgcgatgagggcagagggcgagaggcgtgagaagcatcttctggaaggtctgccgacaccctcctgcgggtggacaatgagcgcttggaggccgttgtccttggttggggagcggtcgtctggatctaggctagcaaagaggctgctccgggtggggagggaatgaaaacccctgcggctccgacacagatgcccacattgcccaggccttcacagacccccaaaccggaaccgccgggaaaacgattgccaacyggccacaacacccaggcagagacgcggggagaggctgaccagaagaaaggccgacgtgcaagaaacccagcctccggcgcacagggaacatgtgtcccaaggcgcatgcacacacagacggacagagacagaaagagagggcgacggaaagagcgagaagggagagagagagagacagagacgtaag

SEQ ID NO: 44764 - DNA, 1814 bp, Homo sapiens
ttctggcagagtgggttttgctatctaaaacctgctttttctaatagaggcaacttctcatctccagatactccgtgactttcaggaagaaaggcatataacttaaattgaagtgatagataatataaacccatggcctttttggcttttgggtcaggcccctgtgaagttagcaaaggcagcagaagcagctatgcttgcatcagaatgcagaatgatgctcatcctcaggaagcatttcacacccacttcctttccatccatggagtaaggggacagggaagttaattatgagaagggggataaactaatcctatactcattctctggccttctataaaaacactggttggtttttagcaggaaagttatgccagttatattaggattctccaaaaaaacagaaccagtaggatgtgtgtgtgtgcatgtgtcaagtgtatgtcacatatraacacatgtgtatgtgtgtaagtgtatgtcacacacatgtacttatatacatatgcatgtatatatctatatctatatagttgtaggggctaagtgtgaactttgtggggcaggttgacagtctggagattccgggaagagttgatgctgcagtcttgagtctgaagacagtctggtggcagaattcctgctttcttaggagacctcagtcttttttcttaagccttcatttgattggatgaggcccacttatgtaatagatggtaatctgctttattcaatctactgatgtaaatgttaatcacgtctaaaaagaacctttgcaacaacatctagactggtgtttgaccagagtactgggtgccatagcctagccaagatgacacataaaattagtgaccacgttggggcccagactggtctgcatgatataggctggagaggagaggaagaccctgctactgagctatgctcatctctgagaaaacaaattttatcttgcaagttatatctgatattcattgaacaaacgtggaacacctgctatgtgcaaagttctttgccaattattctctgcttttagtgggtcttctgctgttgtaaatcgaaggaagagtacagatgcagacagacaccctgggaagcaacttagtgtggtggaaaggcactgagttgtagagacaagagtaccggttttggctgtgtgactttgtgcaagttttcacccttcaaaactcattggtgattccactttatcaagatctgcaaactgtctaagccttatatttatctataaaaccatcatcatcatcagcagcagcagcagcatcattgccccaggatttaaccgaataaaacatgtaacaatttctgatatattacgagtcaccaacaattgttctttgtcttccttctctatcacattgctaagtaaaaaggggtgtgagaaactatgatatgagaggcagagtgagggaaatggcaccaggcatgatgtttgtgtcttaagtctgaaggtagactggaggcagaaaattggaacctttaatcaggtgtaccccatagtcaactggccagctgactatacagggcaggtctgtggtgcaggtgaggcttcatatttatctattatttggtaaaaatgaggtgctgttcctgaaatctagaatcatgatggtatgactatacacatttcagaatgattctcacccttttcaatcccttatgtcacaatctccatttatagttttgagttttgaattttaagccatgttctaaaaattccgaagttcaactcttagaaaatcccaagtagtctaagagtgttttacaccaaaatagtcacaagattatgttagaca

SEQ ID NO: 44765 - DNA, 515 bp, Homo sapiens
tcaggctggtctcgagctcccaacctcaggtgatccacctgcctcggcctcccaaagtgctgggattacaggcggaagccaccgtgcccggccgacacttttaaataaagagataaatgagsttgatgggaatatattactttacgagcaagatttgtgtctaatgctttaacttaattgtggcaattattgtcagatggtctaggaaaaaattgtgtatctggtacatgacttttggggagctctaggaagccctcagcaacatcatatttccctttgcacacctctgctccagagatattttcacagttggataagatgcttcttagatgatcaccaatactccatgcctactcatcagtccagccacttgaaacaatcaccagtacaacaggaccgccatatctccatgatatgaaatgaagagctcatccacgtgccaggaaggtggtgcaccccagctgaatgggaacagaagttcctgtgctcaggacccttctagacttcactttatg

SEQ ID NO: 44766 - DNA, 515 bp, Homo sapiens
tcaggctggtctcgagctcccaacctcaggtgatccacctgcctcggcctcccaaagtgctgggattacaggcggaagccaccgtgcccggccgacacttttaaataaagagataaatgagcttgatgggaatatattactttacgagcaagatttgtgtctaatgctttaacttaattgtggcaattattgtcagatggtctaggawaaaattgtgtatctggtacatgacttttggggagctctaggaagccctcagcaacatcatatttccctttgcacacctctgctccagagatattttcacagttggataagatgcttcttagatgatcaccaatactccatgcctactcatcagtccagccacttgaaacaatcaccagtacaacaggaccgccatatctccatgatatgaaatgaagagctcatccacgtgccaggaaggtggtgcaccccagctgaatgggaacagaagttcctgtgctcaggacccttctagacttcactttatg

SEQ ID NO: 44767 - DNA, 578 bp, Homo sapiens
ctagaaatgcaagttcataggccccaccccagtcccagtgaatcagaaactctggggctggggcccagcaatctaggttttgacaagccttagaatattcagatgtccaccgaagtttgacagccactgacctagagagctttggaaagggtggccatctacatttttaacaagttcttcccttagtgttatagtttcctgttgctgctataacarttttcacaaatggagtggcttaagacaacacacatgaggccgggcatggtggctcatgcctgtaatcatagcactttgggaggctgaggtggatagactgcttgagctcaggcgttcaagaccagcctgggcagcatggtgaaacctcatctctgcaaaaaaaaaaaacaaaaaaattagccaggcgtggcggtgcacgcttgtagttcagctccttgggggctgaggtaggagggtcacttgaacccaggaggttgaggctgcagtgagctgagatttcaccactgcactccagcagcctgggtgacaaagtgagactctgtttccaaaaaaaaaaaaaacacacacacacacacacaaac

SEQ ID NO: 44768 - DNA, 605 bp, Homo sapiens
ttttatatatttaccatggtatctccttcttatttataaatatataattaaaagcaaaagaaggagaaagaagtagtaagaaaaaaatcaagtatcaagttgcccttatacttgttatattgccctatttatctatttttctttgttgaccctctgtgaatcttaattcatttatttctctaaactatctttaatttatttttatcactttatgccattacaatgtaatatcttttatttctgattttagagattacagaagaatttaggtagattagctagtctttggttgcaaaataatgatatagggaatcaatctgaccattaatacactttgtttagcccataaagtgtttaaaaatgaagtggggtgttatcagaataaacatatatcctttagttagctgtgaacccacaccctattgtcttgggccagtcggctttgctcatttacttttctctgataatggttggttatgtatatttgtgtatacacattgtaaccctactttatacaaacatgaaggttaggaggcagtagttcagtgmcatgaaaagagaaggttcctcacctcaaagtaaaaaaagaggtttctttaagtctg

SEQ ID NO: 44769 - DNA, 2019 bp, Homo sapiens
ctgtccctgcccttaaggaaaaggttcctgttcccagggagatgaagggacacctgctctgatcagggaacagaaagtagttgaggtgactgtaacactgtgtttgcgaaagattaccctaaacccgtctcaagaggaactgagtcctacttattgcagagacaaagggaagaaagagttcggctgaatacagtttttaatctcaactaggggtgggaggcagacaagtaaatagaacaggcaaatatggtgtggtcagtgctgcaacaggaagcgaaggactgtcaggaggtttcccctgagtgcaagtctgtagtgacggcgaactcatgacctcacaaagccgcccatgcactttccagatagagatttctgaggatctcctttcttgtcccccaatccctgtcgccgcaggagaaatctgttccccaatatgcgtcccccttcctcaaaataaggctgttccttcccccaaaaagctgtagggtctctgaggccaactcttctgtcccccttagagccacccccttcacacaatgcttacgggacggggtctggtttggggcccggggtccctgtcgcaggactgccccctcctcaacccgccgtttccatagcaaccagctcaccacttcgcgggcccggctggagaagtcgcccttgcgacgggggctccggcggaacagctcgtcccggctgccatcgaccccgccgcccaccgccactcccagcgccttgttccgcgtcttcacggtcttgacgctggcccggaatagcagcgtgatgtccaccgccatagcgacccgcaccctcagccccacactaggcccgcccacgtaagcagccggcgagccggcgcgaacccggccgctgaaggactggtcctgccccacacgcctccccccggcaacggcgacgcgagaagaaaggttcctgcctgcgccctgtaccgcggcgggaggaaaaaggcttcgcctcagccggcgcactggcggaggaggaaccttcgacgcgctctcgggcatcggtttctcccagcaaagcttggagggtttagctgcgcggagagctcagcgagctcttctgtgtctgtttggggcgtgtgggctccgggagcgtgaggaccgggaagctaggaggctccttcccttctggcggctccctcactgagaccgggcggtttggttgcgggggaagtggagacgagccacccttgacctttgactgcaagaactcaccttgagcaggatagaggcacgtggacggtgaccctcgggatgcaataaatgctgagacagatcaggtgtgcaaggcacagagctagaggccagaggcctttcttctccaaccttcagtcacctctttttaaagtgaagccagcatcctcctcggggtttactgtgaaaattaagtgagctgacgcgtgctgtgttttgatgttgcttggctcctagtaagtggccaataaatggtagtaatcgttaataatgttattattataatcactgttatttgtggtaaaggaagaggctttagagaaaaggcgtcacctgtgcagagatttgaaggatgaataggaagtttagatggagacaaaggtgaaagagtggccctaatgccgctggattctcttcatccttcatgcatagtttttaattgtaccgtcttgagccatagctattaaaattgacaactcaatcaatgagtttcttctgcattttaggttcatgttctgttttgtgttgttttttgagacgggggtctactatgttkcccaggctggattgcagtggctagtcagaggcgccatcctagctcactacagctggaacgccagggctcaaacgatcctcccggactcagcctcctgagtagctgggactataggcacgtgcaaccgtgcgtggcctatggttcagttttaattcaaaatctcattgatttcttcaagatttcttttttcataaagaggaagcacaagtagaatatgtattaaaacagcagttttaatggtcatca

SEQ ID NO: 44770 - DNA, 606 bp, Homo sapiens
taattttatgattaaatatatgtatatatatttaactttttattccttttggaaatattttcaggaatggtttgaggggaggcactaacagaatttttttccaagtgcctcaataccatttaataaataatcagcataattttgtaatgcctcttatatcacactgttggcccatagtcacacagtggtttgtacgtagcctcctatgccaggagtractgcattgacacccatttcaactataggcagcttgaggactctgtgtataactctcacagttcccagaatatggtaggtggccagtgaactcttatatgaaatgcacaattaatgagtcattgatacacctgggaaagtttaacttggaagataaacaaatgtctgtcctgactggtttaaatgtttaccttttgagaaaaagggtgccaagtcagacacgacttttagtgatcctttctgcttatgattttctcttccaccccctactattttgatcgagttgcttagatctttagaatataatattggtttcttagggcctcaggattaggactaaatttaagatctcaaggccttataattcatttttctccaagaacagttatg

SEQ ID NO: 44771 - DNA, 532 bp, Homo sapiens
tctaaggcatattatttctaaggcaactagattcaatgattagttaggaaaaggggattaaacttccttgccttaaaataaggctctgagctttttgctgtatagtatctcctttgtttaaaaccaaactgatgctttttccagagtgtaaaccacttggtgaacagcccaaggatgggcttasattactcacagagtgactgaacttctaaaatgaattatcatatgatatgtcatccatattcatttacaataaatgaaagctaattacaacaaattctaaagattatccactttcattataaaaatgaagcatatttcttaaaaagaataacattcccagtttcaaatggctagggaataaaagaggtcacgaccagtcactgaaagtgcctcaaagaacactgaattagtatggaaaaagtgttctggggaaaagaacaaaaccatattgcaaacggcccccacaaaaattgttcatgctcttccaccttatgaatattgtttaggaagaaaaggaaaaaacattttc

SEQ ID NO: 44772 - DNA, 532 bp, Homo sapiens
tctaaggcatattatttctaaggcaactagattcaatgattagttaggaaaaggggattaaacttccttgccttaaaataaggctctgagctttttgctgtatagtatctcctttgtttaaaaccaaactgatgctttttccagagtgtaaaccacttggtgaacagcccaaggatgggcttagattactcacagagtgactgaacttctaaaatgaattatcatatgatatgtcatccatattcatttacaataaatgaaagctaattacaacaaattctaaagattatccactttcattataaaaatgaagcatatttcttaaaaagaataacattcccagtttcaaatggctagggaataaaagaggtcacraccagtcactgaaagtgcctcaaagaacactgaattagtatggaaaaagtgttctggggaaaagaacaaaaccatattgcaaacggcccccacaaaaattgttcatgctcttccaccttatgaatattgtttaggaagaaaaggaaaaaacattttc

SEQ ID NO: 44773 - DNA, 532 bp, Homo sapiens
tctaaggcatattatttctaaggcaactagattcaatgattagttaggaaaaggggattaaacttccttgccttaaaataaggctctgagctttttgctgtatagtatctcctttgtttaaaaccaaactgatgctttttccagagtgtaaaccacttggtgaacagcccaaggatgggcttagattactcacagagtgactgaacttctaaaatgaattatcatatgatatgtcatccatattcatttacaataaatgaaagctaattacaacaaattctaaagattatccactttcattataaaaatgaagcatatttcttaaaaagaataacattcccagtttcaaatggctagggaataaaagaggtcacgaccagtcactgaaagtgcctcaaagaacactgaattagtatggaaaaagtgttctggggaaaagaacaaaaccatattgcaaacggccsccacaaaaattgttcatgctcttccaccttatgaatattgtttaggaagaaaaggaaaaaacattttc

SEQ ID NO: 44774 - DNA, 564 bp, Homo sapiens
atatggtccagttggccctccatatccatgtgttctacatctatgaattcaatcaacctcagatttaaaaaaaagtaaattccaggcctcctgcctgcggcatttccagccagagcaacccacccacccatggtttccccctgcagaagcgaccctacccacagcaccccmagctggagtgcctcccggccacaacgcctccaccacttctgctggagcacacctcccaagcccacggtgccccctaccagagcacctcccaccctcagtgcccctgccagagtgcctttcgcccacagccctgcccactggagcatatcctgcccacagtgcccctgctgcccctgctggagcacctacacccatgccctgtcaatggtctgggaacaccccagcctctctatcccagccaaagctcaacagtgagagaccagaggacaaagctgctgacccagtcccagtcccacagggttagagcatgcatcccagcagtatggagctgagtcttgccccctaaaagcatccagaaatgaagtgattcaactatatccagcttacaccaca

SEQ ID NO: 44775 - DNA, 1889 bp, Homo sapiens
tgtcttacccaaggttagtaaaaataggtccagtaactattagcccatccaggcttatataaaacaaacagaaaagaaaattgaaggaagatatttaggagagtgactgaggtgaagtgttgtcagcttagcagggaatgttgcaatgtttcccctgaatttcccatcacctccaaaccaagtgaagggcacagatagaaactgacactgaaaaaaaggagggctggtatcccacagtcctgaggaactgcagaaattgtgggtccatcttgagagagttgttgggagaaagtgatgtttgtttcctggagtttggaggaatgtttcaacataaagactggtgcctcctaccagccttgtcccctgttaaatttggaaggcaaaagagtgactgaagttattcatgaaggcagggtagagagtgagcagaggtagaccactgtttatgtgaaaagcaagtatgatcttcctttgggataagtgtacactggggaagataactagactcraaacatgctagggcactgccagagagggtgacagggaaaggtggcagggagtgttgctgaaggagttgccagatgttggccagaaagtgcaccccacttctgagaacccacagtggagccagcctttgagcacatgtggctcccagagggtgtcaatgctcaagagtaaagcacctttggacaggcaagaatgaagatgctctcctcccctgcccaccgtgaggagtcaatggcagggagtggggaagaagctcagaaacagggaaagagtgcagcacccctctcctctccactgcagatccccatgccccagggtaggcctgagctttgaggagggaaagtaggaaacactttgaattggatgtatgattgaatgttttaagctttaagtcagactgcaccgtttaaatccacaaaagtgcccaggaagccatgaagagaaggcagtgtggttgaaggcagtgatgagagaaaaatgaatgtgtttcccatttatacaactattgaattcagcccatttaataagctggtttacagaagttgatgacagatctgtgccatagttttgctttattactgcatgtgtgtctgtgggtgtgcatgtatttatatacattatacatagttcatcccctcgtgtgggtttatctcttagccaacaaattgttttgttatctttaatttatgatcctcaataaagaatccctctaggtatcactaaggagcaggacctcagccaggtgaacccaatcaatattaaaatccctatttgggggcctcaggtgggcagagcaggcgaagagcagttccaaatgaactactagcaggtgggtgggaaaattatgtctttttggtgcctatggaaggaatggcaaaggggcctgagttcttaactgggaacaaaaagcacatactttgctgtgacgtcttgattaatagactgaaagaactttgattctgcatgaatccaagtgaacttaccccccagccagcccctgcctcatccagtctccctatctgatttccattttgcccctggagaactgtcctttctgcctgtctagagctgtggttttcagactcggctgcatattagaatcacctggggaactggtatttttaaactggtatttcaaaagtaaaccaatgccaaggtcttacccccactgagtctctggaagtgtggtatgggcatcagtattttttaagaagctcctctggtgattcttatgtataggttaggtctaaaagattgaagagaatagtagcagaggctgactgtgtccaattatacagggaagcaaagttctgcggagcatggctccaggctgcaacttctgggtctggccatatgaaatgcagaaattcattcattcatgt

SEQ ID NO: 44776 - DNA, 1799 bp, Homo sapiens
ccttgcagaagagaggcagagctgcctgtgctccccsacccaagtcaggtgctgttcccctttctcaagcaggcccccaattactgtggttttctgggcttcatggctagccagctcaccacgacagcacaataccgtgttctcactctccacgcaaccagctatttataactgcaggatgccaggcttgcatagagcagtgtgacacttccagaaagtcgcactgctattttagcaatctcctaacgaggagcaccaacagacacagcctgtcctcgtcaggcagagggagtgaaagtgttctggaagaggaagactgcaatttgtgcttgtgtgtgtgttttattttttaacctgggatgccatttagcaatcttaaagggactgtccttctcagccacctcccccaaccccccagctgtcttgattagtggctctgtgtatgctggtcagatctggggattaatgatggctaatttgcccgaggttggtgcagcccaggcagcagacgttgcacaaccagcttttgctgccatatgggcggaagcagctgtttcaattactttctgtgcccagatgtgtcagacgagccaccagtcctctgcggggtacatcagccgcacggcagctaattgcttcaatcgcatgtggaagcgtggtgctgggtaccgtgaaagggggttttggggacagccaagtgccagctgtcgtcacggctcacaatgccagcaagctgagaggctgagactagacttcagtcttcacttgctggcctacctcgatgatacctggtctggctgtgtctttgtgagttgtacacaatggcggcacagagacaggtaacttaacatgcgctaggctggggtgtgtttacgtctctgtgtcaggagcagatgaaatttggggcccatgctctgtggataccaaagacaccaaaattacatgatttcaattaacatgcagttcaggctggccatttgaatttaaagcttccaggcacatttttaaaggttataatccctcctcctggagcccagacggtgatcaatgaatcaaagtgtgtgttacgttttcttgtgtatcactgagccaaagggggatgggaatgaaaggtaggctagcacccattcccctctgcactgtcctaggctctttagaaaagaatcagaaacataccttaaatatatacaataaaatttatttaaggaaaaaaagaaatggaaacaaatatcatgcaaagatgtcatctttccattgtttggagtaggagtggtgatgggaaaacctggggtaaataggaagctgttatcatcatcataatacatctatttaggaaaagaacaaacatttgttttgtgctaattctatggtaatcagggtgattgtactgtacatagctactggttgttgccatggttatttcaagcagtttgtggttattaatggcctagaataatccacagtactcagtttgagacctttcatcagaaacatgagtactaatttcagtctcacatcccaacatttttggagcccaaaataagtttcctttctcttagctttgtatattatgtggcatctaatctgtgttatgaaatggtttgctccctttttcacattacttctcctcaaaaacacctttaaaaaaaaaaaacaccttttgactacagatctatagtatgattaacagagctcagcgtttttctactgatctattgatgaatatgtattaatgcaacctagccaaaaactgcattgagagaatgaacatgtaatctgtgttcatggactcctctttc

SEQ ID NO: 44777 - DNA, 527 bp, Homo sapiens
aactgtggrgcacttatttcgatttctttttaactgtattatgttctaccttgcattatctgtgcacatgtttaaatatctaataaaataaaggcagtatttcttggtaattctattttcccccatcccctttggcaactagaacaagaaacagtctgaaataattaaattgtttttatatcctgtcatatatcttttagctgcagcctgatttcttttcaaacagcaactttcttagcactcttccaaatttgtcacctgcattaaagacctggttttgaatttatccaatgttctttctcatagctaggcaggaaagatccaaaatattctgacaaagtccttgaatttaaaattcatgtgttcaatttttcaaaaacaccggcttggcacggtggctcatgcctgtaatcccagcactttgtgaggccgaggagggcagatcacctgaggtcagaagtttgaaaccagcctggccaacatggcgaaaactcgtctttactaaaaatacaaaaattagccaggca

SEQ ID NO: 44778 - DNA, 527 bp, Homo sapiens
aactgtggagcacttatttcgatttctttttaactgtattatgttctaccttgcattatctgtgcacatgtttaaatatctaataaaataaaggcagtatttcttggtaattctattttcccccatcccctttggcaactagaacaagaaacagtctgaaataattaaattgtttttatatcctgtcatatatcttttagctgcagcctgatttcttttcaaacagcaactttcttagcactcttccaaatttgtcacctgcattaaagacctggttttgaatttatccaatgttctttctcatagctaggcaggaaagatccaaaatattctgacaaagtccttgaatttaaaattcatgtgttcaatttttcaaaaacacyggcttggcacggtggctcatgcctgtaatcccagcactttgtgaggccgaggagggcagatcacctgaggtcagaagtttgaaaccagcctggccaacatggcgaaaactcgtctttactaaaaatacaaaaattagccaggca

SEQ ID NO: 44779 - DNA, 1347 bp, Homo sapiens
gaggttgcactgagcctagatcgtaccactgcactccagcctgggcaacaagagcgagactctgtctcaaataataataataataaaatattaaggaacaaagagtagaaaaaataaattagaacagaggcagacacagagtaaagaccatgtgaagacatgggggaaagacagccatctgcaagccaaggagagaggcctcagaagaaaccttacctgctgacacattgctcatgaatttctagcctccaaaattgtgagaaaaataacttctgttgtttaccttcttccctccacctcaaaatttaattttaactctgtgtgttttagttaaatttctcctttatatctaaaataggaaagaaatactaacatactcattaatcacagttatgctaatatttattttgtaaaattttattatactttcagtctttgcactgtttttttcctaattaatctataaattattttatcttacatgaagatatatcacaacagttagaaataattttcctacaactaatttatgtataacatttaaagcaatcaaatatattgcaggccatttatcgcagataccattaaattattttttttcttttcctattaaactttaaagtatgtgaggaattaaatccatatatctctgttgtatttttaatttttgcatgattttatatttttatactttctaatattttatatgcaatatatatgcattagatgatgcccaattctatcaacaataaatggatatttttaaattttcaccatgaaaaatgtaaagtgatatttcattttctaataattttgtgttcactgtctattgtttaatttcagcatcatttattaagcatattggctgtttctatttctctctataatcaggttatatcctttgtttatttttccatcaacatacatattgttttcttttcrcaatttgaagtgttccttgatgttattgcaataagccattttctctctaataaaatttgagacatctatatctatcaaagtcaccaacaatccttttgtgtgtagatcttcattcttcacagggaaaataatttaattcattttacatttgcagaagatttacaatatatgtaccctattattttatactacaaagattactaaggtaatttctgcaccccactttcaaaactcaagatggaagaatatgtctgcatgaagaagataaatccaagcatcaaactttctcactaatgaaagacatggaagaagaaaagaaacaaacaaaaaacagaaatatcagaaaaataagacactaggcttaatttttctggattttctgctttgtttgctcttatatgacac

SEQ ID NO: 44780 - DNA, 573 bp, Homo sapiens
aaatacattaattaaagtacagtactgctttaggaggaagcaggtgcataggttagaaaatattgatatcattgaagcagatcttaatgctcagttatatttcaaaaataacatttcaatttggtgggtaattaaaatataattcagtggatgatgttggtacaactggccatttgttaagataataaagttaaatctccgtaccacacttgcacaaaggtaaattacaratgttttaaagatttaactgtcaaaaatgccaaagcaaataaatccataatacaaagtatttaggcaaaaaaagttaaactgatcaattttctaaaattctaaacaaaatcatagacctgaacattgtttatacttattaatacatgtatatctatagctatttgtatatataaaacagaagagtcaatattattcatctctaaaagtcttacaaataaattagtaaaggagaagcacgctaacagaaaaaatgggcaaaagatctgaacagggaaaaatcacaaaagaagaaatgcaaatgaaatagatagatatttaatctcactaagaattaaaaaaaaa

SEQ ID NO: 44781 - DNA, 1171 bp, Homo sapiens
aaactctaaatagctcaactaatttatattcttattagcattgtaagagaatacctatttcccaaaactttactatctataattatttttaaaacatttttgaaaaatggtattttatattttgtttcttggcaaagattgagctttaaaaaacatacgtttgacacttttatcattccctttgtatgatgtctgtttgcgtcttttgccctaaaaggccttcaatattatgacatagtaaatgctatctatgttgtggagcataaatttgaagttggctgaaatttgccttggccagccttggctctgggcctaggaccctccagataagccctttttatggttgcttctaaatgtcatgtgcccatctgttttaatttggcccagtccatgaggacttgagaacaggactccttgaagcacataataatcattgcctcaaagtggcctgttcttcatctctggatggcttcccataatccagctccttccggatggccatttttagttgagacaaccatgccattttgaagcctgctgcttttggaggctaaatataatttctctgggaaaggggccaactgcgacagtttatttccatttgtcctatgtcttgaggcaagactgaatgtgagaggaaacctggagccagtgcgaagaacagcatggcagcatcaggcaccagccaccactgtccacacactgcccggcgtgcggggtccagagtctacgcacacccccacgttggaacccccagaggggataggcaccttagtcacagcacgctgcaggacaggttctttcaggctgaaatgatagggctggctgagtgtgtgcctacycaaacctgacaggaagattttgcctaaattcaatttctcctcatccaatgaataaccgtagtccacccaatccaatcaattgaattactagttcttgaaaaatgaaatcattcataaaaaaatgagcagcatattttaaggttataaaactcataaaacattaaaaggtgaagtatatattcggatattaacaatgggcttaatcttttatttatttatttatttattttgagacagagttttgctcttgttgcccaggctgaagtgcaatggcgtgatctcagctcactgcaacctccgcctcctgggttcaacttattctcctgctt

SEQ ID NO: 44782 - DNA, 531 bp, Homo sapiens
tgttatagtttatactttatataattttatgtttttaaaacttgaaataagaaggcagagaaagtatatatttataggtttctacacaaactttcttctatgacatttttctactcttcatttgttcttgtaaatttaaatactatttggtgttacttccttacttcaatatggcttttctcccacctgtcttttttctgctgttattaaaaatatactgcatttacacttgttatagtcatagcaatgaaattatatgcatattrttttctatcattgctttttaaatctgatgagaagagaaaagaaatatatataccgtcttccataaatacgtaattacctttaccaacattctttatttctttctttcttttattttttttttctgcaacctctgcctcctgggttcaagcaattttcctgcctcagcctcctgagtagctgggattacaggcacctgccaccacacccagctaatttttgtatttttaatagagacggggtttcaccatgttggccaggctggtc

SEQ ID NO: 44783 - DNA, 682 bp, Homo sapiens
ctccttcagtcctcttggcctcccctcccaactctggcctgacagtttctggaaacttcttagttggaccatcccagctgtcaccatggcccctccttgataaggaatcatactctagaatctccggattttattagttgggtcatttggaggcctgtccctgggctcagaaatggaaggggcagtagatgtttctgctacatgcggtaaatagaaggcggtttctccagcgcctctggctgcctgggctagatgagacctttatggaaatagaaatcagggtccagggcagacagggcttctgcctcttagttcacttctgagaagccccaccctccccaagtgggaggagggaaggaaagaggagacagacagggaggatggagaagggacgcagggggcctaccactccgaagatgtgcgagatgtactgcatgctgaackgctggctctgcggcggccagtactgcaagaatgtgtccacgtccacccgcaggtccttctgctcctcctccccaaagtgctccacgtggttctgcaagtcgtccacggacaccaggcagccctccgtgagcccggtgccttctctctccacccgccacatgatgcgcgccgccagcctgtgggaagggcagcgtcaggaggccactacagctgcattcattccttcaacacacattta

SEQ ID NO: 44784 - DNA, 682 bp, Homo sapiens
ctccttcagtcctcttggcctcccctcccaactctggcctgacagtttctggaaacttcttagttggaccatcccagctgtcaccatggcccctccttgataaggaatcatactctagaatctccggattttattagttgggtcatttggaggcctgtccctgggctcagaaatggaaggggcagtagatgtttctgctacatgcggtaaatagaaggcggtttctccagcgcctctggctgcctgggctagatgagacctttatggaaatagaaatcagggtccagggcagacagggcttctgcctcttagttcacttctgagaagccccaccctccccaagtgggaggagggaaggaaagaggagacagacagggaggatggagaagggacgcagggggcctaccactccgaagatgtgcgagatgtactgcatgctgaacggctggctctgcggcggccagtactgcaagaatgtgtccacgtccacccgcaggtccttctgctcctcctccccaaagtgctccacgtggttctgcaagtcgtccacggacaccaggcagccctccgtgagcccggtgccttctctctccaccckccacatgatgcgcgccgccagcctgtgggaagggcagcgtcaggaggccactacagctgcattcattccttcaacacacattta

SEQ ID NO: 44785 - DNA, 1643 bp, Homo sapiens
tcaataaccaagtttttttaacttctactatgtaaaggccaattattatgaaaagaaaactgtcattaaagagccaatgagatgcaagcattacctaacccatcatctgaaactaaaaccaactactgaattcaacagggcttgaaaagggtctgaagacagctttttttttttttttttttgagagggtgtctcactctgttgcccaggctggagtgctgtggtgcggtcttggcacactgcaacttctgcctcctgagttcaagcgattctcctgcctcagccaccaagtagccgggattacaggcgtctgccactgccccaggctaatttttgtatttttagtagagaccatgtttcaccatgttggccaggctggtctcaaactcctgacctcatgatccacctgccttggcctcccaaagcactgggattacaggtgtgagccactgtgcctagccaaggacagctttttgatcattaattttgcatcagaaataaagtaaccaaatagcccagtttgccagagacagtcctgatttacatccattgcccagcaattactaactgctccccttcgctcttaaagatgttctagctcgggtgacaaattaaaagtcactatgggccaggcatggtgactcacgcctgtaatctaagcactttgcgaggtcaaggtgggtggatcacctgaggtcaggagttcgaaaccagcctgaccaacatggtgaaaccccatttctactaaaaatacaaaaattagttgggcattgtggcaggcacctgtaatcccagctactcaggaggctgaggcaggagaatcacctgaacccgggaggcagaggttgcagtgagccaagatcacgccattgcactccagcctggatgactacagcgaaactgtctcaaaaaaaaaaaaaatcactatgaaaaacatacaacttctatgtttatacatttatataaaatactgcctacatacttcagtaaatatataatattcaatatatgcatccacgaatagcaatgcttagctagcattacatgatgttctaaatgacttaacatgcctattaaccaaagctttataactttatttctgatgtcgttcagtttctaaaatgtttcacatgctctctgccttaaaagggttaagagttrataccacataatttacaccactctttttttggtaagcggaaacagggtcttcctctgtccccaggctggagtgcagtggtgcaatatagctcactgtcacctccagctcctgggctcaagtggtccaccagctcaagcttcccaagtagcaaggactacagatgcatgccagcatgcctggctgattttatttttctttctgtagagaccgagtctcactatgttgtccaagctggtctcaaactcctggcctcaagcaatcccctcacctcagccttccaaagggaggggattacaagcacgagcccaccacacctggccttataccattctcagtggctccacatcaattatagcactacactgtcatacaatgatcccctcagagtggccagggctaccactgtgaagagacccaaatctgcttttagtagtaaataatcccaaactgcaatgtttgtgtactcacatatcctctcttc

SEQ ID NO: 44786 - DNA, 1643 bp, Homo sapiens
tcaataaccaagtttttttaacttctactatgtaaaggccaattattatgaaaagaaaactgtcattaaagagccaatgagatgcaagcattacctaacccatcatctgaaactaaaaccaactactgaattcaacagggcttgaaaagggtctgaagacagctttttttttttttttttttgagagggtgtctcactctgttgcccaggctggagtgctgtggtgcggtcttggcacactgcaacttctgcctcctgagttcaagcgattctcctgcctcagccaccaagtagccgggattacaggcgtctgccactgccccaggctaatttttgtatttttagtagagaccatgtttcaccatgttggccaggctggtctcaaactcctgacctcatgatccacctgccttggcctcccaaagcactgggattacaggtgtgagccactgtgcctagccaaggacagctttttgatcattaattttgcatcagaaataaagtaaccaaatagcccagtttgccagagacagtcctgatttacatccattgcccagcaattactaactgctccccttcgctcttaaagatgttctagctcgggtgacaaattaaaagtcactatgggccaggcatggtgactcacgcctgtaatctaagcactttgcgaggtcaaggtgggtggatcacctgaggtcaggagttcgaaaccagcctgaccaacatggtgaaaccccatttctactaaaaatacaaaaattagttgggcattgtggcaggcacctgtaatcccagctactcaggaggctgaggcaggagaatcacctgaacccgggaggcagaggttgcagtgagccaagatcacgccattgcactccagcctggatgactacagcgaaactgtctcaaaaaaaaaaaaaatcactatgaaaaacatacaacttctatgtttatacatttatataaaatactgcctacatacttcagtaaatatataatattcaatatatgcatccacgaatagcaatgcttagctagcattacatgatgttctaaatgacttaacatgcctattaaccaaagctttataactttatttctgatgtcgttcagtttctaaaatgtttcacatgctctctgccttaaaagggttaagagttaataccacataatttacaccaytctttttttggtaagcggaaacagggtcttcctctgtccccaggctggagtgcagtggtgcaatatagctcactgtcacctccagctcctgggctcaagtggtccaccagctcaagcttcccaagtagcaaggactacagatgcatgccagcatgcctggctgattttatttttctttctgtagagaccgagtctcactatgttgtccaagctggtctcaaactcctggcctcaagcaatcccctcacctcagccttccaaagggaggggattacaagcacgagcccaccacacctggccttataccattctcagtggctccacatcaattatagcactacactgtcatacaatgatcccctcagagtggccagggctaccactgtgaagagacccaaatctgcttttagtagtaaataatcccaaactgcaatgtttgtgtactcacatatcctctcttc

SEQ ID NO: 44787 - DNA, 578 bp, Homo sapiens
gacacagacaacctcacttggaggctaactggtctccttatcttgaatcccaaaatacacctatttacaacacagatccaaaacctcgtaactcctttctcaaaatcctgtaatgccctgtcaattgcattcagaagaaaaccaccttttcatcctttctccctttaagagcacattagtaagagtgtaaatcccagttctaccacttagtaggtttatttcatttgtaacctctatctcatttgtaaaaaaaagaatcatagtactatcttctcaataaagctgttctaaggaaataattattacyaataaagcactgagaacaatgcctagcacatagaaaatgctcaaaaaaggttattattgttatccaaaccctatcctgcctcaccctacagactacttgtacttttataagtatttattctacagatttattcagtccttatgactaggagatgaagatacaaatatccattaaaaaatgttccgcattatctggccttcctgcctgtgcctgtggagtttctccttgccctgaatgctcctttctacctacagatatcctactcatcccc

SEQ ID NO: 44788 - DNA, 578 bp, Homo sapiens
gacacagacaacctcacttggaggctaactggtctccttatcttgaatcccaaaatacacctatttacaacacagatccaaaacctcgtaactcctttctcaaaatcctgtaatgccctgtcaattgcattcagaagaaaaccaccttttcatcctttctccctttaagagcacattagtaagagtgtaaatcccagttctaccacttagtaggtttatttcatttgtaacctctatctcatttgtaaaaaaaagaatcatagtactatcttctcaataaagctgttctaaggaaataattattactaataaagcactgagaacaatgcctagcacatagaaaatgctcaaaaaaggttattattgttatccaaaccctatcctgcctcaccctacagactacttgtacttttataagtatttattctacagatttattcagtccttatgactaggagatgaagatacaaatatccattaaaaaatgttccgcattatctggccttcctgcctgtgcctgtgkagtttctccttgccctgaatgctcctttctacctacagatatcctactcatcccc

SEQ ID NO: 44789 - DNA, 578 bp, Homo sapiens
gacacagacaacctcacttggaggctaactggtctccttatcttgaatcccaaaatacacctatttacaacacagatccaaaacctcgtaactcctttctcaaaatcctgtaatgccctgtcaattgcattcagaagaaaaccaccttttcatcctttctccctttaagagcacattagtaagagtgtaaatcccagttctaccacttagtaggtttatttcatttgtaacctctatctcatttgtaaaaaaaagaatcatagtactatcttctcaataaagctgttctaaggaaataattattactaataaagcactgagaacaatgcctagcacatagaaaatgctcaaaaaaggttattattgttatccaaaccctatcctgcctcaccctacagactacttgtacttttataagtatttattctacagatttattcagtccttatgactaggagatgaagatacaaatatccattaaaaaatgttccgcattatctggccttcctgcctgtgcctgtggrgtttctccttgccctgaatgctcctttctacctacagatatcctactcatcccc

SEQ ID NO: 44790 - DNA, 566 bp, Homo sapiens
tcattctaaggtctctttccttggtttgtagataatgttcttcctctggtatctacaaatggtctattttttgtgtgcctgtgtcctaatctcctcttcttataatgatgtcagtcatgctggattaagaccacatttaaccttaactatttttttaaatacctgtctccaatwtcagtcacattctgaggtactgctggaaattagaactccaacatatgatttctgtggaaacacaacacaccctgtaacaatccctattgttaacagatgagaccagcaacgaacaaagaaaattttcccacaggtacacgagtagctattataatacttgggattttagctcaagtaatctaacaacaaaggctaaatttgtagtggtagttagaccaactttgctagaaataagtcaacaaataatagccgtgtctatgaagcacctgactgtttttgctatggtaaaatcataactatttcattttccatctggctgtccaatgctctaggctttcatatactacattaaagagtggaggtgacctaaaatattacagaatataaagcag

SEQ ID NO: 44791 - DNA, 566 bp, Homo sapiens
tcattctaaggtctctttccttggtttgtagataatgttcttcctctggtatctacaaatggtctattttttgtgtgcctgtgtcctaatctcctcttcttataatgatgtcagtcatgctggattaagaccacatttaaccttaactatttttttaaatacctgtctccaatttcagtcacattctgaggtactgctggaaattagaacyccaacatatgatttctgtggaaacacaacacaccctgtaacaatccctattgttaacagatgagaccagcaacgaacaaagaaaattttcccacaggtacacgagtagctattataatacttgggattttagctcaagtaatctaacaacaaaggctaaatttgtagtggtagttagaccaactttgctagaaataagtcaacaaataatagccgtgtctatgaagcacctgactgtttttgctatggtaaaatcataactatttcattttccatctggctgtccaatgctctaggctttcatatactacattaaagagtggaggtgacctaaaatattacagaatataaagcag

SEQ ID NO: 44792 - DNA, 566 bp, Homo sapiens
tcattctaaggtctctttccttggtttgtagataatgttcttcctctggtatctacaaatggtctattttttgtgtgcctgtgtcctaatctcctcttcttataatgatgtcagtcatgctggattaagaccacatttaaccttaactatttttttaaatacctgtctccaatttcagtcacattctgaggtactgctggaaattagaactccaacatatgatttctgtggaaacacaacacaccctgtaacaatccctattgttaacagatgagacmagcaacgaacaaagaaaattttcccacaggtacacgagtagctattataatacttgggattttagctcaagtaatctaacaacaaaggctaaatttgtagtggtagttagaccaactttgctagaaataagtcaacaaataatagccgtgtctatgaagcacctgactgtttttgctatggtaaaatcataactatttcattttccatctggctgtccaatgctctaggctttcatatactacattaaagagtggaggtgacctaaaatattacagaatataaagcag

SEQ ID NO: 44793 - DNA, 566 bp, Homo sapiens
tcattctaaggtctctttccttggtttgtagataatgttcttcctctggtatctacaaatggtctattttttgtgtgcctgtgtcctaatctcctcttcttataatgatgtcagtcatgctggattaagaccacatttaaccttaactatttttttaaatacctgtctccaatttcagtcacattctgaggtactgctggaaattagaactccaacatatgatttctgtggaaacacaacacaccctgtaacaatccctattgttaacagatgagaccagcaacgaacaaagaaaattttcccacaggtacacgagtagctattataatacttgggattttagctcaagtaatctaacaacaaaggctaaatttgtagtggtagttagaccaactttgctagaaataagtcaacaaataayagccgtgtctatgaagcacctgactgtttttgctatggtaaaatcataactatttcattttccatctggctgtccaatgctctaggctttcatatactacattaaagagtggaggtgacctaaaatattacagaatataaagcag

SEQ ID NO: 44794 - DNA, 553 bp, Homo sapiens
ccttgcacgtaccccactaatgcgtatttttggttgtattttgcaatttttacttctggtcacttccttattttctgatcttacrcatgctccaggcttatttgcacattttctgccaaattctataaccagttatttctctgtggagtcctttaggatcctcttatcagagaatgggtttagaaaccatatctgagcagtaggtgtgcttactgctactggggtgttgatgcttctagatcatatttgctaaaagataaaagatttatatgtgtgtatgtgaactcttgcatatatcgttatttataaacatttccatctgtaaccatctgtatctatattaagctaaacatgagttcaaactgacgtctccaactctattactacatggatggttctagtaaactccaaagtggtaaaagacacatgtttgtgttgaactaccgaatatgatttggactagtgctctaaccctcatgttctgatccacagaggcttggacaatttgatgagcatcctcaaaagcaataatacttgtaaaatagaaataaag

SEQ ID NO: 44795 - DNA, 553 bp, Homo sapiens
ccttgcacgtaccccactaatgcgtatttttggttgtattttgcaatttttacttctggtcacttccttattttctgatcttacgcatgctccaggcttatttgcacattttctgccaaattctataaccagttatttctctgtggagtcctttaggatcctcttatcagagaatgggtttagaaaccatatctgagcagtaggtgtgcttactgctrctggggtgttgatgcttctagatcatatttgctaaaagataaaagatttatatgtgtgtatgtgaactcttgcatatatcgttatttataaacatttccatctgtaaccatctgtatctatattaagctaaacatgagttcaaactgacgtctccaactctattactacatggatggttctagtaaactccaaagtggtaaaagacacatgtttgtgttgaactaccgaatatgatttggactagtgctctaaccctcatgttctgatccacagaggcttggacaatttgatgagcatcctcaaaagcaataatacttgtaaaatagaaataaag

SEQ ID NO: 44796 - DNA, 1809 bp, Homo sapiens
ggacaaccccctccataacacaacgaagaattatcctgtccaaaatgtcaatagtctaaaatctatctggagatagagcaatatccatgggcaaagtcccatgccaggcacaagaatctagagtgaaccagcttcttactacgcagtgtagggaatgaaatgagaatatggcttaaagtaaaaagactgggtttgaatatggtcctgtcccttactgtttgttcatgggcctctcgtctacctccaatccatatactgagtatgtcccagcacagaaagtgtgattccttggaagctgctcacataattcccatgagcagcccagctcatgggaagggaagatgtctgtctcagtttccccactactggctgggtcacagcacatcgatcccgctgctggcagagggaaaacctggcagccagtgagctgcacacatgcctattcacaggacaggggtcccaggcacctctaaaagtctgcacttaccccataagtattcatgtgtccaagagaacatgayattaaacagcaaataacaccatgagaggttgaaagagatactgcagaaggaaaagctaacagcacttttctcttgctatctgaacaagggaactgggccccacaaattatgtagccagccctgacaaggtctgtgctcagccctggagcaaggaggttgggggctcttccaagcttatttcttcctggaggtagtagctatacatcatatttgcttttcttctgttctttaaagttcccttttagcttttatgataatcactttccattagctaatattttttattttgaggcagggccttgttctgtcgcctaggctggagtgcagtggcacaaacatggtccactgcagccttgacctactcagttcaggcaatcctcttgtctcagcctcttatgtagctgggaccacaggtatgcaccaccatgccgggctaattttttaattatgtaattttttgtagagacagggtctcactttgttgcccaggctggtctcgaactcctgggctcaagcgatcctcctgcctcagcctctcaaactgctgcgattataagcatgagccaccacgcctggccagataataattttttatataaaattttccgccgggtgtgatggctcacgcctgtaatcccagcactttgggaggccaaggcaggtgatcacctgaggtcaggagtttcagaccagcctggccaacgtggtgaaaccccgtctctactaaaaatacaaaaattagccaggtgtggtggtgggcacctgtaatcccagctactcaggaggctgaggcaggagaatcagttgaacctgggagttggaggttacagtgagccaagatcgcgccactgcactccagcctggacgacagagtgagactcagtctccaaaaaaataaataaataaataaataattttccttgttcgagttactagtgttgtttccatgtcctgtctggaccctgatggatacatagttcctgcttatggtctggtgggacgcagcagtaaaggatccaaagcacattataatctatgaagctctgcaaaacttcaggaattattagtgtagggaaaagaaagagcgatcagattattactgtgtctgtgtagaaagaagtagacataggagactccattttgttctgtactacgaaaaattcttctgccttgagatgctgttaaactataaccttactcccaaccccgagctctctgaaacatgtgctgtgtccactcagggttaaatggattaagggctgtgcaagatgtgctttgttacagatgc

SEQ ID NO: 44797 - DNA, 1341 bp, Homo sapiens
tgccacgtctctgacrgcgatttacctgacatgtgtcatctccctgcacacccccagccctcacccctcagcatcctctctctgctgccaactcacagccctatggatgagtgaagcctttttacagcagcaaagagtcaaccagaggaggcagagcatgctctgaaagggcaggagtcagagggagagtgccctgacttcatgggaaatctatttttcataggagagagcaatgcatgggtattgaactcgcctctcatttgtgcctggcaccccgagggaaggtgaaaacagagcccagtcccatctttttcttggtctgatttgcttctattcatcacttttttcttgagaaaaaaagaggaaaaacacaaaaataaaagaaatgcaagaatttggagtcaaatcttgaagcagaaagaaaagagtaatgccgtttgcagtcaggaacagaaaaagctaaatatgccacagaacagtaaggcagtgttctcaaatgcgtgtgctgatattccagccagagtgtggctcatatgctgtgtccacatggcgacgtcggggaaccacacaccctaagcaaacaggagctgagagggaacgggagtgatttacagtttaaaagggccttcttcctcttcctaagaaactgctgcttctgaggaacaaagcaaatctactatgattatttatgggtccatcaacagatctgaatcacctcaccttagtacgaaacgagatggataaataaataaattcagggaactgtcttatgcctgatctaagaaatacacattttgatgaagcatttacattttaataaaccaatgatgattttcattagaaacacatttaaaggggaggcagaaaaaagttaagaagttgacaaatacaaagaagtcaaaagaatgcagaagcaaagttctgagcatctagacagaggtggcaatggcccaggaacctgtctcttgccctgtctgctccattcaactgctagggcgagcaccgcagtgctcgatctaggaaggcgggcagccatttgtcgtgctggcccttgctgccgagagcctcggcctgccttctccaatctgccctgtggtgcctcagccctcccaacgcccctctgcctggctctcatgttctcaggcacgaaacatgcacatgcttcctcctcaaaaaatatttaggagtcgaccttttggattctagaaactttccagtctgcttcttcccactgcgcactttgcaactagttaataggggttttgttgttgtcgttgttgctgttttgcattaagtcaaagaaacagttcatgtatagatacagccaatgtagggcctttc

SEQ ID NO: 44798 - DNA, 556 bp, Homo sapiens
ttctcccgcctcagcctcccacagtgttgggattacaggcgtgagcaccaccatgccyggctactgcttgatattcttaagtgacttttagggcctccctccatttccattccccacataactagttttaaagcagttccagaatttacttttgtctgagacagatctttctgtttcttacccgctccttttctccacctatcctgcgtataagcaataagcaagtagcagaggctgttagagtctttgctggtgaccaccaattccaaacactggggaatcaggatccctttaatcatttttaaacgattagtagagggagacgcttgaatcagagcattttctctgttgcaatgttccccttttccctattacaatacctcctccctctcccatacaataatctttccaataaagtctctccttaccaggttagaaaacaaattaatagaggaagcagacaacaagatctttctttttcaaaactgctgaatgataaaaatgcctgacaattctgttgtaatcgattgctcaataaattattgctgactgattc

SEQ ID NO: 44799 - DNA, 556 bp, Homo sapiens
ttctcccgcctcagcctcccacagtgttgggattacaggcgtgagcaccaccatgcctggctactgcttgatattcttaagtgacttttagggcctccctccatttccattccccacataactagttttaaagcagttccagaatttacttttgtctgrgacagatctttctgtttcttacccgctccttttctccacctatcctgcgtataagcaataagcaagtagcagaggctgttagagtctttgctggtgaccaccaattccaaacactggggaatcaggatccctttaatcatttttaaacgattagtagagggagacgcttgaatcagagcattttctctgttgcaatgttccccttttccctattacaatacctcctccctctcccatacaataatctttccaataaagtctctccttaccaggttagaaaacaaattaatagaggaagcagacaacaagatctttctttttcaaaactgctgaatgataaaaatgcctgacaattctgttgtaatcgattgctcaataaattattgctgactgattc

SEQ ID NO: 44800 - DNA, 556 bp, Homo sapiens
ttctcccgcctcagcctcccacagtgttgggattacaggcgtgagcaccaccatgcctggctactgcttgatattcttaagtgacttttagggcctccctccatttccattccccacataactagttttaaagcagttccagaatttacttttgtctgagacagatctttctgtttcttacccgctccttttctccacctatcctgsgtataagcaataagcaagtagcagaggctgttagagtctttgctggtgaccaccaattccaaacactggggaatcaggatccctttaatcatttttaaacgattagtagagggagacgcttgaatcagagcattttctctgttgcaatgttccccttttccctattacaatacctcctccctctcccatacaataatctttccaataaagtctctccttaccaggttagaaaacaaattaatagaggaagcagacaacaagatctttctttttcaaaactgctgaatgataaaaatgcctgacaattctgttgtaatcgattgctcaataaattattgctgactgattc

SEQ ID NO: 44801 - DNA, 556 bp, Homo sapiens
ttctcccgcctcagcctcccacagtgttgggattacaggcgtgagcaccaccatgcctggctactgcttgatattcttaagtgacttttagggcctccctccatttccattccccacataactagttttaaagcagttccagaatttacttttgtctgagacagatctttctgtttcttacccgctccttttctccacctatcctgcgtataagcaataagcaagtagcagaggctgttagagtctttgctggtgaccaccaattccaaacactggggaatcaggatccctttaatcatttttaaacgattagtagagggagacgcttgaatcagagcattttctctgttgcaatsttccccttttccctattacaatacctcctccctctcccatacaataatctttccaataaagtctctccttaccaggttagaaaacaaattaatagaggaagcagacaacaagatctttctttttcaaaactgctgaatgataaaaatgcctgacaattctgttgtaatcgattgctcaataaattattgctgactgattc

SEQ ID NO: 44802 - DNA, 1642 bp, Homo sapiens
cacccacagcctcattccctctgctgcacggatggatcccaagccttagtagcagggatgggcagcacaaggctatgttgagctgggctgggccagacttgggcacagaacaagtgtgaattccatctgagtgtttctgatactgtgtgactaccttccaaagaccaacatctatcatggtcagattattaacatgtgattttgcatagtgtaaggatatatattagagtgtgaaattttgagttagatatggtagtggttgtggggaggactgtactgtgcaagttttgtttgycaatctaatgaaggttctctcatttttttttagttccttgagaatatgtatatcgggaaggaatgtaaacgtgcatgtaataagactcctataaaacgaactcaagcatagaagaatcgtaggagaatgattaggcagattttattactacgtacttggctatttctctgtctccttttaaagattaaacagagtttatgatgagtgtcccactgtggatgttcaactttgacttggcaacatctgtaaatgtaatacctgatggttataagcatttctcaatggatttctgcttcagttaatcaacattttgtatactttatcacccatgagatcaatattcacatgtaatcttctcatatttttgtggcacgtgaatattatataggtatatcaactattggtaaaaataaataaaggcataaataaaaacagacttactctattgcctttttcccaggtttttcccctggtattgaatgagtacctcctttcctcttcctttacaatattattttctttcattttgaattaaatttactgagatattttttccttttgtccgcattgccatgggtggatatggtctgtttggccccgctaaatcttatgttgcagcttgatccccagtgttggacatgggggctggtttgagatgtttgagtcatgggggtggatccctcgtgaatggcttggtgccattctcacaggagtgagtgaattctcactcttagttcctgtgagaactggttattgtaaagagcctggctcctcctcctctctcttgcttgttctctcaccatgtgatgtctgcacatgctagctcccctttgccttttgccacgagtggaagaatcctgaagccctcaccagaagcagatgctggcaccatgcttcttgtacaccctgtagagctatgagccaaataaatttcttttcttaaaaattacccagcctcaggtattcctttgtagcaacacaaatggactaagacaggcatgttagtgttgataataaatgtgtatctataacataaggtcataggtcagaaggtttaatggaaactcaagatgacatgtattttaattaccttttaaaaattatattttattttaaaatgttaatactctctgggtgtgaccactcactcctataatcccagtgctttgggaggtcaagtcaggaggatggcttgaatccagtagttcaaggctgcagtgagctataatcatgccagtgcccttttgcctaggtgacagagtgagatcctgtctctaaaaaaaagttaatgctcatattaggaaaatcagaaaacatagactagcaaaaagaacatagaaaatacta

SEQ ID NO: 44803 - DNA, 573 bp, Homo sapiens
tgcatttctgaaaaatcttaaaatataaaacaatattcattcctcacaatgaattccagggtcttttaaccatattgaagaacatttatactatttactcagaaaccaccttgcaataatttaaagacattctttcttgtttaatagcaaaaggatattcacgtttgactgttagtcacacaatatcctttctaaagatatraaacctccttccaccttaccttcatgtaaaaaaaaaaaaataaccctcaggctacttacagtcctcagttactaccattctcatttgcatcctctacaagttcttaacattgtgactttttggaggaaaatgaattgggcagattatgggtttatattacaaaactgcttgattttaagctctaccacatgtaagcctaattatgcgtgaatgacataatctcttgcacctaagatgcctcttttttttcttttctcttcttttcttttagagacagtctcacttggccatcctggctggagtgcagtggtgccatcctagctcacagcagcctcagattcctgggcttaaagaatcctatctttcagcct

SEQ ID NO: 44804 - DNA, 534 bp, Homo sapiens
acacacacacacacmcaccccaaacactgtcagtttgtcttctgtcaagtttaggttccacacctaccttcagctgttatgttttaacttcagactcccagcctggtcaactccacagtgagtttcatgtgtagattcactagaaatgtcagacggacaggcagcagaagagcagctaacaaaagggctaggcttgcaataaaagtctgccaaggggcaggagaaggtggggaggggacaccaacgctgaattacaaaaaaatttcaaacccaattctttgttcatctttctgcatcatctttttttttttttttttcctgagacagggtctcactctgtcacacaggctggagtacactggcgcaatcatagctcattgcagccttgacctcctgggctcaagcaattctcttgcctcagcctcccaagtagctgggattacaggcatgcaccaccatggctggctaatttttaaattttttgtagagatggggtctcactatgttgcccaggctgctcttgaactcgtaggc

SEQ ID NO: 44805 - DNA, 534 bp, Homo sapiens
acacacacacacacacmccccaaacactgtcagtttgtcttctgtcaagtttaggttccacacctaccttcagctgttatgttttaacttcagactcccagcctggtcaactccacagtgagtttcatgtgtagattcactagaaatgtcagacggacaggcagcagaagagcagctaacaaaagggctaggcttgcaataaaagtctgccaaggggcaggagaaggtggggaggggacaccaacgctgaattacaaaaaaatttcaaacccaattctttgttcatctttctgcatcatctttttttttttttttttcctgagacagggtctcactctgtcacacaggctggagtacactggcgcaatcatagctcattgcagccttgacctcctgggctcaagcaattctcttgcctcagcctcccaagtagctgggattacaggcatgcaccaccatggctggctaatttttaaattttttgtagagatggggtctcactatgttgcccaggctgctcttgaactcgtaggc

SEQ ID NO: 44806 - DNA, 534 bp, Homo sapiens
acacacacacacacacaccccaaacactgtcagtttgtcttctgtcaagtttaggttccacacctaccttcagctgttatgttttaacttcagactcccagcctggtcaactccacagtgagtttcatgtgtagattcactagaaatgtcagacggacaggcagcagaagagcagctaacaaaagggctaggcttgcaataaaagtctgccaaggggcaggagaaggtggggaggggacaccaaygctgaattacaaaaaaatttcaaacccaattctttgttcatctttctgcatcatctttttttttttttttttcctgagacagggtctcactctgtcacacaggctggagtacactggcgcaatcatagctcattgcagccttgacctcctgggctcaagcaattctcttgcctcagcctcccaagtagctgggattacaggcatgcaccaccatggctggctaatttttaaattttttgtagagatggggtctcactatgttgcccaggctgctcttgaactcgtaggc

SEQ ID NO: 44807 - DNA, 565 bp, Homo sapiens
cagcatcattgggagggtttttwaaagtgcagatccctggaccccacccacagagtttctgattcaagagatctggagtggagcctaagaatctacattttcaccaagttcccagtgaggctgatgctgctggtccaggagccacagcgtgaggaccattgatgtagggaggtgtaagtaattgtgacagggagcagggttataggggaagtgtttgcatcttttgtcaggagaacccttgaatcaggacctggatagttcctttccaacacatgggataggagagagaagaggggaggggaaggaggacagatcggggggaagagagcaggagttgggacctctccccatttccagttctgctgactgcctcctccaggctaggtgggagagccctggcccttctcactgggcaccttagaccatggaaacggccctggggtggagggaagtccacattctgcaccatgtttctggagtttgctgataaatcagcccactgtgtctccagcctgtctgtgcctgaggcctgctaagtagggagttttctgtctgtgttgggtga

SEQ ID NO: 44808 - DNA, 611 bp, Homo sapiens
ccgggtgacaaaactgaggcctggagcccagagagggcaaagtcagctgcagagccaggctatccagccccaggccatgctcatcttccctgctcccaagggcctttcagggatgctaytccccacccccaccaggatggttttcttggtaagctgctccctgcgtactgaccagatggctaggaggaaacttgagcaggaggtttttctttgcaggttggggcccagctctgtggcaactttggggcagtgataccgagtcacagatagcccgcctccaattctccttccctctgccctgcccccacccaggtagatccgattgctccccaggacacagctcctgcattcccacattgaggccgagtgggcagcccaccctattcagtcaccttgctttttataggtaagagcttagcacttcaacttcccttgtgccctaattaggctgtgctctttaatcagcgggacagtagtccttgtccccttggtacacagagaggcccacccagccagcactccaaggtatttgcctacttgttattttattgtttattttctcaaccttttaaaaactttgtgtaacctattttaattacttactacacata

SEQ ID NO: 44809 - DNA, 611 bp, Homo sapiens
ccgggtgacaaaactgaggcctggagcccagagagggcaaagtcagctgcagagccaggctatccagccccaggccatgctcatcttccctgctcccaagggcctttcagggatgctactccccacccccaccaggatggttttcttggtaagctgctccctgcgtactgaccagatggctaggaggaaacttgagcaggaggtttttctttgcaggttggggcccagctctgtggcaactttggggcagtgataccgagtcacagatagcccgcctccaattctccttccctctgcccygcccccacccaggtagatccgattgctccccaggacacagctcctgcattcccacattgaggccgagtgggcagcccaccctattcagtcaccttgctttttataggtaagagcttagcacttcaacttcccttgtgccctaattaggctgtgctctttaatcagcgggacagtagtccttgtccccttggtacacagagaggcccacccagccagcactccaaggtatttgcctacttgttattttattgtttattttctcaaccttttaaaaactttgtgtaacctattttaattacttactacacata

SEQ ID NO: 44810 - DNA, 582 bp, Homo sapiens
ttatgcatttgtgttgtagctggtaagtttgtgtcatttgtcacagcagccgtaggaagctcatacgcgtggaatgagggctttcaaaaggagacaagaggggagacggttgtgtcatttctttatctgtgtttgctcatttctggttttctggtgactttgccactttctacattgaggaggactctsttttctagggtataagtcaccaaatcttgggcagtgaattttgggtagtagatgtcctaacctcatgccctgtgaatatttgctagagaagacccacccccactgctcacacagtgagtcaccaaatctttggctgttccaggccaagtttcagtggccaagtggctcctaggggacgggaagggaacatgtgtggttaacagcaggctcacagctgcgccctgtgtcagctccaacccaacagcctggccagttcccaacagcattgtgaaagaatagatctgctgcccctctcctcccctgcccgcccctctctccttagggcttctgaggtttcccacgtcttcaccttgcaggcagctccccctactccagccccctcaaagcgctctc

SEQ ID NO: 44811 - DNA, 511 bp, Homo sapiens
tgttgcagagaagagttctcttcccccattgctgggttcatggctgaggccacgataacagaagccagsttaagagaaatgcataaccaaactcatttgatgtgcattttgcatgccactggaaccttcagaaatgaagacccaaagaaagagagaaaattgtgtgttttaatgtatagtcgtgcagaagtatgattagaggacgaaaagatagaatttagtggtgataaacggggaggaacttaagtctcctttgctcagcttcttccctgtgtgtctatgtcttcattcctttcctctgcatcctgggagtgtccttctggaatgaaggtttcatgacctgcttccaaggaaggccagagaattattctatgccctgcttcagggcagaaggggcaagtagaggctggagtggctttcctgcttctgcagtttcctcaaaactgcatattttggagtggttctgaacactgtcagtatcaaaggaaaattttgttttagggaattcttt

SEQ ID NO: 44812 - DNA, 511 bp, Homo sapiens
tgttgcagagaagagttctcttcccccattgctgggttcatggctgaggccacgataacagaagccagcttaagagaaaygcataaccaaactcatttgatgtgcattttgcatgccactggaaccttcagaaatgaagacccaaagaaagagagaaaattgtgtgttttaatgtatagtcgtgcagaagtatgattagaggacgaaaagatagaatttagtggtgataaacggggaggaacttaagtctcctttgctcagcttcttccctgtgtgtctatgtcttcattcctttcctctgcatcctgggagtgtccttctggaatgaaggtttcatgacctgcttccaaggaaggccagagaattattctatgccctgcttcagggcagaaggggcaagtagaggctggagtggctttcctgcttctgcagtttcctcaaaactgcatattttggagtggttctgaacactgtcagtatcaaaggaaaattttgttttagggaattcttt

SEQ ID NO: 44813 - DNA, 511 bp, Homo sapiens
tgttgcagagaagagttctcttcccccattgctgggttcatggctgaggccacgataacagaagccagcttaagagaaatgcataaccaaactcatttgatgtgcattttgcatgccactggaaccttcagaaatgaagacccaaagaaagagagaaaattgtgtgttttaatgkatagtcgtgcagaagtatgattagaggacgaaaagatagaatttagtggtgataaacggggaggaacttaagtctcctttgctcagcttcttccctgtgtgtctatgtcttcattcctttcctctgcatcctgggagtgtccttctggaatgaaggtttcatgacctgcttccaaggaaggccagagaattattctatgccctgcttcagggcagaaggggcaagtagaggctggagtggctttcctgcttctgcagtttcctcaaaactgcatattttggagtggttctgaacactgtcagtatcaaaggaaaattttgttttagggaattcttt

SEQ ID NO: 44814 - DNA, 511 bp, Homo sapiens
tgttgcagagaagagttctcttcccccattgctgggttcatggctgaggccacgataacagaagccagcttaagagaaatgcataaccaaactcatttgatgtgcattttgcatgccactggaaccttcagaaatgaagacccaaagaaagagagaaaattgtgtgttttaatgtatagtcgtgcagaagtatgattagaggacgaaaagatagaatttagtggtgataaacggggaggaacttaagtctcctttgctcagcttcttccctgtgtgtctatgtcttcattcctttcctctgcatcctrggagtgtccttctggaatgaaggtttcatgacctgcttccaaggaaggccagagaattattctatgccctgcttcagggcagaaggggcaagtagaggctggagtggctttcctgcttctgcagtttcctcaaaactgcatattttggagtggttctgaacactgtcagtatcaaaggaaaattttgttttagggaattcttt

SEQ ID NO: 44815 - DNA, 534 bp, Homo sapiens
tgcagactaccaataggatttattaatatatgtgaaataagccactatagatactaaggaaattccaaagttaaagagttcaaaatgtagggcaagtcagtgagagataaagaacgtgtgtgtgtgtgtatgtgtgtgtgtgtactctaccctttaaagttgacaatggtggctagagcaatttgattaggagacagatttcttcttactgagcactttctttctcagcagttggtctctaaggtgctgaacaaaactatatttgaaataatataatccctacagatctgtataagactttctttggtttctgtagagttcygtgaaggaatgataatcacgcttctgttccattcaattctcagagggattctgcgcatttaggaaacttaaatctttatcaacctgacagggagactgagagacagatacactgtttaaaatataggcaggtccaattctaatatcaattaatttttgtaccatattttgtcactcacttcaaaatgtatgaaaaacagacacatttttata

SEQ ID NO: 44816 - DNA, 582 bp, Homo sapiens
ccacaatataatctggaagtggttctatttttacttgaaagaggcatatcaactttcccatggttataattacaataacattgaaacaagtgtgctaatcgtcatgcggactgacttcaaagtttataattccaaagcctattttaatatgtccatgcattattttcatcaaaagcaactgaggagctcattaaacatacagatttctaggatccacatcagacattaagaattttaatctctgagttccagttaggaagtataaatacttaatagayaatgagaattctgggtgattttgttactgagattcatagtaagatacataggttctagataatgaggcaccaaatcaaagccaaggagggaagcttaaatggaaacagttggataagcctgagaaataaaaacaagtgacatttttgtttgagtgtggctccacaagggaatcacttggagaacttttaaaaacctccatgtgttaactctactccagacccatgacatgtgggtccttcacatcagtacttcaaaactattcccagatgatttttaataagaaaccaggtttttcattaacat

SEQ ID NO: 44817 - DNA, 563 bp, Homo sapiens
tcccccaagtggacagtgaggtcagttaaatcagagataatgtcttagataagtctgtaaccctcactgtaactgactatcagcatcgttatcaccatcaaaatgtatttactatgtgccaggtgctgctacagatgctttccaacaatcctgtgggatatatactactatttttcccatattacagatgaggacattgcatcataaacagagaacatcacagatatttgaaaacattgggcataaaatcatatttttgaatggataagtgtttcaccaataactatgctctaatacctttgcatatattcatccatcaatctagaatgttttccctgtccttcccagcctagcaaaattctcccaaccttcagggttcaactcaagcgttaccttttaacactaccctggcaagttcctccttccatgaattgtctcaaacatttgaaacatgtytgtattataacactgaggttgttataacctctaaatgtttgctgaattagaatgggtttcttaatggcagtctgatcaatatttttaatccttagaacagtaaatgg

SEQ ID NO: 44818 - DNA, 574 bp, Homo sapiens
aagttgttaaaaggtcaattacatattaaaaaatatagagaacatatttgtatcatatatatagaatatttatatgtaaaagaagttttcctttatatacatatatacttacacacacacacaatgatggagagagtaagaagacagagtacataaaagtcatcatttaactgaatccgtcgtagkgaattagtttttccatataaatgggtttttcagccaactgcagcttcaaatatcaaaatacttttagttaaacccgttttgaatggaagtatttccaaaatgagataatccctataaagcaggtagcatagaccctggatacacatcacatagcactttaggtgatatgacacttgagctcactgcaacagcaacaggaagtggctacaaaattttatgtggattatcagctgtggagatagcgcccctagtccctgcattaaggatcaactgtactaaagggaacaactagaataaaaactgtgaaaatggattagaattgaaaatattggtgagaacccatggttttcaacatattttaatatggaaatatagatgaatgtatgca

SEQ ID NO: 44819 - DNA, 574 bp, Homo sapiens
aagttgttaaaaggtcaattacatattaaaaaatatagagaacatatttgtatcatatatatagaatatttatatgtaaaagaagttttcctttatatacatatatacttacacacacacacaatgatggagagagtaagaagacagagtacataaaagtcatcatttaactgaatccgtcgtagtgaattagtttttccatataaatgggtttttcagccaactgcagcttcaaatatcaaaatacttttagttaaacccgttttgaatggaagtatttccaaaatgagataatccctataaagcaggtagcatagaccctggatacacatcacatagcactttaggtgatatgacacttgagctcactgcaacagcaacaggaagtggctacmaaattttatgtggattatcagctgtggagatagcgcccctagtccctgcattaaggatcaactgtactaaagggaacaactagaataaaaactgtgaaaatggattagaattgaaaatattggtgagaacccatggttttcaacatattttaatatggaaatatagatgaatgtatgca

SEQ ID NO: 44820 - DNA, 528 bp, Homo sapiens
ccatttttttttataattttggatcattttgtgtgttccattgatgagttgtggagtgcagcccttttaacaacggaagctttaaagactcaggaaggaccaagtggttgtcaggccctttgtgaatccacgcttaacattgaatttacatttttttagataccaactttgtttttccaaattaaatgcattgcactgtttattaaatagatcaccgtatgggagttgatttggatcagtcttatggagttcattcagattgcatattctcacagtgtcagcactagctgatttaacrtgcacatcggctagggcattcctttgatattcagattcagttttacaggtatcatcttcaatcttaatcataacgatctgtgatgataacagtgttaacaggatagctgaaaggagttcatctaactggagtcccaatagaagtgagaaacccctattgtttattttttaataatgtaatttttattatgcatatttgtctttttttttctttttctttttctttttttc

SEQ ID NO: 44821 - DNA, 528 bp, Homo sapiens
ccatttttttttataattttggatcattttgtgtgttccattgatgagttgtggagtgcagcccttttaacaacggaagctttaaagactcaggaaggaccaagtggttgtcaggccctttgtgaatccacgcttaacattgaatttacatttttttagataccaactttgtttttccaaattaaatgcattgcactgtttattaaatagatcaccgtatgggagttgatttggatcagtcttatggagttcattcagattgcatattctcacagtgtcagcactagctgatttaacatgcacatcggctagggcattcctttgatattcagattcagttttacaggtatcatcttcaatcttaatcataacgatctgtgatgataacagtgttaacaggatagctgaaaggagttcatctaactggagtcccamtagaagtgagaaacccctattgtttattttttaataatgtaatttttattatgcatatttgtctttttttttctttttctttttctttttttc

SEQ ID NO: 44822 - DNA, 575 bp, Homo sapiens
gaaacaatttttattagtttttggtttgccctttcactgcttttttttttttttttttgacaatataaggaaagacatatatgggtacctatttttgtctttcttacaaaaaaaaaaagaaaagcatactattcaacattttattactccagtaggcagcctctaaattgggccctaagacttgatatcgggccctgtgtaattcctccttcttagtgtgggatggactttcccgccccacccccgctccgccgccaacttctagtgaatacagcagaagtgatggagtgttcttcctgaattaagttataaaaagactgtggcttcttatatgctgagtcayctctattggattgcttgccctggagaagccagctaccacagtgtgagcaatcctatggagaggcccatgcaaatgagcctggagggtgaccatctgaggctttccaaaagccatgcgagtaaactcagaaatacatccgcccagttgctttaggtggccacaccctggcagtcactgagagagcctgagctaaaaccagccagctatgctgctactagttgtttttcaacaa

SEQ ID NO: 44823 - DNA, 600 bp, Homo sapiens
gattyctttttttgttttttagagacagggtctttctctgttgcccaggctggagtacagtggcacgatcatatcttactgtagcctcaacttcctgggctcaagcgatcctcctagctcagcctccagaacagctgggactacaggcacatgccaccacatccagctaatttattttatttttttatagagttagggcctcactatgttgcccaggctggtttcaaacttctggcctcatgagatcctcctgccttggtttcccaaagtgttgggattataggcatgagcctccgcacctggccagagatttcattcccagtaacatcctccctggctggcaacttcccacaggcagtggcgtggactcctctcgcattcaggcctgcaagtggaggctgtccacctgatccattttgagcagggagaaactcagagggtgttgggaaggactgaggcagaaatgactccccaatttctttcctgggaactcaggcagaaaagaggtcctttccctcagctctgcctccacaaaaatgtcacagggctgtttattggctgtgatactgggacttgagatgggaatcctacctttgaaca

SEQ ID NO: 44824 - DNA, 600 bp, Homo sapiens
gattcctttttttgttttttagagacagggtctttctctgttgcccaggctggagtacagtggcaygatcatatcttactgtagcctcaacttcctgggctcaagcgatcctcctagctcagcctccagaacagctgggactacaggcacatgccaccacatccagctaatttattttatttttttatagagttagggcctcactatgttgcccaggctggtttcaaacttctggcctcatgagatcctcctgccttggtttcccaaagtgttgggattataggcatgagcctccgcacctggccagagatttcattcccagtaacatcctccctggctggcaacttcccacaggcagtggcgtggactcctctcgcattcaggcctgcaagtggaggctgtccacctgatccattttgagcagggagaaactcagagggtgttgggaaggactgaggcagaaatgactccccaatttctttcctgggaactcaggcagaaaagaggtcctttccctcagctctgcctccacaaaaatgtcacagggctgtttattggctgtgatactgggacttgagatgggaatcctacctttgaaca

SEQ ID NO: 44825 - DNA, 600 bp, Homo sapiens
gattcctttttttgttttttagagacagggtctttctctgttgcccaggctggagtacagtggcacgatcatatcttactgtagcctcaacttcctgggctcaagcgatcctcctagctcagcctccagaacagctgggactacaggcacatgccaccacatccagctaatttattttatttttttatagagttagggcctcactatgttgcccaggctggtttcaaacttctggcctcatgagatcctcctgccttggtttcccaaagtgttgggattayaggcatgagcctccgcacctggccagagatttcattcccagtaacatcctccctggctggcaacttcccacaggcagtggcgtggactcctctcgcattcaggcctgcaagtggaggctgtccacctgatccattttgagcagggagaaactcagagggtgttgggaaggactgaggcagaaatgactccccaatttctttcctgggaactcaggcagaaaagaggtcctttccctcagctctgcctccacaaaaatgtcacagggctgtttattggctgtgatactgggacttgagatgggaatcctacctttgaaca

SEQ ID NO: 44826 - DNA, 600 bp, Homo sapiens
gattcctttttttgttttttagagacagggtctttctctgttgcccaggctggagtacagtggcacgatcatatcttactgtagcctcaacttcctgggctcaagcgatcctcctagctcagcctccagaacagctgggactacaggcacatgccaccacatccagctaatttattttatttttttatagagttagggcctcactatgttgcccaggctggtttcaaacttctggcctcatgagatcctcctgccttggtttcccaaagtgttgggattataggcatgagcctccgcacctggccagagatttcattcccagtaacatcctccctggctggcaacttcccacaggcagtggcgtggactcctctcgcattcaggcctgcaagtggaggctgtccacctgatccattttgagcagggagaaactcagagggygttgggaaggactgaggcagaaatgactccccaatttctttcctgggaactcaggcagaaaagaggtcctttccctcagctctgcctccacaaaaatgtcacagggctgtttattggctgtgatactgggacttgagatgggaatcctacctttgaaca

SEQ ID NO: 44827 - DNA, 974 bp, Homo sapiens
gacaagagtgcagccgctccattcggatcctggctctgacacttacctggaaaatgacttaaccattcccaggatcagctgtttgtctgtaatttaggtagtttaatggcacttgtgtcctagagttgtttagaaggttgaataatatggagcacttaacatacttagcacctagaaacacttcctaaatattagttgctgctgttgttatcgttattaaaatttctgcctaagrtctcatttcagggagcccaactcaatctttgacaagcttaaacaaaaattgcttttcttcatttattcacttacacagcaaacatgaattgagcctgtactgtgtttccagaactgtgcaggaccagagaggcacaggtgaaggaagcaaggctctggctctactggggaaacagcaagaagattgctacaatgaggtgggaagagggctggactagagagaagccctgattagtgtccttgctacctttctctgggagagccaaggcaggcttcctggaagaggtgatccttggctgaaacttcgatgaagaaaaggaaagagcgcagtggttagggaggaaagggcattctgggcagatgaaatgacatgtgacaaaatatgggtgatcatggcatgttaggaaaatagcagggtgttcaacatgattggagcactgtgtgtgtgtggtgagggggagaattgaggttgtcaagaagtggttctcaactgagcatagttttgcctcagaggggacatttggtaatgtctgcagacattttttgattgtcacagcccagccgagaaggtactactagtatctttttggtagaggctagagaggctgctaaacatctaacaatgcacaggacaggcctctgtaacaaaaaagtatccagtcaaaaatgtccacagtgttgagaggtttaggtaagtaggcgctaaaacataaggagactgtgcctgagagcaagaagga

SEQ ID NO: 44828 - DNA, 570 bp, Homo sapiens
ataattaccatccagcttcacatataaaagctttgaagaggataccacatcttattgaaccaaagatatcattgattgtaaaatgtgtactgatttctggaatgtgaaaaatatgtatcttagaattattgaaacatgacacattactcatttgatatttcaatcagttgtgagataaaatatcctatgtatttacagaaaaagagcagaacccasgttttcagagtcacatagctaataaggggtagagacataattcaaatccatatctgtttgacgattatgttcaaactcatcttaattcaatgttgtttcttcaattcattgcacagatagtagataaaaagtgttattgaataacatgcttatagaactcgatagctgttgacatgtttgttatactcctagtaattcactaggtatcactaggcctgtttttataaatgggaataaccgggcctaaaaaaattgaatgactcactcaaggtcatataattagaaagtaacagagccaggagtgaaacccaagataaatgactctgaatccagaacatgtttgactaaagtcag

SEQ ID NO: 44829 - DNA, 486 bp, Homo sapiens
ggacatgaactcatcattatgcccactttttgaagtaacascatgtgtggttttgctgtggggagcagggaacaccgtgccatcttcctccatgattaatgggcttgcattattaaacagctactggtggaaggggccacaggtacaacaccttttctactgaggcacccaacgtgtgaactttcatttgcagccaacatttgctggaggaaggctgagctcaccaccacattttacttactgaaattaatcatgtcaccacttcaatagtaacctctattacatatctaattaccaaccctgtgcacggactttttatgtaacttttaaaaatttctatttcagtcatgcttagattttttaatacttaaatgctctaccaggcaaaggacgataatctgtaactattgtggttatcagagtatacatttttatgggtttttccccacaataggtagtcaaagaactaagaaattttactggaat

SEQ ID NO: 44830 - DNA, 1455 bp, Homo sapiens
ttttcatgctgctgataaagacatactcaagactgggtaatttatgaagaaaaagaggcttaatggactcacagttccacacagctgagcaggcctcacaatcatggtggaaggcaaaaggcacatcttacacggcagcagacaagaaagaatgagagccaagtgaaaggggaaatcccttatagaatcatcagatctcacaagacttactaccatgagaacatatgggggaaaatgcccccatgattcagttacatcccaccggttccctcccacaacacgtggggattatgggagctacagttcaagatgagatttgggtggggacacagycacaccatatcagatggagaccatcaagaacaccttagttagtgtgtgtctgctccctcctcctaaaaataacagtaatgcttgcccttcctacctcctactgacgtgtggccaggaatcactgtgagaatgagaaagtgcagcccttgaaggtgagctcaaagggttaagcaggtcccctttgggctggggcagccaggaagatgcttcctggtgacctgagaacatcatgacatccccgcaaggttgctactgcctagtagagaaatctgttttcatctcagatgtaatccaaccacaaagacattgaaaatagccctcctgctgcaagcagacagccacagggtgctcaccctactgttgtttataataccaaacattcagaaacaacctatgctgtccaacagccctcagatatatacagaacgtctatacagtgggatactaatgtattttaaaaataagagaacggcctgaaaatatgctcaagaagccatgttatgtggaaaaagcagacggcaggttcctcagggtctcctgtgatgtggaccaaaatgttgatgcttctatttctgctgcaagatcctctctcctttcagctcatctgtgttttctaaattttcaactgtgcttgaatgagtaaagaaactttggcttgttctatttgtcttgctttgtgtttagcctctcttcaccacagtacagccgagaattccaggggccaaaatgctgaccgagcagccggcatgggtcagaacacagagctgcagcactgggtaggttattaataagtaattagcggctagcatttctcagagcactttggaaggaagtaatgcctcctagtccgccccacagaaaagacttcagatgtggaactttgagcaagctcaagcacagacttaaaaaagaaacagcccagcccacgagagcctgcttcaaccagaacagcatgaaaacggtggaaaagaatccgcagaaccaggctaaggggaaagacagggaccagcacaaaccctgcttctttgaaggggatgtcagcagtaatcggggagcaagaagccttcattaggactcagttgtatagcacatgtgatctatggtaggtgagcaccaaatgca

SEQ ID NO: 44831 - DNA, 521 bp, Homo sapiens
cagtgctctccccagatctcaaggtgtgcctatgattctgatgagagatgccattatttattwggggtatgtgcgggttgtccttgagttcacaaaagcacttttattaacccagaactccaaattgcccatgttctgaaggacaagctggggagtattgggttacaaaccatgaaccactccaaatccccatttcctcatctgggaaggccagatgattccatttctaaagagctttccaggctatccctctgtgattctatgatcttaatgtgtctattgtgagtttgtcaaaggagagtcctctatcaggaacaaccaagaagttgctgatgagtctaaaccattctactcagaatttctcaactcatcccagtagctgtccgctccaaaatgagactataaaaaataaataaaataaaaaataaaggacatctctaaataccatatgaaactttgactttatctcctcatctattggtttcccaaaaggagtaaatttgacttagcatcctgttcca

SEQ ID NO: 44832 - DNA, 521 bp, Homo sapiens
cagtgctctccccagatctcaaggtgtgcctatgattctgatgagagatgccattatttattaggggtatgtgcgggttgtccttgagttcacaaaagcacttttattaacccagaactccaaattgcccatgttctgaaggacaagctggggagtattgggttacaaaccatgaaccactccaaatccccatttcctcatctgggaaggccagatgattccatttctaaagagctttccaggctatccctctgtgattctatgatcttaatgtgtctattgtgagtttgtcaaaggagagtcctctatcaggaacaaccaagaagttgctgatgagtctaaaccattctactcagaattyctcaactcatcccagtagctgtccgctccaaaatgagactataaaaaataaataaaataaaaaataaaggacatctctaaataccatatgaaactttgactttatctcctcatctattggtttcccaaaaggagtaaatttgacttagcatcctgttcca

SEQ ID NO: 44833 - DNA, 538 bp, Homo sapiens
tgcatcttataattgttccatgtgactgtattacatatttttgaaaactactccgtggcatattgttaggaagtttcagaaaatgcaggaataaaaagagagttctagaaccttttatagaaggaataatttacttttcagatctgcagtggtacgaaggtccaacaccagccccatgggcttcctccggccgggatcatgctccccagtaccagcagacacagcacagacagttggacgaaggctctccactgggtcttctaggccttactcaccttcccctttgggtaagtagagtttaaaaacagttgttttcaacctttttttcactgtaataaatctgacatgacacattttctttaggaacttcggctcatgatggcagtgattctcagctgattggaggccataccccgtccctccatctttaccccaatcccaactccctcttttcttttctttttccttttctttctctatttgagacaaggtctcrctctgtcgcccaggctggagtgcagggggcatgatctcggct

SEQ ID NO: 44834 - DNA, 603 bp, Homo sapiens
ataactaataatgttgagcatcttttctcctgctttatgggccgtttgtgtgtcttctttggagaaatgtctgttcaaaactttgtacattttttttagctgggttatttatcatattgttaaattgtatgaattctttatgtattctagatactaggcccttatcagatctatagtttgcagatattttctcccattctgtggattatctttttacttttttgatggtatgcaaaagttttaaattttgatgaaatccaatttatctatttttttcttttgttgcttatgcttttggtattatactatccccggctgttcttaaaaactgctggatcatctgaaatctacygaaagagttccagtacctaatttcctagaatcatgtaactaaatccttggggagctttgaaattcatttagaatagcatttgtagtagctcagtattcttgagtgttttgtgcactgaataagcctgattcttctatctgaagatcttgttcatatgtaaaaaactccttctttgtgtgtgcatatatatgtatgtatacagacatacatgtatatatatatatatatttttaaataatatttaaaatttg

SEQ ID NO: 44835 - DNA, 1599 bp, Homo sapiens
ttcacctgaaatggagatggagataagtgttaatatataaaaacaattatttgtgggaggcactgaatccatataatttcacaaaaacaaacatggggagtatggctgtagactatwacacaaatgttataagttctgacaaatacagaaaagggataaaggaagagaagaatggcttattgctatttttctgtgtttcttatctggtacggtggaaaagagtgtagatacagcaagtgaagtgcctgatcgaggcatatacagggggaagctgacagtcggggtggactgcccttacaaggaagaatattttatcactgatattgtattattggtgcatggtagtaataatcatcagattgatttatatatggttttattatcattttaaaattttctaaagaacagtgcacattcttattaaaagcatctggcatggacagctcccacagcctcacccttggtaatccactggctaaggtacaggtatatttaccattacaaagcaaacactaaaaagacaatattatcagctaaatgaggaagcagagtagagggaggcaaaaggaaaggtgaaatatatgtgctaatttcatctttggtcattgtctggaattaattgctactgcaacaaatatgccattgtgactttgaataggcaaaacttattaaagaatgatccctgcagcacaaaccctaaaggaattattcatagcttatgacaattaaaatcacttctattccttaaatgaaacaaaggattaaatatactatgcaaagctgtaggtatgaatgtaatcactaggaaaaaaatcttaaaagacttcagcaaaacccagatataaaacaaaaagaaaaagaaacaaaagcacacagtgaaagatttatttttaaaataattaaagtttaagacaccttttcccttaagaaaaatgagaaattctcttctccacagccgtcacagtctcatcccttcctggctcacttttcttactttgttccttttccctccatgccttgaatgcaaaagccatgaaaaaaaaatactcatttctcttttgaaagacttggggtagagaagttggctctatagcagagaaacacaaaattttatacccataactactatcatcaattgttgctattacattgcttgctttttaattatgtccaggggttgatcaagacttagatcaaatatctagctgtgttactgaattatctcagtgaggtgtggcaagagcacaggctctggataatgtttctaagtttaaaatggacctttttgctgggcgaggtggctcatgcctgtaatcccaacactgtgagaagctaaggagggcggatcactaaagcttacaagttcaagaccagcgtaggcaacatagcaaaactccatctctacaaaaaatacgaaaactagccaggtgtggtggcacatgcctgaagtcccagttactcaggaggctgaggtgggaggaaggcttgagcccaggaggcggaagttgcagtgagccaaggttgcaccactgcactccagcctgggcaatagtaccagaccttgtctcaaaaaaatgtgcctttcccatttactctcca

SEQ ID NO: 44836 - DNA, 1599 bp, Homo sapiens
ttcacctgaaatggagatggagataagtgttaatatataaaaacaattatttgtgggaggcactgaatccatataatttcacaaaaacaaacatggggagtatggctgtagactataacacaaatgttataagttctgacaaatacagaaaagggataaaggaagagaagaatggcttattgctatttttctgtgtttcttatctggtacggtggaaaagagtgtagatacagcaagtgaagtgcctgatcgaggcatatacagggggaagctgacagtcggggtggactgcccttacaaggaagaatattttatcactgatattgtattattggtgcatggtagtaataatcatcagattgatttatatatggttttattatcattttaaaattttctaaagaacagtgcacattcttattaaaagcatctggcatggacagctcccacagcctcacccttggtaatccactggctaaggtacaggtatatttaccattacaaagcaaacactaaaaagacaatattatcagctaaatgaggaagcagagtagagggaggcaaaaggaaaggtgaaatatatgtgctaatttcatctttggtcattgtctggaattaattgctactgcaacaaatatgccattgtgactttgaataggcaaaacttattaaagaatgatccctgcagcacaaaccctaaaggaattattcatagcttatgacaattaaaatcacttctattccttaaatgaaacaaaggattaaatatactatgcaaagctgtaggtatgaatgtaatcactaggaaaaaaatcttaaaagacttcagcaaaacccagatataaaacaaaaagaaaaagaaacaaaagcacacagtgaaagatttatttttaaaataattaaagtttaagacaccttttcccttaagaaaaatgagaaattctcttctccacagccgtcacagtctcatcccttcctggctcacttttcttactttgttccttttccctccatgccttgaatgcaaaagccatgaaaaaaaaatactcatttctcttttgaaagacttggggtagagaagttggctctatagcagagaaacacaaaattttatacccataactactatcatcaattgttgctattacattgcttgctttttaattatgtccaggggttgatcaagacttagatcaaatatctagctgtgttactgaattatctcagtgaggtgtggcaagagcacaggctctggataatgtttctaagtttaaaatggacctttttgctgggcgaggtggctcatgcctgtaatcccaacactgtgagaagctaaggagggyggatcactaaagcttacaagttcaagaccagcgtaggcaacatagcaaaactccatctctacaaaaaatacgaaaactagccaggtgtggtggcacatgcctgaagtcccagttactcaggaggctgaggtgggaggaaggcttgagcccaggaggcggaagttgcagtgagccaaggttgcaccactgcactccagcctgggcaatagtaccagaccttgtctcaaaaaaatgtgcctttcccatttactctcca

SEQ ID NO: 44837 - DNA, 619 bp, Homo sapiens
atttttcatttttaaaattagcaatttagtttagaaattagtaaccactaaaacacaagtatgtcatctatatcatttgtgccatttaaatatacatctagtttttcttattaaataaataaataaataaataaaagcctccaggcaaaagggaaacagagaaaggaactgcagataaaaggaggacatcaccaaacacactttgcttcagcaaaaaaaccataacctaatttcagtggtaattgcagatacaaaaatctgcctatgcccacctctttacatttcaaagacaaataaatttagttgtgaagataatttactacttaccaatcctgctattggtgtagacagtctattgatcttcttaatgacgccaggtttaagcttattaatcaaactgaaagtaaataaataacagatgcaattacaagatgccaatatcaggttttttgttagcattctcaaaaatcacatatatcactattccctcccctcaatgtgttatacagagagccaacagcccatcaaaaagcaaataaccaagatatcaagtctagagacaaagaagagcaccacayacaatggtgagttgttctccatagtctatatcctttatgtg

SEQ ID NO: 44838 - DNA, 590 bp, Homo sapiens
atgagggatgagcaggagtcagatcttgatggagcttagggggcccgaagctcctcctgtaggcgaaggaactcattgcagttagctgaggagtggccagagckgcacttgaaaagggtcaccctggcccctcatcttccctagcactgagaggctagcagcccctgggcacactggtgggggtcccacctccatgcctttgctcactccccgccttctgcctgaaactcttttcctccctgcactcctgctggatacctgggccatctgtttgaagaatcaagtcaggggctgggtgcagtggctcgtgcctctaatcccagcacttcgggaggctgaggtgggcagaccacttgagatcaggagttcgagaccagcccaggcaacatggtgaaaccctatctcgtctctactaaaaacacaaaaattagccaggcgtgatggcaggcacctgtagtccccagctactggggaggctgaggcaggagaatcgcttgaacctgggaagcggaggttgcagtgagttgagatcgcaccactgcactccagcctgggcgacagaacaagactccatctcaaaaataaaaaat

SEQ ID NO: 44839 - DNA, 1446 bp, Homo sapiens
ttttaatcagtgacagactacacatacagcagtggtcccrgaagatcgtaataccatattttactgtaccttttctgatttatatttaaatacacaaatacaaggcattgtattacaattgcctgcagcattcagtatagtaacatgctatacagtttttagcctagaagcaataggctataccatatcgcctacctgtgtagtaggctataccatctaggtttgtgtaagtatactctatgtcatttgcacaacatcacctaacaacacatttctcagaatgtatcctcatccttaagcggcaacccatgattgtattatgaaaagcaaagcatgaataaggacatcaacgttctaatttaagtgataattctttcacttgtaggtattacaccttgaatcagttattaagtctctttacaggctcgtttgtttttaaagtctccattcttattcaacttcagtagcactgagagtcttactataggccttgcttaacttaggaaggaaaggacacttttaagaagaaaatgggcagaacaaactccctgcatcttctccattatcggcatagacgacttcttttgaaaatatcatatagagttttacctttttcattttaaagctggaagtcataaatcttatcatctgcctccatgttaaaataccagcattgtcacagtgccaccatcctgggagggagggtcccttgggttattgcaaaactagagggttatgatgtacagtttaagctaatgaaggtaggcttccagtcaggatgtggagtcactccctgcggtgaggccgttaaatagccaggaatgagacatgtctataattagagaagcattaggcgttagtgatcccagtgaccagggagcctgtgcccaatggcctagtcagactggctggctacccacccaaagctatttcctccatcattcaaagtcagaagcaatgtaatgaggggtggactaacaaattccatgagctgaaactatccattcaaaaaaataaataaggtttctgaaaaataggcttgagcatttcatatgcttagagaaaaacaaaagcaaaaacaaaagcatggtatccactaaagcagcagattgagaaaaatgtacctcagaactatgagtagcaaaccacagactattatcacatcattgttctgaatcatttctatggtctgaaaataaaagccaagaaaactgcaacaagtcattacgtttctctggaatatatatttatttaaaatgcagtaagtgttccttgtcagggatcccagtataatcagcaaggcttataggcctagaatattttgaaaatgtgggctgtgagaaaggtggcagaaatgctagtctaccttcattgtttcacagatgagggaatcaaagctgaggagaaatagaaggaaaattaatgtaaccatatctattaattaaa

SEQ ID NO: 44840 - DNA, 1446 bp, Homo sapiens
ttttaatcagtgacagactacacatacagcagtggtcccagaagatcgtaataccatattttactgtaccttttctgatttatatttaaatacacaaatacaaggcattgtattacaattgcctgcagcattcagtatagtaacatgctatacagtttttagcctagaagcaataggctataccatatcgcctacctgtgtagtaggctataccatctaggtttgtgtaagtatactctatgtcatttgcacaacatcacctaacaacayatttctcagaatgtatcctcatccttaagcggcaacccatgattgtattatgaaaagcaaagcatgaataaggacatcaacgttctaatttaagtgataattctttcacttgtaggtattacaccttgaatcagttattaagtctctttacaggctcgtttgtttttaaagtctccattcttattcaacttcagtagcactgagagtcttactataggccttgcttaacttaggaaggaaaggacacttttaagaagaaaatgggcagaacaaactccctgcatcttctccattatcggcatagacgacttcttttgaaaatatcatatagagttttacctttttcattttaaagctggaagtcataaatcttatcatctgcctccatgttaaaataccagcattgtcacagtgccaccatcctgggagggagggtcccttgggttattgcaaaactagagggttatgatgtacagtttaagctaatgaaggtaggcttccagtcaggatgtggagtcactccctgcggtgaggccgttaaatagccaggaatgagacatgtctataattagagaagcattaggcgttagtgatcccagtgaccagggagcctgtgcccaatggcctagtcagactggctggctacccacccaaagctatttcctccatcattcaaagtcagaagcaatgtaatgaggggtggactaacaaattccatgagctgaaactatccattcaaaaaaataaataaggtttctgaaaaataggcttgagcatttcatatgcttagagaaaaacaaaagcaaaaacaaaagcatggtatccactaaagcagcagattgagaaaaatgtacctcagaactatgagtagcaaaccacagactattatcacatcattgttctgaatcatttctatggtctgaaaataaaagccaagaaaactgcaacaagtcattacgtttctctggaatatatatttatttaaaatgcagtaagtgttccttgtcagggatcccagtataatcagcaaggcttataggcctagaatattttgaaaatgtgggctgtgagaaaggtggcagaaatgctagtctaccttcattgtttcacagatgagggaatcaaagctgaggagaaatagaaggaaaattaatgtaaccatatctattaattaaa

SEQ ID NO: 44841 - DNA, 603 bp, Homo sapiens
tcataatatcaagtattagagaggtgtgggttaagaattcataaacagttgcttgtaaaaacatttgggaaaaccatataccatgagacatataaaagactgttcttagcaggatcggttgtcttaacaaaaatactagtaatgacgctagtgggtatcaatagaaacatggattaaaaaaatacagtacattcagaaaatgaaatatgttaatatgttacagcagtgaaaactaatgaatccaaatgcacgcaatagcatgaagaacccttaaacatagcattgagtgcaagcaagttgcaacctacttcatttttctaaaattcaaatgtaaacaatatattttgtgataagcatatgtgaggaaacttcttttttttaaaaaaggatctataagcgcttatctcaaaatattaggagaggggcaggaggaatataaaagataggaagaaacgagaatacaaaagaccgattatactagtcaggttctgtttcttaaataytgtggctggttcattggtattcattaagttttccataactcaggattatgttacatacatgattttgatgataatattatataattattgtgtggttaaa

SEQ ID NO: 44842 - DNA, 603 bp, Homo sapiens
tcataatatcaagtattagagaggtgtgggttaagaattcataaacagttgcttgtaaaaacatttgggaaaaccatataccatgagacatataaaagactgttcttagcaggatcggttgtcttaacaaaaatactagtaatgacgctagtgggtatcaatagaaacatggattaaaaaaatacagtacattcagaaaatgaaatatgttaatatgttacagcagtgaaaactaatgaatccaaatgcacgcaatagcatgaagaacccttaaacatagcattgagtgcaagcaagttgcaacctacttcatttttctaaaattcaaatgtaaacaatatattttgtgataagcatatgtgaggaaacttcttttttttaaaaaaggatctataagcgcttatctcaaaatattaggagaggggcaggaggaatataaaagataggaagaaacgagaatacaaaagaccgattatactagtcaggttctgtttcttaaatactgtggctggttcattggtattcattaagttttccataactcaggattatgttacatayatgattttgatgataatattatataattattgtgtggttaaa

SEQ ID NO: 44843 - DNA, 606 bp, Homo sapiens
ttagaatttattttattaatctgatgaaattacttttgtttttccaaaagttaatgataatgatagattaataatgtattgttccaaatagtaatatatttgcattttaacctttccttagtccttgcatagaatcaaggtacactgtaaggagaagtgtttggaggctgatgagtcagttgtcacttgtcctactccattgtcaggtacttagaggtattggtatggctgttgatttctttagttttgagaggcaagtctcaaaacagaaatcagagtgtgctrtcggaaatcttcaaaacagaaacttcatcatgatgaagtcttattcatcattcatgtattaacagctgttctctcttctcacatgtagttctactttagatagcatctaaagcacaggcagaccgtattgtagagttaaaaaaagatgtctgtcttcaacatttatgatagtgggtaagaaatcccaaggtttgtgtttttgttttttttttccaaatgcattctgttaaacagagacatgttctgggacaccttggtcaaatttccccatataagtacagcatttttttttatcacacaccatacaattggaaacagatg

SEQ ID NO: 44844 - DNA, 618 bp, Homo sapiens
tgctgaacaattttgctagtagctattgaaacccatgtaaatacttttatgctatttcctcaattacttaactagtaaaatataactgacaaacatacagagtgatggcaaaatagaacagtcaaaacctttctttaaatcctgcgggtaaagcaaaggtgagaaaattcatctctaagtaaggacgaaagtaaaatgagttactagtgaaagagataaaaaatatgaggggaagtattttttaaatcactcttgggggaaatattgagaagaaactggagagcggtataaagttaagatttaaatttttttctaaatgaaaatgcattgcataatgaagacaaggagaagattaaagacaggctaaaatattttaaagtcacaattacaatatataaagatattagaattctactkatatgaacattgagattgtataaagtaatgacatccatgggaacaaaaagaggaaaaattgagttcacataaaatagttatgcattaggaaagcatttaaaatatgagtaaaatgcatgcttatgctgatatgttgaaaaataacagcaagaatgcacattccaagagtaaaaatagttattttttcatattcatatttac

SEQ ID NO: 44845 - DNA, 618 bp, Homo sapiens
tgctgaacaattttgctagtagctattgaaacccatgtaaatacttttatgctatttcctcaattacttaactagtaaaatataactgacaaacatacagagtgatggcaaaatagaacagtcaaaacctttctttaaatcctgcgggtaaagcaaaggtgagaaaattcatctctaagtaaggacgaaagtaaaatgagttactagtgaaagagataaaaaatatgaggggaagtattttttaaatcactcttgggggaaatattgagaagaaactggagagcggtataaagttaagatttaaatttttttctaaatgaaaatgcattgcataatgaagacaaggagaagattaaagacaggctaaaatattttaaagtcacaattacaatatataaagatattagaattctacttatatkaacattgagattgtataaagtaatgacatccatgggaacaaaaagaggaaaaattgagttcacataaaatagttatgcattaggaaagcatttaaaatatgagtaaaatgcatgcttatgctgatatgttgaaaaataacagcaagaatgcacattccaagagtaaaaatagttattttttcatattcatatttac

SEQ ID NO: 44846 - DNA, 618 bp, Homo sapiens
tgctgaacaattttgctagtagctattgaaacccatgtaaatacttttatgctatttcctcaattacttaactagtaaaatataactgacaaacatacagagtgatggcaaaatagaacagtcaaaacctttctttaaatcctgcgggtaaagcaaaggtgagaaaattcatctctaagtaaggacgaaagtaaaatgagttactagtgaaagagataaaaaatatgaggggaagtattttttaaatcactcttgggggaaatattgagaagaaactggagagcggtataaagttaagatttaaatttttttctaaatgaaaatgcattgcataatgaagacaaggagaagattaaagacaggctaaaatattttaaagtcacaattacaatatataaagatattagaattctacttatatgarcattgagattgtataaagtaatgacatccatgggaacaaaaagaggaaaaattgagttcacataaaatagttatgcattaggaaagcatttaaaatatgagtaaaatgcatgcttatgctgatatgttgaaaaataacagcaagaatgcacattccaagagtaaaaatagttattttttcatattcatatttac

SEQ ID NO: 44847 - DNA, 618 bp, Homo sapiens
tgctgaacaattttgctagtagctattgaaacccatgtaaatacttttatgctatttcctcaattacttaactagtaaaatataactgacaaacatacagagtgatggcaaaatagaacagtcaaaacctttctttaaatcctgcgggtaaagcaaaggtgagaaaattcatctctaagtaaggacgaaagtaaaatgagttactagtgaaagagataaaaaatatgaggggaagtattttttaaatcactcttgggggaaatattgagaagaaactggagagcggtataaagttaagatttaaatttttttctaaatgaaaatgcattgcataatgaagacaaggagaagattaaagacaggctaaaatattttaaagtcacaattacaatatataaagatattagaattctacttatatgaamattgagattgtataaagtaatgacatccatgggaacaaaaagaggaaaaattgagttcacataaaatagttatgcattaggaaagcatttaaaatatgagtaaaatgcatgcttatgctgatatgttgaaaaataacagcaagaatgcacattccaagagtaaaaatagttattttttcatattcatatttac

SEQ ID NO: 44848 - DNA, 556 bp, Homo sapiens
aggagttcgagaccagcctgagcaacatggcaagaccccatctctacaaaaaaaaatacaaaaattagccaggcatggtggcaccacctgtagtcctagctccttgggaggctgagatgggaggatcacctgagcctgggaggcagaggctgcactgagctgtgatcacactactgcactccagcctgggtgacagagtgagacgctgtctcatgaaaaaagaaaaaaaagaagaagaaagaaagagaaagggagggaggcagggaagggagggagggagggagaaggggaggggagagggcagtataaacaatatattgtttataattagggaggtaaatgacaaaaggagtccagagtgctggggaggtgggagaggcggagcaaggagcactgcttttcattacgcatcttctagcaacagttaaatattttaaagcatgaccatgaactscattgtcaaaaatgaaacattttaaataatttaagattatttatataatttttatagccttgtcctggaatttcttcatttttcaatatactgggagcctca

SEQ ID NO: 44849 - DNA, 544 bp, Homo sapiens
cacaaaaactgttctgtagtctacctctccactcagtaccaggtcttkaatgtcttcctatatcggtaagaaccagctgttttcaataataatttggtaattggttataaaatgagtaattaattgcactacgttattatccctttggtggttaaagccaccttcagcagcaggaacaagcatcagatattaagtgatttaaggatcagtttcctgagatgctacatgctgaaattctgtggatttctagattctgctttgttttttccatgtaggtatattctaggtggttttgttagggtgaaggcacagctgtctagaagcagttggggctggtgccagtgtttgactccagtgagtcttatgatttggtcttgactcttgaatctggactgtgtttcccctgaacaaaatgttacatagccttccagcctatctgggcagagggatcaccctcccgcccccgaagtattgtgaaaatgtggccacagcatagcattatggtttccactaaaaaacccctcccatttactcaacatttggc

SEQ ID NO: 44850 - DNA, 400 bp, Homo sapiens
tggagaggtaaacacagcaggtgggccccaccgaaggaatctcttgacaagctgggctttctcgtgacacaattgcctgttaatggattcagcatctggcagtttcaccaaaagccgactgccaatgagcctggctgctcgaaacccttgacactgctgatcacaaatgggtttccttttgacgccctgcgctgctcctgaaatggtcttgatcaaacaacagagtagtagttaaccgaaacccatgtcctagaattctcctccttccccacctcccgcaagcaaagtgatgtygatgtctgcaggggaaaatgagaatgggccctcaccccctagccctgcaaagactgtacacatttgtacaaagcctactgagtgctctgaaagtagcttttgctta

SEQ ID NO: 44851 - DNA, 1055 bp, Homo sapiens
ctgcctggaaattgtcccagtatcatttggctgatgtttgttaaaatatctttatatatattgatccactaatctgtttattgcatttattttgcctcctgggagagcttttcagatcctcatttaagtttttctttccttttcctttacatatgattctaataagcttggttttctggcttcttttaaatttatagcaaatattaaggggtggaaagatgttaataaactcagtgtaaagcgagagggagaaaacctataaaaacaaagaggcttcgatcttgaaaagctccgcaatgtaggactgtttagtgcagggaaacagtcatccttcctcattaggcccacaaggcattgyatctacagcctcacgcatcattcatttgttcattgattcattcagcagaccttgattaccttgaatgccaggtaccgagctaggagccaggagcaccttggtgagtggaacagacaagatccttgcttacttggagcttaacaagcatggggtgtgggtggcggaggaccagccaaaagcaagcaaggaaataataaaaataattacagattgtgtcatcaaggaaagaaaccaggagctgagagaatccataatgggaatacggaagagggaatcttggcttatcaagaagtcagatatgtgtagtctctttgccttgacctgactgtaaattccaccaagtggggctgggtctgtttactcaccctgtagcaccaggactggcctatggcctgggcagtagttggtgctcagtaaacagtggtggaatgaatggatcctctgtatcggagggcagggaagttccagtcattggagaaggagtttcaaagggtaaaattaggattttttttttttttgagacagagtttcactcttgttgcccaagctggagtgcagtggtgcaatcttggctcactgcagcctctgcctcctgggttcaagcaactctcctgcctcagcctcccaagtagctgggattataggcgcctgtcaccacgcttggctaattttttgtattttttgtagagatgatgtt

SEQ ID NO: 44852 - DNA, 589 bp, Homo sapiens
ctcattcgtagctccaagtacatagagagcagggcttgacacactttgtctgtaaagggtcagataccaaatattttagactctgtgggccatacggtctctgtccctgctactcggttctgctgttgtagcacaaaagcagccatagacaatatgtaaatgaatgagtgtggctgtgttccaattccacttttatttacaaaaacaggcagcaggcctgtgggccgtaagttgctatcccctgttatagacagtcctagtcrtcaacttgacgtctcaaagaaagcagcgatttcatagaactgaggatattttcaggatcagtaataaactttaggggcatggctatgctcatttgaaatagtcatccttttaatgtaggcacatgtcagaaaggtacattgtattgtctgatgccatccctccaagatatttggaaaaatcttttggagtaagtagctgcaaataataaggactagggagagttaagagcaggcataagcccctgtcagtcacataaggtttgttatagtgaataggcaaggaatgatcattttggggtcttgcttttttcttgggctgtggggtg

SEQ ID NO: 44853 - DNA, 568 bp, Homo sapiens
tttttttttttttttttgagacagagtctcactgtcacccaagctggaatgcaatggtacggtctcggctcactacaacctccacctcctgggttcaagcaattctcccgcctcagcctcccaagtagctgggactacaggcacatgacaccacgaccggctaatttttgtatttttagtagagacagcatttcaccatrttggtcaggctggtctagaactcctgacctcgtgatccacccacctcggcctcccaaagtgccgggattacaggcatgagccaccgcacccagccgaggtctttcatattaatgattttccagtcgaaatatttaaccaattaaatgtttcatgttaataatttttgagtcaaaaacttaaccaattaaattttcagcattctcctgaaaactcttacatcctccactttatacaaggaaggaataaagtgcacaatgcccaggttctcttcctgctctcagattctgtgatttctttacagcaaaattcatccttatttattcaaaatgtattaaaacatatattacaggcaaagttttaatcaatg

SEQ ID NO: 44854 - DNA, 562 bp, Homo sapiens
tggcttcttacccaagaaaaattaaaactttggctacaaaaagacatgtacaaaaatcttcacaccagctttattttataataacacaaactgaatacaacccaacagatatccttagttgaatgggttaatgaattatgcaatatgtgtactcagtaatgaaagggtacaaactgttgatatacacaayagtcaatagtggttatgaatgctgaaacattacctgaagtaaaaaataaatccacgtttatgaatttgtagcacagataaacgaaataatgatgacagaaaccaaatacatccttttctggaagaatcaggcaatacactggaaagtagcatgcagaaactttagagagtaataaaattgtttttatcttaaagtggtatacatatatatgaacacaattatcaaaattcaacaatctgtgtacttaaaattagtacatattattgtatataaattgagtgcaataaaaatagtagtaaaacagtaaaaacataaaagtgcccattattatttgaaggactggctaatattacatttaaaagaactgctagg

SEQ ID NO: 44855 - DNA, 562 bp, Homo sapiens
tggcttcttacccaagaaaaattaaaactttggctacaaaaagacatgtacaaaaatcttcacaccagctttattttataataacacaaactgaatacaacccaacagatatccttagttgaatgggttaatgaattatgcaatatgtgtactcagtaatgaaagggtacaaactgttgatatacacaatagtcaatagtggttatgaatgctgaaacattacctgaagtaaaaaataaatccacgtttatgaatttgtagcacagataaaygaaataatgatgacagaaaccaaatacatccttttctggaagaatcaggcaatacactggaaagtagcatgcagaaactttagagagtaataaaattgtttttatcttaaagtggtatacatatatatgaacacaattatcaaaattcaacaatctgtgtacttaaaattagtacatattattgtatataaattgagtgcaataaaaatagtagtaaaacagtaaaaacataaaagtgcccattattatttgaaggactggctaatattacatttaaaagaactgctagg

SEQ ID NO: 44856 - DNA, 543 bp, Homo sapiens
ataggtcaatataacatatgtatataaattcttatttatattaaacatggttaaattttaatctcccatctgtttaaacatgggagattcaacatactcatttagctccctttcccttgaaatgccactaaattgatagcagagtttttattataaaaaggcaaacccacagaaataagaaaatgggagatgcttaacagctaccagttttggaaaatgagaatgcagacagacatttagtaaacttagcaaacctgaggaagctaaatcctaggctggcagtgggaattggagaagcaacctgattagtagctcagaatctccgtaaggcttggtaattgccaactgcaggaacctctggaagtggaggtgaagctaaacacagaagtggttgaaagtctgtttcagaagcagttagagctccttagctccctcagtgctagcccaagactggaggtttgttatttggcgaggatgaaacagagggcctctggactagggaaaacgcagaccttgctgaggrtgagctgctgtcatgaaagc

SEQ ID NO: 44857 - DNA, 753 bp, Homo sapiens
ttcctgtgctcccctatcctttggctggccttccattatattctgcttgtcttgctggggatcacaaagagacatgtctctgtgtttctctcccctccgcttttgagtccgttgaagacacaatttctctctgtcgggtgcttaggaggagctccatgaacatgtattgaattggacttagctgaacrggctgctggttggctgcccagagggggcaggctgtgttgctgggagccttccagctccctgcagcagtcatggggcagggttccccgagtccgtaatccccatttccacctactttcccttagttatttgattccctgtctgtcgtactcagcttaagtggagcatcccctttcctgggagacacgaagcaggaaacactggcaaatatcacagcagtgagttacgactttgatgaggaattcttcagccagacgagcgagctggccaaggactttattcggaagcttctggttaaagagacccggtaagaggacagagaagccactggtttctcaggtactgatcccttcctgtcgcctctgtcaaagacctgtcagtatgtccccactttgacatagctgtcatctgcactgttgtggtctaatccgggcaggtgctggaaagtgtggcctagccaagacgtggcattcatcttgtttgctcaagtctttctgctttcttctcctgttgaaatgtaaataatgtgtgtgtgtgtgtgtgtgtgtgtgtgtgtgtgtgtgtgtg

SEQ ID NO: 44858 - DNA, 573 bp, Homo sapiens
gcatgtgtcctctttgtgataaattactgagcagtagaataacaggatacctgtgtatattatactttagtaaatgtatttgaattcatttttgccattaggacaaaaatatattatatctgtgaattttaagtatatatttattaaatattgacaaatgtatgtcagtgtaatacaaatctctatgaatatctacaatatttgtccacatatgttttgtcttatcccctctctttttttcttctgggattccaattaggtataatagatatatgttggaccttttgatatggttctgtgggtctctgagactatcttttttcaagtatcttttttctctcttctttaaattcaataatactgatcttttttcaagttcactgtctcttcttctgttatcttcattctgcagttaaacctattgatgaattttttaatttagacattgcattttttttagttctagagtttatagttcattgctatagttttcctctactgcaatttctgatttttacaktattgcaaacctagatagattcggcctttaaccacatagattctgccattaac

SEQ ID NO: 44859 - DNA, 1904 bp, Homo sapiens
tgcatatgagcccttcatcagttaygcttgttgctctatcttctttccctctgtgggttaacttaaatagtcttttggcaaatgcgaattttaaactttcacgtagttcagtttattaaaatatttctatgattagcccaggtgctcatgcctgtaatcccagcactttgggagaccaaggcagatggatcacttgaggtcaggcgttcaagaccaggctggccaacatggtgaaaccccgtttctactaaaaatacaaaaacttagccaggcaaggtggcgggcacctgtaatcccagttactcgggaggctgcagcaggagaatcgcttgaacccagaaggcagaggttgcagtgagccgagattgtgccactgaactccagcctgggcaacagagtgcctccatctcaaaaaaaaaaacagtgtgtttttttgtgtgtatatataaaattaatgctttctatttccacttaagaagtgcttcccttgccccgccccgccgcgggacttggggcggcgctctacttctgcggagaaggatcgacgagctttccggagaaagatccgcgagctttccggagccggagccggggcgagcagccaaaatggcccgcggagtcccgctgggccgccccggagcagctgaaccgggggccgcacctgccaggccgacgggtctggcccagactggcgccgaggggttcgaggggttcgtgtgctgtggagacgcagaggatccaggcggtgcggtctgagtgaaagccaatggaaaaagtgtgacatttagaagcagaagacttagcttcaaatccctactctttcacttactaattttgtgatttggaaatatctgcgcaagatgttgacgttgcagacttggctagtgccagctttattttcctcaccactgaatctataggtgaacttctagatccatgtggttatatcagtcccgaatctccagttgtacaacttcattctaatttcactgcagtttgtgtgctaaaggaaaaatgtatggattattttcatgtaaatgctaatgacattgtctggaaaacaaaccattttgctattcttaaggagcaatatattatcataaacagaacagcatccagtgtcacctttacacatatagcttcattaaatattcaactcccttgcaacattcttacattcggacagcttgaacagaatgtttatggaatcacaataatttcaggcttgcctccagaaaaacctaaaaatttgagttgcattgtgaatgagggaaacaaaatgaggtgtgagtgggatcgtggaagggaaacacacttggagacaaacttcactttaaactctgaatgggcaacacacaagtttgctgattgcaaccaaaatgtgacacccccacctcatgcaccattgattattctactgtgtattttgtcaacattgaagtctgggtagaagcagagaatgcccttgggaaggctacatcagatcatatcaattttgatgctgtatataaagtgaagcctaatctgccacataatttatcagtgatcaactcagaggaactgtctagtatcttaaactgtttgcttagcattcctattgacaacttttctgggagtgctgttctgctttaataagcgagacctaattaaaaaacacatctggcctaacgttccagatccttcaaagagtcatattgcccagtggtcacctcacactccttcaaggcacaattttaatgcaaaagatcaaatgtattcagatggcaatttcactgatgtaggtgttgtggaaatagaagcaaatgacaaaaagccttttgcagaagatctgaaatcattagacctgttcaaaaaggaaaaaattaatactgaaggacacggcagtggtattgggggggtcttta

SEQ ID NO: 44860 - DNA, 1904 bp, Homo sapiens
tgcatatgagcccttcatcagttacgcttgttgctctatcttctttccctctgtgggttamcttaaatagtcttttggcaaatgcgaattttaaactttcacgtagttcagtttattaaaatatttctatgattagcccaggtgctcatgcctgtaatcccagcactttgggagaccaaggcagatggatcacttgaggtcaggcgttcaagaccaggctggccaacatggtgaaaccccgtttctactaaaaatacaaaaacttagccaggcaaggtggcgggcacctgtaatcccagttactcgggaggctgcagcaggagaatcgcttgaacccagaaggcagaggttgcagtgagccgagattgtgccactgaactccagcctgggcaacagagtgcctccatctcaaaaaaaaaaacagtgtgtttttttgtgtgtatatataaaattaatgctttctatttccacttaagaagtgcttcccttgccccgccccgccgcgggacttggggcggcgctctacttctgcggagaaggatcgacgagctttccggagaaagatccgcgagctttccggagccggagccggggcgagcagccaaaatggcccgcggagtcccgctgggccgccccggagcagctgaaccgggggccgcacctgccaggccgacgggtctggcccagactggcgccgaggggttcgaggggttcgtgtgctgtggagacgcagaggatccaggcggtgcggtctgagtgaaagccaatggaaaaagtgtgacatttagaagcagaagacttagcttcaaatccctactctttcacttactaattttgtgatttggaaatatctgcgcaagatgttgacgttgcagacttggctagtgccagctttattttcctcaccactgaatctataggtgaacttctagatccatgtggttatatcagtcccgaatctccagttgtacaacttcattctaatttcactgcagtttgtgtgctaaaggaaaaatgtatggattattttcatgtaaatgctaatgacattgtctggaaaacaaaccattttgctattcttaaggagcaatatattatcataaacagaacagcatccagtgtcacctttacacatatagcttcattaaatattcaactcccttgcaacattcttacattcggacagcttgaacagaatgtttatggaatcacaataatttcaggcttgcctccagaaaaacctaaaaatttgagttgcattgtgaatgagggaaacaaaatgaggtgtgagtgggatcgtggaagggaaacacacttggagacaaacttcactttaaactctgaatgggcaacacacaagtttgctgattgcaaccaaaatgtgacacccccacctcatgcaccattgattattctactgtgtattttgtcaacattgaagtctgggtagaagcagagaatgcccttgggaaggctacatcagatcatatcaattttgatgctgtatataaagtgaagcctaatctgccacataatttatcagtgatcaactcagaggaactgtctagtatcttaaactgtttgcttagcattcctattgacaacttttctgggagtgctgttctgctttaataagcgagacctaattaaaaaacacatctggcctaacgttccagatccttcaaagagtcatattgcccagtggtcacctcacactccttcaaggcacaattttaatgcaaaagatcaaatgtattcagatggcaatttcactgatgtaggtgttgtggaaatagaagcaaatgacaaaaagccttttgcagaagatctgaaatcattagacctgttcaaaaaggaaaaaattaatactgaaggacacggcagtggtattgggggggtcttta

SEQ ID NO: 44861 - DNA, 1904 bp, Homo sapiens
tgcatatgagcccttcatcagttacgcttgttgctctatcttctttccctctgtgggttaacttaaatagtcttttggcaaatgcgaattttaaactttcacgtagttcagtttattaaaatatttctatgattagcccaggtgctcatgcctgtaatcccagcactttgggagaccaaggcagatggatcacttgaggtcaggcgttcaagaccaggctggccaacatggtgaaaccccgtttctactaaaaatacaaaaacttagccaggcaaggtggcgggcacctgtaatcccagttactcgggaggctgcagcaggagaatcgcttgaacccagaaggcagaggttgcagtgagccgagattgtgccactgaactccagcctgggcaacagagtgcctccatctcaaaaaaaaaaacagtgtgtttttttgtgtgtatatataaaattaatgctttctatttccacttaagaagtgcttcccttgccccgccccgccgcgggacttggggcggcgctctacttctgcggagaaggatcgacgagctttccggagaaagatccgcgagctttccggagccggagccggggcgagcagccaaaatggcccgcggagtcccgctgggccgccccggagcagctgaaccgggggccgcacctgccaggccgacgggtctggcccagactggcgccgaggggttcgaggggttcgtgtgctgtggagacgcagaggatccaggcggtgcggtctgagtgaaagccaatggaaaaagtgtgacatttagaagcagaagacttagcttcaaatccctactctttcacttactaattttgtgatttggaaatatctgcgcaagatgttgacgttgcagacttggctagtgccagctttattttcctcaccactgaatctataggtgaacttctagatccatgtggttatatcagtcccgaatctccagttgtacaacttcattctaatttcactgcagtttgtgtgctaaaggaaaaatgtatggattattttcatgtaaatgctaatgacattgtctggaaaacaaaccattttgctattcttaaggagcaatatattatcataaacagaacagcatccagtgtcacctttacacatatagcttcattaaatattcaactcccttgcaacattcttacattcggacagcttgaacagaatgtttatggaatcacaataatttcaggcttgcctccagaaaaacctaaaaatttgagttgcattgtgaatgagggaaacaaaatgaggtgtgagtgggatcgtggaagggaaacacacttggagacaaacttcactttaaactctgaatgggcaacacacaagtttgctgattgcaaccaaaatgtgacacccccacctcatgcaccattgattattctactgtgtattttgtcaacattgaagtctgggtagaagcagagaatgcccttgggaaggctacatcagatcatatcaattttgatgctgtatataaagtkaagcctaatctgccacataatttatcagtgatcaactcagaggaactgtctagtatcttaaactgtttgcttagcattcctattgacaacttttctgggagtgctgttctgctttaataagcgagacctaattaaaaaacacatctggcctaacgttccagatccttcaaagagtcatattgcccagtggtcacctcacactccttcaaggcacaattttaatgcaaaagatcaaatgtattcagatggcaatttcactgatgtaggtgttgtggaaatagaagcaaatgacaaaaagccttttgcagaagatctgaaatcattagacctgttcaaaaaggaaaaaattaatactgaaggacacggcagtggtattgggggggtcttta

SEQ ID NO: 44862 - DNA, 692 bp, Homo sapiens
tactgtttgttttaatccattaaggcagcaaaaattttaaaaatttaaaaattagtaataatatataaagtggagaagtataaaggcaaatgggtatttttcacatatttctggtgggggtgtagatgggaattgtaatacaagttgctttttgttttttgatgtcttcctagagtaccacacactcatgtacaagactgcaggatgtgattaaattgtaacaactgaaaaaaaaaaatcacctagagttagggaggggaaaccaatcaaattgtttcagggtcactaggggtagggcctgagcattggttttattttaaagctcctcacgtgattctagtgctcaacccggactgcaagtctctcagttcggtgaaatattacgctttttttctttttttactgagacatatctatatgtaactgatgtggatagcaaattgcagaatatgaatggtatgatgtcatttatgtagaaacaaaacaatactgtgtagttccatgggcatatatacatatatgtgagtacagtagtccctccttagctgcagttttgctttctgaggtttcagttaccatggtcaaccaaggtctgcaaatcttaaattaaaaattccagaaataaacaattcacaarttttaattgtgtgccctctggttccatcccacccagggcacaaatcatccctttg

SEQ ID NO: 44863 - DNA, 605 bp, Homo sapiens
ttttctaagaagagtaaaatatacagcataaactatttaaaattcttgtctatatgcctcaaatgtgctttctcagaagcatcttttcatagtctttaaagaaatattacatttttaattcatatctactctttcaattcatgagaaatcagagtgctgatacaaattctttggtgtgakaatactgatattgtgactaaaggttgtttaaggccaatcttagcattaaaaaaaaaatcaacatactgtttcacatacaaaatagtaactgtcaacaactgtgactgtcatcagctctagactggaactccctacactactacattaaatctgaatattccaaaagttccttgaaacatctatttcactaggattataactatgtttattcaaaatttataaaaaattataaagcaaaactcaatgttttcaaaattttttgataaattttatgaaaatatatctaccaaacagaactttaaggaaaaaaattatttcaaaataatttaaaaatctttattagaaacactatccagtttatttctgtcaaattgacatatcagtaagtcaaatcagctgtcaaatacattttttttttcgaggtg

SEQ ID NO: 44864 - DNA, 607 bp, Homo sapiens
gttcccagccgatctcagtcccggaggagctgctgcacttcactttcctccttgccataggtgcttcctgtcacttctctattgaattccagcttctctcttggatctatttgaagtgtggttacctacttgctgttcttgttcttctttatgaaggaggccagtaccaggtgactgtggtcagctggcccctgaagcccctctcattcaggctccaaactttccttttaaaagctacaccccccagaggtgacttcaaccctaccttcagtcttttaatgtgatatttgacatttacaaagatgtgttattatcctaaataggataaacaggctccctgcctaccaaaaaatgattcagttagaaaattytaaaaaaaaaaaaaaaattgagattatttccagttttctctgagacataaaatttacaattgaaaaggagaaatagacatttttaaaaaatcattcattgaacattcaccaagattgaccatatcctaggccattaaacaaacttcaacaaatataaaataactaaaattatatgaagtgtgttctctgatcataatggaatcaaatcagattatcaatagcagaaagacaataga

SEQ ID NO: 44865 - DNA, 597 bp, Homo sapiens
cagcaatttgggctgttgattgtcgaagaggactttttccaccataaaatgaaccacttttaaagcatgaagacaactctgggtagggtgctcaccctcygcttgcagcactgggctatttgacttcccctgggtggttatattgctgcatcaggtgcatgggaccaaagagctctggaaacatgtagctcttttttagtgggatacagtgacctcagtgtctccacctctcctgtcacttttctccagattgaagtccagatcgtcttgcattttctcattgagcctcctggccccactgaagcagggtgtggaggatctggaaggaccttagatctgtcagcagtttttctttaatctccttctgctcttacttattttggggggccctgatctatattagagtgagtctggctttttcaccaagaggatgaggtctatctatactctgcattttggaaacataatgaacaactcctttcttctttaggcagaagatcccctgggagcaattcacttgagaggctgtgtggtgacttcagtggagagcaactcaaatggtaagatgaatttctgtgtgagagaggtgggtctgct

SEQ ID NO: 44866 - DNA, 597 bp, Homo sapiens
cagcaatttgggctgttgattgtcgaagaggactttttccaccataaaatgaaccacttttaaagcatgaagacaactctgggtagggtgctcaccctccgcttgcagcactgggctatttgacttcccctgggtggttatattgctgcatcaggtgcatgggaccaaagagctctggaaamatgtagctcttttttagtgggatacagtgacctcagtgtctccacctctcctgtcacttttctccagattgaagtccagatcgtcttgcattttctcattgagcctcctggccccactgaagcagggtgtggaggatctggaaggaccttagatctgtcagcagtttttctttaatctccttctgctcttacttattttggggggccctgatctatattagagtgagtctggctttttcaccaagaggatgaggtctatctatactctgcattttggaaacataatgaacaactcctttcttctttaggcagaagatcccctgggagcaattcacttgagaggctgtgtggtgacttcagtggagagcaactcaaatggtaagatgaatttctgtgtgagagaggtgggtctgct

SEQ ID NO: 44867 - DNA, 553 bp, Homo sapiens
  misc_feature (1)...(553): n = A,T,C or G
tgccttttccaatgcctaagtagtactctcttcacatattggatagacaatgctagcggctgcaagagacaagccctggaatcccagtgaattaccaagacaaaagatccctgactgctcacatcacagccagggtttggttaagtggccagtgtccatcttgtagcaatgccatctggaccacacagcttccaaatcaccatggcaggaaaacagagagctagaaaactgcatgggatgtctttaaggactaggtatggaagatgtttacataacttccttccacatatattagctacaaattagtcacatcatctctaacttcaagggagtctgagatggaggaatggacaaatgcaggtatagataggatgtatgataagtgctaacgctctctgctacatgttctcaattctccttttatgatatatatacatgtttttatgtttttagtttttatatgtgttttcatataaatattatattwtatatatcttcctttaganattatatatattatatatttatatatataatatatatttatatatta

SEQ ID NO: 44868 - DNA, 1741 bp, Homo sapiens
ttttaaaaacattttttacatgaaatattgctcttaacctaaaaaaatgaaacagtatagtttggcacagcactcatctaaaaataggtctttggtgaataagctttctgcccataacactgaggctgtgtgttgcacttgtgtgcacatgcccagagttgcctgcgtgttgtaccatgtagttggaaaatagtaacttcagctaaaaaaaaaaaaaaaaaaaaaaaagatttagaaagaggcctttggtgaaattccttaacaaaaactaaaacttaaatgtttgttgaaatgctttcaagaaattgtacacttaggaaattatggttttgtttcataaatgtgaaacctcaaaatatatgagatataatctagaaaaatgagtctggccttttatatctaaagtaaaaaaatttaaaaacgttttgcaaaacctaaatatgtgacttcttttaaagactgattatcttgtgctatgctggctctaactggatttctagatcttccctggctgttttgtttctatctacctagggttttactctgtagtgggatggtccttttgctttgacgaaattggggggcggagaggaaaggaactcaggcaaatatatgttgtagtagtggtatgaggtgtgtgaagatatattttcagtataattttagctataatggacttatatgttaattacttttctagatcataaaattatgaaaagaaatcctttatgtaattttattagtatttttctttcaaaggaaatatgaaaataaactaagaggcaaaaaaatgattaacagagggctatggatatgccattataggtttaacaatagtgtaagttgaaactctactcatgtgcctcacaaaaaaagcagactgtgattatctgtaaatgtgcctttccactttaattagtcccgtatctgtgagtctacattcttcttgaaattaagataccattgaataataatgtaactggccataagacctcatcaaaagcaactgtaaaagtatcttctagatttcactaattatattcccaatctagcaaacatacaaatttgtacttctttgctccacagctactaagcaatagctgttgaaatcattaaggtacaaattgaggacaggtggcacacagtggctcctgcctgtaaacccagcactttgagaggcccaggctggcagattgcttgagctcaggagttcgagaccagcctgggcaacatggcgaaaccccatctttacaaaaaatacaaaaaattagctgggcatggaggtgtgcacctgtggtcccagctactcgggrggctgaggtaggaggattgctcgagcctaagaggtggaggctgcagtgagccatgatagcaccatagcactccagccagggtgacagcacaagaccctgtctcaaaaaaaccccaaaccaaaaccaaaacaaaacaaaacctgaggatattctgagtttttatgatgtctagattcctaacaacaaataaggcataggaaactctgaggtagtttccacatgtgatactgagttctctctctttttggctagaaaaaagttttggtgatgcaaggggaaagggtttcattaaaaatgtgaatgaaaaataaaaatatcctgttgcttgatctatatcattcatttcctagaaatgctggtaaatatttttatctttcttctgggcattggcacattgacacagttataagtaatctttgatctgcaga

SEQ ID NO: 44869 - DNA, 1741 bp, Homo sapiens
ttttaaaaacattttttacatgaaatattgctcttaacctaaaaaaatgaaacagtatagtttggcacagcactcatctaaaaataggtctttggtgaataagctttctgcccataacactgaggctgtgtgttgcacttgtgtgcacatgcccagagttgcctgcgtgttgtaccatgtagttggaaaatagtaacttcagctaaaaaaaaaaaaaaaaaaaaaaaagatttagaaagaggcctttggtgaaattccttaacaaaaactaaaacttaaatgtttgttgaaatgctttcaagaaattgtacacttaggaaattatggttttgtttcataaatgtgaaacctcaaaatatatgagatataatctagaaaaatgagtctggccttttatatctaaagtaaaaaaatttaaaaacgttttgcaaaacctaaatatgtgacttcttttaaagactgattatcttgtgctatgctggctctaactggatttctagatcttccctggctgttttgtttctatctacctagggttttactctgtagtgggatggtccttttgctttgacgaaattggggggcggagaggaaaggaactcaggcaaatatatgttgtagtagtggtatgaggtgtgtgaagatatattttcagtataattttagctataatggacttatatgttaattacttttctagatcataaaattatgaaaagaaatcctttatgtaattttattagtatttttctttcaaaggaaatatgaaaataaactaagaggcaaaaaaatgattaacagagggctatggatatgccattataggtttaacaatagtgtaagttgaaactctactcatgtgcctcacaaaaaaagcagactgtgattatctgtaaatgtgcctttccactttaattagtcccgtatctgtgagtctacattcttcttgaaattaagataccattgaataataatgtaactggccataagacctcatcaaaagcaactgtaaaagtatcttctagatttcactaattatattcccaatctagcaaacatacaaatttgtacttctttgctccacagctactaagcaatagctgttgaaatcattaaggtacaaattgaggacaggtggcacacagtggctcctgcctgtaaacccagcactttgagaggcccaggctggcagattgcttgagctcaggagttcgagaccagcctgggcaacatggcgaaaccccatctttacaaaaaatacaaaaaattagctgggcatggaggtgtgcacctgtggtcccagctactcgggaggctgaggtaggaggattgctcgagcctaagaggtggaggctgcagtgagccatgatagcaccatagcactccagccagggtgacagcacaagaccctgtctcaaaaaaaccccaaaccaaaaccaaaacaaaacaaaacctgaggatattctgagtttttatgatgtctagattcctaacaacaaataaggcataggaaactctgaggtagtttccacatgtgayactgagttctctctctttttggctagaaaaaagttttggtgatgcaaggggaaagggtttcattaaaaatgtgaatgaaaaataaaaatatcctgttgcttgatctatatcattcatttcctagaaatgctggtaaatatttttatctttcttctgggcattggcacattgacacagttataagtaatctttgatctgcaga

SEQ ID NO: 44870 - DNA, 549 bp, Homo sapiens
aaattctggaaaatatgaactaactcctagtgacagaggacaaatcagtgacttcctggtggtagaagtgaggtacccatggaaagattataacagagccaacaaaacttctgagagtgatgggcaagttcattatsttgattgtggtaacagattcacatgtatatgcctatgtcaaaatctgtcaagttgtacactttatagcaattttacacttttatagcaatttattgtatgtcaattatactccaataaagctttttaaaaataatgagtgttgatgtttaaacaaactaaattacaaactaagaaggataagccaggactgtcataaattaattttttcctaccacaattatgaacaaacagtacatacttatatagtagagtgaatacatgggtttaatttaagggatttttttgctatttttccaatagatatatttggaagacactatgtcttcatttttctaaaattttcttcatattctaaataagatacaagtaatcttattaatttttaaaaggcaataccaaaatagatttcaa

SEQ ID NO: 44871 - DNA, 549 bp, Homo sapiens
aaattctggaaaatatgaactaactcctagtgacagaggacaaatcagtgacttcctggtggtagaagtgaggtacccatggaaagattataacagagccaacaaaacttctgagagtgatgggcaagttcattatcttgattgtggtaacagattcacatgtatatgcctatgtcaaaatctgtcaagttgtacactttatagcaattttacacttttatagcaatttattgtatgtcaattatactccaataaagctttttaaaaataatgagtgttgatgtttaaacaaactaaattacaaactaagaaggataagccaggactgtcataaattaattttttcctaccayaattatgaacaaacagtacatacttatatagtagagtgaatacatgggtttaatttaagggatttttttgctatttttccaatagatatatttggaagacactatgtcttcatttttctaaaattttcttcatattctaaataagatacaagtaatcttattaatttttaaaaggcaataccaaaatagatttcaa

SEQ ID NO: 44872 - DNA, 549 bp, Homo sapiens
aaattctggaaaatatgaactaactcctagtgacagaggacaaatcagtgacttcctggtggtagaagtgaggtacccatggaaagattataacagagccaacaaaacttctgagagtgatgggcaagttcattatcttgattgtggtaacagattcacatgtatatgcctatgtcaaaatctgtcaagttgtacactttatagcaattttacacttttatagcaatttattgtatgtcaattatactccaataaagctttttaaaaataatgagtgttgatgtttaaacaaactaaattacaaactaagaaggataagccaggactgtcataaattaattttttcctaccacaattatgaacaaacagtacrtacttatatagtagagtgaatacatgggtttaatttaagggatttttttgctatttttccaatagatatatttggaagacactatgtcttcatttttctaaaattttcttcatattctaaataagatacaagtaatcttattaatttttaaaaggcaataccaaaatagatttcaa

SEQ ID NO: 44873 - DNA, 543 bp, Homo sapiens
gcgggcgcctgtaatcccagctactcgggaggctgaggcaggagagtcacttgaacccgggaggcggaggttgcagtgagtcgagatcacgccactgcactccagcctgggcgacagtgcaagactctgtctcattaaaaaaaaaaaaaaaaacaccacaaaaattagccaggcatggtggtgtctgtaatcccagctactagggatgctgagacaggagaattgcttgaaccagggaggaggaggttgcagtgagacaagatcacrccactgcacttcagcctgggtgacagagcgagattccatctcaaaaaaaatacatatatatatatatatatatatatatatatatatatatacacacacacacacacacacacacacacacacatacacatatctctaggaaaaatgctttatgtgcaaagaaaatcaaaattttattccttgtatataaatatcagaaaactgaaggcagcctcacatggcagaaagagaactgctaagtgaactggggatatctactgaggacatttcccatcc

SEQ ID NO: 44874 - DNA, 543 bp, Homo sapiens
gcgggcgcctgtaatcccagctactcgggaggctgaggcaggagagtcacttgaacccgggaggcggaggttgcagtgagtcgagatcacgccactgcactccagcctgggcgacagtgcaagactctgtctcattaaaaaaaaaaaaaaaaacaccacaaaaattagccaggcatggtggtgtctgtaatcccagctactagggatgctgagacaggagaattgcttgaaccagggaggaggaggttgcagtgagacaagatcacaccactgcacttcagcctgggtgacagagcgagattccatctcaaaaaaaatacatatatatatatatatatatatatatatatatatatayacacacacacacacacacacacacacacacacatacacatatctctaggaaaaatgctttatgtgcaaagaaaatcaaaattttattccttgtatataaatatcagaaaactgaaggcagcctcacatggcagaaagagaactgctaagtgaactggggatatctactgaggacatttcccatcc

SEQ ID NO: 44875 - DNA, 559 bp, Homo sapiens
actagactactttatattgtttaaagacaaacaatagaagagagacatgaaaagaagagttgatttgttgaaaagataaacaaaattgacaaaccggtaattagactaagaaaaaaagagaaaactcaaataaataaaatgagagatgaaaaaggagacgttacaactgatatygcagaaatcatagaggatctgaagtctattatgaacaattatacaccaaataattggaaaatcgagaagaaatagataaattcctggaaacataggacctaccaaaattgcattatgaataaatggaaacctgaacagaccaataatgtgcaaggagattgaatcaataataaaaggaagccatcaaaaaaagctcagtaccgcacagcttaattttgtcaaatatttacagaagatttactaccaattcttcacaaaatattccaaaaaactaaagaggagggaattattcccaactaattctacaaggtcggctgtacccaggcaccaaaaccagacaaggtccccaaaaaaaagaagaaaaactacagaccaatatccctga

SEQ ID NO: 44876 - DNA, 1832 bp, Homo sapiens
aaaatttattcctagattaatttttctgtaagaagttttctgaaatatttcactaaatttaaaaataattgttgtgaaacgtaacacttcatctcaggattcacagcttgtatgtacgtttgtagtagtaaactacatttactaagaaggtatgttagagaaaacagactgtcctagaaaacacaccttgctcatcagtcttacatattttttgctttgattaatttgatcttgttaaaaacaatccagctagcctgtaagttctggatataaggtggtttttttttttttcttttttttttagcttttgtcactttattgttaaccaatgaatattagaatattatccaaaattagagatataattgtaacttaattgtacagcacaaaattatgctaatggtaaaagcctactgggatttaccaaatactcattagtgtatttttacattgactatatgaacatgtgcttgtgactgctaatgatgagttataattggtttaatctctatgaaaatccatattttaaatggttcttgtttagaaaaattcacacagccttaaaaatgaattaaatccattttaatcctaatctacaaatagatcataaacagcaaaatataactgataatttttcaatactgtatcaagctgatatagctatggtagtgcacataattcaaaatgaggaaaattaacaaaaatccaatgaaagttcaggtttttatctgttatggcaattgctttaaagtgaacatttatgtttcaaaacatgaatagcagggtccaccatccattcctttgatgtactgcaagtaggaacattctcttccataggattctgaagcatgtgcacaaccatggtacaacagtcacttcaaggttaaccagctatgttttgtcctacaaagttaaaaaaatatattaaacacaacctttccttttcataatgtctgcccagattaatccttttaaagtcagcaaaatcaaaaaagcaaaagagatattttcagacacaacttgaatctactgtgcatgaaaatgtttaataaaaggcaattttaatagataaatgtaaatttgagtaattccaaatggaaagtagctgaaccacacggagaaaacaaggctttacatatctccaaatttagcggttttacaataaacaaagtattagaacatgtgactattagaacctcctcctaactggaaagatttcttcagtaacatataaatgaagttaatataaactaaaattataatttctaaaatagaattaacaaaccaaattttaagcatttttagttagagattaaaaaaataagcacagtgatctagaaaccaaatatactgattatgtaactatcatatcaaagtacagacattcttcatatgctacaaggttagcatctctctcacacacacacacacacacacacacagacacacacacacagagtctctcyctctctcattctctctctcactcttcctcagccatacaacacccctccaggatgatagtacaccagtgaggagcttacaagtttaatacagatcagaatcccacagtttgactcaacaaaaaggcagttaaaaatttagcactctagatattctaagggaaaataaaaacttcaaaagtatttcttcatgattgaggctatcattatgaattataaaacatatagcttacacactccattgtgtttgaacaaccagtcattgcaggtgtagtagtgaggtagtattgtcgtcccctccttgggactgatgtttttatatgctgcccttccagaaaggtccaggtttaaaaatcagttaccaacaaa

SEQ ID NO: 44877 - DNA, 1009 bp, Homo sapiens
caagtaatccaggtatgagaatcaacttggtcaacagaagctggtgctacaaatgaagaaatgtgcaccagtgttgctcccaaagtggcttaggtagcccttttcatttacaaatctcaaattttaagatggatttcattgaatatatgcatttcaatggaaacaaaattctgttatagcartgatttatttcctgggttcatagacctgaggcaatgagtcatagaatttcatgtttgattttctttaccttatcaaactacatgtttagtaattgatacttatttttattatcattatttatttttttattttttttgagatggagtctcactctgtagcccaggctggagtgcagtggcacaatctcggctcactgcaagctctgcctcccgggttcacgccattcttctgcctcagcctcccaagtagctgggactacagacacccgccaccaagcccggctaatttttgtatttttagtagagacggggtttcaccgtgttagccaggatggtctcgatttcctgacctcgtgatccgcctgcctcggcctcccaatgtgctgggattacaggcatgagacaccgtgcccagccgatacttatttttaaaaattagggcatttacaaaactattgtatgtttcagatttcagagagataaactgcatttcaagtaaaaataaacattttaatattgccatgcctcatttttcatagaaagcatggcttaaaaggcatgataagccacctgcagaataggctgtcacgtttggatctttgctaacaccctttcaagttgaaagacatatttgttgaaatttgattgtttaatatctacatatgttctctgcatttccttctttatttaaagtctggtatatagatattcagctttctcagggccctgcctttgtgtggcattgtcccttcactctgccgcactgagatgtggttatcgtatataccagtgaaccattgtctaacattctccattttatagaaacc

SEQ ID NO: 44878 - DNA, 596 bp, Homo sapiens
tgggaaaaaacaatacataactggaaattgggcacaatttcaaatccatttccaaatatccaaatgttctgattttaacttagcaggttataatcaaatattgatcctatcattgataataaagaaccrccttaacaacaatagttttattaatgaatacacaaaatacaatatgaggaagtggtttaagtactataatttcttttacaaaatagatttctttatctaattttaattaaaaatgactaacttttataacagttaagttgatttttaaatggtgatatatgtaaatatttttgtttgcttatttttacaactggaaattcttttctaaattgcatatggttcttaaatagggttgtttgtagcacagcttgcataaataaatacagttaaattagttcactgaggtcagttttggttcatttatggttccgtgtaatcctgttacttttcttcccacttttaaatgagatgcttacaacaaaaatgttgttaagatataacaagaagagaaaagccaaatgaaagtcagtttatatgaaatttgcctcttgcctggtaccatttgtgaccatgaggccgatgatgct

SEQ ID NO: 44879 - DNA, 555 bp, Homo sapiens
gcctagtacattattacttgcctacgtcagggttccccaacctctggtccttgaccagtacaagtctgtggcctgtcaggaaccagaccacacagcaggatgtgaggggtgggygagccagcatcaccaccagagctctttctcctgtcagatcagcaatggtattagattttcatcaaaccctgtagtgcaatgtgcatgtgagggatctagattgcacgctgcttatgagaatctaatgcctgatgatctgaggtagaaaagtttcaatgaaaagccatcaccaccacccacccaccatccatgaaaaaatgtcttccacgaaactagtccctggtgtcaaaaaggttggggaccacttctacgtttttcaattattgtctttatttatctgcttgcaaacctttccagagaacaaatgcagagtcatactcctctactttgccagtaaaaaagaaagaatctggttcctgaactgcttcttcaacttgatggctgggtttactcactgctatctttgctacagcatctatccccagagagatgccagcatgt

SEQ ID NO: 44880 - DNA, 555 bp, Homo sapiens
gcctagtacattattacttgcctacgtcagggttccccaacctctggtccttgaccagtacaagtctgtggcctgtcaggaaccagaccacacagcaggatgtgaggggtgggtgagccagcatcaccaccagagctctttctcctgtcagatcagcaatggtattagattttcatcaaaccctgtagtgcaatgtgcatgtgagggatctagrttgcacgctgcttatgagaatctaatgcctgatgatctgaggtagaaaagtttcaatgaaaagccatcaccaccacccacccaccatccatgaaaaaatgtcttccacgaaactagtccctggtgtcaaaaaggttggggaccacttctacgtttttcaattattgtctttatttatctgcttgcaaacctttccagagaacaaatgcagagtcatactcctctactttgccagtaaaaaagaaagaatctggttcctgaactgcttcttcaacttgatggctgggtttactcactgctatctttgctacagcatctatccccagagagatgccagcatgt

SEQ ID NO: 44881 - DNA, 555 bp, Homo sapiens
gcctagtacattattacttgcctacgtcagggttccccaacctctggtccttgaccagtacaagtctgtggcctgtcaggaaccagaccacacagcaggatgtgaggggtgggtgagccagcatcaccaccagagctctttctcctgtcagatcagcaatggtattagattttcatcaaaccctgtagtgcaatgtgcatgtgagggatctagattgcacgctgcttatgagaatctaatgcctgatgatctgaggtagaaaagtttcaatgaaaagccatcaccaccacccacccaccatccatgaaaaaatgtcttccacgaaactagtccctggtgtcaaaaaggttggggaccacttctacgttwttcaattattgtctttatttatctgcttgcaaacctttccagagaacaaatgcagagtcatactcctctactttgccagtaaaaaagaaagaatctggttcctgaactgcttcttcaacttgatggctgggtttactcactgctatctttgctacagcatctatccccagagagatgccagcatgt

SEQ ID NO: 44882 - DNA, 602 bp, Homo sapiens
aagatttctcatgaagatcttagacccagagactttcatttctttcaaacatcctaagaagggaagacgttcccactagtcaaccagtttcagagcctagaaaaagatttttaaacttccatattcattttatgaatccaacatgtcctaaaactaaatcataaactaggcctcctccaaacctcatctactaatatagtagtaaaagtcctaaacatgatgcaaaccatattacatatttcaaatgcaccataaccaagtaaggcttatgttagaaatgcatgggcagttagtattgggaaatacattaacataatttgcaatgcaaacmaattattgatagatcaaaggagaaaaattatgattaacagataccccaaatcaaataaaattcaagatgtctttttgattacatatttttaaaaacttctcagagaactatgacaagaaagatacttccttaacaaatgaattttttgtctcacactaatagccaacatcatacttgattataatgtcttagacatagccctattagttttagaaaaaacataaggatgcctgttatcaccactattatttatcactgttctgaaagcccc

SEQ ID NO: 44883 - DNA, 575 bp, Homo sapiens
ggctgtgtctccttcactaaaatgaagcccccatgaaggcaaaaattttgctgtcctgttcatggctccaatcttggctcctggttgataatattaaatattcatggaataagttaatgtatacttgtgttgactcaagctaggcagataagcgctgagatattcaacagcattcaaaagcaatgtgcatgctggaagaatggcatggttcaactaaaactgattgttcacaatagtgtatagaatcagtggtgaaatactggcagaatatctctttgtgtgcccaccactactgtaagcaatggaagagatacaacagaaacatgatcacgatcagcagcaaacatttgccgagggcttgctgttggcccagcatgttctaagctcattactcgcgttagcatgtttaattctctcagcaccacctatggggtaggtaggtacaagtgtaatcacccccatttgacatccaaggcagctggtgccagggcgatttagcaacttgcccggagtcctatagctagtacayggtagagctgggattccatctgctctgctgtttcctgccagtctct

SEQ ID NO: 44884 - DNA, 550 bp, Homo sapiens
tacatgaaaactaaagaaaatactacttataaaatgtgacacagcaataaatacaacagcaaggcaaagtgccccatattccaggcttaaaagtttaccttcaggttacagggtgcaatagtgaagagatggaccgtggagccctagggctttcactgccaccctggacacaatgtttgattacctgtcaaaatcatcatcttctagttcatctgcatttgcccagtcctcatcttcttccaaatcaaccatcattgctaacatctgaggaactaaagtaaacaattatttcatacccgaagactgtgactttatcktatccatatcactatttataaacaagaattttaagattttactttgcctgtaagagaacaagacaaaacaattatttgtctgtgcccccaaaacctggtttgttaaattttaaccttgttatatttgcttttatcgtttctttaaaaagcaacattcattaagtcaaaccctcctatgaaattcccaaatccgattacattctccccatcaccagaggtaagaagcaacatca

SEQ ID NO: 44885 - DNA, 553 bp, Homo sapiens
tgagycagtatgcctggccccaagaacttttgatcaattatctttttaaaaatggctttgttcccatgtgagcggatcttctcctacactctaccctttgttccatccgatccattgtcaacacctgcatcatcaatgcattctaaattcacagagttgatgaaacaagatctccactttattcgtcaaaattgtcttggctactccaggccctatgttctttcagaagaatttcaggattgttctatcataaccctagattaatttgagaactgataatttgttcttctattagtctttcaatatgttattcaactttcccatatgtcttgtacatcttttgatttattcccagttactataactcatgcctataaaattttctaaatgattattatgaataatggaacacttacaataaaatgttctcatatctaaggatcttgcttaaccctttgattagcagtttatctgttgagtctttaaaactttttgtagacaataaccacatagcctacaaataagcaatatttttgttttctaattctttttt

SEQ ID NO: 44886 - DNA, 602 bp, Homo sapiens
ctatattgacacttctcatttaattgtatttcgatcagagactgttgcatgtgcatgtaatactgctaacgtatgggattcactgatgtttccttttgatgtgtgtgtgtgtgtgtgtgtgtgtgtgtgtgtgtaaggttatatgagcctttgaaaaactgtattctctatgagtagagtgtgtattcattttctagtgctgccataacaaagaaccacaaactgagtggcttaaaacactataaatgtatcrtttcacagtcccagagaggagaagtcagagatcaagtcatggtcatgctctctctgaggcctgtagtggggactccttccttgtgtcttctagctctggtgtttgctgacaatccatggcagtcctgggctggtaggtacatcaccccaatctctgccttcatcatcacatgactgtcttatcctgtgtgtctctgtctcttctctttttcttataaagacaccagtcacaattgattaaggtttcactctactccagtgtaacttcatctgaactaattacgtctgcaacaatcctatttacaaataaggtcacattctaaggtgcaaggggttaggacttcagttta

SEQ ID NO: 44887 - DNA, 1875 bp, Homo sapiens
tgatttgtgatgggaataagcattgtgtcttcatttttaattacctttctcttgtagatgaactcaggaaaatatcaaagtaaaatttgtcttgtcacagtagaatacactgggataactagcatactatattaaacactccctagattaataatcagagttatttttctactaaataaccacataggcttgagatcagtcttttttttatggagacgattattgaattacacagtctatattctctttgtcattattccatgatatagtattccacaagacaaaaatatttctagggatttacatatgcccattgagttctgagagattcttttatgtattttctatagttttagatgacaattatgttcatattttctaggacactaaatgattcataactctactatcctaagatattttattttatgtcataaaatgtgaagtggtgcaaaataaaactaagcaggatagtcatcttatgaaaatgaacctttccacttaagtttaggagtgacaactttttgaatcaggtgccacgtcagcaagtttgcaaagaaataaagttcagaaaatatgcagaaaacacaatacacaggagagagcagaatgttaaatatatttgtttattttattatgtagtatgtttatgataaaagtcagtggtgaattgtgtaaggataatcatacactacagtagaacaagtgtagtcctgtcattggtcattgcctatccacaaggctctgaagcatgattcaacatgccatcttctagctggtatcacaagtcatcctctcagagtgctgtttttgcttcctttttcagatgcagaaaatctccccaaagtaatgaggtttcatagtactctcaggagaatactgaactgccacaccatatttcatgtatatgacaaacccaaatgatggtagtggagaagatgggaattaaaattacaccaacttcttgattctgtagatgcaatggccagtcaccaggggtgccacttatgagatgcttgcagattgaaagtagcaaacataaagtaggtttagggtcccaagctagctagctctgcgtacgggttggatacaattttcaagaagaaaatttcattttatttgcagcagataaaacactaatccatggtaaaagcagagaaacttcattagaaaaattgtggctagagaactacggttctctacgttggttctatccaaccacggttggatatcattaggtagtttagggacagtaatttatttgggtccccaggtcactgaggaatgttggagcagacaaataaatgaccaacaacctctttttttctttttaaatacaaacaaacaaacacaaaaccagattaaaaatacaaatgaagcactgtgcttaatgtttgcatcactgtgtaaattttaaacattaaaataacattcatttaagcatttttaattatttaaaattatcaggctgggcacagtggctcacacttgtaatcccagcactttgggaggtcgaggcaggtggatcacctgaggtcaggagtttgagacaagcctggccaacctggtgaaaagccatctctaccaaaaacacaaaattagctgggcatggtagcacacacctataatcccagctactcaggaggcygaggcaggagaattgcttgaacccaggaggcagaggttgcagtgagcagagatcatgccattgcacttcagcctgggtgaccagagcaaagctccatctcaaaaacaaacagataaataaataaacaaataataaaatcatcacatagggaataaaaatgagatattttcatcatataacccagaattgaccaatgatcgtgcgataagtgcatgtcaaaaacaata

SEQ ID NO: 44888 - DNA, 573 bp, Homo sapiens
caagcgattctcctgcctcagcctcccgagtagctgggattacaggcatgtgccaacgtgcccggttaatttttgttttttttttttttgagacggagtctcgctctgtcgcccaagccggactgcggattgcagtggcgcaatctyggctcactgcaagctccgcttcccgggttcacgccattctcctgcctcagcctcccaagtagctgggactacaagcgcccgccaccgcgcccggctaattttttgtatttttagtagagacggggtttcaccttgttagccaggatggtctcgatctcctgacctcatgatccacccgcctcggcctcccaaagtgctgggattacaggcgtgagccaccgcgcccggccaatttttgtatttttagtaaaggcagggtttcaccacgttggtcaagctggtctcgatctcctgacattaggtgatccgcccgactcagcctcccagagtgctgggattacaggtgagagccactgcatccagccaggtcacagacttctatgactacaagaaatgtgtcactaatcatttttatgaaatctccag

SEQ ID NO: 44889 - DNA, 1638 bp, Homo sapiens
aattatttcaaccattgtggaggacaatgtgtggcaattcctcaaagacctaaagagagaaataccattcaacccagcaatcccattactgggcatatacccaaaggaatataaattgttctgttataaagagacatgcacgcatatgttcattgcagcactattcacaatagcaacctaaatgcacatcattaacagactggataaaggaaatgttgtacatatacaccactgtatactatgcagccataaaaaaggacaagatcatgtcttttgcagggacgtggatggaactggagtccattattcttagcaaattaatgtaggaacagaaaatcaaatactgcatgttctcacttataattgggagctaaatgatgagaacacatgaacacatagaaggtaacaacacacactgggaccctacttgagggggggagggtgggaggaaggaaaggatctggaaaaataactaatgggtagtaggcataatacctgggtaataaaataatctgaacaacaaactcctatgacacacgtttacctatgtaacaaacctgcacatgtacccttgaacttaaagtattaaaaacaacaataacaaaaaagtataaataaacacagaactgcaaatgtgaaagattagctctggagtgaaaatgatcaaacagaatgccataatctgagagaaaagaaagaaagaaaagccatgacaaccaaagaagaaagcgatgcttgccttttgagcccatggttctgattggtctacagaaattctgccattctatcctagccattgggctgtatcctcaggtaaaatcactgggagattaatcaaagccagccagagtgaaaattcatattcttttgcttgaaaagagaatgtgaatatctctatatctccataatttgtttaatgtctttatattagtgaaatataatgtctcataatgattataagacaattaaaaggaaattaagaaaataaaataaaatataatatggatttaaaaacgacagcctatttcttcaaagagataggccacatgatctttcctgtgcaccccccacaacaggtttaattagcttcacacctgcactgatgtctttccagatcttttaacacctatgttcatattgaataatcttatcaattacttttggactaggctgtgatatctatttgaaaaatgaatgcagccatctgcacaagttggatttacacatatacacatgcatacacatacaggtgtcatgtacacatgctataggaaacacaggagagcaatattaaactcaactgaatgcttttcaaaactgcttgttaygatcctgaaacacatttcactttgtcaagacactggaaaggcaaagatagtggtggaaacaaataataataataataataataataataataataataataataaagaatgaatagcaaatctggtgttttccaactcaagaagccagagttgattttagaagtggcagaatatatacgctgctcccaattttattcaagcaaaatcttccatccttgcctttgtatatgactggcctcacattttgcagttacacaccaaagccctcgggaactagggttttcgatcagtgtcagagcatttatatttt

SEQ ID NO: 44890 - DNA, 1638 bp, Homo sapiens
aattatttcaaccattgtggaggacaatgtgtggcaattcctcaaagacctaaagagagaaataccattcaacccagcaatcccattactgggcatatacccaaaggaatataaattgttctgttataaagagacatgcacgcatatgttcattgcagcactattcacaatagcaacctaaatgcacatcattaacagactggataaaggaaatgttgtacatatacaccactgtatactatgcagccataaaaaaggacaagatcatgtcttttgcagggacgtggatggaactggagtccattattcttagcaaattaatgtaggaacagaaaatcaaatactgcatgttctcacttataattgggagctaaatgatgagaacacatgaacacatagaaggtaacaacacacactgggaccctacttgagggggggagggtgggaggaaggaaaggatctggaaaaataactaatgggtagtaggcataatacctgggtaataaaataatctgaacaacaaactcctatgacacacgtttacctatgtaacaaacctgcacatgtacccttgaacttaaagtattaaaaacaacaataacaaaaaagtataaataaacacagaactgcaaatgtgaaagattagctctggagtgaaaatgatcaaacagaatgccataatctgagagaaaagaaagaaagaaaagccatgacaaccaaagaagaaagcgatgcttgccttttgagcccatggttctgattggtctacagaaattctgccattctatcctagccattgggctgtatcctcaggtaaaatcactgggagattaatcaaagccagccagagtgaaaattcatattcttttgcttgaaaagagaatgtgaatatctctatatctccataatttgtttaatgtctttatattagtgaaatataatgtctcataatgattataagacaattaaaaggaaattaagaaaataaaataaaatataatatggatttaaaaacgacagcctatttcttcaaagagataggccacatgatctttcctgtgcaccccccacaacaggtttaattagcttcacacctgcactgatgtctttccagatcttttaacacctatgttcatattgaataatcttatcaattacttttggactaggctgtgatatctatttgaaaaatgaatgcagccatctgcacaagttggatttacacatatacacatgcatacacatacaggtgtcatgtacacatgctataggaaacacaggagagcaatattaaactcaactgaatgcttttcaaaactgcttgttacgatcctgaaacacatttcactttgtcaagacactggaaaggcaaagatagtggtggaaacaaataataataataataataataataataataataataataataaagaatgaatagcaaatctggtgttttccaactcaagaagccagagttgattttagaagtggcagaatatatacgctgctcccaattttattcaagcaaaatcttccatccttgcctttgtatatgactggcctcacattttgcagttacacaccaaagccctcgggaactagggttttmgatcagtgtcagagcatttatatttt

SEQ ID NO: 44891 - DNA, 2324 bp, Homo sapiens
catctggtgtccttgcagagtccactcccagggcagctgcctttttgcacaggcatagaaacagaataaaagaagatgaagagagaatgagggaggcaccaatggcaatgtgattttagtggctgaggttacattatgctttagctagaaatggaagccacaggggccttgagacagaaagtaaagagctttggctttaaaatcagaattgcctgagttcatatcccgactcattcactgggtagcttgaccattgttgattataagcttaatcagaggtcatcagggataataatatccattgcatcactgtataccaacatccagtgtttaagtaaatatgacacttagtagttgtttgggcaatattatttcaactttctgttttgcccatcaaaggaacagctatttcataatgttgtagagcagaaaagaaaattcatgtgtcaaataaaaagtagttatatttatttaaataatgatcacgtcattggccaaattctaaatgcaaggaattcatagcactgccttttgtcctgtgtggactctgtcttgcttcttctcctgtatttttatgttgctttttttttggacattgtgacagcattctaagtcctaaagcccacccatgtccacccatcacctccttttataatgcttattggtttgggtttcaagatatctttcatgagccatactcacattaccttcatgatattaatgaaatttcctacaattgcatgtagatcactgtttcttattattttgcatgaagtttagctgacacgaacctgctttacaaatgtacatttactcccaaattcacttgctttgcaatgctttagatgggtttacctaaaaaccttggctacaattgagagcacctgccagttccacaggagcaataatcagaagtggtttctgacactgagcaatgctatggtcacacagggactacctggaacattgagacaattaccttaagatcaaggcccctaaaccaaaagaagagaaaaaaaaagtttttttgtttttcaattgctggttggttgtttacaatcagattaaatatccactttttgcataacccatggatagactaaatggtgaatcttaaagacaataatcaaaagggcaacattatggagaactcctgtaaggtaagtctagaaactagagtaaaaatgaactgagtggtatttctaagagattgactcaaaaaaaaaaaaaaagctggtagagtcaaaactaaaagagcagaaccatccaattggagaattttttaagtgagatgtaatttcgtaggtgacagtaaaaaccagactggacatggcagtagcaaatgcactctaaggaacaatttcggtggtaggaacaagttggccttattgccctaatggatcatccctttctctatctgctgtgatatgagagctgatgagatcctgcctgaggcagcgggactgtctcaacacagattgtctctccattcacaggggtaaacactttactgggaggtttaaagtgaaatttagaattacacagaagtacctaggaaacggattatttttttcttcagtgaactcttgagagggcttctcagtaaagttcaagcaagcaggtgtgccgaaaattgctttaaaaccaaacagacagtaggaggcatgcatatgccagaaatcatagcccccgtgagagagacaagcccatttttcagcagcagcagctgttggtgcatctgcagacaggttgytgtcaggagtgttgagcagagaaatttcaggagaaaggtgcacatgagaagagaagaggcgtgaggtctctggtgtatgagattcagcaaagaaacttgggtgatgcactgagtcctgggctgacattgttagaatttagaatttcatctgagactgggagcctggacgaaagtggcactgagactttagattggagtttgttaaatcctgggcaataaaaattgtagttcactctaatgaaacttcctgggaagactattagtattaaacagggagactctctccccagaaataatgctaaatcacagacacaaatacttgcaagtccagttcagcacaagccagaacatgattgcactttttaaattaaattcactcttattgctttggcagttgccattttctgaaattaataggaatggaacgcatgaaccaaagggctaagggtgaccatactgtgttagagggtacagaggtgaaggcgacaaaggtgggtgggcaggcagaggaaggggtggccatatctttattaagcatttacttcaagggaggagatcgatgaaaaaggct

SEQ ID NO: 44892 - DNA, 2324 bp, Homo sapiens
catctggtgtccttgcagagtccactcccagggcagctgcctttttgcacaggcatagaaacagaataaaagaagatgaagagagaatgagggaggcaccaatggcaatgtgattttagtggctgaggttacattatgctttagctagaaatggaagccacaggggccttgagacagaaagtaaagagctttggctttaaaatcagaattgcctgagttcatatcccgactcattcactgggtagcttgaccattgttgattataagcttaatcagaggtcatcagggataataatatccattgcatcactgtataccaacatccagtgtttaagtaaatatgacacttagtagttgtttgggcaatattatttcaactttctgttttgcccatcaaaggaacagctatttcataatgttgtagagcagaaaagaaaattcatgtgtcaaataaaaagtagttatatttatttaaataatgatcacgtcattggccaaattctaaatgcaaggaattcatagcactgccttttgtcctgtgtggactctgtcttgcttcttctcctgtatttttatgttgctttttttttggacattgtgacagcattctaagtcctaaagcccacccatgtccacccatcacctccttttataatgcttattggtttgggtttcaagatatctttcatgagccatactcacattaccttcatgatattaatgaaatttcctacaattgcatgtagatcactgtttcttattattttgcatgaagtttagctgacacgaacctgctttacaaatgtacatttactcccaaattcacttgctttgcaatgctttagatgggtttacctaaaaaccttggctacaattgagagcacctgccagttccacaggagcaataatcagaagtggtttctgacactgagcaatgctatggtcacacagggactacctggaacattgagacaattaccttaagatcaaggcccctaaaccaaaagaagagaaaaaaaaagtttttttgtttttcaattgctggttggttgtttacaatcagattaaatatccactttttgcataacccatggatagactaaatggtgaatcttaaagacaataatcaaaagggcaacattatggagaactcctgtaaggtaagtctagaaactagagtaaaaatgaactgagtggtatttctaagagattgactcaaaaaaaaaaaaaaagctggtagagtcaaaactaaaagagcagaaccatccaattggagaattttttaagtgagatgtaatttcgtaggtgacagtaaaaaccagactggacatggcagtagcaaatgcactctaaggaacaatttcggtggtaggaacaagttggccttattgccctaatggatcatccctttctctatctgctgtgatatgagagctgatgagatcctgcctgaggcagcgggactgtctcaacacagattgtctctccattcacaggggtaaacactttactgggaggtttaaagtgaaatttagaattacacagaagtacctaggaaacggattatttttttcttcagtgaactcttgagagggcttctcagtaaagttcaagcaagcaggtgtgccgaaaattgctttaaaaccaaacagacagtaggaggcatgcatatgccagaaatcatagcccccgtgagagagacaagcccatttttcagcagcagcagctgttggtgcatctgcagacaggttgctgtcaggagtgttgagcagagaaatttcaggagaaaggtgcacatgagaagagaagaggcgtgaggtctctggtgtatgagattcagcaaagaaacttgggtgatgcactgagtcctgggctgacattgttagaatttagaatttcatctgagactgggagcctggacgaaagtggcactgagactttagattggagtttgttaaatcctgrgcaataaaaattgtagttcactctaatgaaacttcctgggaagactattagtattaaacagggagactctctccccagaaataatgctaaatcacagacacaaatacttgcaagtccagttcagcacaagccagaacatgattgcactttttaaattaaattcactcttattgctttggcagttgccattttctgaaattaataggaatggaacgcatgaaccaaagggctaagggtgaccatactgtgttagagggtacagaggtgaaggcgacaaaggtgggtgggcaggcagaggaaggggtggccatatctttattaagcatttacttcaagggaggagatcgatgaaaaaggct

SEQ ID NO: 44893 - DNA, 502 bp, Homo sapiens
gccgggagactgaggtgggtagatcacgaggtcagaaggtcgaggccatcctggccaacacggtgaaaccccgtctccactaaaatacaaaaatttagccggggtggtggcacgcgcctgtagtcccagttactcaggaggctgaggcaggggaattgcttgaacttgggaggcagagattgtagtgagctgagatcacgccactgcactccagcctggcaaaggagcgagactcccatcaaaaaaaaaaaaaaagaaagaaagagagaaagagatcgagagagagaatgtgacctttacttgacttccaggatgttctttaagccaatgttttcaatatgggttgcaacccattactgggtcatgaagtcaatttactgtgtccagaccaacttttttttttttttttaaatggagggaaagagaacagacaagaacatgacaayagataagagaacacagagtccactgcacatgtaagagtaacaaggagtaagggtca

SEQ ID NO: 44894 - DNA, 554 bp, Homo sapiens
tactcaatctagaagtagcaataagctcgaagatgtcaaaatgtggattttagagattctcagtgaacagatgttgtaccttcaataaagtctcttttcataaaggggctaactggtgaactaacctttcttaaagaatgaaagttcagaatgcctctgagcttccatttctttccccactattaattcatcattatctcaagaaccaaactgctccaaaacaaaaccagttgcgtctctcttgctgcatccattgtttctgataaagtgtacctttgtagcaggaaaacccctcgagtatgaacctctattatttcctaaacctagaatttccttgtttgaattctgacaactgagtcagatctgtttcatttaagggtgaggtgaatactctgaagacattcaaaaactgaagttaaaaaaaaaaamaaaaaacacgcaaatccctgattttaggtactaaggcgctattgctatgggaagaccatattgccaaatcactggaattatcactggaaaaaattacaactacattccaatgatgttgcaccaaa

SEQ ID NO: 44895 - DNA, 1408 bp, Homo sapiens
ggaagcattgaaaaatcagtcaaacttaagaagcaagacaacctcatttgtaatttttttagagacagagtctcattctgttacccaggctggagtgctgtgcaatgatcatagctcattgtagcgytgacctcctgggctcaagcctcggcccccagagtagctaggacacaggccaccatgcccggttcatttttaaattttttctagagatggggatcttgccgtgttgcccagtctggtctggcactcctggcctcacgcaaacctcccacctcagctttctacgaagctaggactacaggtgcatgccatgcctggctaatttttaattttcttttttaagaaatggggatcttgctatgttgcccaggctgatctggagctcctggactcaagcaatcctcctgcctcagcctctcaaagtgttaggattacaggtgtgagccactgcgcctggccgtagagaacctcctttttgacataaaagtaatcatgaacatgtgagcaatatttcatttggatgccaatgtagagttaagcatccctaaccccacccggtctcgtctcactcaacatctgcagcttgtccacgcctctccacagcagcagaaatgagccaaagcaggaaaggctgactcattgtaggtgccagaggctgggaaaatctatagagccagaggggaagtagacacgttggttctggggaagggtggcctgtcactttggggaaagaaatggaaggtcagagggacttctggaaggcagaggggagcaggtgggatggtttcctatgcctggaccatcagtttctgggagggaagaggcaggaagtagtgatggatgccctggactgaagactgggagggccaggaaggagccttaaaatttgcacttccagagagaaagtcggctggtgggattgacctcggactgacaactaacaggcagcatgcggtggagtttcaggaagccagaggtctggggtgccagcagcaacaaacccaggctggctgatggaagggcccagcctagacagggaagcagaggggctgcatggaaaggctcagggctggaggtgatgtgaagtggaataagcttcagtgggagccaggaggttgtatttcccgttgggggcggtggtggagggatgggggtgcccagagaggaactatggattaggcccaggccggccactcagagtgcttggcatccaggatgtgttaagatggcattgaggccgagcgcggtggcttaggcctgtaatcccagtactttgggaggccaaggcaggcggatcacctttggtcaggagtttgagacaagcctggccaacatggtgaaacctcgtttctactaaaaataccaaaaacaattagctgagcatggtggcgcgcgtctgtaatcc

SEQ ID NO: 44896 - DNA, 527 bp, Homo sapiens
tttttccagttctctttccattctggatcagatttacaataacaagagttctgacttcatcatgatgctactcatgatgctttattctatatgaatacaaatggcattttaaacaattcaaataaactcatatctgcaaacaaattactttggcattaactctacaaagaatttaacatagggttgttcttaatagtagaaattcctttttgaacacttaaaatattcagttttccaaaatacggcttaaataaaactatagaaacacagccacagtataaagtgaaacatatgcttaattgttatttttcaattaaatccatattrttttagttatgatcagcaacttattatttgatattgtactgaatttgctggtaggttatctcagtgtactccctgccctgcagcctgtcaaaagactgtttttcttgattaaaaaatgtaattgtttttctgtagctacaaatcaaacattcctttagttttcttaagacagtacctttaaaaaaagtcagattaactgc

SEQ ID NO: 44897 - DNA, 519 bp, Homo sapiens
gcttcccaaggacagcgaacagaatgtcctatggaaacatagttcccatggggctacaaatattgccaattttagtgagaaattacgttcctgagtcaaaatattttccctatgtatcactgttctttgaacaatctatttttttcttttaaaccacaatgacaaaagccttctaaaactctgtggtttccagtgagcacaaattaagggaacttagatgctaagatacattagaaatcgtcatcaaattcttatccttggctgtatgtacaagggaagtctcatctccttggcatacaaggcttcttgcagcacagtcccaccatgtcctccctggactgctcctgccacccaagcacagcatgtgttttcccagtcgctttacctggaattcctaccacctccatctctctgcctggtaatatccaaacctttgttcaaatgtcagcctccctgataagcctttctcaactttaccaakcaccctgtaggccagcttacaaagcatccctacactgc

SEQ ID NO: 44898 - DNA, 525 bp, Homo sapiens
ttgttttatgccactaaatttggggtggtttggtatgcagtgatagatatcagaaccaatttggtccataagccccaagtaaagacaactacctaaaaatgtcctctcagtgttgtcatggggggtgcaacctcctcttctagcaagattcaaatctggaaaacacgaaacttcataaaaacaggctttatttccttttgtttcccactgggccctgacaaatctacaaaactgaaatgtcaagagcagcccttggtatctgatatggtttggctstgtgtcccccactccaaatttcatcttgtagctctcataatccccatgtgttgtgggagggacccggtgggaggatcttttctgtgctgttctagtgatagtaaataagtctcacaagatcatgagtttgaacaagtgggagtttgcctgcacaactctccctgcccgttgccatccgcacaagatgcgacttgctcctccttgacttctgccatgattgtgaggcctccccagccacgtggaagtgta

SEQ ID NO: 44899 - DNA, 556 bp, Homo sapiens
ttttccgatttcaataactgtactatggttataacaatgaaaatttcctcattttggtaactgtactttcataactgtccttgatcccaggaaaaatacactaaaatatttaggagttagaaaaaactttacagtttttgagatccctcatgtataactccttcatgatctagcagctccaacttgcctcttggatttctcagaactcatatcctacctgccacttccttttattagtattcaacaaccttggctttctttttgctcctcaaagattccaagcttgttctaytttcaaacctttgtacttgctgttttctctgcttacagcattctcctcccagacctgtacatgctggcttcttgtcatcattgggccctaactcaaaagtgacactttaacacctcatctcacagcagcagttttttattattcagacaaaagtagttctccatacattatcaattacattaacctgttttcttatcttcatgtgacttatcactatcttaatgtatgttgtttaagtattgcctgttacttccctcatcccac

SEQ ID NO: 44900 - DNA, 571 bp, Homo sapiens
ccagcccaggaagggagtaaagccaaaggggttccaggggaacctaagaccttggcctgggaaggtgatggttgggacccatgtgactgkgcatgaccagaacgaattggtgttttccctaaggaaatcccttgccccaaactctcccctgccagctgctctgtggccttggagacaagctatttctctggttatttgctccaagttcacccagagctggaagacaagtgtggctgaggcacctgcatgaaacagcagggagagaacaggtgctcaggagtcactgggctgggttcccatcttgccatcacctctgcatgtgtgaccttgggcttgtcacttaatctctctgagcctgtttccttataggttaaacacctcacagaatcactgtggggtcaactgagataatgtatgtgaagacgcattgcaaatagcaaatgtggcaccaggacatctgctgaaacaacaggtgctaaggaacccacattctatccattttttttctttttcttttcttttcttttttttttttgagacagggtcttgctgtgcatgatcatggctcact

SEQ ID NO: 44901 - DNA, 1801 bp, Homo sapiens
tatagtcctaaaaatgatgttgtctttcaagattgaataaaatacagtgaataactatgtgttttataaatcattattttagtaataagaaggataaattatataagcttgttttacataaactatctattgccacatacacgagagaggagaaaatgtgattgcctttttaaaggataacmgttgtgaatataggaactcccacaacatgctatgctatagagttggaattaaattatttaatatacatctacatagttaaaaaaattggtggagaatcctttgatagagaaaaatctggtaatcaaaagcatgcaacagaatatcaaagcaataagccagctatttttgtagaaaaagcaattttgtatagcagattgaacatgtcaagaggtaaaattagaataaggtctttttaaactaggctaaatggtttgaatttttttttaattttatttattttttattttttggagaaggagtctcattctgtagcccatgctggaatgcagtggcatttctgctcactgcaacctccacctctcaagttcaagtgattctcatgcctcagcctcctgagtagctgggactacatgtgtgtgccactgtgcccagctaattttttgtagagacaaggtttcatcatgttggctggatgatctcaaactcctgagctcagataacctgcccaccttggcctcccaaagtgctggaattagaagcatgagccaccatgcccggcctgaatgtattttaaagtaataagtcctcaaacatttctgcacagaagaagtacaatgaaagcagaacactggggacattgttctgactgcttgcccaggatagaatgggaagaagagcttagatgcagttagaagtctattgcaaggctagagagcattgtgattcaagagaagtaaatgtagtaaaagctaatacaaagttgttttaatttaattttggtcttctaagataaacaaagtacatcagaggagccaaggaaagttgtggataagattacttaattgctgtgagtaattactgagatgtattggtaacctagtaaaatgcccaagtgatgcagaaagtggtaaaagtacctcagtgttgtttttttttcataaaaaattaaaattaaaattaaagcctatagacaataaaagtgaaaaccatgcacacagaaaaactttttatcagatgattattagacaggctgtttctgagcaccaggtaccagcagacttttattttttggcttaatgtaacattaatttgtattttgcagaattaaaacttacaacagaaatagtagttataagatcctatgctattgtgcctgtaaaatgactacaaattttataattgtctgtttgttctagttagcagtaagtaaaagaagttctgcttctgggaagctagagtatgtgtgctcttcttcattctacacactaaatagccctgggtattatatataaaacaaatatatgaacactctgcaaggcatagagaagatgacagtctggctagggaacttgagatctaagaaatgacatggcagtgagttttttgtattctctttttgttgttgtttgtttgttttttgcctcatatataccagacttgaagctaaagaagccagcaacccagaaacatcaatgaatttaagaggcaaataccatccccatcaacaaagcctgctttctttagccaattgtcctgtaaaggggcatagcaaggtagaacttttttagataatagccaccctactccatcccaacagtacagaaaaacagtgggccaa

SEQ ID NO: 44902 - DNA, 594 bp, Homo sapiens
ggtgcattcctctagtaatgggctatgaaatcagtccagtgggttgtcactggcactaaaaatttaagttcctccttgtacctctggtagaattcggctgtgaatccatctggtcctggactctttttggttggtaagctattgattattgccacaatttcagagcctgttattggtccattcagagattcaacttcttcctggtttagtcttgggagagtgtatgtgtcaaggaatctatccatttcttctagattttctagtttatttgcgtagaggtgtttgtagtattgtctgatggtagtttgtatttctgtgggatcggtggtgatatcccctttatcatttttattgcatctatttgattcttcwctctttttttctttattagtcttgctagcggtctatcaattttgttgatcttttcaaaaaaccagctcctgggttcattaattttttgaagggttttttgtgtctctatttccttcagttctgctctgattttagttatttcttgccttctgctagcttttgaatgtgtttgctcttgcttttctagttcttttaattgtgatgttagggtgtcaattttgg

SEQ ID NO: 44903 - DNA, 522 bp, Homo sapiens
tctgggtgatggcattttgcccttaaaaatacagtgaaggctagaaactggaaagaattctgatgaagtcattcctcyttcccaagagccgattaggccctgatgccactcccaggtttcagaaatttgggaagccctcagagagtggcaatttcaagtcaggagcagctgccgtccagcatagggacccatggcatcacagcagcaggccagcctgctgggagcagggaagagagctccaggccctcaccatgtgtgcctgggcgtccctctcctctctggcccagatgcttccacagaggaagaagatgaggccgatgaactgctgagctctcaggccctccctgtggccttcttctgaaaccccttcaggccagcatgggaggggatggggagaatttccagctgtgtccactcccgttactaggagccatggcaggtcctttggctcagagactcatctcatgtccctgtgggctgcccaaaaatccaaaggcatggggaagataggtgacctctagt

SEQ ID NO: 44904 - DNA, 601 bp, Homo sapiens
ttgacttattttttttttgacattagccataaatgtcaaagatgatagcttagctctcttatacttctcccctaatcctaacatacacacaagtacacgtgtgtgcatacacaagcacatgtacacatgcagacacacacacttcccagattcccatcttttcaatatgattgtatcataatttttatctgtctcttattcagtattgacatgattatgattatataaatattgttcacagctgagccacctagtgtaccatgattatattttctttcttttgaacagctttttgtttttttcagctaataattgcttttccctctcatttgtttactctctatgaacttatgattaattcagcccctttgtccrgaactataaacatttctctattgagttaaatacaccatgtaagcttaggttcctgtttcctggagccatttcttttgaaactttctgtccccctgctccctctgaactggttgcatgctaagcctctgtagatgtgtcatcaacaatgacagaataattcagataaacaggtttgcgaacaacagcctatgatggttaattttatgtgtcaacttgactcgccaag

SEQ ID NO: 44905 - DNA, 558 bp, Homo sapiens
caacatacttccctctcatctttgcacacggccctacagagagggagcccaaaagtccagcttcagtctcagagtgggagataactcgatgggaaaagtaaaaaccaaatagacctcatcctcctgattcttctacagagcaaaagtaaacacaaatcggtatctgcacacttagccctgtgtctggcatgtgatgggttctccaacctttccattgttatttgtagctgctgctaagtgctgcctgagttcaccaaaggggccagccttggaccttcctccctgtgtgacctccctcccttcccartctgtcagcagcagagactgggaattatgccagtgtgagggtcggtgctcctggccactctgttgaggtctccactggcctgagctctctgcacgctccactgagtcccggggagatggttatgaggtcacctctggcaaaggttttttagacactcccctccacatcctccttttcttgagtcaaagcaacccatgattcagcctccagggaagaggagtgaagagaagctttgaaaacaacctgcaggg

SEQ ID NO: 44906 - DNA, 596 bp, Homo sapiens
cagagtaygggatacagggaggaaagaagagatgcagaaataaattaaaaacaagatttgtttaaagaggaactgcaacttctttaattgggcagattgaaccaataaaagcacagttctctcccttcacctgttatcctttagtctcttcaactttcacattgcttcactcactctcttcctctccctttcacctgctcaccttagccaacttgaactgtgccctctgatctgacacaggatgacaatgacatcagtcattacctagcagccattttttctgataactagagttctgagtgatgatagttcatggtgagataatttccaagacctcgctagccattggtggtactactctccattaaagacaagggcatttgctgattgagaaatcaatcatacaagtgtccttggaggccaccaaggctttgcctgaactgttctcagcctatgatggtttctctttctaaacctgttcttctaggttcagctcaaacatcctctcctatagaaacctttccccaacctcccagtcagaactaatgatttcttttcacttcaactgtacttagtttataatttatatgactata

SEQ ID NO: 44907 - DNA, 596 bp, Homo sapiens
cagagtatgggatacagggaggaaagaagagatgcagaaataaattaaaaacaagatttgtttaaagaggaactgcaacttctttaattgggcagattgaaccaataaaagcacagttctctcccttcacctrttatcctttagtctcttcaactttcacattgcttcactcactctcttcctctccctttcacctgctcaccttagccaacttgaactgtgccctctgatctgacacaggatgacaatgacatcagtcattacctagcagccattttttctgataactagagttctgagtgatgatagttcatggtgagataatttccaagacctcgctagccattggtggtactactctccattaaagacaagggcatttgctgattgagaaatcaatcatacaagtgtccttggaggccaccaaggctttgcctgaactgttctcagcctatgatggtttctctttctaaacctgttcttctaggttcagctcaaacatcctctcctatagaaacctttccccaacctcccagtcagaactaatgatttcttttcacttcaactgtacttagtttataatttatatgactata

SEQ ID NO: 44908 - DNA, 596 bp, Homo sapiens
cagagtatgggatacagggaggaaagaagagatgcagaaataaattaaaaacaagatttgtttaaagaggaactgcaacttctttaattgggcagattgaaccaataaaagcacagttctctcccttcacctgttatcctttagtctcttcaactttcacattgcttcactcactctcttcctctccctttcacctgctcaccttasccaacttgaactgtgccctctgatctgacacaggatgacaatgacatcagtcattacctagcagccattttttctgataactagagttctgagtgatgatagttcatggtgagataatttccaagacctcgctagccattggtggtactactctccattaaagacaagggcatttgctgattgagaaatcaatcatacaagtgtccttggaggccaccaaggctttgcctgaactgttctcagcctatgatggtttctctttctaaacctgttcttctaggttcagctcaaacatcctctcctatagaaacctttccccaacctcccagtcagaactaatgatttcttttcacttcaactgtacttagtttataatttatatgactata

SEQ ID NO: 44909 - DNA, 597 bp, Homo sapiens
taatcatcaaagatatcattcatttaaagaccttcccctgccttctggtttttttttttggcttttsttttgttttgttttgttttgagacggagtcttgctctgttgcccaggctggagtgcaatggcgcgatcttggctcaccgcaacctccacatcctgggttcatgcgattctcttgcctcaacctcccaagtagctgggattacagacatgtgccaccacacccggctaattttgtatttttggtagagatggggtttctccatgttggtcaggctggtctcgagctccaccttaggtgatccgcctaccttggcctcccaaagtgctgggattacaggcataagccactgagccagactgattaacaattcctttgggaccactacaggatgtgatgtaacttaaaggttaagaattaaggctctggagtaggagtttctctctctctctctgacacttattggtagtaacatgggaaaattatttaacatagctatctctccattttcttgactgtgtaatggagtaaagctgtgtgacctcaggcttaaaattaactttactgaggttgttttatcaagaaaataataa

SEQ ID NO: 44910 - DNA, 597 bp, Homo sapiens
taatcatcaaagatatcattcatttaaagaccttcccctgccttctggtttttttttttggcttttcttttgttttgttttgttttgagacggagtcttgctctgttgcccaggctggagtgcaatggcrcgatcttggctcaccgcaacctccacatcctgggttcatgcgattctcttgcctcaacctcccaagtagctgggattacagacatgtgccaccacacccggctaattttgtatttttggtagagatggggtttctccatgttggtcaggctggtctcgagctccaccttaggtgatccgcctaccttggcctcccaaagtgctgggattacaggcataagccactgagccagactgattaacaattcctttgggaccactacaggatgtgatgtaacttaaaggttaagaattaaggctctggagtaggagtttctctctctctctctgacacttattggtagtaacatgggaaaattatttaacatagctatctctccattttcttgactgtgtaatggagtaaagctgtgtgacctcaggcttaaaattaactttactgaggttgttttatcaagaaaataataa

SEQ ID NO: 44911 - DNA, 597 bp, Homo sapiens
taatcatcaaagatatcattcatttaaagaccttcccctgccttctggtttttttttttggcttttcttttgttttgttttgttttgagacggagtcttgctctgttgcccaggctggagtgcaatggcgcgatcttggctcaccgcaacctccacatcctgggttcatgcgattctcttgcctcaacctcccaagtagctgggattacagacatgtgccaccacacccggctaattttgtatttttggtagagatggggtttctccatgttggtcaggctggtctcgagctccaccttaggtgatcmgcctaccttggcctcccaaagtgctgggattacaggcataagccactgagccagactgattaacaattcctttgggaccactacaggatgtgatgtaacttaaaggttaagaattaaggctctggagtaggagtttctctctctctctctgacacttattggtagtaacatgggaaaattatttaacatagctatctctccattttcttgactgtgtaatggagtaaagctgtgtgacctcaggcttaaaattaactttactgaggttgttttatcaagaaaataataa

SEQ ID NO: 44912 - DNA, 597 bp, Homo sapiens
taatcatcaaagatatcattcatttaaagaccttcccctgccttctggtttttttttttggcttttcttttgttttgttttgttttgagacggagtcttgctctgttgcccaggctggagtgcaatggcgcgatcttggctcaccgcaacctccacatcctgggttcatgcgattctcttgcctcaacctcccaagtagctgggattacagacatgtgccaccacacccggctaattttgtatttttggtagagatggggtttctccatgttggtcaggctggtctcgagctccaccttaggtgatccgcctacctyggcctcccaaagtgctgggattacaggcataagccactgagccagactgattaacaattcctttgggaccactacaggatgtgatgtaacttaaaggttaagaattaaggctctggagtaggagtttctctctctctctctgacacttattggtagtaacatgggaaaattatttaacatagctatctctccattttcttgactgtgtaatggagtaaagctgtgtgacctcaggcttaaaattaactttactgaggttgttttatcaagaaaataataa

SEQ ID NO: 44913 - DNA, 610 bp, Homo sapiens
tgggtgaagtgagccttcgccaccacaccaggcctccttccgctgcttattccccattaagaagctgtgccaagtgtctgaacgttagagtctgagatctgagtttgtgggttacttgtacagtcttttcatgtaacagagtttagggaagtgtgttcagaaacaatcgatcagccaaagtggtttaaagagaatgtgcttctatggcacttgttgtaaacagattccctgtaatgaatccaataaagcaaaataaaataaaatgtaccttcatccctggtaagcctggtggtccctaaaaaagaaagttttggtgttagttttgtttttctcaaaatatcattagcattaaaattgttatcatgtaatattatatataaaatataagttattaaaacataagcaaagaaagaaagaaaaggaaatggaatgaaaagagagaagtcataactaaaagaaagaagttctgccctaaataacctctactcacgggatttccwgcgaaaccaggcaagccaggaggcccgagcggccctctctccccctggggagacagcagagcatcattcatacgcactgtgtgtggcagacacatcagccctgacatcgc

SEQ ID NO: 44914 - DNA, 573 bp, Homo sapiens
tgatttggaagaattacaagtaaaaatgacctaatttgtgcagatctctgagaggttttatatcttacccaaggtcacaagtttgtaagtggcagagtcagcatctgaactcagatttgtctagtttcatgaggacgacaaaatgactcttgggttcagatacaggatgggtgcactgagtcttaggctttaagaattctggtgtaaaagcgatggtacccctaatgagtacaagctaatgcatgtaatttaaagtccagtaagctagagtgaaaaagtgcatggaaagagccagcatacagccattaaaatcgaaaagcccatgaatratggttaactaaattggtagactatggtatgttcaagctttagaaaagagagtgaaaagattttttaaatgaccaaagttgaaccgtttcattctcttccatttatcaccatcatacttaaaaccatcaaaacaagtactctgtattgtggctggtgccagtcccaggtaaagtttagcaggccaccccagcctgtctctcctgctgagtgcatggagcagctattagaggactctgtcagtga

SEQ ID NO: 44915 - DNA, 591 bp, Homo sapiens
tgttttattcctgcttagtattatctgtctttctggctgggggcttttctcaactgtcttgtgaccctgggctggtctctaataattttgaggaaggcatgaaaaaggctgtcagaagcactgcgagttccagttgaggctgtcatctggtgcccttcattataataaaatggaaattttcctttgaagactccaaaatcagtatctaaactttgttttttctagagaatactcttcaagtatcttgcctgggggtatgtgcgccwgtttgctgtcattctgagcagcgtcaacaaacggggctcaaggaaccacattcagtttataaattttcgtcgaattctaccgtgcttggttccttgctggtttatttctttgaaaaatgaatattttctgttagtggcagagggtgcttgatttactggctgtgtgtatgtgggagggcacctgggaacttgatctcaattctatgtattgagctttctgcttctcttctcccttggatggcaccctgggctctgcagggttaaatgggctcccttaagccttcctcctcagatgcatgggtagcatttttgctctgctgagtct

SEQ ID NO: 44916 - DNA, 530 bp, Homo sapiens
ccctagtcattaaacatgcaccactggaatgtaaacaatgttatctagtatgtcaattggttataatattttaaataaaaaagaaaaaagtggtatgaaaattatgaaattaagagttttttcattgaaaacaaaatctgtttgtggtaaagtttttcttggcaattttaggattgtccgtggattgggataaaaggggtcttgctagggccggtttcttagatttggattttgtacagattgtaaagagcctaaatgatcacsctgattatctggttgatctggtcttggatttctggtgtttgaaattgctggataaactttatctaaaaaaggaactttgcttcaatgcccttaacctagttcttggtagacatatgagagaacagccatcgtgaccacttggcaaaaataagtacttaaaattggggtctgtttcaaaacaagcaagaggttttagctttgactgtttccaacttttgccatgcttatttcctctttgcctacgttgggtctgctgctgtgtggga

SEQ ID NO: 44917 - DNA, 575 bp, Homo sapiens
tgatgttcccacattcctagcagcatggccccttcctccatcactccagtttccctgtccgttgtcccaggtcctctctggctgttaccttcctccctccctattataaggacccttgtgattatgatggtctcacccagatcattcaggatactctcctgacccccaaattctcaaccatgtctgccaagttatttttgacatattcataagtaatgatcatagattccagataytaggacaatgatgtctttagtgggtgtattattcattccacaaacaaccctcatcatccacacaatggtcttcccctaaggtagaataaaaatatcacaaggcagatttacgaggcgatcgacctagaaaaaacctgagaatctaggactgtctgatgtgtggatgtcaaatcctgggagattctgagtctctgctctatgtggactctatgttgtgtagccatttgtggaaggcttctgtgattttgtgacctagagaaaatgaatctctgctaaaatcaaatctaagaaagattggcaaagggaatttaaagatttcctaaatttttggaatttccc

SEQ ID NO: 44918 - DNA, 575 bp, Homo sapiens
tgatgttcccacattcctagcagcatggccccttcctccatcactccagtttccctgtccgttgtcccaggtcctctctggctgttaccttcctccctccctattataaggacccttgtgattatgatggtctcacccagatcattcaggatactctcctgacccccaaattctcaaccatgtctgccaagttatttttgacatattcataagtaatgatcatagattccagatattaggacaatgatgtctttagtgggtgtattattcattccacaaacaaccctcatcatccacacaatggtcttcccctaaggtagaataaaaatatcacaaggcagrtttacgaggcgatcgacctagaaaaaacctgagaatctaggactgtctgatgtgtggatgtcaaatcctgggagattctgagtctctgctctatgtggactctatgttgtgtagccatttgtggaaggcttctgtgattttgtgacctagagaaaatgaatctctgctaaaatcaaatctaagaaagattggcaaagggaatttaaagatttcctaaatttttggaatttccc

SEQ ID NO: 44919 - DNA, 564 bp, Homo sapiens
tccccgcacacgaggggcagtgatggcggcctcttcctgtgcagcctcagccacggtactgctcggagccttgggcgtccaacttgtgacctgcaaacaagcacagcgcccctcagggctgtggtgcagcctccactgagtgtttatggttggggttggtgcacagcaagacagaggggagcgcctttccctgcacattgttgatgggagtccggctttctgccaggccagacgcggtttcctctgaagcttcggttgttgtaaggctcgagcatctaccaggtctcttatcagttttgaaactcgtggcattgctgccaagcccctcctggaatgtgtgctgattctcttgtgcgrtgcatgggtgctttggtgtcaggacacatttcggggctttcagccaaccatgcgatatgcaagggagctcttgccaccgtcttgcgggctttgtcaccgtgcacccagccggtgcagtagttgccgagcccggcacccggctcctggcatcatgaggcctgggcccacattctggtgtgatgcccacgtctccgcggctcaccgtag

SEQ ID NO: 44920 - DNA, 550 bp, Homo sapiens
aaaatttacgggaggctattggtttagactgagctcctgcacttggctcaacagaccaaactaaaatggagccattcatgctgaagttccacaccaccaagccaaacctaagttgtttatctgatcttccaagaaatcaggagagacagagataataacctaaccaataactaaaaggccagttttagtgggcattgagacggaaataatacagggtggtcataggagaatagaatattctaggcggcagtttcacatgagcagccaaaggaaactgtaaatagctacagaagctatgggctgataagaccctgaaaaaaccagggtgtsgaccaagctggctaagactgactggacccaacatggcactggagtgacctaggtttcacctgggacctcattatacactcattaacataccaaacacacaccccgcagcgccatgacagttctgggaacatccatatttggtgtaaaaatgagtggcaccacagttccgagaaacctccacctttttccaggaattctcatgaatattcagccccttgat

SEQ ID NO: 44921 - DNA, 550 bp, Homo sapiens
aaaatttacgggaggctattggtttagactgagctcctgcacttggctcaacagaccaaactaaaatggagccattcatgctgaagttccacaccaccaagccaaacctaagttgtttatctgatcttccaagaaatcaggagagacagagataataacctaaccaataactaaaaggccagttttagtgggcattgagacggaaataatacagggtggtcataggagaatagaatattctaggcggcagtttcacatgagcagccaaaggaaactgtaaatagctacagaagctatgggctgataagaccctgaaaaaaccagggtgtggrccaagctggctaagactgactggacccaacatggcactggagtgacctaggtttcacctgggacctcattatacactcattaacataccaaacacacaccccgcagcgccatgacagttctgggaacatccatatttggtgtaaaaatgagtggcaccacagttccgagaaacctccacctttttccaggaattctcatgaatattcagccccttgat

SEQ ID NO: 44922 - DNA, 550 bp, Homo sapiens
aaaatttacgggaggctattggtttagactgagctcctgcacttggctcaacagaccaaactaaaatggagccattcatgctgaagttccacaccaccaagccaaacctaagttgtttatctgatcttccaagaaatcaggagagacagagataataacctaaccaataactaaaaggccagttttagtgggcattgagacggaaataatacagggtggtcataggagaatagaatattctaggcggcagtttcacatgagcagccaaaggaaactgtaaatagctacagaagctatgggctgataagaccctgaaaaaaccagggtgtggaccaagctggctaagactgactggacccaacatggcactggagtgacctaggtttcacctgggacctcattatacactcattaacataccaaacacacaccccscagcgccatgacagttctgggaacatccatatttggtgtaaaaatgagtggcaccacagttccgagaaacctccacctttttccaggaattctcatgaatattcagccccttgat

SEQ ID NO: 44923 - DNA, 572 bp, Homo sapiens
ggaggacattgctacacagtctacacccacaaaatcccatattttagctgatctttgttttaaaarttatctttttcttcacttgaacctccacctatcttttaggacttaatgtgtattatagagttccacatttacttggttaatagtttctagtcaattcaaaggtctttgaagatgggattgtgtcttgtttttcttagtatcacttacaacacaccgacctggaggaaagcagttaagaatacaaaaggaggaagaaaatctccccagataatgtttctgagggtgtcccattgtgaattagaagcaaattggaagattctagttatgctttggggagaagaaaaatccaatacagggtaggcttcttgaatttgtagggagtttggaatattcaatcacagagaagtttagtagataaatagtggggaaaatgtcaattatcgaatcacccaatatttattaaatgcccactgacatcttcaaaatatttcagatgcagaaagtagttccaaatggacaaagcacttcaccatctgaactatttaaaaccccattctaagtgactg

SEQ ID NO: 44924 - DNA, 1525 bp, Homo sapiens
caggcgtgagccaccacgcccggcatttaggtgagtttttcataaggattttatagtgtatgtttttggatttttaatttctttgtgccccaaaaaacatagaaatccgatcacttttttaaaggcatttcagaaatgtttaaacctccttttatcctagtgaccagggaaccctgagagctgaccgtgcacactctctgcctcaggtctccctccttttctctctctgggtggaaacggtgcggccttacctgcagacggtggacgagtggatcgtgcacgggcacctgtgggatggcgccagggagttcatcatccagaggtgagctgcagcagagcacaaggtcactgggggctggcatcaccagtttcctccccatgaaaatcaaatgctttcgttagtttcagacagtactgagaaagcacagttcacatcacagaacttgtcgtcatcataggcaagttctatctcatttttacggaaggcatcagtaataccagctgattagaaatatctttgtccaagttttgtcagtccgcaacttttcttaagcaaattatatttttggatggtagtatatttatggctagctagtacacactgcttcccataaaatgagtttagatgatatcatatggtttcagctatttccattgtaaattatcagtaaagagatacagaaatattacagagtatgcctctaatatatttatttctctgaattatctactgatttcttttaccttagtatattttacaaaacaaggaaaatcttaatccatttatgacaatttcccttcagttaattgatttttctgaatagaatcatataaacaatgtagagctatttgtactcttttagcccaattttaaattatgcggtatatttagatatatggtttctattgatagctatccattgagctcatcaggaaggataactttaagtctttagtgttctggaagggtagcaatatgtatgcaatgctcacataagtgaactgacccttccttcaactcaatctcatatctgtcactgtgttctgattcatcaatctcacatgagaatttttgtgaaaaataggactctgactgttcttctagggtgatgattgaccatcattttattgttaaaagtagtccagttaagaatctttgtagggaaaatgatagagaagtctgcaaattagtttcacagcagatggtaaatggataaacttttattcttcttctaaagaggaccaaattagtcatattttaaataatccaattcaggaaactatttctacttaaattttacttacactattcaaagtatttattcacttttctctttaaactgagatgagattaaaactgtcccattttgcctaaagtttgcttcagtttactaataattaatactatgttttataatgtctggacaacaaactagaacaagtrtgctgtttttaagaaagagaaataagagtttaaaattcttttgaatctctttagaaacaaaaatgttccagttaatcacag

SEQ ID NO: 44925 - DNA, 518 bp, Homo sapiens
atgcatcattttatcctcagtgaaactgggatacaaagcggggctgggcttccaggtcagtcgctaaaagcggaaaaaacaaatcctctcccctagcctaacccaagcggtagggatattctagagctactaagctggtgcaaaagtaattgcgttttttttgccattaaaagtaatgtccaatatgcagccacatgtaaccagttaagtttcggtgtatgcaaactaaaaattctttttttgttttttttttttgagatggagtctggctctgtcayccgggctggagtgcagtggtgccatctcagctcactgcaacctctgcctcccaggttcaagcgattctcctgcctcagcctcccaagtagctgggattacaggcgcccatgaccaccacgcctggctaattttttttgtatttttagtagagatggggtttcaccatgttggtcaggctggtgtaaaactcctgacctcaagtgatccacccacctcaactcccaaagtgctgggattac

SEQ ID NO: 44926 - DNA, 605 bp, Homo sapiens
tggccaaaggcagtggtccccaaacttatgtgctcatcagaatcatctggagagctccttaaaacatagaatctgggaccctactctcagggtttcttattcactagaggtctgagttggggacctgagaatttggggaccacacttyggagaccactgcacttgaggcttgggaaatcagtaagcataagttcttaaaagttttttccttgtctccttcgggagtgtcgcattgcatttctccttaatcttatataatgtaattggtatttcttttaaatatcttccttcttctctaataaattaggtgacattgaaggaaatacctatattcttgacaaattaattagatgaaataaaaaaattataagggaagagtagagttcttatatcaaaaccacatatggcaaaccaatatgtaaacttctcaaaatgagcccaaatgtatgattatgtactgacaataacattcctgaatgtatggatttatataaagaatttcagatacaaagtaacgatttctagccaatttccaaatgtcatcacatgccgtttcagtatgtgggattaacttaattttttttattgtaccactcttaggctct

SEQ ID NO: 44927 - DNA, 1125 bp, Homo sapiens
atctgtgcctccaatagaatgtaagttccctgacggcagaggcttgatttttgctcactgcagaatcccctatgtctagaacagtgcctggaacatatcagaggctcgttaaactttttttttttttccacaacctggcatgtggagcatctctggttcacacagcaaaatgcacatgatcattgataatctccaagggtctgtttagcctctctcttgagggatgtgtcacagggaaatacttatcaatgtcttcatgttcattaggggacagcatttctctgacaggagaactcaaacacacttggttcactatcccatcctctggtctcaactgattgaaacagtgcaaagccaggaagacatatcacagcaaaagaaacttgaggctggggtcagggttgagagatggaagagtggagagaacagggcttcttctaggtttaggattatttctacccagatctgtttagggatgtattactgtccccagttaacagataaaaagattgaagttaatcaaaataaaggtctgccagctaggctgtaccaatatcaggatctgaacccaggcctgtcttctctaaagcctccaactccacctgcctgctcccacctcagacgccctacagacttgactggcctcagaaacagcattgtttctccaagccgtaagtctcacttgtcaatgaggaggccagagacaggctgtgcagcctctgatgggtacctgcctggggacccttggctgccaccttcttctggaggtttgggcctaaaggagaggggctgcccacaaccagagcttggctgcttgggtgatggaaccctcactgactccagtaaggggaccttctttcctttcaytctttgggaaaataacccacctgcagagaagctgaatcttgcacattctggtacatctgcatatcctctctaacttacagggcataacacagaaaatggattcattcaaatttcaccatagtggacagaataacctacaagttaacacattagggttgcatacattccagagcagccttgatagcttataatttattcagttatctggacttttgctggacttcagtttcctcaacagtaaaatgggaacagcaccat

SEQ ID NO: 44928 - DNA, 949 bp, Homo sapiens
ggacaattctttactgagaaaatagaaacagtttatcatcaaatctaccaaatgtctctttctccaatgctttgacaaaaattttcattcccacctgtctatagtgatcaaatgtgctcttattttactttatgttatttagagatagaatcaaaactgggatataataatatttcattatttaaaacatatttcctagatctcccttccaaaataacaatgtgaggagcttaatggaccccagcaacacaacaataattggttaaaaaaaaggttaaaaacacaagataaaataaaatctctagaaatttccttaaggatataaggcaagtgaagaaacatttattcaaaataatctgttaaatcttacttaggtcagcaagagtctataaaacttcagccatgaatctctgtctccaaaaacaaatttttctttttcaccctagctcctagtcaaggaagatgtatcaccacagcagaggcaggctactagcttttcttacccaataccaccttattgttacacaggctaaattttagatgaatgtagcagtgatgtcaaagttttcttcttttacccagttgatgactattaagacaaattctctaccctaaatatcacaggctaagaagtgaaataaacatagttaaataagaagattaatataacagatactttttccttcttttatgtctttaaattataaaaatttatataaaatagtaattgtaacactatattgttagatttgttattatacatatatatgagtagtttgtatatcaatagtagcataaaaataactatataggaacaacatttcttcatttcactagaatttrgtatcttatttttttagggctgccaaaacaaaataccacagattgagtgtcttaagcaatatacatttattttgtcacacttctagaggcagggagcccaagatca

SEQ ID NO: 44929 - DNA, 798 bp, Homo sapiens
  misc_feature (1)...(798): n = A,T,C or G
cgcaagacaattgcttgaacccaggaggtggaagttgcagtgagttgagatcgcaacactgcactccagcctgggcaacaagaccaaaactccgtctcaaaaagaaaaaaaaaaaaaaaaaagtgaagtctttctttacagaagaaagcaaactaattacttagaacaaatggtcaaaattttaaatcaccattttagaacgcccaatgtaataactaattcaggcaaagatcattaaaggatactaaaaccattaggtgaaatgttaatgagttagatattcctaaggtgtcataattacttacagcaaagaagaaaatgcatctttcaatggtacaatctggtggtcaatactcaaaagtaaattaattcaggatctctaataaatagaaaaacagaaattatgtatgtccaattgcatgaaataggcatcatcgcttatgttttaatctgaacctaatcaaatttgtaaatctaacttccacttcacagaatttagaaggaataaaggaataaattaaatgatgctgtaagaaacaatcanactttgggaggctgaggagggyggatcacaaggtcaggaaattgagaccatcctggctaacacggtgaaaccccgtctctactaaaaatacaaaaaatagccaggtgtgctggcgtgcgcctgtagtcccagctactcgggaggctgaggcaggagaatggcatgaacccaggaggcggagcttgcagtgagctgagaccgcaccactgcactccagcctgggcgacagagcgagactccatctcaaaaaaaaa

SEQ ID NO: 44930 - DNA, 524 bp, Homo sapiens
caacataacataatcataggttccatggattaggacatagacatctttgagtaatgggaagtttcattgttctgcctaccatgagaggacttctacatattaggtggatttgtatgcctacaggcaagaccaagtaggaatgtttattcctgttcaaaaagattcattaagagagtgagacaggatctcgccttgtctcccaggctgagtgtagtggcacaattatggctcactgcagcctcaaactcctgggctcaagcaatcctcccatctcagcctcctgagtagctgggacttcaggcacgtgccaccacacctggctaagttttttgtttttttgtttttgagacagggtcttgttatgytgcccaggctggtttcaaactcttagactcaaacaatcctcctacctcagcctcccaaagtgccgggattaaaggggtgagccaccacacctggccagtttaaaatatactcttaaactttgtgtcactatcccacaatatagtttcataaaacagcca

SEQ ID NO: 44931 - DNA, 595 bp, Homo sapiens
agattgaacttttgttcaagataagctttcttgtactcatttctgcaaattttttctgctctaggttatctgtcttcagaaaattatttctatgttcgatcaacactatctttcatggctataatatcttatctgtcattacttttgttctggttctgcagctctacattgtgtgctatttttttccactgtatcctccttttcttttattcattgacttaaaaatgctaattctactcagtggtgtccttcttgtcatttttaaaggaagttttgtagagttaccctaaaattctttgttgcttttgttgtttttataatcttcacttcttaatctgggcaattccacccattcctattaattgccccaaaatagtgttgatgaattgtctttgatttcccctccctgttgaaacagatgctgtyggaattttctctgtaatctttgaacttgttgctttatttggttattcagctgcttgaaggagggtataagcaggccctgaggcaagagacagctgcattctgggtttgttatttctgctcactttcctttcaaatcagttgactcccctgccaaggagcatatctgaat

SEQ ID NO: 44932 - DNA, 637 bp, Homo sapiens
tgcattctgtaccttagtcctgtgaggagaaaattaagttgcttttctctcgttttaggcacttgcagttacattcaccacatttgtaacggagccattgaagcatattggaaaaggaactggggaatttattaaagcactcatgaaggaaattccagcgctgcttcatcttccagtgctgataattatggcattagccatcctggttagtattaatatattagcactgtcgggccaggcgcrgtggctcacgcctgtaatcccagcactttgggaggcctaggcgggcggatcacgaggtcaggagatcgagaccatcctggctaacacagtgaaaccctgtctctactaaaaaaaatacaaaaaattagccgggcgtggtggcgggcgcctgtagtcccagctactcgggaggctgaggcaggagaacgggggaacctgggaggcggagcttgcagtgagccgagatcgcaccactgtactccagcctgggcgacagagcaagattccgtctcaaaaaaaaaaaaaaattatacatatatatatatttatatatctatctatatatatttatatttatatatctgtctatatttatatatttattatatataatatatatttatatattatatat

SEQ ID NO: 44933 - DNA, 637 bp, Homo sapiens
tgcattctgtaccttagtcctgtgaggagaaaattaagttgcttttctctcgttttaggcacttgcagttacattcaccacatttgtaacggagccattgaagcatattggaaaaggaactggggaatttattaaagcactcatgaaggaaattccagcgctgcttcatcttccagtgctgataattatggcattagccatcctggttagtattaatatattagcactgtcgggccaggcgcagtggctcacgcctgtaatcccagcactttgggaggcctaggcgggcggatcacgaggtcaggagatcgagaccatcctggctaacacagtgaaaccctgtctctactaaaaaaaatacaaaaaattagccgggcgtggtggcgggcgcctgtagtcccagctactcgggaggctgaggcaggagaacgggggaacctgggaggcggagcttgcagtgagccgagatcgcaccactgtactccagcctgggcgacagagcaagattccgtctcaaaaaaaaaaaaaaattatacatatatrtatatttatatatctatctatatatatttatatttatatatctgtctatatttatatatttattatatataatatatatttatatattatatat

SEQ ID NO: 44934 - DNA, 607 bp, Homo sapiens
ccaacaataaatcaataaattatttccccccagtccattgtgtgaggtaatcttttaaaagtactacaatggaccgggcgcggtggctcaagcctgtaatcccagcactttgggaggccgagacgggcggatcatgaggtcaggagatcgagaccatcctggctaacacagtgaaaccccgtctctactaaaaatacaaaaaattagctgggcgcggtggcgggcgcctgtagtcccagctactcgggaggctgaggcaggagaatggcgtgaacccgggaggcagagcttgcagtgagctgagatcgtgccactgcactccagcctgggtgacagagcgagactccgtctcaaaaaaaaaaaaaaaaaaaaaaagtacyacaatggaattataaaagtaatgcaattggaatacttttcaagagaggtcttctgttacttgagtggaaattagggaaattaggaaagaagaagagatattatattgtttgtcatataatgctgcatgtaatattctttgattaaatacagtttaaagactacattacaaaacttcggttttaagatctttgaagttctttaagaacattactgcaatacactgtaa

SEQ ID NO: 44935 - DNA, 384 bp, Homo sapiens
caagctcatgcagtcctcaccacagccccagcaggaatgtgatcgtatctccatgtcatcataagcaaaccaacacctaaggaagctgtgaacaataaagctcacaagaaaatgaaataagagtttttaaaaataaaatgtttctgtctccaagatcatttccaggatgtcctgctgcctcacccggaaacagaagggaaacaaagaagctcgtcagaaaataaatgaaaacaaactgaaaygagagcgtctcctgttagtaacacatatgggtttttgttttaaggaaacatgctctatgttttgattgcccttatttctgttttcttagcttcatttagcaaaaaagatataggtggacaggtggcaggatgaaccttcaca

SEQ ID NO: 44936 - DNA, 1915 bp, Homo sapiens
tgcataattttcatgacatccaccaccacagctaagcaaaaattccttgcattcaaagggttggatgcagctgaagatgttttattatgaaagggaatctctgatgagctgttygccatattattaaaagatatccatcctactacttttttactattatttcacttaaccagattggaaagaaattttatttgatatccgcagctctaacctagcaatggaatttgagtaatatgttccctacagccatattttaatatgtaaaaaagcttatatccctgaagttcaatattatgacactatacactatgttatgacatatctattttcttagaatgaagtgagaaagggaagactatggtattctcagaacttgggactcaaactcatattattgcagggacaaaacagatactgttagtgaataaagtgggtttagcatagactctcaagacatgtctcctgtatagtagggaagccagttctctattccaattattttatgctaacagaatggaacactggttttgtctggtcttatattttttaaaacaaattaaatttctgattttgttttaataaggctcactatatgcactaaaaactcatttcacgaatttgaaaatgctatgttaaaacaaaaaaactagaaattttacttagattgtaaaataacatcagttacttttaaagtttagaactttgagaagactttaaaatcatcactgtaatatacacatttcacatacctaaagttcatgacatacttaatgtttacatatgttgacaaaattgcaagtcataccaccatttagtcaaaatatcagaatactgacacctaatctactcttctttattatttatttattttttgagacaaagtctcactctgttacccaggctggagtgcaggggcgtgatcttggctcactgcaaactccgcctcccgggttcaactgattctcctgcctcagcctcccaagtagctgggactacaggtgcccgccaccatgcctgactaatttttatatttttagtagagacggggtttcaccatgtttgccaggctggtatcgatctcctaagtgatccgcgtgcctcggcctcctaaagtgctgggattataggcgtgagcccaccgtgtctggccccactctattttcagcgttccaggatccagcccaacagagcaagtaatacttaaaataactgcataaaatcctaattactacaatgttcttaaaactatttttgtaccacatattgcattattcaatttaaatctagcataacctccagagtgtgtatagatctgctgcaaaagtattagtttataacaaatatagaaagcttagaatctaagtttataaaccaataataatgctaaaatatcatgtactactaactaacaagtctggagctaatagtcttcattcccaaagaacttttggaggcaccatactttgtctacagtagccagttaattttatttcataatttttatcagatcttaatctcagcaagatttcttctttttcttcctctaaatcctttgttggaatctgaaatacgcacaaagtaacatatttttgtgtatactaatttatatgaattgcagttggtcattaacaagatttaagtggaaggcattcaatattgcttaactgaatattcattaatttaacaagtcttatcttacctaccacaggtaagatgcaatatgaggtacaatggtgagaatacaaagagggtgatatcatgatatcaaggtgtcaaggttcagcttttatattcttaagacattgtgtgtcttgaccaagtcacattaacgacacaggtttcaaggttcttacctgtacaataaagataataatggcatgtgttgctgtgtggcttgaatcataatagtgtaaca

SEQ ID NO: 44937 - DNA, 644 bp, Homo sapiens
  misc_feature (1)...(644): n = A,T,C or G
aaagacagagaggattacataaataataaactaacaaactgctttcccaaggtctaggaggtgtgatttaaagactgtcaattgcatgacacttagcattaagccagagaaaggcttttgtgaaaatgtcagatgttattagcagcctgttttataaatgaggaaattgaggcctcacaaagcagtggcttgtatgagttctggcaactggtttgttaagaggtcgggataaaaatccaggaattttgactctacatatcctgctcttgtcatcgataggcacacagcaaggccacttggaaagaacttatgtcaagttatagtctgtctaaagcaagaaggtatgcacaggtataacagtgtcagaagaattagaacaaacaacaatcgtctagaatgtccatgttccctaagtgtggaagtttcccattaagtggntgagactgctccagagttgtattcagcatgggcctgtcggctgatactgtggacctgcctgtcaggaagaaatcctcttcttcycccagaaatcctgcacctgtagcaacaggtgccatttgcagagggtgccactgccttcacaatccctttctaggcactatttcctttatttttgccctgatatggcaacccaaaagtcatgc

SEQ ID NO: 44938 - DNA, 427 bp, Homo sapiens
ctggagtgcagtggcataatctcagctcaccacaacctccgcctcctggrttcaagcagttctcccactcagcctcccaagtaactgggagtacaggcacccgccaccacgcctggctcatttttgtatttttagcggagatggggtttcaccatgttggccaagctgatctcgaactcccaacctcaggtgatccgcctgccttggcctcccaaagtgccgggattacaggtgtgagcccctgcgcccggcccataaattgattttcaaacgttaagttaacggtgcacggtggaataaacgtgcttcctggccatgaagtgttctctcttgtgtgtatgtatctcatgcactcagtcctcattatttgtgggttctgtgctggtgaattgcctacttggtaaaatttatttgaaaccgcaaatca

SEQ ID NO: 44939 - DNA, 427 bp, Homo sapiens
ctggagtgcagtggcataatctcagctcaccacaacctccgcctcctggattcaagcagttctcccactcagcctcccaagtaactgggagtacaggcacccgccaccacgcctggctcatttttgtatttttagcggagatggggtttcaccatgttggccaagctgatctcgaactcccracctcaggtgatccgcctgccttggcctcccaaagtgccgggattacaggtgtgagcccctgcgcccggcccataaattgattttcaaacgttaagttaacggtgcacggtggaataaacgtgcttcctggccatgaagtgttctctcttgtgtgtatgtatctcatgcactcagtcctcattatttgtgggttctgtgctggtgaattgcctacttggtaaaatttatttgaaaccgcaaatca

SEQ ID NO: 44940 - DNA, 1291 bp, Homo sapiens
ctgtgttatattttaaacagtagtataataaaactgtcccatattcgtattcagggtcctgtatacaaccatgccagaaaaactcccaaagagatttaataaaatgaaacacatttattttcatggtcccttcattgagctctttatgaaactgagacaattacacgtatatgaccaccttgcagacatcaggaaagtacagaattcccagctgggtccataaggctgtactacttgacagtgcctggtttaggctttcattgtatttatagagctactagaaactcacacactggagacaaatgggaacaatcaatagaagctggatactttgcacattgagttataacaatggtaattaatgtggacatttctgggacccccagaacagtaactttggtgtaagagaggctgcttaccctattatttgactcccaaagaattttgatgattacggtgtatcttatgtgtctaccactttgcagaagcatttggcctgagaagataccacaccctctccatcgttttcataagaattgcctaccatctacagatgaacccacccaagcaaagccagcatgctctgcataggaagcctgagatgatggagtccacatgctgtttatttagtcatcatagctttatgacttgaaaatgttgacagagacatgcatctaccagtcaccatggcagggattcaatagcccactgtgccacagagggcatgccttggatgtagagagtgaagactttccacaacttgtgaatgagccctctgtgagtttagccaaaacattcatgtcaaagaaatggaaatctcaaataaaacccatcgcaggccaagctcaggagggctggctagccaacaaatcctgaacaagggggttcaagggaaaaggaaaacatgtgtttcataggcatgtatgaaaataatcttttcttctatagcttttgaaatgaggataatgaaatatcagttggtctttgaggatgatgaaaggaatattttttgtaagttataaaacaatagcgtctgcctttagcaagtaatctcaagagagtcactttcagagtccakactggaagaacacttaacttcaaaatagctctttacaaatactaatcagatggtccacaaaactctctgccatatgaaagttatcttaacccaagtagggaagtcacagatagctgtaaatatctgtgtgcctagctctgtgttagaagcaatggtgaatgtgtgtgtgtgggatggggtggagtcagtgggtatgtgtaggtgtgttggtgg

SEQ ID NO: 44941 - DNA, 552 bp, Homo sapiens
ataattgctgcactactaaatcttgcaacttctatattaagacaaacttgatgaaaaatgggtcaaaatttgaggctcaatatcagcctcatttggcaacagagccaatcctcagtaatctgtggaaatggcaggcagggagagtagggaacatctccaaaacccattttagcaatattccaacagttccagttatcagagctcttaacaaagagcagaatttaaggttcttcctcaattckcaggccaccctggaggtgaggtgagagaaagggaggaaagggcaggctcctgactctctttactgaggaaaaaaacaaaaacaaaaagacagaaaggaggagattaagaccaacacataaggccacaaagaaagggagaatgatgactgttttgaagcgatttgcattcttttagcagacctgagtaaaaggaaagccctcccgaaaaacacaaaaacactgccccactcacttcatttcttcctgaagggcaggctcaacaggactaaaaatctgctccttgaacaggagatttgctaaacaatccatg

SEQ ID NO: 44942 - DNA, 588 bp, Homo sapiens
tagaaaagagcagatatcaatgaaatagaatataaaggyaaaatagagagaattaatagagctaaatttggttctaaataaactccttgtaagactgagcaaaaaagaaagagaaagttatacagatagaggaggaaaacacaaaataaataacacacaaaatatggaggggtcaggacaaaaatgtaaggccaagattaaagcatattagaccatcattaaaaattttatgccaataaattataacatttaaccaaaacaaaaaaacataagaaaagtataatttgttaagagaaactcaagtagaaataaaatatgaatgttgctaaaactattaaaaatagttgaacctgtagttaaatatcaggcccccagaattttataagtaggttccacaaaacttttaaggaacacatcatgccaaattcaaataaacattttagaacagaaaataagaaagaaatctatggcttattctataagaccagcataactttgatataaaacaagataaggacaaaacgagaaagaaaaattataataccctgttgttcatgaaaataggtacgaaaagcctagaaagataat

SEQ ID NO: 44943 - DNA, 588 bp, Homo sapiens
tagaaaagagcagatatcaatgaaatagaatataaaggtaaaatagagagaattaatagagctaaatttggttctaaataaactccttgtaagactgagcaaaaaagaaagagaaagttatacagatagaggaggaaaacacaaaataaataacacacaaaatatggaggggtcaggacaaaaatgtaaggccaagattaaagcatattagaccatcattaaaaattttatgccaataaattataacatttaaccaaaacaaaaaaacataagaaaagtataatttgttaagagaaactcaagtagaaataaaatatgaatgttgctaaaactattaaaaatagttgaacctgtagttaaatatcaggcccccagaattttataagtaggttccacaaaacttttaaggaacacatcatgccaaattcaaataaacattttrgaacagaaaataagaaagaaatctatggcttattctataagaccagcataactttgatataaaacaagataaggacaaaacgagaaagaaaaattataataccctgttgttcatgaaaataggtacgaaaagcctagaaagataat

SEQ ID NO: 44944 - DNA, 558 bp, Homo sapiens
caagcaattggctctatagtacggggtccctttgctaccaatctagcggacttaaaagtgaaagcaggctgggcatggtggcttatgcctgtgatcccagtactttgggatgccgaggcaggcagatcacttgaggtcaggagttcgagaccagcctggctaacgtgttgaagtcccatctctactaaacaaacaaattagctgggtatggtggtgggcgcctgtaatcccagctactctggagcctggggcaggagaattgcttgagcctgggaggcagaggttgcagtgagcygagatcgtgccactgcattccagcctggatgaaagagtgagactccatctcaaaaaaaaaaaaaaaaaaaagtgtgaaagcacgtttaagctaagactaggtataaatgtaaagatgtcacagataattaccaccaggacctatggacaaagagacatcactagggtcaatgcagcctaacagtcttcaaggagtataggatctgagttaggcttggaggatgggtattagtaaagcttcctttatatcaaatgacagatacc

SEQ ID NO: 44945 - DNA, 582 bp, Homo sapiens
tggacatccttcatttaggtaattattattgctattaaaatattacctgaaagggtgcatattattgagcaaaatgagtgcctaagtgccttatctctcccacttaatatttctactgaattatgtattctatttcttactaatagagaaaatgaagttccttatgcctttctttagctttattaggagatagaactaattttgaggaagtgctacaccaggaatgcatttgtttccctgaactgtatataagtaactgagctggggcagtgtgaaaggaaagagaggagaggggaggaggaaaggagatgggaggaggagaggtttgttgattaccactctatgccagatattatgctagagagcaaacagaatactgaaatcacctcctccaactgcccagaaactgagtgaggtaggcatattcccatttgacagatgaggaaatcaaggccccaggtcacatagctaaggattgagccaagattcaaaccygggcctgagtctagagttcctgatcttgcttcagaaattgtcactgttagagaagacttgcatagctgccaaaagatacatgctaat

SEQ ID NO: 44946 - DNA, 603 bp, Homo sapiens
aagcgggcaaagagaatttgccaatagctgggacttcgtcacttaaaatctggtaggagccccactcctatccagccaggactaatgctttctctcatgtagttgtgaggcttggcttctattcacgagcccaaagactggcagaatccaggagaaggctaagaacaggagtgacctctccaagaggcatccactccaaacccagatgacggagttagggggcatgaactgatcaagaagcagaaactggacacacaggcaggggtacttacctttctggagaatcctagaggcctcaaagtgagtgacacacacaccaagtgagtgacacmcacactaaggtgccggtgggattcccaccaagaggctgcttcaggtacgcacggccgtcctgcctgcgtctgagcaccagatcctgttgagcggaagtttctgccctgctccttcacggcgtgggcacggtcgttcatcaggcatgtgcagcatcctcaaacacttctaatgctcactggtaaaaccaatccacttaaaaacacactgcatttccaggatcaatgaggagctcttaatgaccccagatcgcacgtcctcctcggccaggcc

SEQ ID NO: 44947 - DNA, 413 bp, Homo sapiens
tagagatctgactcacagaaaggaaggatgacactccacatcaaaggtggaagtggacaggtgttttyaaataatcatttccagctgggcttgggggctcagacttgtaatcctagcactttgggaggccgaggcaggcaaatcgcctgaggccaggagttcgagaccagcctggccaacgtggcgaaaccccatctctactaaaaatacaaaaaattagctgggcatagtggcaggagcctgtaatctcagctactgcggaggctgaggcaggagaatcatttgaacccaggaggcagaggctgcagtgagccgagatctcgccatagcgcaccagcctgggcgacaagagtgaaactgtgtctcaataaataaataaataaataaaatcatttcatttcccacccaaatat

SEQ ID NO: 44948 - DNA, 550 bp, Homo sapiens
gaaatgttaccaaaaccgaaatgacatctaaaatctctttaattatattttctactcaattcaaacttcctcttgataggaccagctgtattttcaaagagaatacaactccttttttttttttttttttttgagacggagtcttgttctgtcgccaaggctggagtgtggtggcatgatctcagctcactgcaatctccrcctcccacgttcaatcgattctcctgcctcagtctcctgagcagctgggattacaggcacgcgccacagacccaactaatttttgtatttttagtagagatggggtttcaccatgttggtcaggctggtctcgaactcctgatctcgtgatccacccactttggcctcccagagtgctaggaatacaggcatgagccaccgcgcccagcccttgttaattatttttaatctgtcagacccagaagacataccatcaaaattttaaaagatgaggcaagtactttaggaaaggtcgggtgacatagaaaagtggtagcttggccgggcacggtggcttaatgcctgtaat

SEQ ID NO: 44949 - DNA, 626 bp, Homo sapiens
ttttatattcaactaggtttaacatgtaaccataaccaaatatttaaattttctctccaggagcttgaaaatatttatttttcttgatacttacttcgccttctgatttctgttttttatactgaaacagtcttttaaatgatggcattcattgattaattctttatttttctcttctagcagaccttctttttcactctcgaaacagcagccttggatattaattactatttgttcattatcccctttcttatgagcaccatctagttgctgttcaagctacagattttcatgttgtagttgagatatccactcgtctacatagtcttgctttcctttatctgatgctgtgtttggcttargtcctttggcacacttttttttgaggcaaaagataacaataagttactgaacaactttctaaagctggaattaaattcaataccctaaaaagtaaactccatgagacaagaagttctctcagagaattttgtattgttcagatggccaaattaagtcatcaaggccatccttaaatgtgttcgctttttgacctttttcttttgacgctttcttcgcaggcctgtcatactcgtctttctctttcctgggaaattgctgatggt

SEQ ID NO: 44950 - DNA, 605 bp, Homo sapiens
gcccgaggttggacctagtaaaacaaaagactcagagaagactgactataattttggtaaaaggggagagtgtattagtttgttctcacactgctatacagaattacctgagactgggtaatttatgaagaaaagaggtttaattgactcacacttccacagactgtacaggaagcatggctagtaggtctcaggaaacttacaaccatggcggaaggcaaaggggaagcaagcacatcttaccatygtggagcaagagagagagtgaagggggaagtgccatacactttcaaataaccagatctcactcattatcccaagaacagtaagggggaagttcaaccccatgattccatcacttcctaccaggcccttcccctgacacatggggattacaatttgagatgagatttggatggggacacagagccaaaccatatcagtctttgtcaatattttaataaatgctaaagatgataagattaatagccttggtacaccaattaataatatgtttctagaattgaaagcaaaaatcatatgatcatctcaatacaggcagaaaaagcttttgacaaaatccaacatcccttcatgataaaaac

SEQ ID NO: 44951 - DNA, 605 bp, Homo sapiens
gcccgaggttggacctagtaaaacaaaagactcagagaagactgactataattttggtaaaaggggagagtgtattagtttgttctcacactgctatacagaattacctgagactgggtaatttatgaagaaaagaggtttaattgactcacacttccacagactgtacaggaagcatggctagtaggtctcaggaaacttacaaccatggcggaaggcaaaggggaagcaagcacatcttaccattgtggagcaagagagagagtgaagggggaagtgccatacactttcaaataaccagatctcactcattatcccaagaacagtaagggggaagttcaaccccatgattccatcacttcctaccaggcccttcccctgacacatkgggattacaatttgagatgagatttggatggggacacagagccaaaccatatcagtctttgtcaatattttaataaatgctaaagatgataagattaatagccttggtacaccaattaataatatgtttctagaattgaaagcaaaaatcatatgatcatctcaatacaggcagaaaaagcttttgacaaaatccaacatcccttcatgataaaaac

SEQ ID NO: 44952 - DNA, 337 bp, Homo sapiens
tgcgtaggcagtggygtgatcatagctcatagctgtaaccttgaactcctaggcgtaagggatcctcaggccacagccttccaagtagctgggactataggcacatgccaccccactcagcttggcctactcactttgtatatgaataaacaaaactggctcttccatgaacaattgacataattattgaaatacttttcatttttgtagagacagggttctgctatgttgtccaggctagtctcaaactcctggcctcaagcagtgcttccaaattggcctccaaagtgctaggattacaggtgtgaaccatagtacccagccagttttttctttt

SEQ ID NO: 44953 - DNA, 584 bp, Homo sapiens
aatgacctccttgccaccaaatccttcctttgctcattttctttttctttctttctttctttcttttctttccttctttctttctttctttccttctctctccttctttctctccttctttctctctcttttctttctttcttctctctctctctttctttttttcttttgagggggacagagtcttgctctgtcgcccacgctggagtacaatgatgcaatctcggctcactgcaacctccacctcctgggttcaagcaattctcctgcctcagtctcccgagtagctgggattacaggcacacgccaccacgcctggctaatttttgtatttttagtagagacgaggtttcaccatgttggccaggctggtctcaaactcctgagtgcaggtgatccacccaccttggcctcccaaaatgctgggattacaggcrtgagtgagcccctgcgcccggcgcctgttacaaattaataacactaaaataatagcattgctttgtgccattattccttcattcatttaaaaacttttattgagaaactacaatgtggaggcactgtttcttaagctctatggctat

SEQ ID NO: 44954 - DNA, 607 bp, Homo sapiens
ctggtatgggttacagattcattttacaattttttttgagttacattctgtcagaaatcatgctagaagccaaggatacaagaattagaaatggcataggttttgtttgaggatagttcatattgagtaagaatcctctctgcctacagaggattgggtcctgtgacaaggaatgtcctgtggtgcttggggaagatgtggcttttcaactgttacattacttactcagtcctactggaacccatctggtgaggccaatgaaggaggagatttatagaattcttattctggaattcacagatgggcttgtgggggggatcgtgaatccctctttttacatgagtatgtatagattttcatcagatttgcaaaaggtctataaaccccaaaattagaaaaactcttctaactctgaaactttagtccttagataacccaggtaattgagtctacaggttttaaaattgtctgaaaaagtcaaagatcttttcccaaaagctactttaaagccttgagatactagtcccaaaacaaaacaraaggtctttcccagtgtctgcagtagttttgggtattttcatgcaatgttaagatagaaaaagttagg

SEQ ID NO: 44955 - DNA, 647 bp, Homo sapiens
tgtctatggatgaatacaaaattcttgttgtcgttagggaataaaagtgagtgagctcctattctgtcatcttattgatatattcacccctgtcataaaattatacccccaaagtatacacacaagacaaagctaacaaaaatcttgagaaaaaaagcacatttgagcagagaagtaaaagtaacattttaattatccattgatggataggaaaaaaaaaaagacagaaggcggcattcaggcagaggaaataacataaacaaagaatgaggagaatgtgtaatgtgtttagggaatggctagtagctttctgtggacaaagtaaatgataaacataatattaggaaacatgatagaaaaatagatttaactaaattgaggataactttaaacttcatgtcagggagtttagacttaatggggagccaattaacatttttaagtttgagagttgtartcaggtttgttttccagataaatcactcatgaagaagggaaaaaatgaggccaagcacggtgcctcacacctgtaatcccagcatttggggaggccgaggtgggtagatcacaaggtcaggagttcgagaccagcctggctaacatggcgaaacctcatctctacaaaaaatacaaaaattagctgggta

SEQ ID NO: 44956 - DNA, 523 bp, Homo sapiens
tgcatagtttcttcataatacacattttccatgaacattttgaagactcctcatatacttttccaattcttaaatatttcacattatttgattaaaaatcaacctggattttgtgaattagacatttttttttacagattgatttaaaccacactcaaggaatggcatgaatcaggatattagtgaaaaattaattataagatttatttgctctctagagtgttgataagcaaacacatttttgtttttttaaaatctaaaaatagcrtttttagacttcaaggaaatactgttaagtaggtttatttattttattagcagttataaatgactaagcaaatcaaactgatatttatttgacacttcttatgtttagttgataaaatgagtctgtttcccattagaatttttatagccaagtatataattgtaccctatggtgtaaaataattttagaaatatccaaaaacatcacagcaacatctactgtgttactaatggttagaaattttgtattcattta

SEQ ID NO: 44957 - DNA, 588 bp, Homo sapiens
gaagagggggaggaagagggaaagggagaaaaatgtagactatgggaatgaagaggagcaataactaactttaaatcctatactaaataggcagtacagtcttcaaagaagaggagatgtttgggccaactgttgaggtaaagggaagagttatccaggcagagtaagggcaaggggatttttagacacagccaagaacgygcacaagcagagaggtatgcaaaagggtgaaatgttggttaatttgttgggattcagtgaaagactataggaagtaccctagctagtttaatgggaaaatgtttccatataaagaatttggttcttacagagtcagctggaggaccacaggaatgggcttttgactggacatccaggaataattcccagagggacactgtaaaactggcttgctggagagccatcatctctgtcacaatcaggaaaatgctgctacactgctggctccagcaacacggcactggggcccagtgcagggatcacacagctgttggctccagaaaaatacggctttacctataatccggagatcagaaagttacctcctgaagcatgctgtgcttgcta

SEQ ID NO: 44958 - DNA, 524 bp, Homo sapiens
caaacgcctttttgtctacatctacttaagaatgaagtaatatagttctatttttttttttttgggacggagtctcgttctgttgcccaggctagagtgcagcgccgtgatctcggctcactgcaagctctgcctcccaggtgcacgccattctcctgcctcagcctcctgagtagctgggacttacaggcgcccgccgccacactcagctaatttttgtatttttagtagagacagggtttcactgcgttacgcatgatggtctcgatcccctgacctsgtgatccgcctgcctcggcctcccaaagtgctgggattacaggcatgagccaccacacccagctattcctattttaatatcaaatgagaatggaaattacagtatttttttttttttttgagacagagtcttcctctgtcaccaggctggagtgcagtggcatgctcttgactcactgcaagctccgcctcctgggttcaagccattctcctggctcagcctcccgagtagctgggattacagg

SEQ ID NO: 44959 - DNA, 591 bp, Homo sapiens
ctcaacactttttagcatttcagggagcaaatactatgactaacaattaatggaactaattatatatacataataatatataatacataacatagaatatagactacagaatactatatatattatataaatgtaacacatataataatatatgtatctacccacacatacacacacacactcatatgttcaaaatacccaaaagattttgtgtttagtggttaaccaaacagaaaagcctctggcagtataaattcaaaccaagaaatttcacaagaaattaaataaaataaataaaaacttttctgatgtagtagtggttttgaaattaagggcaaaatatgataaactgcaaatcatactgaaagaaagaacttacaattcttgccatacccagttgactacactggtacttctgctgacaataatcaaaatgctgttataaaacaaacaaacgtctttaatacatccctgacacagcagtaaaaattactctggatagaaaactagcaatamctgtcttatcaccttgataagagaacatctgttcagaaaatttggccctgagcagagattaaaagaaaaaatgca

SEQ ID NO: 44960 - DNA, 610 bp, Homo sapiens
gcaaaaagggtcagaatagtgtgaaatgaaaaaaggcttttggacccccaaaattctatgggaaggaaacaagctgaaaactactcagttggaaacaccaggtgtattggtctgttttcacactgctgataaagacatacctgagactgggcaatttacaaaagaaagaagtttaattggacttacagttccacatggctggggaagcctcacaatcatggcagaaggcaacgaggagcaagtcacattttacgtggatggtggcaggcaaagagaagatgagcttgtgcttctttttttaaaaccatcagatctcgtgagtcttattcactatcacragaacagcacgggaaagacttgcccccatgattcaattacctcccaccaggtccctcccacaacacgtggaaattcaagatgagatttgggtgggacatagccaaaccatatcaccagccattttttatagagaaagaaggatgattcagaaggtggaaccaagaatctagagaacagagccaaaagccacaaagaatcattcccaggcagtagaactgagccctaatcaagaaattggcaacacaatatgagcctgaatggatttcagaat

SEQ ID NO: 44961 - DNA, 656 bp, Homo sapiens
agagacccccactaagagggcatatgttccgaaatagttttcatcagtggtgacagatgtgtgccaagacagagaggggcacctgctgctgaacygccgtctgggacgcagctctagcctgtggccatggtctgggcagagctaagtctcctatgagggaactgaagtcagagctcaggcctgggcagggtttgtcactccccgtgttcagaactccctgctgaagcacatccctgctgtccccctgccaaaccatctggcaacctcctacccacctttccggggccaactcaagcgtcacctcctccaggaagccacgtcagacttccctgggtagaatatttccttcacggttctataaaaacgcatgccctgccacggcggcgtctctgtttacatgcctgtctctccctttagttctgagaactaaaagcaagggctgacttacatctttacatccctaacacctcgctcactgactgacccaaatagtaactcaccgaatgttgttgaaacaaggatggaattactcagcaaagccgtaatccttttcttttctttctttctttctttctttctttttttttaaacaaatgtgatatttatagtgctggactcacggcttttagatcctttcagtctttctatgacatgca

SEQ ID NO: 44962 - DNA, 656 bp, Homo sapiens
agagacccccactaagagggcatatgttccgaaatagttttcatcagtggtgacagatgtgtgccaagacagagaggggcacctgctgctgaactgccgtctgggacgcagctctagcctgtggccatggtctgggcagagctaagtctcctatgagggaactgaagtcagagctcaggcctgggcagggtttgtcactccccgtgttcagaactccctgctgaagcacatccctgctgtccccctgccaaaccatctggcaacctcctacccacctttccggggccaactcaagcgtcacctcctccaggaagccacgtcagacttccctgggyagaatatttccttcacggttctataaaaacgcatgccctgccacggcggcgtctctgtttacatgcctgtctctccctttagttctgagaactaaaagcaagggctgacttacatctttacatccctaacacctcgctcactgactgacccaaatagtaactcaccgaatgttgttgaaacaaggatggaattactcagcaaagccgtaatccttttcttttctttctttctttctttctttctttttttttaaacaaatgtgatatttatagtgctggactcacggcttttagatcctttcagtctttctatgacatgca

SEQ ID NO: 44963 - DNA, 478 bp, Homo sapiens
ttaaatgatgcccactcaccacaattatgtatgtgtgtgttttcttgaattttgtctttatctcttttttttttgtaggctcttcaggtttcttttgatatctgtggaggcgaatctggaacaaaatggaaaactctcagtagcagccrgttcttgcttacaaacacttacatgttgaagggcttttcccacttgaaggacgtcatagtcaatgtgactattgtatatggtacccgtgaccatccagacgccttctccccggcaaaacacagactcagttggctcctggggagcgagggcccctttaacgccaaaatccatggctggatgggggaggggagagcccggacgtgagggaagcgccagaccctctagccaggtgggtcagaggtgcagggaagccaatctgctctcctcctgcccctaccaaattctaaatgctcctccaggtcccaatcccggaagccaaacactctcc

SEQ ID NO: 44964 - DNA, 574 bp, Homo sapiens
caccctccaaagtgctgaccgacaccgcatatgtagcagttcagcagcagcctaccacaagggaagaatcaagagaggagaaaagaaaatcctggaaccatgccaatgtataaaaccccaagtcaaggatttaacagggcacatggatctctcaagtcacctgttgggccttcttccaagtttactttgcttccttgctcccgctgtaaaacttttcaatwaactcttactcctgctctaaaagttatctccatctttccctcagccttaaacctacttctgctccttggccaaattctgtcctctgaggaggcaagggttgagtttgctgccaacctgtgtggattcaccactggtaacaagccactgggccatgaaattaacaagttaaagactaggcttctatcgcacgtcgaagaaaactatacattaatgttttaaaatttttaggctgagcacagtggctcatacctataatcccagtactttgggagcctgaggcaggcagaccacttgcgctcacgagtttgagaccagcctgggcaatatggagaaaccacattgctacaaaaaa

SEQ ID NO: 44965 - DNA, 290 bp, Homo sapiens
tgtaaagtaaatataataaaatctcaatgctcaaaatataatccaatgacttagtgccccaaagtatagtttctgaaggtttttgagcaaaaggtgaagcacctgattggcacagatgcctgccaataatagcaaggtggcataggaaaggtagaaagaaaagcaaactgaaatttcaaaggcctgggttataactagatgagtgatctgaggattatctgtaaaatgggaagaattacctrtaaagtggtcttaaagtaaccttccaggttacttatctaagagcatct

SEQ ID NO: 44966 - DNA, 481 bp, Homo sapiens
tttctgaacaaggaagtagcaaacttcttaatgagcaaatgctatcaacattctctttaaatctgayaccctaactcaacacgatgcagggcatttggcatggactatacttcctgtcaccatttattttggagttctaagatgtttctgactcaaaaaataactgaaagcctatttctctgctgtcataaatcaaattagcccacccatctcaacagaacttgggcccgatccaggagatacatacaaaacagaaagagatgaatagcttttcagaagggaagatatttgctgcaacagcaacaggagtgaggacatgtattttcccaaaggatttggagtaaattcccagagcctacagatggcctttgagtttatctgacagactcccttcccatttcaacctcctttgagggtctggtcagaaggtctgcatgccagtggggcaaaataaaggcactctgatggcttcgtcagtgcc

SEQ ID NO: 44967 - DNA, 1720 bp, Homo sapiens
atgcacaatctcattgtcatattcactcacagctgatacagggaagaccatgattcatgcaggaaagaattacattgtgctggtgtgagatcaaagaagagtttctttcatttatccatctagaaggaaatcttgtaaggtaatgtaacagtgtacaagttgctcctttgatgaaatacatgttttagaaataatattctctttagaatgctagaaaattgcaaaaaatgtatcccttcattttcccatgtatgcttggctggtacttaccaaaataagagcttagctggcactgaatacagcagaatctctgtgttaagactgctcctcatttaatgacgacactacacccaagttaacaaaaactgttcttcaaatatgtggggtatttctctatttgccatagaaactcaggtttcctattttagtttaatttcatctttttttccacctcaagatgaataaatactaatttggaaataagaatttcagttttagaaattggggtaagagggacaactggtaaattctataatttatcagttaatataagatgagcttggcaggggcctaggtgctagaggaggaggtggtagttatgggagctatgtggtggggagggcacatgactagactgtgaggtcttttccatcacctgtaggcctgcagtggtgagaggagagagctgggtggtgctggtccatgggtaggtccccgataggcagtatagtatttcattttgtattcctattcttagaacaatgattgacacacaaaaggcactcaatatatgtctgttaaatgaatcaatgtcctctagtaattcatggcacagttagggagaagaactacatacacaatataaaaacctgtagaagttgaggaaggattagatattaagatcttaacagtggtcatttatgggggagggagaaggaaagaattattgttgtcttattttctttaatttttgcttctgtattttggcttttctctgcaaaagattatttatttattttgaatttaaaaagggcaattgatttaaacaatgaataaaaatatattaatatctttatatatgacagaaatctgaggattcagtttctttctgtctctctgttctatcaatgtgtgagttcccatgttaaggctggttgccaaggtgctcaagaaggctgtggggtacaattatagatacaggtctcattgatattcctgttgaggtaagaggtgggactttactctgggggtgggtcttggacactggaccaaattgaggactagctaaaataggtccagtgtggaagcaactttccgtaagacacacccaccagtatgccatgttagtttaccattgccatgccaacactcagaagttactctccctttccatggcaatgaccttgacaacctggaagttatcattatttttctagaaatttctgcataaactgcccccttaattttcatatagtaggtataaatatgagtgcagaactgccctgagctgctgttcttggcactctgcctatggggtagccctgctctgcaaggtgcagtacrtgtgctgctgctgtactctgccacctcaataaaagttgctgtctaacaccactggctcaccctggaattctttcctgggtgaagccaagaaccctccttgactaagcccgaatttcagggcttgcttcttctgcatcattgtggctcttctctctca

SEQ ID NO: 44968 - DNA, 568 bp, Homo sapiens
ccttcctgcccatccacctagagtctcaggcccttggcaacaggtcctagaaggatctggtttcttcacaaggtgtctgaatgttgcrtaggccctggagctggccagcacgaggcagcccctgtgctctgatgcaccagcctgcaaagcttggcagggcctccaccaagtgtcacatgggagggaggtgatctgggtcggccctcaggcttctccagttatggagggatgacttggagcaaactcttaacaaaaacctggggttgggctaagatgggcatggccctgaggccagacccaaaacaaatcactgaggctcgacccaggatatagcacttgagagactctttgcaaaatactttcatttcctctcgccactatcctcacaacaagtccctgaggcaagctggacaggtgttatccttattttgcagatgagaaaaacatgtcaacaaaggtcaaatgacttacccagggtcacgaaactaataagcagtggagctaggactagcacccagatctttggctccaagtccaagtggttcagggagaccagcctgtgattgtc

SEQ ID NO: 44969 - DNA, 3146 bp, Homo sapiens
ttagagctgatagtacactggtaggattggtgtagtcatgccatttgttaagatattaaaatgcttctatactgattggtaaatagtttccaccataagacccttgagtggctactcactcattctattgctgccacctggctattgagattaggagaattttaatgcttctaaaaccttttaatcactgaagcatgcacatactgaaaattaattttggcatgctgtgactattcattctactacataggctattttaaaaagcatttatgagttctttttttatttaattcatctcctctacctttataacctttaaaaaataatcctcagattaaagcatctatttccccattaaaaattgaatcttgctcttacatagcatttcctctggtatgaagaggcatgtaaataaaaagtaatctaacattgtatcagaaaaggagatttatgtctagtggtggaaatagtccataaatcgtgtaaaagagaaggcaaggaaagaggggcattggggaggtgtgggttgtgggcactatagggattattgtaatctcagtgggttattttaatatagcaggtgtcaaaagaccaatgtagtggaagcaggaactcaaattctgttccagatttctaatgggaaagggtgattttctttgcttggctttaattaagttgtgccatatattttccttcaaaataacatttcctggaacatcttactaaatattcatagacacatttaatacttatttgcattatgtttatcaatattgcagtcttcttttgaatacatgtgtatttctacagtctaacattgtggcttccccaaatatgcagctttattttagacaatttttaaaacaatttgtatgtgaatatatgtttgtatatgtgtataataggcaaacagaagtgcaaataatactcattcagaattttactttttctatgacaataaacagcttttcaggttttatagaaggatttacatatataataattaaatatggtataaaattaaaatggaatctgataccaaaattttagaaataggctattcacttactattacttttgttgtaaatatgcaatacaatttaaaatgttaataaaactcacttattgtgataatttagatttttttgttagtgcatatatgagacaaccactcccatgatcattctgtgggttaaaaaccaagcatttaggatctggcagcatgtacttgattctgagctctaccttccaagttgcacaaggattttaacttttctgagcctcatttcttttatctgttgagttaggaaatataatatctaccttctggggttttcatgaggattgattgacatgatgcatgtaaagtgcttcaaatggcccctgcaacataaatgctagctattattttcctcactgtaataaatcaaaatatttttttcttgtaatgctaattactacaaagcattccaaagaatgtggtctggtttcatttagtccctagtaaaattacttacccaaggcaaagaaaataacattttgttttagtcaacgtttataatgcgtgactttattttagagctatgaattcattgttcccccattgcacatgctttattttgattcaagtaggaaacatgtgcaatcgtgtcccatgacttgtttatttagcaagataatttatcaatatttttgaggagcggtcattgacttcaatctctttgaaatactgactgaactaggatctcctgctgagtatatgtggaaataactgttgataaaatggcatttaaaatgaggaataaaaggataaaaaaattatacaacttgtgtagtcagtagggtggagtggatgtggctaaagattcataatagtgcttctctctaagccaacagtcttcttgaggctccagaaatattctacatttttgtttttgtcatcactgcttctaccagccttgtcctttttctttagtcacttactaagctattgtacaactgagagggaaaacagaatattgatcttatttatttggatgatgattattgaaagggaaggaacacagatcaagactattaataagagagagaagactgaagaggaataagaatctttgccatttctaagaaatgtgttgcaggaaaccagaagaggttaatgcccacccacccaccagggagcagggacaagaattctcttacatctcagcatacccaagacctcctccaagatttttcctgtgctcattaggaatagaaggacctagtactattcaagtaggaaagatcagatattgtgataaacagcaaaagagggtatctagattttgtagtcgtaaatcaacctttttcaaagagattatttgaaaggattatcaacagcctgtatttgaaagagctcaccatatttttccagctaaatatatgtgatctcttgacatgtcatggattttacctggaaactaaagtattacggatcctattatgttatgattcttaacttttagaatgagtgatataaattcccactaattatgaacgtactgatttttatcacaatttgaagtatgaaaatataaatgctttgacttgttgaaagttttaaaattacaaaaatatagatcaagattctttttcaccgtatttgaaacaaaaaactaataatttctcaaattgttgactattggaaatattttgaaaatattatccacattatcaattaagaagtgtcctacatttcsaacaagatataatccttattggctttccagacatccttagagaaacagtgtactagattcagtgtttaaaatgtgtttccaataatagaattcctactatatacttttacaagcatattaaatttgaaagtgttttatattttcagagtggttcatacatgtaattttgttccattctgaaactggaaaagtgttaagtgagtaaaataagttttattatccctaaggaaaaaatactataaaaacaaaaagagaagagattataaggcttacttgtggttttccaattcattagtaacaaaaaaaaatgtgatttttcccttttcctctctgttgtttttttctttagaacttgaattttccttttttttttttttaattctagaccctttgcaaccaatgaca

SEQ ID NO: 44970 - DNA, 3146 bp, Homo sapiens
ttagagctgatagtacactggtaggattggtgtagtcatgccatttgttaagatattaaaatgcttctatactgattggtaaatagtttccaccataagacccttgagtggctactcactcattctattgctgccacctggctattgagattaggagaattttaatgcttctaaaaccttttaatcactgaagcatgcacatactgaaaattaattttggcatgctgtgactattcattctactacataggctattttaaaaagcatttatgagttctttttttatttaattcatctcctctacctttataacctttaaaaaataatcctcagattaaagcatctatttccccattaaaaattgaatcttgctcttacatagcatttcctctggtatgaagaggcatgtaaataaaaagtaatctaacattgtatcagaaaaggagatttatgtctagtggtggaaatagtccataaatcgtgtaaaagagaaggcaaggaaagaggggcattggggaggtgtgggttgtgggcactatagggattattgtaatctcagtgggttattttaatatagcaggtgtcaaaagaccaatgtagtggaagcaggaactcaaattctgttccagatttctaatgggaaagggtgattttctttgcttggctttaattaagttgtgccatatattttccttcaaaataacatttcctggaacatcttactaaatattcatagacacatttaatacttatttgcattatgtttatcaatattgcagtcttcttttgaatacatgtgtatttctacagtctaacattgtggcttccccaaatatgcagctttattttagacaatttttaaaacaatttgtatgtgaatatatgtttgtatatgtgtataataggcaaacagaagtgcaaataatactcattcagaattttactttttctatgacaataaacagcttttcaggttttatagaaggatttacatatataataattaaatatggtataaaattaaaatggaatctgataccaaaattttagaaataggctattcacttactattacttttgttgtaaatatgcaatacaatttaaaatgttaataaaactcacttattgtgataatttagatttttttgttagtgcatatatgagacaaccactcccatgatcattctgtgggttaaaaaccaagcatttaggatctggcagcatgtacttgattctgagctctaccttccaagttgcacaaggattttaacttttctgagcctcatttcttttatctgttgagttaggaaatataatatctaccttctggggttttcatgaggattgattgacatgatgcatgtaaagtgcttcaaatggcccctgcaacataaatgctagctattattttcctcactgtaataaatcaaaatatttttttcttgtaatgctaattactacaaagcattccaaagaatgtggtctggtttcatttagtccctagtaaaattacttacccaaggcaaagaaaataacattttgttttagtcaacgtttataatgcgtgactttattttagagctatgaattcattgttcccccattgcacatgctttattttgattcaagtaggaaacatgtgcaatcgtgtcccatgacttgtttatttagcaagataatttatcaatatttttgaggagcggtcattgacttcaatctctttgaaatactgactgaactaggatctcctgctgagtatatgtggaaataactgttgataaaatggcatttaaaatgaggaataaaaggataaaaaaattatacaacttgtgtagtcagtagggtggagtggatgtggctaaagattcataatagtgcttctctctaagccaacagtcttcttgaggctccagaaatattctacatttttgtttttgtcatcactgcttctaccagccttgtcctttttctttagtcacttactaagctattgtacaactgagagggaaaacagaatattgatcttatttatttggatgatgattattgaaagggaaggaacacagatcaagactattaataagagagagaagactgaagaggaataagaatctttgccatttctaagaaatgtgttgcaggaaaccagaagaggttaatgcccacccacccaccagggagcagggacaagaattctcttacatctcagcatacccaagacctcctccaagatttttcctgtgctcattaggaatagaaggacctagtactattcaagtaggaaagatcagatattgtgataaacagcaaaagagggtatctagattttgtagtcgtaaatcaacctttttcaaagagattatttgaaaggattatcaacagcctgtatttgaaagagctcaccatatttttccagctaaatatatgtgatctcttgacatgtcatggattttacctggaaactaaagtattacggatcctattatgttatgattcttaacttttagaatgagtgatataaattcccactaattatgaacgtactgatttttatcacaatttgaagtatgaaaatataaatgctttgacttgttgaaagttttaaaattacaaaaatatagatcaagattctttttcaccgtatttgaaacaaaaaactaataatttctcaaattgttgactattggaaatattttgaaaatattatccacattatcaattaagaagtgtcctacatttccaacaagatataatccttattggctttccagacatccttaragaaacagtgtactagattcagtgtttaaaatgtgtttccaataatagaattcctactatatacttttacaagcatattaaatttgaaagtgttttatattttcagagtggttcatacatgtaattttgttccattctgaaactggaaaagtgttaagtgagtaaaataagttttattatccctaaggaaaaaatactataaaaacaaaaagagaagagattataaggcttacttgtggttttccaattcattagtaacaaaaaaaaatgtgatttttcccttttcctctctgttgtttttttctttagaacttgaattttccttttttttttttttaattctagaccctttgcaaccaatgaca

SEQ ID NO: 44971 - DNA, 548 bp, Homo sapiens
  misc_feature (1)...(548): n = A,T,C or G
caggatccttctaagccatgtggggtagggggtggcccggggactcagggaagtgccaagggacgagggctgagcagacagactcctgggccrgagccccaccctccctggctggcaggggctcaccttgggcttcttgtagaagccagacaggtaccaccgcagcaccagcttcatgcggctgtaggcatcctcctccaccgcagccctgccatggggcaggagaacgctgaccccagctnccggggcgtgggccaccctccctttccctgacccttccctcctaccatcccgacctccaaccactcagctggaaacaggccacttggcccaggcgctctggtcacccccaagcaggataattttctctggggaagtgggttcttctaatcagaaagtgccagggctgctcccacgctggggcagagaggacactgctgacctgggctgccagggtgcccctgtctccaggaagcctccctgcccatgctcttgttcccacctgctccctctgcctggctcctgagcctgcagcccccttcctgcct

SEQ ID NO: 44972 - DNA, 551 bp, Homo sapiens
aggaggctccccctcactctgactcttcagggacccaccccctccatcccagacccacccctggccctgccccagcagggacatgccctcccttcctgcccccacatccagctgcagattgtgtgggggcagacatcgggaacccctgaggattgaggacttcccaaggaggcagacccggcctggggacaggtgtgccaggggaggcagccctgcagaggcacctggggatgctcacagcacatccccacgcacctccaccacccacattgctgaygaggggctgtgacccctccaggtcacaaacccagaacactcggaaccagcctcccaccctgacggccacccacaggtttctgcaggtggagttagggaggagggtcctccctcactgggaagcactggtcagggtgccaggggctcctgccggcctggagtccagggaggagggtggggaaggctgaggaggggcttgcacaccagggaggagacctgcctgaggccgcccagaggctctgtgggcagcggtggagcaggggctggtcgacagc

SEQ ID NO: 44973 - DNA, 557 bp, Homo sapiens
tggaaatcgaaggagaccaccatctaagaagagtgggcatcctctagaagatggcaaggctagaaagcattctcctctgaagcctccataaaggaaggcagccctaccctgaccttgattttagcccagtgagacattgccgcagacttctggcctccagaactgtaagataatgcgtgtttttaaagtcactgtttgtggtaatttgttatagcagcaaaaggaaagtagccttcttgcttccttgacttcctccctcttcctaataaaggaaattacatttagaagatttatttaacctagtatccaattttataatcctttcttactccctgttacatttaaatgcagtgtcagagctgctgcttgtgacttacaggaatgtaaagtaaagggccaaacctctttacaaccaaacrtttacaatgctttaaatatccaaggagagtttttaaacagcagttctgtcatggatagagaaagagcaagaagcatgaagtgctccacaatgtacacggcttaataagccaaggtgggttgggtgcggtggctcacgc

SEQ ID NO: 44974 - DNA, 1919 bp, Homo sapiens
catcaggagaaagctagcgcccccagctccccagcccaccctcccatggggacccagccagtggcccagcttggggctcacgccttggccctgccacagcccccaggtgtcctttcacagaggcagggttgcaccgcaggccacacttgctgccctcccctctctcgaatggcagcctcagcccgggtggaaggcagagccgccaggtcactgcaggcagctaagagaactgggaaccaggaaggcagggcagctcggccccgccctcctcctgctgttggctcctctccacttggaggcccctcggcaagggcagtggtggcctggggttgccatcccagcagtctccttgcaggcccgacccctgcactggctccaggctgtgagcacccagatcccccgggtgccgtgccctggctttcttggacgtgagcatctctccgtctgttttgcacaaaccttcctctaccgctggccacccactcagcttgacacacagtaccgtgtccccaggatcctgtcctctgtcccactctgctctcctgccctcctgcccctgtcaccctcaccctccggtaccgcatgcagcctgctccaggccagcctgcttttcctgcccctgcacccctggagctccattcccagcccgcgttatcgaaagcctcacacttggcctctctgctgcactcctgggctctggtggcttcccctcatccagggccactgcagatgcccctaggtgctcggccctcctcccctctcccattcccccgtcaccatcctcaaggtgaggcttacaaaccccagtgctgttctgagcatatgacgaatgttcattaacttaaccctcaaccaccctctgacttggggacaatttttatccccatttttactgatgaggaagtgagacatagagaggttaagggacttgcccaagctcactcagctggtaaggaaggagcagagacttttctaccttccccaggagactcagggtgcaggctctgccagcccaaggtggtatcctactgcagagatgccactttccggactccaccgccagccccactccaccttttgtggcaggagctgaggtcccttggccttggccatgctcaggtgcctccactccctgctccttccctccttccctgtgcaggacaagccttctccagacaacaccttcctccccaccgttctttccccaggacacctcccccagcccctcactgttcaggtctaacgtctgctcatctggggagcacccccacacccccaggtcctgcaagaggtgccaagtgccctccagctctggctgctccatgccacgggcactggtgtgacacctgactgctacagcccccagaggagcaggtgttgggagccccctggacacgtgggaacgcccgtagaggcagaggcttctggccactcacacctgagcagcccggcaaggcggcccagctagcaactccaacttcctctaggcctccctgttccaaagccasggggtgcccacctctgcctctgtacaccccagtgtgtgtgtgtgtgtggggggggggggctgtgggagagtgtgtatgtacatctgggtgtgcaaatctatatgtgcacattgtaacttgtgacagtgtctgtgtgtacagctctgtgtgtgcatatgtgtggggagctacattgtacaagactgtgtgagtgtgtgcctgtgtgtgtaaggctctgtgtgtgtttgtgttaggctccgcatgagcatgtgtgtgctcacatgtacttgacctgggagcctgagtgatcaggcgtgagtatgtgtgtgtatgcctgtgcatgcatgcctggtcctgggtgcctgggtgccagtgtgagtgtgtgtgtatgtgtgtgtgtgtgcaggcactgctctctccgccccctgggtg

SEQ ID NO: 44975 - DNA, 1919 bp, Homo sapiens
catcaggagaaagctagcgcccccagctccccagcccaccctcccatggggacccagccagtggcccagcttggggctcacgccttggccctgccacagcccccaggtgtcctttcacagaggcagggttgcaccgcaggccacacttgctgccctcccctctctcgaatggcagcctcagcccgggtggaaggcagagccgccaggtcactgcaggcagctaagagaactgggaaccaggaaggcagggcagctcggccccgccctcctcctgctgttggctcctctccacttggaggcccctcggcaagggcagtggtggcctggggttgccatcccagcagtctccttgcaggcccgacccctgcactggctccaggctgtgagcacccagatcccccgggtgccgtgccctggctttcttggacgtgagcatctctccgtctgttttgcacaaaccttcctctaccgctggccacccactcagcttgacacacagtaccgtgtccccaggatcctgtcctctgtcccactctgctctcctgccctcctgcccctgtcaccctcaccctccggtaccgcatgcagcctgctccaggccagcctgcttttcctgcccctgcacccctggagctccattcccagcccgcgttatcgaaagcctcacacttggcctctctgctgcactcctgggctctggtggcttcccctcatccagggccactgcagatgcccctaggtgctcggccctcctcccctctcccattcccccgtcaccatcctcaaggtgaggcttacaaaccccagtgctgttctgagcatatgacgaatgttcattaacttaaccctcaaccaccctctgacttggggacaatttttatccccatttttactgatgaggaagtgagacatagagaggttaagggacttgcccaagctcactcagctggtaaggaaggagcagagacttttctaccttccccaggagactcagggtgcaggctctgccagcccaaggtggtatcctactgcagagatgccactttccggactccaccgccagccccactccaccttttgtggcaggagctgaggtcccttggccttggccatgctcaggtgcctccactccctgctccttccctccttccctgtgcaggacaagccttctccagacaacaccttcctccccaccgttctttccccaggacacctcccccagcccctcactgttcaggtctaacgtctgctcatctggggagcacccccacacccccaggtcctgcaagaggtgccaagtgccctccagctctggctgctccatgccacgggcactggtgtgacacctgactgctacagcccccagaggagcaggtgttgggagccccctggacacgtgggaacgcccgtagaggcagaggcttctggccactcacacctgagcagcccggcaaggcggcccagctagcaactccaacttcctctaggcctccctgttccaaagccacggggtgcccacctctgcctctgtacaccccagtgtgtgtgtgtgkgtggggggggggggctgtgggagagtgtgtatgtacatctgggtgtgcaaatctatatgtgcacattgtaacttgtgacagtgtctgtgtgtacagctctgtgtgtgcatatgtgtggggagctacattgtacaagactgtgtgagtgtgtgcctgtgtgtgtaaggctctgtgtgtgtttgtgttaggctccgcatgagcatgtgtgtgctcacatgtacttgacctgggagcctgagtgatcaggcgtgagtatgtgtgtgtatgcctgtgcatgcatgcctggtcctgggtgcctgggtgccagtgtgagtgtgtgtgtatgtgtgtgtgtgtgcaggcactgctctctccgccccctgggtg

SEQ ID NO: 44976 - DNA, 1919 bp, Homo sapiens
catcaggagaaagctagcgcccccagctccccagcccaccctcccatggggacccagccagtggcccagcttggggctcacgccttggccctgccacagcccccaggtgtcctttcacagaggcagggttgcaccgcaggccacacttgctgccctcccctctctcgaatggcagcctcagcccgggtggaaggcagagccgccaggtcactgcaggcagctaagagaactgggaaccaggaaggcagggcagctcggccccgccctcctcctgctgttggctcctctccacttggaggcccctcggcaagggcagtggtggcctggggttgccatcccagcagtctccttgcaggcccgacccctgcactggctccaggctgtgagcacccagatcccccgggtgccgtgccctggctttcttggacgtgagcatctctccgtctgttttgcacaaaccttcctctaccgctggccacccactcagcttgacacacagtaccgtgtccccaggatcctgtcctctgtcccactctgctctcctgccctcctgcccctgtcaccctcaccctccggtaccgcatgcagcctgctccaggccagcctgcttttcctgcccctgcacccctggagctccattcccagcccgcgttatcgaaagcctcacacttggcctctctgctgcactcctgggctctggtggcttcccctcatccagggccactgcagatgcccctaggtgctcggccctcctcccctctcccattcccccgtcaccatcctcaaggtgaggcttacaaaccccagtgctgttctgagcatatgacgaatgttcattaacttaaccctcaaccaccctctgacttggggacaatttttatccccatttttactgatgaggaagtgagacatagagaggttaagggacttgcccaagctcactcagctggtaaggaaggagcagagacttttctaccttccccaggagactcagggtgcaggctctgccagcccaaggtggtatcctactgcagagatgccactttccggactccaccgccagccccactccaccttttgtggcaggagctgaggtcccttggccttggccatgctcaggtgcctccactccctgctccttccctccttccctgtgcaggacaagccttctccagacaacaccttcctccccaccgttctttccccaggacacctcccccagcccctcactgttcaggtctaacgtctgctcatctggggagcacccccacacccccaggtcctgcaagaggtgccaagtgccctccagctctggctgctccatgccacgggcactggtgtgacacctgactgctacagcccccagaggagcaggtgttgggagccccctggacacgtgggaacgcccgtagaggcagaggcttctggccactcacacctgagcagcccggcaaggcggcccagctagcaactccaacttcctctaggcctccctgttccaaagccacggggtgcccacctctgcctctgtacaccccagtgtgtgtgtgtgtgkggggggggggggctgtgggagagtgtgtatgtacatctgggtgtgcaaatctatatgtgcacattgtaacttgtgacagtgtctgtgtgtacagctctgtgtgtgcatatgtgtggggagctacattgtacaagactgtgtgagtgtgtgcctgtgtgtgtaaggctctgtgtgtgtttgtgttaggctccgcatgagcatgtgtgtgctcacatgtacttgacctgggagcctgagtgatcaggcgtgagtatgtgtgtgtatgcctgtgcatgcatgcctggtcctgggtgcctgggtgccagtgtgagtgtgtgtgtatgtgtgtgtgtgtgcaggcactgctctctccgccccctgggtg

SEQ ID NO: 44977 - DNA, 1919 bp, Homo sapiens
catcaggagaaagctagcgcccccagctccccagcccaccctcccatggggacccagccagtggcccagcttggggctcacgccttggccctgccacagcccccaggtgtcctttcacagaggcagggttgcaccgcaggccacacttgctgccctcccctctctcgaatggcagcctcagcccgggtggaaggcagagccgccaggtcactgcaggcagctaagagaactgggaaccaggaaggcagggcagctcggccccgccctcctcctgctgttggctcctctccacttggaggcccctcggcaagggcagtggtggcctggggttgccatcccagcagtctccttgcaggcccgacccctgcactggctccaggctgtgagcacccagatcccccgggtgccgtgccctggctttcttggacgtgagcatctctccgtctgttttgcacaaaccttcctctaccgctggccacccactcagcttgacacacagtaccgtgtccccaggatcctgtcctctgtcccactctgctctcctgccctcctgcccctgtcaccctcaccctccggtaccgcatgcagcctgctccaggccagcctgcttttcctgcccctgcacccctggagctccattcccagcccgcgttatcgaaagcctcacacttggcctctctgctgcactcctgggctctggtggcttcccctcatccagggccactgcagatgcccctaggtgctcggccctcctcccctctcccattcccccgtcaccatcctcaaggtgaggcttacaaaccccagtgctgttctgagcatatgacgaatgttcattaacttaaccctcaaccaccctctgacttggggacaatttttatccccatttttactgatgaggaagtgagacatagagaggttaagggacttgcccaagctcactcagctggtaaggaaggagcagagacttttctaccttccccaggagactcagggtgcaggctctgccagcccaaggtggtatcctactgcagagatgccactttccggactccaccgccagccccactccaccttttgtggcaggagctgaggtcccttggccttggccatgctcaggtgcctccactccctgctccttccctccttccctgtgcaggacaagccttctccagacaacaccttcctccccaccgttctttccccaggacacctcccccagcccctcactgttcaggtctaacgtctgctcatctggggagcacccccacacccccaggtcctgcaagaggtgccaagtgccctccagctctggctgctccatgccacgggcactggtgtgacacctgactgctacagcccccagaggagcaggtgttgggagccccctggacacgtgggaacgcccgtagaggcagaggcttctggccactcacacctgagcagcccggcaaggcggcccagctagcaactccaacttcctctaggcctccctgttccaaagccacggggtgcccacctctgcctctgtacaccccagtgtgtgtgtgtgtgtggggggggggggctgtgggagagtgtgtatgtacatctgggtgtgcaaatctatatgtgcacattgtaacttgtgacagtgtctgtgtgtacagctctgtgtgtgcatatgtgtggggagctacattgtacaagactgtgtgagtgtgtgcctgtgtgtgtaaggctctgtgtgtgtttgtgttaggctccgcaygagcatgtgtgtgctcacatgtacttgacctgggagcctgagtgatcaggcgtgagtatgtgtgtgtatgcctgtgcatgcatgcctggtcctgggtgcctgggtgccagtgtgagtgtgtgtgtatgtgtgtgtgtgtgcaggcactgctctctccgccccctgggtg

SEQ ID NO: 44978 - DNA, 1919 bp, Homo sapiens
catcaggagaaagctagcgcccccagctccccagcccaccctcccatggggacccagccagtggcccagcttggggctcacgccttggccctgccacagcccccaggtgtcctttcacagaggcagggttgcaccgcaggccacacttgctgccctcccctctctcgaatggcagcctcagcccgggtggaaggcagagccgccaggtcactgcaggcagctaagagaactgggaaccaggaaggcagggcagctcggccccgccctcctcctgctgttggctcctctccacttggaggcccctcggcaagggcagtggtggcctggggttgccatcccagcagtctccttgcaggcccgacccctgcactggctccaggctgtgagcacccagatcccccgggtgccgtgccctggctttcttggacgtgagcatctctccgtctgttttgcacaaaccttcctctaccgctggccacccactcagcttgacacacagtaccgtgtccccaggatcctgtcctctgtcccactctgctctcctgccctcctgcccctgtcaccctcaccctccggtaccgcatgcagcctgctccaggccagcctgcttttcctgcccctgcacccctggagctccattcccagcccgcgttatcgaaagcctcacacttggcctctctgctgcactcctgggctctggtggcttcccctcatccagggccactgcagatgcccctaggtgctcggccctcctcccctctcccattcccccgtcaccatcctcaaggtgaggcttacaaaccccagtgctgttctgagcatatgacgaatgttcattaacttaaccctcaaccaccctctgacttggggacaatttttatccccatttttactgatgaggaagtgagacatagagaggttaagggacttgcccaagctcactcagctggtaaggaaggagcagagacttttctaccttccccaggagactcagggtgcaggctctgccagcccaaggtggtatcctactgcagagatgccactttccggactccaccgccagccccactccaccttttgtggcaggagctgaggtcccttggccttggccatgctcaggtgcctccactccctgctccttccctccttccctgtgcaggacaagccttctccagacaacaccttcctccccaccgttctttccccaggacacctcccccagcccctcactgttcaggtctaacgtctgctcatctggggagcacccccacacccccaggtcctgcaagaggtgccaagtgccctccagctctggctgctccatgccacgggcactggtgtgacacctgactgctacagcccccagaggagcaggtgttgggagccccctggacacgtgggaacgcccgtagaggcagaggcttctggccactcacacctgagcagcccggcaaggcggcccagctagcaactccaacttcctctaggcctccctgttccaaagccacggggtgcccacctctgcctctgtacaccccagtgtgtgtgtgtgtgtggggggggggggctgtgggagagtgtgtatgtacatctgggtgtgcaaatctatatgtgcacattgtaacttgtgacagtgtctgtgtgtacagctctgtgtgtgcatatgtgtggggagctacattgtacaagactgtgtgagtgtgtgcctgtgtgtgtaaggctctgtgtgtgtttgtgttaggctccgcatgagcatgtgtgtgctcacatgtacttgacctgggagcctgagtgatcaggygtgagtatgtgtgtgtatgcctgtgcatgcatgcctggtcctgggtgcctgggtgccagtgtgagtgtgtgtgtatgtgtgtgtgtgtgcaggcactgctctctccgccccctgggtg

SEQ ID NO: 44979 - DNA, 602 bp, Homo sapiens
tattaagtcattgatggaatagatattaagtagtcaagttcttatttgcaatgaaaacttaagacgtggattgactcacttaatcctcacaaaaactttgtwacaaattctacgattattttcccgattttatagatgagtaaattgaggcagagcagagatcagtaacttgtgtaaaccatggagttgggaagtggtgaagccaatattgagacccatacactctgactgtagacattaatatgctgctttgtattctttccccacaaggttgtagcagaaccaggcctggtaacagggcttgactcctggttattttcaatgggctgccctgacacagccacaccacaatctttcgtcataagatggtctatgtctctaaaacttcagccaattttccatacctcacagctagtcatttcacagagtagtagaggtatagtttctttttatctaagattatgattgtccatgtcaaaaattattttattcgtttctacattcacccgggccattttgtttttgaatcctggcttctaataagcttattactcttcccagcaatgacattgaccaaactagaattattcccatgattaaag

SEQ ID NO: 44980 - DNA, 580 bp, Homo sapiens
ttctagaaggtattcttttaacttgggctttacaaagacttaacttagggataagaattaaacccacaatatgggargaaatgtatataattaagtaatggttaaataaaatatgttatatactatagacagcaagtaacacatgtctttatatacagtgtgattctggcagtaattaccaatcccttcctgaattacaattgtgaaagattctctccaggagggcctggagtgaagtttcagtttctttctggctctagaaactcttcttcttttagggtcttggatctatttctctctttttcagacacttctgcattctacagtcatccaagcatgatgtcatgggagtccagataggcatgtatttgggtcaaggctgctggtttaactacagagagctttctgtctgtctatcagcctgtctttgtctctctctatctgtctcgacagtggctcaaagcagcagagacttagagactcaatctcatgagctgaagcagattttcctttggcatttttattcctgctgcataactcagtgagcccctaaaattatggcaacagactcttttcaaat

SEQ ID NO: 44981 - DNA, 573 bp, Homo sapiens
aaaacatttaccttccggccttttacagaaacaaatttgctgactcctccccggctgatcttgcttgactcagttctcccgcctccacaagattaactgacctaaaactcgacttccgccgtcgctctgtgttcaaacccccggcaggttccccgatgcccataaagcccacactgtaccctgacatccatttgaccaggagaataaacaagaaagccctcaacgccatgcctttgctcatgctgttctctgcctttcaggaagcccttcctgccttccaccgctaagcctgccgctaccttaccttgcccttgcagtcagggcaaggctctgggaatgctcccagctccctgtgctctgctcccacagctccctatacttaccctcatcatagctcttaccacacagcgctgaaatcaactatttgwgtgtctgtcttgccagctgcagcaagatcccagagggcaaggaatacatcttatttatctcccaccacccagacagaacccggtacagcagctcatcaatgctgaaggcaaccccagcctggccaggctggcctcctcgctgccc

SEQ ID NO: 44982 - DNA, 633 bp, Homo sapiens
actgaaaaaaaaagcatccacttgatttcaccgcaattatttcttgttttttaaaagggagatttatacagaacatgccattaaaacttttttaaataaaaatgtttaaaagattaaaaaccttttcacccttactaacgtactgctaatgccactatttccctatcaatattacctcctccctccccaccgctctgccacccctctgctcctacacagatgtacaaaccacccccacttccatctctcccacacacagcttctgccttcaggcccaagttgagaaaatgaatctctgagagattcaacaagggctccaaactcaaaacytgtctttcttcaaagaactagtcatcacaggttttcaacttactctaatcatttgggcatctgttttgtatcctctccacagcaaatgcctctcattgcagagcatgtccaaatactgcttgattcctacgttctgttttctcgaagccttcctggcattaaataatcagtttctaacaataaggagtgtttatttaagggtgcaatcttacttgattagctatggtgtaagttttcgggagagtcatctgaatgttgttatatccataagcaatagctgcatcttctacaatatcacatgca

SEQ ID NO: 44983 - DNA, 501 bp, Homo sapiens
tgccctaaaatactcaatacttttcaatcttaccaaagaaaattactgttactaaatgtaacataacaccaaatacaagccctagctgtgcttctagaaacaggtatcattagagattagattttattggacctgacaatgaactcttatcttccccaccctacttcagcttcctgaattgattcacctctgaaaatacagtacaaatattcaaaggtcaaccattgctgacaagaatggtgtcaacgtagttagttgtacagtctagtctctctgaaatcttgctatcatttaccttttccaatattatctccaaactttcactgccttcttttccaaccacaaaacctctctcttgctcattaagacacacacgcacacacacaaacgcgcgcgcgcrcgcacacacacacacacacacaccagttgcaggaacattcctctaaaccaaggatttaatgtggatttagtgcttcaaagataggaacagttcatgtcttc

SEQ ID NO: 44984 - DNA, 501 bp, Homo sapiens
tgccctaaaatactcaatacttttcaatcttaccaaagaaaattactgttactaaatgtaacataacaccaaatacaagccctagctgtgcttctagaaacaggtatcattagagattagattttattggacctgacaatgaactcttatcttccccaccctacttcagcttcctgaattgattcacctctgaaaatacagtacaaatattcaaaggtcaaccattgctgacaagaatggtgtcaacgtagttagttgtacagtctagtctctctgaaatcttgctatcatttaccttttccaatattatctccaaactttcactgccttcttttccaaccacaaaacctctctcttgctcattaagacacacacgcacacacacaaacgcgcgcgcgcgcrcacacacacacacacacacaccagttgcaggaacattcctctaaaccaaggatttaatgtggatttagtgcttcaaagataggaacagttcatgtcttc

SEQ ID NO: 44985 - DNA, 586 bp, Homo sapiens
ggaaggaactttccacaacatagaaccttgaataaatagtattgatatagactaggcttgggagaaatcagtaaagttgccatcttgtccctctttcaccaaaggtagcttgcggacttcacacaagtaaccttccaatgacagatgttacttccaaaggttaaaactctgagggattgctttttttcactctggagaaaaacgcatacattctgggggcttatgaatacctggtgaaakatttttttttgcaacagcgtgagcactaacagaacaacacagggctgactattcattttttggataccttttcctaagcagctcaaaaccggcagtagaacgtgacattaccatgtaacaggaggctggcctgatcctgtgctgtgtccaccgccaaggtgtttttgtcatatctgtcccctgctgggtggggacaggggcatcaaaagcctatctacagtcaacaaaacaaagcacattctaaagaaagccaaatcaggcacaaaaagcttgggccaatattaaaaccacaggtattcaaagcgaagagatattctgatttttaagatgattacttggttttctc

SEQ ID NO: 44986 - DNA, 584 bp, Homo sapiens
ctttttgactgaaagctcattattttcattcattcattcagtccgtttttcaacaaataattactttgcagaatgcttttattctcattttagagttaaaagtagcatcagcaggtaaaaatgacacaaaattttagctctatagaaataagaacttcccagaattcagaggtatcaaaaaaatcaaatggtcatattcagacacaaccaaatagagggttattctgcaaaccaccaatctgacccttcaaaaagatcartgtcagccaggcacggtggctcacgcctgcaatcccagcactttgggaggccaaggcaggcggatcacaaggtcaggagatggagaccatcctggctaacatggtgaaaccccgtctctactaaaaatacaaaaaattagcggggtgtggtggggggtgcctgtagtcccagctacttgggaggctgaggcaggagaatggcgtgaacccgggaggcggagcttgcagtgagctgagttggcgccactgcactccagcctgggcaagagtacgagactccatctcaaaaaaaaaaaaaaaaagatcaatgtcaggaaagaaaaa

SEQ ID NO: 44987 - DNA, 548 bp, Homo sapiens
tgtgtatatatttaaaataaatgtattatatgttaaagtaaatgattaatttttatcaaaaataactattttccaaaacaaaaatttagtgagaagtatggcattgttttacattttgcccatctcttcaatgtctgggttactagaggctgaattctcatacctgttccacagtcaacctgctgaatatcgcatgtcatgtagcctctggacaactccactgtacacttttgagaaaatgagagtaaaaaaggcaartaacatcttagtatttccccaaacactacccaatcagagagcagagaataccgttttgacctgatggaccccctgaaaaggtcttggggtgtccccggtgtaagaaccacttttctggatgtctgtgtctggcatgtgatttggcagccggggctctgaaagacagggaggagtcggggagagccaggcctggtgatcaggagacagggctgtggacccagctccctcaactccacagctgtaacacggagcacgtcccttcccatctctgatctctctgcatcttagtt

SEQ ID NO: 44988 - DNA, 633 bp, Homo sapiens
tgcatacaccactgaagtggtctatatgtacatacacttacacatatagcgtatacacatacattgatctatgatacagataacatatataatataaatgmatgaatattatataaataaataaatataaatgaatgaagaacttaacaattaaccaatcaacagatacgattttgacacatggtttatattgattgactcagggttagcacgcagaggtgagtttctcccactcctctgcatgcaaatttacttcgcacagacactcctctatttccactcaccctcgtccagcccctactcttcactctccattggctcctcttgacccctttgatggctgagccagcaggagcgtccacggtgaagtgctccactttgagttaactctgtagtcagcagggcttcgttatttctgagggaaggaggaggatacctttgggaggactctgaggagtgagcttcgaaagtgtcttcttggattggcacgtgggccctctgcttgaagagctgcagggtcaaagtgaagtaaacgtggagttaattaaaattcatgggatagctggaggcagtctgcacataaaatggcagaaaatggcacagtgttatatgataatagctctttatgcccct

SEQ ID NO: 44989 - DNA, 633 bp, Homo sapiens
tgcatacaccactgaagtggtctatatgtacatacacttacacatatagcgtatacacatacattgatctatgatacagataacatatataatataaatgcatgaatattatataaataaataaatataaatgaatgaagaacttaacaattaaccaatcaacagatacgattttgacacatggtttatattgattgactcagggttagcacgcagaggtgagtttctcccactcctctgcatgcaaatttacttcgcacagacactcctctatttccactcaccctcgtccagcccctactcttcactctccattggctcctcttgacccctttgatggctgagccagcaggagcgtccacggtgaagtgctccactttgagttaactctgtagtcagcagggcttcgttatttctgagggaaggaggaggatacctttgggaggactctgaggagtgagcttcgaaagtgtcttcttggattggcacgtgggccctctgcttgaagagctgcagggtcaaagtgaagtaaacrtggagttaattaaaattcatgggatagctggaggcagtctgcacataaaatggcagaaaatggcacagtgttatatgataatagctctttatgcccct

SEQ ID NO: 44990 - DNA, 557 bp, Homo sapiens
tggatatatatataccttccaatggaagagtaggcagagtacagtagaaaagtggcacacacacacasacatagtacattctaattactcatggtattccataaagtctctgcaaacactcagttagcaaatatgaaactgttgttcctaaggatgagcacttgtgtgtgtgtgtgtgtatgtatatacacactatatgtgtgtacaaatgtatacatatattgtgtgtgtatatatatatatatatacacagaatgatataaatatgtagattgatcaccatcttaaatcctaaaaaataacttaaaatgtaaaaggctttggaaacgtggattctatcttctgatatacatatacatcaacttacaattaaatatgaagtagtgttcagctaaagatgtgcagtgctttgctacaggtaagacattggtaatagattggtagattctattttctttattttacaagtgagaaaatgaggctcagaaaagttgagacttgactgaagctaccccactaacaggcaccagggttgggattcagaccctatccaactg

SEQ ID NO: 44991 - DNA, 595 bp, Homo sapiens
catacatgtcagtaatggtttagcagtttagttttgaaagatatatggtaagtgttcactctgaaatccctacattgaagttgtgtttcttaaactatgaaataaacgcaatcagcattaagagaatatatcagcatattttctgtcaatgtattttagtacagatccttataaaagaggaaaatgtaaaaatcctaccttggtataggtggtgccagaattggcctaggcttcagaagcagttattgtgtatctctgtgttttaaacttcttgtggaaaatttgaagcatayacaagataaaattttaggcaacaaaaattttgacatcaaatagtctcatgtgctttgttctcagcataattttggtgcaaaacataattttttggaagataatctatattttgggtcaacaaatctgatcctacatttcagtcaccatctaaattaattaattacactgtctacaactcagaggtgaagaaggcagaatatcttattaaatgttttatatagtaatctaaatatatcatcccaatcatcctattggacattactttttttttttgagacggagtctccctctgtcgcccagg

SEQ ID NO: 44992 - DNA, 306 bp, Homo sapiens
tcatctcttaaaaaaagacagtagggctggtgcagtgggcatggtggctcacatctgtaatcctagcactttgggaggccaaagcaggtggatcatttgaggtaaggagttcaagatcagcctggccaacatggtgaaaccccatctctactaaaagtacaaaaattagccaggcgtggtggcaggcacctataatcccagctgctcaggaggctgaggcaggagaatcccttgaacccyggaggcagatgttgcagtgagctgagattgcaacactgcactccagcctgggcacagagcaagact

SEQ ID NO: 44993 - DNA, 523 bp, Homo sapiens
aaattagaattcttatgtaaatgtaaaatgatagtggttttgctaccattgttatgatttaaagggattattaaatactttatcaactttgtattttcttcaaaaaattgatggttttggattataacattcacctttttgggttgttttttagttaatgcagaatttcctgaagtataagttaagccactgrtgaacttatacgatagtactggtaactgagcaacatcttaacccttattcatattgtatttttcaccattttattttgttactaaaataacattgatatttacaatttattatttttgtggttataaacaagtcaatagtacacatttcagtgcatatatctttgcatatttgtataatttcaggccaaattttctcattgaaatggtatctaacttacaaagcttttgcccagaacctttctgagttaaaatggaatccactttctgtggcttctcccaaattcttcattggaataattttaaatctataagaggttcatctgaatgtc

SEQ ID NO: 44994 - DNA, 588 bp, Homo sapiens
ggtggccctaaatgccatcacttgtacccttaaaagatggtggcagacagaagaggagwaggcaagatagccacaaaggcagaggctggagtgacgcagccacaagcacagggttgccaggagctcccagaggctaaaagaggcaaggaagggattctcccctgcagcctccagagaaagcacagccctgcacacaccttgatttctgccagtgatactgattttggatctctggcctccaaaactattttaaacttggtagtttgaaatgaatttattcttgttttaaatcaccaagcttgtgctaatttgttacagtggcaataaaaaaaaaaaaaaaaaccctaacactatgcaagtggtcaaaaaaaaaaaaaaaccctgatgggattggcctgggtagtccccaaagttcctgccagctgtgacactcttgatgctttcgttcttcaaggtagaactgcctgacccttgatccccaagagtatccctgggtacctgccccagagcttgctgggagctgccaggctaacacagctctctgtgcaggctacgtttctactcctcagctgccttgctcaataatgg

SEQ ID NO: 44995 - DNA, 588 bp, Homo sapiens
ggtggccctaaatgccatcacttgtacccttaaaagatggtggcagacagaagaggagtaggcaagatagccacaaaggcagaggctggagtgacgcagccacaagcacagggttgccaggagctccyagaggctaaaagaggcaaggaagggattctcccctgcagcctccagagaaagcacagccctgcacacaccttgatttctgccagtgatactgattttggatctctggcctccaaaactattttaaacttggtagtttgaaatgaatttattcttgttttaaatcaccaagcttgtgctaatttgttacagtggcaataaaaaaaaaaaaaaaaaccctaacactatgcaagtggtcaaaaaaaaaaaaaaaccctgatgggattggcctgggtagtccccaaagttcctgccagctgtgacactcttgatgctttcgttcttcaaggtagaactgcctgacccttgatccccaagagtatccctgggtacctgccccagagcttgctgggagctgccaggctaacacagctctctgtgcaggctacgtttctactcctcagctgccttgctcaataatgg

SEQ ID NO: 44996 - DNA, 575 bp, Homo sapiens
gtgccaggtgcgcccaacgccaagaagggtcgccctggctggcctcttccacacacagacttccacacttaggcaccggcgaaaatcaccgagggcttcgggcccttgcacaaccctgtcctgggcgttagtggcactgtagggccagataatttttcaaagagaaagtagaggaaaataagtgttggcttttggtcccgtggtcaccccgaggcccacagccaccttcggttctgattttctttttctttgaagaaaaaagctgaagaaagcggccgaagcgctcctagctgaaaaaaagggatgtcaaggtggggttcgctagctgaaggcrtgttgggggctaccctgaacccacagacgtgggacctggccccggactttccgtcttcctcagcctccgggtcgcgtcagttgctcggcgagggtctgagaagtggaggagggacacggcctcggcagccacctaggcgtggccggagtggagcgcggggtcggggcgggccccaccgcgaacgaggccagcagcgccttcagtgttgtcctcgcggtggacgcactgccagtccgcccag

SEQ ID NO: 44997 - DNA, 553 bp, Homo sapiens
ttggcttatagaatccatatggtatacttttagtattgcactggtttacgagtcaaacctacatttaaatcaaaccctttgtcttccctcccacactaaaggaaactactttcttttaaattgatgttttctctgtttttatactttcactacctttgcacatgttcataaatactatatgatattgatttgtgtttttaaaacttagataaatagtatgttatgcttatccttcagaaagttggctttctccctcagcatcatgtttttaagatttgtgcatttggatacattcattcattctaacgaattggtagtattctaacatatgaataaatcacactttacttatccattcgcattctgactgccaatttggatttctaaattagcattacagtttattttaacaaacaaagatcatcgttggccatatcttcttatattacacataagagaattttctagggcayatacctatacatgagcttgctgggctgtatcgtctgcccaacttcacatgtactatgtattgctaaattgctctctgaac

SEQ ID NO: 44998 - DNA, 645 bp, Homo sapiens
taataaccatgtagcttaagaaagagaactttgcaaaacccagaagccaccacgtgcctctccccaattataactttcttctgtctttattggtaactattaccctgacatttcttgctttcctttatggttttaccacctatgtgtgtatacttaaataatatagtttagttttgtccacggtaagtttgtatgaaaggtatcatactgtatatattcttttgtgtttttcttctttcatcatggtaaaatttatccatattcatcttttttcaatgccatgagttctgtctaccctttatttgttgttttttttttttttttttttgagatagagtctcgctctgtcttccaggctggagtgcagtggtgtgacctcggctcactgcaatctctacctctcaggttcaagcgattctcagcctcttgagtagctggcattacaggcatgtgccaccacactcagctaatttttgtagttttagtagagacggggtttcaccatgttggccaggctggtcttgaactcctgccctcaggtgrtccacccgcctcggcttcccacagtgctgggattacaggcgtgagccaccacgcctggcctatttggtgtatttccaaccaagaacaaggcaggtgcttaag

SEQ ID NO: 44999 - DNA, 541 bp, Homo sapiens
cccggttacatgcatgctccttgatttcaaacataatacaaaatagattcaaaagtcctcaaaccaaaagagtaacagtaccactccctctttcccaagtaccgcctcccattcctcagcgtagggtgctcttggtgcataaacacatctgcaattgacatagtcaatctgtcacctagaggtctaatacggaggacaaaggttttatttagtttagtgatagttaatatatgacaatctaagggmcttaaagcatgataactgttttaaatagtttaaaaaaatagaaaaactttctgaacacctagaagaatcactcattgctcactgcatgcctgatactcccaatggtatatttcagtcccacattgggacaaaaattttaaagttgagtagctgaatgctaattatctacatagcctcaaataaacttgagccttctacagttcccactatgttgacaaaatattatgagaaaagatagaaaatttagttgaagcaaattattcttctttgggatgctttctttgaaaaataaagc

SEQ ID NO: 45000 - DNA, 541 bp, Homo sapiens
cccggttacatgcatgctccttgatttcaaacataatacaaaatagattcaaaagtcctcaaaccaaaagagtaacagtaccactccctctttcccaagtaccgcctcccattcctcagcgtagggtgctcttggtgcataaacacatctgcaattgacatagtcaatctgtcacctagaggtctaatacggaggacaaaggttttatttagtttagtgatagttaatatatgacaatctaagggacttaaagcatgatarctgttttaaatagtttaaaaaaatagaaaaactttctgaacacctagaagaatcactcattgctcactgcatgcctgatactcccaatggtatatttcagtcccacattgggacaaaaattttaaagttgagtagctgaatgctaattatctacatagcctcaaataaacttgagccttctacagttcccactatgttgacaaaatattatgagaaaagatagaaaatttagttgaagcaaattattcttctttgggatgctttctttgaaaaataaagc

SEQ ID NO: 45001 - DNA, 625 bp, Homo sapiens
aagttactttagaaaaagtgcctattaaacagagtactttgtttagaggacgtatatttaaataaacttatacagctaaagaaactgactttcacttcctcagtgacttaatttcactacatgctgatttgtcctttgcagtatttagctcagaccaagacagaattgtatgtgctattagatttgcaaattgctgatctcccagtgactttccctcttagatcccagttgagtatggttaccttgagaactgtggtattagccatgttagagcatgctccactggggagttctgtgcagtctatttttaatgctatttaatgaaggagcgagcgcctcactcagcaataaaagaagcatgagggaagacagagcagtgcatggttatggatactggacaaggatatttggaaaggtaaaggctgaccattggatatggtaattttaatkaagtcctaatatatcatatgaatggaaatatggatttttgttagagaattatacatgaatagttcaataggtgttttcgtaaacctcttcactagttcttagaaagaagactcaataatttgagtttttaaaacttgagggacatactaaccagggagttcctgcatgcagacta

SEQ ID NO: 45002 - DNA, 466 bp, Homo sapiens
tcctggatatggaagtggagacttcaacatctgctcaggtgtggggcaaggtgatctctgaaacctcagaaaatctctcagagtcggtttcttcatttacatttgagcctttctttctcatggcctaggaagaaattccaggtaaaatgtaatattttccatttttatactttataaagaaatcctaagtaatcacaggtggatattggcccttaaacagtgtctagaatatgtaaataattatggaaygtataaatgacttattgtttatatatttaaatttgaagtaacctttttaaattacaaaaataatatatggccaggcgtggtggctcacgcctgtaatcccagcactttgggaggctgaggcaggaggatcacaaggtcaggagtttaaaatcagcctggacaacatggtgaaacctcatttctactaaaaatacaaaaattaggtgggcgtggtggc

SEQ ID NO: 45003 - DNA, 492 bp, Homo sapiens
cagataggatgatttatgtaactattctccaactgatgggcattcatgctgtttctagttattttactactatcagcaatgctacaatataaaggagacccagtgtccattagcagtcattcctcattccttcctcaccccagcccttggcatccactaatcttttatctctatggatttatttatactggatattacatatcaatcaaattatacaataggtgtgtcattttgtgtcttttttcactatcataatgctttcaaggtcaattcaagttgtagcatgtatcactacttcatttctttttatgtctgaatmatattccattgtatggataacacagactttgttgttttagaattggaatctatttttgtaaatggtgtgaggtagggctttaatttggtaaagtgatagacattaaagggatattttatttttattgtagacatcaatgcccaagaggaaatcaaaatgaattagtattctcc

SEQ ID NO: 45004 - DNA, 545 bp, Homo sapiens
tatctcataacatcatgttgcataccttagacatacacaataaaattcattttaaaaataaaatttaaaaaataaagtcgaacttataaaaacacaaagaaaaaaagaaaamtgcagagaagctgcatagaaatagtaaatctttggggattctggacagttgctagttttatcaattcatctaattaaatatatgacttttcctgtgcataattgcacatcatttcttagtatcacttgataatgaacaatccttacccttgtcattttaccacctgattttatattgagatccccacaccttttgtggcatttgtcattactgcttaggctcacttccttcctaagcaaacataaaatctctttgatgaatagcagcagaacttccaagccatctaaattaagctcctgggatgggtcgggccattcctgtggtggacactgagagggctctcacaccaaggacacacacacacctgtttggacattgtccctgcttccttgacagtgggcttcatctgacagcagatccttgcttccaccca

SEQ ID NO: 45005 - DNA, 545 bp, Homo sapiens
tatctcataacatcatgttgcataccttagacatacacaataaaattcattttaaaaataaaatttaaaaaataaagtcgaacttataaaaacacaaagaaaaaaagaaaactgcagagaagctgcatagaaatagtaaatctttggggattctggacagttgctagttttatcaattcatctaattaaatatatgacttttcctgtgcataattgcacatcatttcttagtatcacttgataatgaacaatccttacccttgtcattttaccacctgattttatattgagatccccacaccttttgtggcatttgtcattactgcttaggctcacttccttcctaagcaaacataaaatctctttgatgaatagcagcrgaacttccaagccatctaaattaagctcctgggatgggtcgggccattcctgtggtggacactgagagggctctcacaccaaggacacacacacacctgtttggacattgtccctgcttccttgacagtgggcttcatctgacagcagatccttgcttccaccca

SEQ ID NO: 45006 - DNA, 506 bp, Homo sapiens
ctaaagtcattattttctattagcattttctctgttcctttttattctagtcaatatctacacattttgaaatatacaaatctacagtaaaataaccaaaataaacaagtaaaagcaggcagaacctgagcctgatatttcaggttgttgcttttttgtctctcttttttttttcaattccatatattcttttctcttctttgtattttttcaagaaatgaaattaaatgcactacagctcctcaggaatgagtaaattcaagataaaagttgagtaacaatctttagaaacaaaaatttgtctgaatttaaaactgttaagcttccattttycccaaactaaattggtaaactatggggaaaaaagtaatatgaagcagtttaacttttgatttgagtacagacaacatgttggctaatttgtattgattatatctgccaatctagatgcaatcacacttttaaaagcagagtcctgtaatttgcttttctataaaatgtcacca

SEQ ID NO: 45007 - DNA, 600 bp, Homo sapiens
tgattcaataaccatttcctttctactcttaaccagacagcttttaaagaattatcaagtatttcagaatttcactaagattaagaatcactttcgctgggcacagtggctcatgcctgtaatctcagcactttgggaggccaaaacaggcagatcacctgaagttgggagtttgagaccaacctgaccaacayggagaaaccctgtctctaataaaaatacaaaattaggctgggcgtggtggctcacgcctgtaatcccagaactttgtcaggccgaggcgggtagatcacaagatcaggagatcgagaccatcctggctaacacagtgaaaccccgtctctactaaaaatacaaaaaaaattaaccgggtgtagtagcaggcgcctgtagtcccagctactcgggaagctgaggcaggagaatggcgtgaacctgggaggcggggcttgcagtgagctgagatcgtgccactgcactccagcctgggcggcaaagtgaggctacgtctcaaaaaaaaaaaaaaaaatacaaaattagcaggacatggtggcacatgcctataatcccagctactcgggaggctgaggcaggagtatc

SEQ ID NO: 45008 - DNA, 600 bp, Homo sapiens
tgattcaataaccatttcctttctactcttaaccagacagcttttaaagaattatcaagtatttcagaatttcactaagattaagaatcactttcgctgggcacagtggctcatgcctgtaatctcagcactttgggaggccaaaacaggcagatcacctgaagttgggagtttgagaccaacctgaccaacatggagaaaccctgtctctaataaaaatacaaaattaggctgggcgtggtggctcacgcctgtaatcccagaactttgtcaggccgaggcgggtagatcacaagatcaggagatcgagaccatcctggctaacacagtgaaaccccgtctctactaaaaatacaaaaaaaattaaccgggtgtagtagcaggcgcctgtagtcccagctactcgggaagctgaggcaggagaatggcgtgaacctgggaggcggggcttgcagtgagctgagatcgtgccactgcactccagcctgggcgrcaaagtgaggctacgtctcaaaaaaaaaaaaaaaaatacaaaattagcaggacatggtggcacatgcctataatcccagctactcgggaggctgaggcaggagtatc

SEQ ID NO: 45009 - DNA, 519 bp, Homo sapiens
ataatggaatactactcagctatcgaaaggaacgaaygaatggcattcacagagaccttgataagactggagactgttattctatgtgaagtaactcagggatggaaaaccaactattatatgttctcactcctaagtaggcgctaggctatcaggatgcaaaggcttaagaatgacacagtggacttggaggactcagggggaaagggtgggaagggggtgagggattaaagactacaaatagggtgcagggtgcagtgtatactgctggggcgatgggtgcaccaaaatctcacacatcgccactaaagaacttacttatgtaaccaaacaccaccttttccccaataacctatggaaataaaaaaaaatttaattaaaaaataaatagatctggtaataatcactaatatttaatgattagggacaattagttcttcacacttcaagatttatgaatgacaactttctttttttttttttttttttgagacggagtctcattctgtcacccaggct

SEQ ID NO: 45010 - DNA, 539 bp, Homo sapiens
tattttcgcattgaatatcagtcatatttgctttagccttaaagagcatgtttatgtaaaattaaatgagtgctttcagtgagctgcactttttttttttcctaaacgagaaaaggggaattctatgattttttttgtttcaagttgttgaatagcttttatagttaaataattttgtgtttttgtttttgtactggataatactcataccacagatgagtaccctgtaaaatgaatttgaaaatctctcagctacgtcacatcataactatgcccagtggatccaaggggatraaaagaattcagctgcatctcaatagcttgtagaataattaggaacatgtaggttttggaatttcactggatcaatttcattgacaactcagaatttaaaaaaaatttttgtaacttctctaacattgtgatacatggtaaaaagtatgacaaataattaagacaacccactattttggaaaatatgtcaattgagtacccactgtggacatgatacacaaagtattttcttttgattattaacc

SEQ ID NO: 45011 - DNA, 593 bp, Homo sapiens
gaccttcagcgttyttttctaactggaatcatttcatgccattccgatgaaatggagacattgttctgaggtttctgacccctccctcctaagggccccgtgatctgccacgaagcctgggaagatcagccacgcacacacccctctccggatcattcttttccagaggtcaatgacttaataagttcactttcgttcagcaagtttaccgttgctcctcttaaagtgatagcttgtgtattcatgacaatttggtattgttactgaagtggacctcacactggggtcaagaattcctaaattgctacctaatggtcactgtgaagagaggatgctgtaccgaccacgtctgcatcccacggggtctggagaggaccagaggcctgggccccaccaggtcacagagttggtcatgaattccccttctcctttctctccttacttcacggaggtatattctttctaaaaagattaaacagcatcatataaaatggatatacctgcttctcactctttcagctgccagagctccaaggcccttggtcctggctaggcccctccatggtcacagcagtgatggcctcgtccttccc

SEQ ID NO: 45012 - DNA, 1141 bp, Homo sapiens
cgtgtaatgaatagactcttctggcctagaacaataacatccacagataagactgcttataggagaaatgtgttctgtaatttgtccattcattcatttattcaccaagtatttgtttagtgtctgctatgtgcctggaccttggacgcaacggtagacaaaagagacaaaaatttctgccctggtgaagcttatgtcctgcgggtagagacagagagaataaataggtagaagacacagtatgttaaaaggtggagaaataagcccgtgtgaggggtccctgagtgtgcggagtggcagctctaactgaaatagtaagggtagagctaataagaagtggcttttgagcaaagccttgacaaggtgaggaaccactcacactgtaaaagacacctgcaggtcaaggtgtcctcaggttgagaagtgcctcatctcatgccaacttttcagcttaaaagatacagtttttgtatgatactgcacagatactgtcttactgggcaattttccttccatctcaggataataaaaggtaaaaccagagggyacttcacacatcacagcaagaatcacagtaaatatgtgtttccttcttataagtgctcttttaaagtttgatagctcaacaagtattgtagactgtacagttgtccttcagtggaaggagaaacatctacacaaagtatgtcatttattttcttctcaggctctttctttaaaatacctgccgtttgccatggacctctaagactgtctggctcataatgttagcaaaatcttttctattagtgtaatttgctcccggtagggcaaaaaaatctcgaaataataatattcttacgtttctttcctctacttccttctgcatgactttgcactcactagttgactacagcatccacattgccttgaaaagaagtaggattttttttttagctgaaatgaaaagtggaagaaagagtaaattttccttttttttcttcccaaacaggaacagttcaacatgaggaagcagaatcaatgcacagaaattaagctaatgtcttcagtctttgcaacaccacttgagcagcttgaccaagtcactcatgcctagtggccccgttagttgctcttctcccatcagtgagccctggaattt

SEQ ID NO: 45013 - DNA, 1141 bp, Homo sapiens
cgtgtaatgaatagactcttctggcctagaacaataacatccacagataagactgcttataggagaaatgtgttctgtaatttgtccattcattcatttattcaccaagtatttgtttagtgtctgctatgtgcctggaccttggacgcaacggtagacaaaagagacaaaaatttctgccctggtgaagcttatgtcctgcgggtagagacagagagaataaataggtagaagacacagtatgttaaaaggtggagaaataagcccgtgtgaggggtccctgagtgtgcggagtggcagctctaactgaaatagtaagggtagagctaataagaagtggcttttgagcaaagccttgacaaggtgaggaaccactcacactgtaaaagacacctgcaggtcaaggtgtcctcaggttgagaagtgcctcatctcatgccaacttttcagcttaaaagatacagtttttgtatgatactgcacagatactgtcttactgggcaattttccttccatctcaggataataaaaggtaaaaccagagggcacttcacacatcacagcaagaatcacagtaaatatgtgtttccttcttataagtgctcttttaaagtttgatagctcaacaagtattgtagactgtacasttgtccttcagtggaaggagaaacatctacacaaagtatgtcatttattttcttctcaggctctttctttaaaatacctgccgtttgccatggacctctaagactgtctggctcataatgttagcaaaatcttttctattagtgtaatttgctcccggtagggcaaaaaaatctcgaaataataatattcttacgtttctttcctctacttccttctgcatgactttgcactcactagttgactacagcatccacattgccttgaaaagaagtaggattttttttttagctgaaatgaaaagtggaagaaagagtaaattttccttttttttcttcccaaacaggaacagttcaacatgaggaagcagaatcaatgcacagaaattaagctaatgtcttcagtctttgcaacaccacttgagcagcttgaccaagtcactcatgcctagtggccccgttagttgctcttctcccatcagtgagccctggaattt

SEQ ID NO: 45014 - DNA, 590 bp, Homo sapiens
aaataccacccacaactgagccatgtagtgtactatgaagacatttcctttctcatatgactttgcacatgtggtagacatttcagcagatccccaaaatccagaagtgctggcttcactggcagggcaggcaagtccaggggagaggagttccctgaggttgtctggcctggtttcccaggcagctctttccatgtgttacagagcaggtctccaaaagtggccctcagagtgaatggggaaggcagggtttgcatcagggtccacacttgtggagggaggaagggcaggattgggtggagtttagccatgctgtgtgcctggcagagccttggcccaactccctgggagcttcagggtaaacgtgtcccaccagagttattccttgtccagctgaaatggccaaaccttccttgataygcccacttccatcggccagagatgtagctgttcctggaagaatgagtccttgtgggaggcaactctctgcacctgaggcaaatcctgaaggcactagaggctttctctgcaacacggtattatgccctttcttgacaggggtttggggggtgtgcacgtgtgtccacccc

SEQ ID NO: 45015 - DNA, 981 bp, Homo sapiens
tggtgctccatggaatagtgaaagtctgggaccaaagcaccttttccctttaatttctccaattgcttttaaaatattctatgcaataagcatctgagtccaaagggaggctgtgtcttcctctagggtctctctgaatgaggtcagtttctatgttaacttttacgcttccttttttgtctcatcccaaaccatttctcctcttgtcatcctctttttcctcctccttttccttcttatttctcctgttgccttttttctacctttttattttttgccaatatacataaaattgcttgttaaaaaaagatcaaagacagcatttttatatttttttcttaaaaaacaatatgaagggctgggcacggtggctcatgcctgtaatcccagcactttgggaggccaaggtgggcggatcatgagctcaggggttcaagaccagcctggccaacgtagtgaaaccccgtctctactaaaaacaaaaaaattagctgggcatggtggcgcacacctgtagtcccagctactcgggaggctgaggcaggagaattgcttgaacctgggaggcagaggttgcagtgagctgagatcgctccactgcactccggtttgggcaacagagcgagactttgtctcaaaaaaaaaaaaaaaagaagttaaaccatgaaaccacccataatatattagtcttcagaaagaaaagaaaaccaaggtaagatgcaaataacagaagtacaacttttatttttctaattgtggagtgactccaagaggattctgctcccaccaggtrggcgataggcgtcctgttggtggcgtgtaaaggaatggaaagctaccacgacctggggggtccaagaggggctgctgcaggtagcctacccccccagccttccccatgaccacagccacccactccctcaaagtgggacttcaggccaagcaggggaagatctcaggcgaggagaaacagtccatccg

SEQ ID NO: 45016 - DNA, 592 bp, Homo sapiens
ggtcataagtaacaaagtttcgaagttgaatgaaccttttttttcctgtaattttactgaccatttccctttctgtttgagagatctgtgcggtcctgttgctgaggttctgtggttcaggggtgttatcggtgacagagtgctgatttcacttgggtctgttctggtttgtcttaatttctcttttagagcttaattttcatttccaacgaattaggcaagacagaaagtgacatttggaaaagagtgaatggatgactaaacattcaccagacgtcattcttgtaacagttaaatggtagtgattcatgtctccatctcttgataaaatataaagcattaaatcttgatggctaaacacactgacaaaactaccgaaccacgttcctggttgaggatacctgaaggtcgacatttatctgggatcttttgctgctgctttggtatgacttctatcaagatagctttcgacgaggtagaacgtttgctttcactctgggttttccttggtttcgacaatttttargtgttaactgaaggaaatcccgtcttgtcagaatgttcttttcaatacaaatcgcagtgaaataac

SEQ ID NO: 45017 - DNA, 612 bp, Homo sapiens
ataattagattgtaacgcaaaggataaaggtttcaggggatagataccccattctccatgatgtgattatttcacattgtctgccagtatcaaaacatctcaagtgcctcataaatatatacacctactatgtacctataaaaatttaaaaatgcaaatttaggagaatccaaatttttatgagataacaaaattgagagaactcgagatagaatgcaaactaaaacaaatgaatctaactcttttacaaagaatcatgtaaccatactatggttacatgtatgtggtggagaaaatgagctgacttaagttggataacagtattttgagtagatacttataaagactaaagacaaaaaataattttatgtaaacattgtatcatagtttgtaaatttgcttctcacagtgctatagaataacaatttaaaactactttatatgtatagaagtgttggatcaataagtaaatatgttgtaaataatgagaaccatgtttctctctgtgaagaaaaaagttacaaataaggaaaggtggaactccattattctggattgcagttggattgccagagaaagagayagaaataaaaattggtatgtctgtatgca

SEQ ID NO: 45018 - DNA, 595 bp, Homo sapiens
agctgaaccaccttacaggtaaaactgcctcctcatcagtgtcctagtttcttctgaagataagctccctaaaaagggctctctaatgaaacccccttattccaaagtccaaatgaaagcaaagggttttacagcaaacctctcataccatttcatatgcctctgccacattctttaatttttgtgagttcaaaataaacaaacaaaaaacttaatttgaaaaacttaaagattagcagccttgtttcaaactacccaatggccagcccaacccagacaccaagaatcacaggagaggccgatgaactcagtcattgagacccctgttgggcctagttcaggcacagactcagggaaactrtggggcttaattaagcttcggagcccctcacccactcatgcagggaggatctagcaatgtattcacatggtggtagattgttgtaacatttgcagaggtaagctaatttaaccccaatgtgttaataccattgattatttcctctccactccaatgtttcctctgtcacacttcccttcacattggatagcactggagtagccaaagaaattttgggatttggctaaggaaaaa

SEQ ID NO: 45019 - DNA, 550 bp, Homo sapiens
tgatgcactttttcatttaaaagactaaaaaggaaattcactttagtctcctttctgcctagtttcattaaactctaaatgcagctattctaagagattttttctagctcagatcagcttgacaaaaaaggtctcatgtatcatttaaatcaattacagattctctggamatatacctcaaactttcagtccaacagttttggtttaaaaataaacacataaaatattaccaaaaaaaatatgcaatcaaacacgatcctcaaaaaacagtatcctgaaggagtatattgtttataattattattaaattatattccaagagttactttttgactttagaaagtattaggaaagtattggtaattacttcctaacgtatctttataaaattgtatctatttttataccaaaaaaatcacataatggccacaactacttataataacatcaaaatttcaatttaatgttattaatatataagctcaggcaatgactgctggttaggaagaaaccatccatttcctccgctagaagagaaggttattgtccc

SEQ ID NO: 45020 - DNA, 582 bp, Homo sapiens
aggcagcagagtcatctacggcatgcaggacaccacgttgtacaagaatgtaggttcattgtgctgcttggtcactcagctcaatcttctccatctcaggttacccagggccaactttcaattcatctcctttcccagcagtgaggatgctcttcaatggggatgtctctcagctccctgacctacagccacctagcatcacctcttatgaaccctttggagcctggcagaaattgattcccagattgagtttttctggtcaggaataagcagggatgtgaaataactgaactccatacaattccgccttttggatccactggactttggagcaagtttcctaagacactggattatctcatggtcaagrtgaacatctcccatcaccctggcagcctgtcaccttcttcctttccttcttttcctttctaaccacattcttctccagcttctctttctcctttatctgctcatttctctctcatttagtcttgctcaaaattgctctcaaagattctttttcctgccatccctcttaggaagcagacgaatagcgggatgccagccctggatggaccataa

SEQ ID NO: 45021 - DNA, 582 bp, Homo sapiens
aggcagcagagtcatctacggcatgcaggacaccacgttgtacaagaatgtaggttcattgtgctgcttggtcactcagctcaatcttctccatctcaggttacccagggccaactttcaattcatctcctttcccagcagtgaggatgctcttcaatggggatgtctctcagctccctgacctacagccacctagcatcacctcttatgaaccctttggagcctggcagaaattgattcccagattgagtttttctggtcaggaataagcagggatgtgaaataactgaactccatacaattccgccttttggatccactggactttggagcaagtttcctaagacactggattatctcatggtcaaggtgaacawctcccatcaccctggcagcctgtcaccttcttcctttccttcttttcctttctaaccacattcttctccagcttctctttctcctttatctgctcatttctctctcatttagtcttgctcaaaattgctctcaaagattctttttcctgccatccctcttaggaagcagacgaatagcgggatgccagccctggatggaccataa

SEQ ID NO: 45022 - DNA, 1905 bp, Homo sapiens
ttaattaactcctgtcaagctctctaatatgttctttaattttcttccactcctccccttttcttccttttctcctccctcctctcctttcctctcttgtcccctcgtctccgctctctttctccttaatgttcctgattcctcatattttacatttagtgcaaaggactaggaccatagtagccattcaaaatgatayaggaattatatttcactatcttgtattcaaggaataaataattagtttgtgaactagttaattaatgatccttcatctttcattcacaaaccgttttcttttttctttgtcagttctaccaaacctactcgctctacaaagatgaataaagcaagatatctttttgtcaaggtgctcaggataactagtatagtagcatcgaagcatatgaaagagtataaaaatcacttgtgacgttttaaaatacaagtagtcaagcccaccaagacatactgagtcaaagcctctgggggtagagtccaatgttcatattttctgaaaaggctcacagttaactctaatatttaccaagggatgatgacagctggcaattggagcacaaaaatacataatggagtacaaatggtataacagtattatgaaaaaggtggttctgattgaaaattttggttgaaaatatctgaatacttgtttaagtgcttgattcagctatgacaatactggtattttctgccaatacatttgcagcttctttctattacagatgatatgaatgtcctctcactaacaccacgttgccaaatgtgtttgtgtttttgggggcggagggtgccatttcatcacttaaaaagaaacttacagtacagaatacatggaattctagcaaatttcaggagttaacacacttctctttcttctttcttccttccttttctctttcttttgttactgtatgacaaatactgttttaagtattgatgaattagctgtgaacaaaatacaaaataggcaaacttcactttcaggaggtaacatttcagtctgaggagaaaaaaaataatcatattaactactaaatgaattaatttcagattcaataaacaataacatgaagataaaatatgtaatcatagaaaatgactgaggggaaggcgacactctagccaaaatagaaattatatttaaattgttccagaaaaattcaaagtagggaccatatgaagataggtggaagaatatttctcacagaagaaaagcacatataaaggtctaaatatgaagcacaccctaatgtattcatgtagctaaagatgaaaggcaagagatctcaatatcaaatagctgtaatctaactcatttcaggtcatgatgaagatacattcagtctactttagcatgtaatggtaactaaccaaatttgtatttcgattggtggttaacttttaaaacaaaaattgcacacttttctcacctttataatattttttaacttttaattaaggttcaggggtacatgtgaaggtttgttacatgagtgaacttctgtcataggggtttgttgcacaatatttcaccagacaggtattaagcccagtatccaatagttatctattctgctcttttctctcaattagaccctagtgtttgttattccttctttgttttcataagttctcatcatttagctcccacttataattgagaatattcagtatttgattttctgttcctgcatagttagctaaagataatagcctccagctccatccctgttcccacaaaagacataatcttggatttttattgttgtataatattccatgttataaatgtaccacattttctttatctaatatgtcatcgaggggcatttaggttgattccatgtctttgctattgtaaacagtgctgcaatgaagatttgc

SEQ ID NO: 45023 - DNA, 1905 bp, Homo sapiens
ttaattaactcctgtcaagctctctaatatgttctttaattttcttccactcctccccttttcttccttttctcctccctcctctcctttcctctcttgtcccctcgtctccgctctctttctccttaatgttcctgattcctcatattttacatttagtgcaaaggactaggaccatagtagccattcaaaatgatataggaattatatttcactrtcttgtattcaaggaataaataattagtttgtgaactagttaattaatgatccttcatctttcattcacaaaccgttttcttttttctttgtcagttctaccaaacctactcgctctacaaagatgaataaagcaagatatctttttgtcaaggtgctcaggataactagtatagtagcatcgaagcatatgaaagagtataaaaatcacttgtgacgttttaaaatacaagtagtcaagcccaccaagacatactgagtcaaagcctctgggggtagagtccaatgttcatattttctgaaaaggctcacagttaactctaatatttaccaagggatgatgacagctggcaattggagcacaaaaatacataatggagtacaaatggtataacagtattatgaaaaaggtggttctgattgaaaattttggttgaaaatatctgaatacttgtttaagtgcttgattcagctatgacaatactggtattttctgccaatacatttgcagcttctttctattacagatgatatgaatgtcctctcactaacaccacgttgccaaatgtgtttgtgtttttgggggcggagggtgccatttcatcacttaaaaagaaacttacagtacagaatacatggaattctagcaaatttcaggagttaacacacttctctttcttctttcttccttccttttctctttcttttgttactgtatgacaaatactgttttaagtattgatgaattagctgtgaacaaaatacaaaataggcaaacttcactttcaggaggtaacatttcagtctgaggagaaaaaaaataatcatattaactactaaatgaattaatttcagattcaataaacaataacatgaagataaaatatgtaatcatagaaaatgactgaggggaaggcgacactctagccaaaatagaaattatatttaaattgttccagaaaaattcaaagtagggaccatatgaagataggtggaagaatatttctcacagaagaaaagcacatataaaggtctaaatatgaagcacaccctaatgtattcatgtagctaaagatgaaaggcaagagatctcaatatcaaatagctgtaatctaactcatttcaggtcatgatgaagatacattcagtctactttagcatgtaatggtaactaaccaaatttgtatttcgattggtggttaacttttaaaacaaaaattgcacacttttctcacctttataatattttttaacttttaattaaggttcaggggtacatgtgaaggtttgttacatgagtgaacttctgtcataggggtttgttgcacaatatttcaccagacaggtattaagcccagtatccaatagttatctattctgctcttttctctcaattagaccctagtgtttgttattccttctttgttttcataagttctcatcatttagctcccacttataattgagaatattcagtatttgattttctgttcctgcatagttagctaaagataatagcctccagctccatccctgttcccacaaaagacataatcttggatttttattgttgtataatattccatgttataaatgtaccacattttctttatctaatatgtcatcgaggggcatttaggttgattccatgtctttgctattgtaaacagtgctgcaatgaagatttgc

SEQ ID NO: 45024 - DNA, 1905 bp, Homo sapiens
ttaattaactcctgtcaagctctctaatatgttctttaattttcttccactcctccccttttcttccttttctcctccctcctctcctttcctctcttgtcccctcgtctccgctctctttctccttaatgttcctgattcctcatattttacatttagtgcaaaggactaggaccatagtagccattcaaaatgatataggaattatatttcactatcttgtattcaaggaataaataattagtttgtgaactagttaattaatgatccttcatcwttcattcacaaaccgttttcttttttctttgtcagttctaccaaacctactcgctctacaaagatgaataaagcaagatatctttttgtcaaggtgctcaggataactagtatagtagcatcgaagcatatgaaagagtataaaaatcacttgtgacgttttaaaatacaagtagtcaagcccaccaagacatactgagtcaaagcctctgggggtagagtccaatgttcatattttctgaaaaggctcacagttaactctaatatttaccaagggatgatgacagctggcaattggagcacaaaaatacataatggagtacaaatggtataacagtattatgaaaaaggtggttctgattgaaaattttggttgaaaatatctgaatacttgtttaagtgcttgattcagctatgacaatactggtattttctgccaatacatttgcagcttctttctattacagatgatatgaatgtcctctcactaacaccacgttgccaaatgtgtttgtgtttttgggggcggagggtgccatttcatcacttaaaaagaaacttacagtacagaatacatggaattctagcaaatttcaggagttaacacacttctctttcttctttcttccttccttttctctttcttttgttactgtatgacaaatactgttttaagtattgatgaattagctgtgaacaaaatacaaaataggcaaacttcactttcaggaggtaacatttcagtctgaggagaaaaaaaataatcatattaactactaaatgaattaatttcagattcaataaacaataacatgaagataaaatatgtaatcatagaaaatgactgaggggaaggcgacactctagccaaaatagaaattatatttaaattgttccagaaaaattcaaagtagggaccatatgaagataggtggaagaatatttctcacagaagaaaagcacatataaaggtctaaatatgaagcacaccctaatgtattcatgtagctaaagatgaaaggcaagagatctcaatatcaaatagctgtaatctaactcatttcaggtcatgatgaagatacattcagtctactttagcatgtaatggtaactaaccaaatttgtatttcgattggtggttaacttttaaaacaaaaattgcacacttttctcacctttataatattttttaacttttaattaaggttcaggggtacatgtgaaggtttgttacatgagtgaacttctgtcataggggtttgttgcacaatatttcaccagacaggtattaagcccagtatccaatagttatctattctgctcttttctctcaattagaccctagtgtttgttattccttctttgttttcataagttctcatcatttagctcccacttataattgagaatattcagtatttgattttctgttcctgcatagttagctaaagataatagcctccagctccatccctgttcccacaaaagacataatcttggatttttattgttgtataatattccatgttataaatgtaccacattttctttatctaatatgtcatcgaggggcatttaggttgattccatgtctttgctattgtaaacagtgctgcaatgaagatttgc

SEQ ID NO: 45025 - DNA, 1905 bp, Homo sapiens
ttaattaactcctgtcaagctctctaatatgttctttaattttcttccactcctccccttttcttccttttctcctccctcctctcctttcctctcttgtcccctcgtctccgctctctttctccttaatgttcctgattcctcatattttacatttagtgcaaaggactaggaccatagtagccattcaaaatgatataggaattatatttcactatcttgtattcaaggaataaataattagtttgtgaactagttaattaatgatccttcatctttcattcacaaaccgttttcttttttctttgtcagttctaccaaacctactcgctctacaaagatgaataaagcaagatatctttttgtcaaggtgctcaggataactagtatagtagcatcgaagcatatgaaagagtataaaaatcacttgtgacgttttaaaatacaagtagtcaagcccaccaagacatactgagtcaaagcctctgggggtagagtccaatgttcatattttctgaaaaggctcacagttaactctaatatttaccaagggatgatgacagctggcaattggagcacaaaaatacataatggagtacaaatggtataacagtattatgaaaaaggtggttctgattgaaaattttggttgaaaatatctgaatacttgtttaagtgcttgattcagctatgacaatactggtattttctgccaatacatttgcagcttctttctattacagatgatatgaatgtcctctcactaacaccacgttgccaaatgtgtttgtgtttttgggggcggagggtgccatttcatcacttaaaaagaaacttacagtacagaatacatggaattctagcaaatttcaggagttaacacacttctctttcttctttcttccttccttttctctttcttttgttactgtatgacaaatactgttttaagtattgatgaattagctgtgaacaaaatacaaaataggcaaacttcactttcaggaggtaacatttcagtctgaggagaaaaaaaataatcatattaactactaaatgaattaatttcagattcaataaacaataacatgaagataaaatatgtaatcatagaaaatgactgaggggaaggcgacactctagccaaaatagaaattatatttaaattgttccagaaaaattcaaagtagggaccatatgaagataggtggaagaatatttctcacagaagaaaagcacatataaaggtctaaatatgaagcacaccctaatgtattcatgtagctaaagatgaaaggcaagagatctcaatatcaaatagctgtaatctaactcatttcaggtcatgatgaagatacattcartctactttagcatgtaatggtaactaaccaaatttgtatttcgattggtggttaacttttaaaacaaaaattgcacacttttctcacctttataatattttttaacttttaattaaggttcaggggtacatgtgaaggtttgttacatgagtgaacttctgtcataggggtttgttgcacaatatttcaccagacaggtattaagcccagtatccaatagttatctattctgctcttttctctcaattagaccctagtgtttgttattccttctttgttttcataagttctcatcatttagctcccacttataattgagaatattcagtatttgattttctgttcctgcatagttagctaaagataatagcctccagctccatccctgttcccacaaaagacataatcttggatttttattgttgtataatattccatgttataaatgtaccacattttctttatctaatatgtcatcgaggggcatttaggttgattccatgtctttgctattgtaaacagtgctgcaatgaagatttgc

SEQ ID NO: 45026 - DNA, 617 bp, Homo sapiens
tcccccacctgcgggatcccaaactgcttcagagctctggggacaaaggctcggccttgagaacagttttgtacttggcaacagccacatcgagggcaagacgatgacctgaaaaccctgcaggaaacccgtyccaaccaactgatcatccaagagtgcgacagaataaagtgatttaccagcaaatgaggactccaaaaactcatgctccatgcacgacttctccaagagccactggaagacgtgcatgaccaagatggcgaggccgcagaaaggaggccacggagcccgggagaggaggcgggggccaggccgggagagcagaccgttcacacgcaccgggcagtggggccagaagcaccaggcggcctgctgtgcagaggagggtctcctaggtctgctgaaatgtgggcctgaattgatagcaggcaggtgtgaaactaagcaaatgaaaaaaatgatcaacttccggaaaaatttctacgaggtgaatgcagtccaggtggactctggttctgctgtgaacgtgacacacgctgtaataacgcaggcgggacaggcagtcagggacggccgttctcctatcatgaacatcatgggggtctatgtaaatgtac

SEQ ID NO: 45027 - DNA, 530 bp, Homo sapiens
cagcctgtttaactcttttttatggaaaaattcagacatactcaaagtaaacagtaatgctgtatccaaccatatatttatcttttccaatatacaggtatattttgatgcgggaggatactatacgttatactttctcatttaaattatatatatattcatttttttcttttctgttttttttttttttaaagacggaatcttactcttttgcccaggctggtgtgcagtggctcaatctcagctcactgcaacctccacctcctgggttcaagcaattctccttcctcagcctcccaagtagctgggattccaggcacgtgcctccatgcctggcaawtttttttttaatacttttagtagagacagggtccatcatgttggccaggctggtcttgaactcctgacctcaagtgatccacccaccttggctttccaaactgctgggattacaggtgtaagccaccgtgcccgaactatattcatctttattattagtattcccatggttttactacattattactgca

SEQ ID NO: 45028 - DNA, 510 bp, Homo sapiens
tgccctatagtcaaaccatgtgccaaaagatgtgttctgattttcgctttagaaaacatggctaatgttttgagttgaactgtgtgccaccaatttcaaatgttaaagtcctaacccctagtacctcagaatatgaccttatttggaaataggatgggtactactaattagttaatatgcagtcaaactggagtagggtgagtcacgaatccagtatggccggtgtcattataaaatgggaaatgtggacatcctccctgtctacttacacagggagaatgacatgtgaagatgtgaagatgaaggcagagattggagcgaygcctcaagccaaggagtgtcagacgttgccagcaagccaccagaagctagggaagagacatggaacagattctctctcatagccctcaaaaggaaccaaccctgctggcactttgatctcagacttctagcctccagaaatgtgagatgataaatttctattgtttaaaccacctggtttgtgacact

SEQ ID NO: 45029 - DNA, 568 bp, Homo sapiens
ttttataaaaatctggctcccaaaatgtagcgtgaaggatagtaatggacacactaacttaagtaacgttattggccacagctcagtataaattcaggctgtcacattaactttaaaaacactgataaatttttaggttggttaataaaattaaactacctagaaccgtgtgccaatactgcagtcaccagccacatgtgtctattgaggacttgaaatgtgagtagtccaaattgaggtaaaaattgtacttcccagattttgaagacttaataaaaaacagaaaaacataatattaattatgtatcatattcatgatatgtttaaataatatttgggatatactgggttaaataaaatatattagtaattgatttaaccagttactctttattttctatgaacatagctactgmaaataagcttacatatgctgggtttgggttacatttctgttgctcagtgctgctcggtggatacaggaggtggatatatcagtgttctaagggcttattggaaaacacctgggatactctagccaattagaggctgtataggagacagtcat

SEQ ID NO: 45030 - DNA, 574 bp, Homo sapiens
aatatactgctgtcaggttgtcctagggctgtaagggctgccccacttgatccacacacagaagagtggcagggctggtgggcactgacccgaaggaagaggagcaggggtacagcaagcatggcagcagaaggggtggtgctacttcctctgactacctgtgccctcactgccagcgcataccatctgatgcgagccaggagggatggcaccgatccaatcaggtttccctacagtattaggttcacatatgaccacgtaagacctctgttcaaaacaagaaaccccaaaactctcagactggcctggacttctctcaagaacaaagtaggaagtcagggasggtgtcacctgctgctccaatgccactctcagatggctcagatcacccctccagttggtgcaattttcaaggaaccctgctgctctgttcccttgggctccagtgggcactcagaggccaaggagcctagctgaggtcggcagcctggaccctcaagaggctgaagagaaagcacttctgcacagtttctccagcccccagccccagctgtcagcctctttagtcatccct

SEQ ID NO: 45031 - DNA, 585 bp, Homo sapiens
ttcccactcgccacactgcttcccagtaggtctccatcaaagacatatcgcgtgcaaagcactgtgtgaatgattctaacaaagctgctcttgttcaaaatattgtttagaaactgttttcaaatttaacacatttatgcagatctttagaagtggcaaatcttctgtctttcagggaggtattgagtttctggaaagagctgagtgtctgtacccgtgccaaggaaggaggcaaggtgtcctgaaggggttggagccagtcacagtatatgaaatgtacccccaacttcggaaggaaactgtctccctaatatggytccttaactaacaagtccttagagtacagggcttttactctgctttgagcgctgagagacatatgtatgagcatgtgcacatgtgcatgtacatgtgtgtgtgcatgtgcatgcaagtggcatgtgggcacatgcatgcacacatgcaacagactacttcctactgcctatgaatactgtgtcactatgtgcctcattccttcccgtaactttcttagccacttggggagcatctagcacaatacgagggctgtatctgccaagtgca

SEQ ID NO: 45032 - DNA, 572 bp, Homo sapiens
cccctgaaggcctgatataaaaagaacgtgttttcatgtggattatttgtttttctgctttgttcatctttgcaatcagatgtcaatgataggtgctttccctgaagtgatctgggtctgattctagttgtatctgaatgagctatcaatgttgctgtggagtatcagatgaatgcagagaatacatcccaggtactctcgattcaaaaagcaccatgtctcaggtgctttaggaaatcctttctaaggccagggaagacttagcagtctctccttaaatcaagaatatatcattcaagccaaatgaatattatacactatacagcacacatattgatatgctcttgaatgtatcttattacttgacagcaaacatataatttaaaaattattgaaactgtgtaaaaaggaagcacgtagaaataaaattttaaaaatatgtttgctataaacaaatatcatttaaatattatttttacttctctgcataatcacctaaacatttcacacattattgagtgaatatatrtgagcaatattaattttatatttcaaatacacctttggaactt

SEQ ID NO: 45033 - DNA, 1168 bp, Homo sapiens
tcagaaaaagtggagaaatcagaaaaagaaaacttattcttgtaaagctaattataaaaagttagacaactgtagcttattttaggaagacagagatttggccattaatttggagtgttgtcagtgggaagatgtctaacatgcattttggataatttgtgcattatgtcgatatagatacacagtaagtgcattagtaacaaattagagacataaaagttgccagcagtgatgggaagttcaggaaaagccacctaatgcagttgaaatacctcaccggcatctctttgcaatgaattgtgttcagtcatcgtctctttgttcccagaccacatccacagtatacgtcttttattctcaacaggaatttctactagctaatttatcatgctgaatccagactattacccctagctattctctccctgcctttcatgtcatgatcaatggcttaggtgcaagttgcactcccaattcaccctgcttttatgtattatgatgtggacacattatttaatcacctcattttcctatgtcagaatatgcggaaagtaattaatgtatacaaaggattgttgtgagaaataaataacataatatagataaatggtttatgcatgttgggcacataacaaatatccaatagatattactgtagtgagtaaaaattaaatttacaaatgatgtaaattatacaagaaaacacacaattatatttacttaaaaatcaagatgagggcctggcgtggtggctcatgcctgtaatcccagcactttgggaggcagaggtgggtggatcacaaggtcaggaaattgagaccatcctggccaacatggtgaaatcccgtctctactaaaaatacaaaaattagccgagcatggtggcaggcgcctgtagtcccagctactcgggaggctgaggcaggagaatcgtttgaacccgggaggtggagkttgcagtgagtcgagattgcaccactgcactccagccggggtgacagagcaagagtccatttcaaagaaaaaaaaaaaaatcaagatgggcctggtgtggtggctcaagcctgtaatcccagtaatttgagaggcccaggtgggtggatcacttgaggtcaggagttcaagaccagcatggcctacatggtgaaatcccctctctactaaaaat

SEQ ID NO: 45034 - DNA, 1256 bp, Homo sapiens
tcaagaatgtatttgaaactagagaattgtccaataggataaaagaggggatgctgcctcatccagagcccaagctctctattagccatgctgccctctgtgtcacttccctcaagaaagaccctccacttgagctatgaatcgcatcctctgtggccatctcaaggcttcacttcttaaattctcctatctctcatacctcaacaatgcctcctctctactgggtcattccctttggtggcacacatgtcataataacatacccatgtttgttttttttaaaagaagaggaaaagaaagcaaaacaacctcctttgtccataggtagacacacacacacacgcgtgataccctgctaccacctcacttctttgccccctttcacagaaaaactccttggaaaagtgctatgtatttaccacccacacttcctcattccctctccaacgactttaatcaggctttctactcctccgctccatggaaatgcctcttaccaagatcagcaattatctcctttcttccaaagccagtgacagttctcagtcctcatcttcctcatcctcttggccgcatttgatgtgcttgtctacactctccttgaaacactttctacatcaagttccgacacccaaaccttcccctggtttggcactcttcggtctcaggctggctctgccttctctacaaatctatgaatgctgggatgtccccagggctcagtcctcaggtctcacctcctttcaatctaaccttactccctcagaggtcccatgcacttcttgggtgcaaatcgcattcacacactgatgactctcaagtttctatgtcaggattactcctctcccacaaactccagattcctcaaacctcctgcctccttcacagcccttctgtaaagtgagtggccaaaacagaactgttgatttccactatgctgtaaatctaccccsttttcaactaaccatctacatactcctaatctcctttgccttgccacaccttttatttttccatagcacttatcaccatctaacatagtgtatgattttatttatttaactcattattcattgtctacctccgataaaatgtaagttccacaagggcagagatctttgtttcattagctgttatatcctaagagcctaaagaattgtcttatatatcgtagactctcaaatattaagtatatgaactaatgagaggtaagtggcttgcctaaggcagtatgcattgcattatataagaatata

SEQ ID NO: 45035 - DNA, 547 bp, Homo sapiens
agaagtcaagcaggcccaacttaggggcagagaagatctgaactccaggcaggaccatagttccagattcaccactaaccagccctgtggtcttggaccagctccctacctccctgagccatatgctccgtgtctgcactggagagtgtgggttagatgatatccaagatagatcttatccacagccaccacgccctgagcagaagacgaagcttcatttgcttctgcacctaccgccaccaccttctgaagccgctggagaaaaactcctaggactttcttgaaggaaccaaaggcagtgattttctgacctggggactgaattccccaccaccatagtgggaacacagttttctgttttggctttaccaaacattaacttcccttcgataccctgagtgactcctctccaccacatggtgcattaggaactactggaaatttaaaaaaagaaaatgaggtcattatgttccaaggacttacactatggtggaagggaataagatctacacataattagtgacaatgtaagcaagaatatggyatc

SEQ ID NO: 45036 - DNA, 1323 bp, Homo sapiens
tagaggtacttctctccagacttctgagatcattggttctatgacctagtccaagtgttttaacttctctgtgactcaattgttttacttggaaaatgaatgcactgcttaattgtatttctttgttttgaagttagttactgcatgtgaagcatttagaacagtgcctggagcattatcattgttattattattgacattatgctatttgaacaaatataagtccatgttacagtggagtagagtggaaaccatgatgtgtggagtggaagcagctgaactttcaggcaggtgaatcagtctctagctcaactccatcactggcttttgggggaatgttatgctgggctaggaaagaaacttaacctctccctccacctgaaagtgaagggattcaaccaacccctttcgcaaggtcatgactgaatgctgctctctggccatcatgggatcatatgagaggaacaaagtgagaggtacagctggagagtacattaccatgtatattagtctgttctcatactgccataaataaatacctgagactgggtaatttaaaaagaaaagatgtttacttgtttcatggttctgcaggctgtacagtaaccatgatgttggcatctgcttgacttctggggaggcctcaggaaactgacaatcatgacagaaagtgaagggggaacagatgtcttatgtggagggaacaggaggaacaagagggagcaacaggggaggtgccacacatttttaaacgaccagatctcacttaccatcatgagaaccacaccaaggggatagtgctaaaccattcatgagaaatctgcctccatgatccaattacttcccaccaggttccaccttcaacattggagattaccattccacatgagatttgggccagagacacagattgaaaccttatcatgtcttcattctaggctggggtggcgggtgggaagatagaccttgcttggagatggagtgtggtgtaggtgtcccaccagtgtttggggacaagagactaaaggctctgtgttcatgctacaaggtcacttgttttgccaggctgtgagcagcttgggtactgagcaccctctctcccagctcttttccatgacacrcaaaggccagagcataaaaagggggcaaaatgaaataggaatttgtaacttcttaagacttgaatatcagtgttccatttttttcttttattaaaaaaggcactgaggataataatgttttacatcggatgctccttatgtgatctgggggcctgtccaagccataatgaacagttgtgagcaacaaagcatgcaattatgg

SEQ ID NO: 45037 - DNA, 689 bp, Homo sapiens
taacaaaataattttgtatctcaaaaacttctacttgcctttctgtggtatgattttctttgggacttaccctttggttcaacagcattgctgtctccttacacgtcagcttccagagtggggccatccttgacttggatatttatatatcaagttgtctccccgctaaactcacttctcagtattcctggatcaagtggctgatctcttcctccctggggaattgtgctcataaaaaattgctgagctttcaagttttaagctcaactgatgtcacgggatttaccaccacccatctgaataccttattttctctccccaaaaagtatcacctcctgaacttctaggtcatctagactccaaccatgtttattcaagycaagacttactgctttctgagctgatttatgcatggtcttgtctttgatggacctctttcctgtgtgctccagtcctgctgtcatatccttctctgttgcaaattaggttaccagtgcatctaggaaacactacatcacaccttctactgagtttttagacagcaatgaggtttggcgttagtctgttttcatgtccctctctgagtccccgattcttgaccttctaaggtcaaatccactgctacacttggatgtatgagataatcacttacgagcaaaatgattggctgcatgtaaggactaatcaca

SEQ ID NO: 45038 - DNA, 689 bp, Homo sapiens
taacaaaataattttgtatctcaaaaacttctacttgcctttctgtggtatgattttctttgggacttaccctttggttcaacagcattgctgtctccttacacgtcagcttccagagtggggccatccttgacttggatatttatatatcaagttgtctccccgctaaactcacttctcagtattcctggatcaagtggctgatctcttcctccctggggaattgtgctcataaaaaattgctgagctttcaagttttaagctcaactgatgtcacgggatttaccaccacccatctgaataccttattttctctccccaaaaagtatcacctcctgaacttctaggtcatctagactccaaccatgtttattcaagtcaagacttactgctttctgagctgatttatgcatggtcttgtctttgatggacctctttcctgtgtgctccagtcctgctgtcatatccttctctgttgcaaattaggttaccagtgcatctaggaaacactacrtcacaccttctactgagtttttagacagcaatgaggtttggcgttagtctgttttcatgtccctctctgagtccccgattcttgaccttctaaggtcaaatccactgctacacttggatgtatgagataatcacttacgagcaaaatgattggctgcatgtaaggactaatcaca

SEQ ID NO: 45039 - DNA, 574 bp, Homo sapiens
ttacctgaaaccatctcagatagggttcacacatccctttcccgaaccctcccaggagcccctcgtgggcgcccaggtcctgcctgctgttgtggcccaggctcacctggagcaactcgactcttcgttacagcctcgtgaacctttcagttcctaaagctgtctagcctgtgaaaggaaaatgaatctgggggccccaaaatcactaagctaaagggaaaaaagctgggaactgcttagggcaaacctgcctccccatctattcaaagtcacccctctgctcactgagataggttaatatgtgatagcctcctttgcggaggctattcagaaacccgaaagaatacaacagtttgtctctcacctacctgtgacctggaagccccctccctgcttcgagttgtcccgcctttcccgagggaaccaacgttcatcttacatatattgatgtctcctgtctccmtaaaatgtataaaagcaagctgtgtcccgaccacctttggcacatgtcaagacctcctgaggctgtgtcacgggcgtgcgtcctcaaccttggcaaaataaactttctaaa

SEQ ID NO: 45040 - DNA, 532 bp, Homo sapiens
aattacacacactttaaaaatagaaaatactgtgtattgctatttggagatttttttttccttagtatattaagttaccttattcctttacaaaattacatagccaaaggaattgctttctaagttctttaaaattggtgtgtgttttatctcaccattctaaataaactatttttttcctgtggtaatgcctctactataacaagcttctcattttgtgcctaatttggtatccggtcagataaatcaattggttctttgtgagcagtttaagcctaagactcagcttcatttttatgagtgataccttagaatcaggaatgacggcagaattagccaaatgccttttatcacaataagagaaktttaaacaatactcaatcaattgataaccaatgaaccaacaagtttgttccatagctataatttgacaaatatctccactgctgaagagtgtattttgttttcccccagagaagacaagtgcaaaataactcactgcagggcaactctaaagggatccctgtgtttc

SEQ ID NO: 45041 - DNA, 605 bp, Homo sapiens
agaatccaccacttcttgctgtttctctttttgtagaccccatggtggggcagagggagaaacagcttattataagcctcatgttctagaatccctttattctggcacaaacattagtaactgcaaatgccatgattaggattctgagaaaattaattctacaacagaaractcttttaaacatttttaaatttggctgggcacggtggctcatgtctgtaatcccagcactttgggaggatgaggcgggtggatcacaaggttgggagttcaagaccagcctggccaagatggcgaaaccccatctctactaaaaatacaaaaaattagcagggcatggtggcgggtgccttataatcccagctacttgggaggctgaggcagagaattgcttgaacccaggaggcagaggttgcagcgagccaagatggcaccactgcactctagccagggcgacagagcaagactgcatttcaaaataaataaataaataaattttttgctcttttcaaattcagaaagattttaagaaatgacaatattctctgctgtaagggggtgaggcggcactgccatttactgcttatgggaggccaaacttgaac

SEQ ID NO: 45042 - DNA, 605 bp, Homo sapiens
agaatccaccacttcttgctgtttctctttttgtagaccccatggtggggcagagggagaaacagcttattataagcctcatgttctagaatccctttattctggcacaaacattagtaactgcaaatgccatgattaggattctgagaaaattaattctacaacagaaaactcttttaaacatttttaaatttggctgggcacggtggctcatgtctgtaatcccagcactttgggaggatgaggcgggtggatcacaaggttgggagttcaagaccagcctggccaagatggcgaaaccccatctctactaaaaayacaaaaaattagcagggcatggtggcgggtgccttataatcccagctacttgggaggctgaggcagagaattgcttgaacccaggaggcagaggttgcagcgagccaagatggcaccactgcactctagccagggcgacagagcaagactgcatttcaaaataaataaataaataaattttttgctcttttcaaattcagaaagattttaagaaatgacaatattctctgctgtaagggggtgaggcggcactgccatttactgcttatgggaggccaaacttgaac

SEQ ID NO: 45043 - DNA, 547 bp, Homo sapiens
tgaaatatataaatgattgcacaggcttyctgttcaaatcggtaaagtttcttttaactatttgaatgatatgttttgacaaagagtctccaatgctttaatttaaaggcaggtttatgatcaataatggatacgattatgatgagtgaaggtttactgatttccttctttgcttgtcacccagggctctgtgagtggtttcctgtctctatcacacttgtctagttagaatgtattttaactcttctccccccatgtctaattctgtaagggctgaacacaaaattaggcatatgtgaaattttggttaattttatttgttgttattcattataatgtgatttatttcatttacaaggttgttcaggaagagggcagcaaattggacaaatctttgagttatacacctatgtaaacaaatacaagaatattttaggctactcacaataccaacctgagattagttgaacccttaaatccaactgcagtgaaatagaaactatagtgaagaatagacgtctagtaaagtgaggaaataaaacaaata

SEQ ID NO: 45044 - DNA, 558 bp, Homo sapiens
ggtcaacatgctgaagagaaatgggaacagaagcttggggaaaaaagctatattataccagctctggattaaggtctcagtggaggtaggggatagatctgacaatctgtggtatgtgccatttcctctgtttctggtaatagcattccagtttgatcttggaaagatattcagtcattgtatcttatagtgggagaaattagaagaatcagttactctctgtctagaatttaaatcttgacaagttccaaaaaacacaacaaagtgttgtagctgattattccagacatagagtgttcattagtttcaccttcagatatccccagaactcttcttccttagttcagttatatagggaccttttttgttccacgactataattttctattctttcaataaattcacatttaaatatagtttccatagttagaaccaaaaatataaagcttacattaaattaattctaaataggtttcagtcttaactttgcatgtagacttttggttgaatttttcaartgaaccatttaataagcctagtgagttttcagtttcaat

SEQ ID NO: 45045 - DNA, 550 bp, Homo sapiens
gatccctgtgctttcatgttatatttcatatctaactgaacagttaatattatttttaaaaattaatakggtcttaagttttttcagttgaccatagacttgagaaagatttatagtttctaagtaatggagacatgatagcttatggagcaattggattcatttaaagatcttatctttgattcccagatgtgtgacactcagatgttgacattaggaactgcacatggattttcagcatcgaaacttatgtacacacaggtattagtggtgaagtagcttatggcaccatggactatatggccttatgtgtgcatatgcttaaatcattagaaataaaaatctacctacttccttgggcaaagattatatgccagcatgtaagagttaaaagctctaaatgggggctattccttgctggtagggactctcatgaatgagtcctataaaatgccattatgcttgcttaggaaggttttacaactcctttaactacattgagggcaggagtgatatcagacttgttcttacttgtatccctggagccact

SEQ ID NO: 45046 - DNA, 552 bp, Homo sapiens
gtctcgaaataaattaattaattaaattaatcaacagtcaattttaaaatttattttaaaattaacagaaagtaggggagagataaaatgcccacttacaaattaaatcaaacaagcacagtgaggcattaccttgccatcacggctgcctcccaaagcccaccattcacactgccaatatgaatgaatagctactcaaccagtggactccagaaatctctggacagtgtggggagctccatggctactgccaaaagccttatggggaagaactgaaaggatgaaaaggaaagaagaaagaatagtaaaggaagtggtgagttttaagttgggagagtgggrcagttcccagaatagcagcagtaccctggattaacatgcctctttcaaaagactttcaatgcagagacgtgtactcacggcccatcatacatatagtataaagtatgcttgccattcattagacctcagtccagctattctggtagaagcaaagggcctgccagctttcggctttctacatatgcaaaacagcaagtctgatgaatcctg

SEQ ID NO: 45047 - DNA, 552 bp, Homo sapiens
gtctcgaaataaattaattaattaaattaatcaacagtcaattttaaaatttattttaaaattaacagaaagtaggggagagataaaatgcccacttacaaattaaatcaaacaagcacagtgaggcattaccttgccatcacggctgcctcccaaagcccaccattcacactgccaatatgaatgaatagctactcaaccagtggactccagaaatctctggacagtgtggggagctccatggctactgccaaaagccttatggggaagaactgaaaggatgaaaaggaaagaagaaagaatagtaaaggaagtggtgagttttaagttgggagagtggggcagttcccagaatagcagcagtaccctggattaacatgcctctttcaaaagactttcaatgcagagacgtgtactcacggcccatcatacatatagtataaagtatgcttgccattcattagacctcagtccagctattctggtrgaagcaaagggcctgccagctttcggctttctacatatgcaaaacagcaagtctgatgaatcctg

SEQ ID NO: 45048 - DNA, 598 bp, Homo sapiens
ggtggcgtgcatctgtagtcccagctacccgggaggctggggcgggtggatagcttgagcctgggagatagagccatgatcgtgtcactgcactccagccccggtgacagagtgagaccatgtcccagaaaaaaaaaaaaaagagtattaacagtagtggtgcatcagtaatgagtttgaaccccaacagttcactggcttgttttctaccatggtattaacacatgcagaaaaccacctgggatatgagtgcaatgagacttttatagcaatcctaccccttcctagtaaactggcccccactaactacagttaattgtgtcctgctggacacatctgcagttttggtagcagttgcttcatggtggagctgggaaagctgcttttttttttcctttttttcttcctttcttttatttttttctttattttttgagacagcatctcactctgttgccaaggctggagtgcagtggcgcaatcttggctcrctgcaacctccgccccccaggtttaagcaattctctgcctcagcctcccgagtagctgggattacaggcacgtgacaccatgtccagctaatttttgtatttttagt

SEQ ID NO: 45049 - DNA, 596 bp, Homo sapiens
tgatatagttcttaatggaactttatgtgttccctgtattagaaatatgaattaatcactgaaagaagtggatgctgagggcaaaaggtgtgtacttcaccagttgacctttccagatctaccttctatcctttttcagcttgctatgtgcttcagaatgtttgacatcttttatggattataccaaaaggctccttgttccctggcttctaattggaatacaatagtgggggatcagaaggtgggtggaaaatgggcttgagaaatatttcttcycatggcttccttgccttcacatagcctaagtccacagttactgccttgtgcccttagcatatttctaccctctccaggttctagttccctcctcttggtcattcaggcttagcgttagttacagcttctcactcttgctatgtgtcactattcttggaatatgtcactatttcttgctggtttccacaactcctatattcatctttatgaagatgtatcctgataaatatgatccttatgtttctaaaagagtgtgagaaggagagcagagctcatatattctgcttcattgtacccatgctcttcattacccatgttaa

SEQ ID NO: 45050 - DNA, 596 bp, Homo sapiens
tgatatagttcttaatggaactttatgtgttccctgtattagaaatatgaattaatcactgaaagaagtggatgctgagggcaaaaggtgtgtacttcaccagttgacctttccagatctaccttctatcctttttcagcttgctatgtgcttcagaatgtttgacatcttttatggattataccaaaaggctccttgttccctggcttctaattggaatacaatagtgggggatcagaaggtgggtggaaaatgggcttgagaaatatttcttctcatggcttccttgccttcacatagcctaagtccacagttactgccttgtgcccttagcatatttctaccctctccaggttctagttccctcctcttggtcattcaggcttakcgttagttacagcttctcactcttgctatgtgtcactattcttggaatatgtcactatttcttgctggtttccacaactcctatattcatctttatgaagatgtatcctgataaatatgatccttatgtttctaaaagagtgtgagaaggagagcagagctcatatattctgcttcattgtacccatgctcttcattacccatgttaa

SEQ ID NO: 45051 - DNA, 582 bp, Homo sapiens
tgtcgcccaggctggagtgcagcggcaccatctcggctcacggcaagctccgcctcccgggttcccgccattctcctgcctcagcctcccgagtagctgggactacaggcgtgtgccaccacgtgcgggtaatttttttttttttttgtatttttagtagagacagtgtttcaccgtgttagccaggatggtctcaatcttctgagctcgtgatccgcctacctcagcctcccaaagtgctgggattacagacgtgagccaccgcgcctggctgaattcaaagtttttataatgaattcaacttctcaacattaactcatcttgggcaacctcaaattggagattctgtagcttacaatataagagtatacagctctgggatgactggtcagctgaaatttagggaagagataaacagcagcagtaaggtaactgtagaaatcttgacctacgtatatgagaataaagtcaacccacattattggctgactactacactaaacaggcaatggcaagagccctccaagaaggcaggggtaaaaaaaamaacctctggaagtgagcaggtatatcaagtgatgc

SEQ ID NO: 45052 - DNA, 580 bp, Homo sapiens
ctctggttgttagtgctggcatactattctatcatatggaaaaattacagttttccttcacccagtcaccgaaagttggatatttaggatgcgaccagtttttcatgataataaagactaataggaatagcagtagacataagatgtttttggcatcttttttttcttgtaatacgttctacatattgaaactaataattgtattttgctacatattgccacgtttttctcaaggaaaattatagctaacagaaagtgtcagctttctctgtgtgttaagggtgtgggtggaagctcggcagtgacgctgagacatattggtatggaacatcattggactctctagagatcaaggtagcagtcctgtagaaatgttagcccgagctrtgtgtcacctgggagtactccaaggacggccaaaagaaatattttagttagaagacaatttataagaaaagtttagaggcttcctagagaggtcatagcatacacaattttatttcatcctttagggcaagccgtatatatatgttctgcgcacatctcctcctgcaccctcctcaaaaaaaaaaaaaaaaaa

SEQ ID NO: 45053 - DNA, 580 bp, Homo sapiens
ctctggttgttagtgctggcatactattctatcatatggaaaaattacagttttccttcacccagtcaccgaaagttggatatttaggatgcgaccagtttttcatgataataaagactaataggaatagcagtagacataagatgtttttggcatcttttttttcttgtaatacgttctacatattgaaactaataattgtattttgctacatattgccacgtttttctcaaggaaaattatagctaacagaaagtgtcagctttctctgtgtgttaagggtgtgggtggaagctcggcagtgacgctgagacatattggtatggaacatcattggactctctagagatcaaggtagcagtcctgtagaaatgttagcccgagctgtgtgtcacctgggagtactccaaggacggccaaaagaaatattttagttagaagacaatttataagaaaagtttagaggcttcctagagaggtcatagcatacacaattttatttcatcctttagggcaagccrtatatatatgttctgcgcacatctcctcctgcaccctcctcaaaaaaaaaaaaaaaaaa

SEQ ID NO: 45054 - DNA, 580 bp, Homo sapiens
ctctggttgttagtgctggcatactattctatcatatggaaaaattacagttttccttcacccagtcaccgaaagttggatatttaggatgcgaccagtttttcatgataataaagactaataggaatagcagtagacataagatgtttttggcatcttttttttcttgtaatacgttctacatattgaaactaataattgtattttgctacatattgccacgtttttctcaaggaaaattatagctaacagaaagtgtcagctttctctgtgtgttaagggtgtgggtggaagctcggcagtgacgctgagacatattggtatggaacatcattggactctctagagatcaaggtagcagtcctgtagaaatgttagcccgagctgtgtgtcacctgggagtactccaaggacggccaaaagaaatattttagttagaagacaatttataagaaaagtttagaggcttcctagagaggtcatagcatacacaattttatttcatcctttagggcaagccgtatayatatgttctgcgcacatctcctcctgcaccctcctcaaaaaaaaaaaaaaaaaa

SEQ ID NO: 45055 - DNA, 879 bp, Homo sapiens
gggacatgtgataatgagtgctatcaggcatcagttgtcttctgaggccaatagggttatctgctgatgcactggactccatgctaaaaacacatggatcaccccctccacctcctttttagaacgtaatacccactgcctttctaaagttgagaatattaaaactctttatcttttttattagcttttgatgctcagtgatgattctgtttttcatgtcttaatgtaatgagttacagtttatatagtacttgaacataactataacctttaagaggggttttgagacctgcatggaaacactcaaagcaaacaatggtcttagaaacagaaactgaaaaaaggctaaaggatttgctgagaaaaattccagcttcctttcttctttaccactgttctgtcagtattgaaagtgtaaaatgctacatcaagtacaatgcttcttaaatgataaatggatgaagtaggtgctttgaatgaaatactaaataaagctcttctcttgaaagtatggccttggtacaaaatagcattttttcaagtcattcaaacaactctattccatttcacaaataatgaaaagacctcatggaagctcagtcaccttttccttgtcttcttacaaaaaagtaacaaaaagaacccattcytaagtggcactggatccataaactggcttttttaccagtttgtattgagggtaaatggatagtgagctgttcagtgcttttccttctccttgtgaaaagcaaaatgctgtatgtatcaacttttctccctcttttttgaccaagacaatatcttattttatatatgtgtgtgtgtgtgtgtatatacatatataaacagatatcaaaacatttatgaacatatgggaat

SEQ ID NO: 45056 - DNA, 585 bp, Homo sapiens
tcataaactagtgtgtaaataacaccagtggaggttttcagtaaagcactaaaattctcagctatttaaagatctatttatttaaaacatgttgttggaaactcactattagcaaaatgtgctttgaaataagagtttttaaaaatatttttactgaaccttaacatgagttttataataagcttttaatatcttttaaaataatatgataatttaaaatgaaagctcttcaaagtacttttagtttagaatcatttcatggacatctaaaccttacgtatatcagttatctatgtaatcttttatgcctttgataaggctttcccacagcataatacrtggtagtccaaatgcaagatttccatataatctaaagttctctaatttgaaatctaatgaataaatgcaaaatatttgtaatgatgttgaaaaactcaaattttcaaaaataacaattgcaacagcaaagtgctaagcaacatgaaactctttttgctgacctgatatggaaaaataagtgccattattaatgatttttatttttaaatatttgagtaatctgtctctatagtgtctctgaaaaca

SEQ ID NO: 45057 - DNA, 569 bp, Homo sapiens
cagctcccattataagtgagaaggtggcgtttggttttctttccctggattagtttgctgacgataatgaccacacatcaccactgtttttgttttttagtataaagagtagtattttattgaataagatttgctcacagaaaaataagcttaaatctacaatgaatgccagaccctacagcagaaagcaattttctcacttttccacacacaatggttcctactaagtgaaaaaaaagccataaaatttcattcacaaatgtactactctgtctcaaaacatctcacgtaatcatgcactgtactaaagccatcagatcagttcttcagtcaggttaaagaagtatccctctaataactgacttttataatgctatcaatatccactcccaatcagtctgccattgttaatggtgtacagcattactgaatacaacggaattgatgacgcccatatccacagacaaaccgtgacttatgatggttkgatttatgatttttcaacgttatgatgggtttattggaatattagattcgtttctgagttacactgggtttatgagtatgcg

SEQ ID NO: 45058 - DNA, 606 bp, Homo sapiens
taacctctgtttatacttatcctatgttattttacctcatcagtctttctcatattcaagaaattttccgaggaagcattttcgtcttatccacattcatagccacagcatcagatagagcctaagtttcagtagatgtgmaagttatttattgaaatgaatgtcctcaaaaggtgccgatgggagggttaattcttttcagcacactagcatataaggtcagcctccattttgttgagaggatattaaagcaagattagaggctcaacctggagtcataaataaatgtcagaagaaaacctgaggtagactccagaggatcccactcccagtactgcctttgcatcatctccaaattctagcaaaagtcccatggatgttctatatattaatatgtaccttttaatgtttcatatgtgcttggtgaattaatatgtaccatttacatgtcccctttgtagacttggaagttggggctatttactatttcacaccttaaaaagtcagatatgcactttaaattgattttgaggggtaggttttgacctttcttggacttcttacactcaccttgcgattattgtcacatgcacccacacaatggct

SEQ ID NO: 45059 - DNA, 606 bp, Homo sapiens
taacctctgtttatacttatcctatgttattttacctcatcagtctttctcatattcaagaaattttccgaggaagcattttcgtcttatccacattcatagccacagcatcagatagagcctaagtttcagtagatgtgcaagttatttattgaaatgaatgtcctcaaaaggtgccgatgggagggttaattcttttcagcacactagcatataaggtcagcctccattttgttgagaggatattaaagcaagattagaggctcaacctggagtcataaataaatgtcagaagaaaacctgaggtagactccagaggatcccactcccagtactgcctttgcatcatctccaaattctagcaaaagtcccatggatgttctatatattaatatgtaccttttaatgtttcatatgtgcttggtraattaatatgtaccatttacatgtcccctttgtagacttggaagttggggctatttactatttcacaccttaaaaagtcagatatgcactttaaattgattttgaggggtaggttttgacctttcttggacttcttacactcaccttgcgattattgtcacatgcacccacacaatggct

SEQ ID NO: 45060 - DNA, 580 bp, Homo sapiens
cctgtgaacatagcagtctcttacccaccccacaataaagactctggaatgataaaagtgatcttcaatataagagaactgtaatttgccctaacccaagtttgagctttaagytctgtctgaaaggaagattgtataagcaacagaagaaaattgatatcaaaaagtatgagtgagatagtagaaaattgattgtgaatttctatagctacctttgtcaatgtgaaccaactgggagacccatggatttgcgttttgcaaagaaccaaattaggaccccaggtgtaataagtttaaagggatggcgtagaccttgagagatcactgaggctaccttcctgccacttgacagattattggcatcatctgagtgccaggggaaagtctgaaattcttcatctgtgtgtgattcaactgacatagcattaatgaaaaattagctcatactgtttttatcttcattgcagaacaactgtactttaagaaacatttgtatgtagctatctaaacttagagaaaacgaattaaatcagcattcattgtaaagagttttttttgccttaagtgttaatacactcca

SEQ ID NO: 45061 - DNA, 580 bp, Homo sapiens
cctgtgaacatagcagtctcttacccaccccacaataaagactctggaatgataaaagtgatcttcaatataagagaactgtaatttgccctaacccaagtttgagctttaagctctgtctgaaaggaagattgtataagcaacagaagaaaattgatatcaaaaagtatgagtgagatagtagaaaattgattgtgaatttctatagctacctttgtcaatgtgaaccaactgggagacccatggatttgcsttttgcaaagaaccaaattaggaccccaggtgtaataagtttaaagggatggcgtagaccttgagagatcactgaggctaccttcctgccacttgacagattattggcatcatctgagtgccaggggaaagtctgaaattcttcatctgtgtgtgattcaactgacatagcattaatgaaaaattagctcatactgtttttatcttcattgcagaacaactgtactttaagaaacatttgtatgtagctatctaaacttagagaaaacgaattaaatcagcattcattgtaaagagttttttttgccttaagtgttaatacactcca

SEQ ID NO: 45062 - DNA, 1348 bp, Homo sapiens
tataatacacgtttatttttttttaatttttaaatgaagctcaatattatttaggcatagaaagggaatcacactagaaatttttataaatttaaaactgaggccaggcatggtggctcacacctgcatcccagcactttgggagaccgaggaaggcagatcaagaggtcaagagtttgagaccagtctgaccaacatggtgaaaccccgtctctactaagaatacaaaaatttgctgggtgtggtggcgcacaactgtaatcccagctacttggaaggctgagacaagagaatggcttgaacccaggaggsggacgttgcagtgaactgagatcgcgccactgcactccagtctcggcggaagagtgagactccgtctcaaaaaaaaaaaattaaaactgaatggtattaatactatgtgtcaaagcaggtggaataaagctagagtagtaattagagatattactgataatttaaatttatttttataaattctatattaaaataaaggtatagtatattctacagaggaagtcaataaaagtacaacaagataaatctgaattaactagctgaggtgtaaaaaagatataaaaattaggacagaaatcatgaaattgaaaaaatacgagagtttgagagagagttaaaaaaaaaccctctttaaaaaatgcaagaaatttatttccagtaatatttttaaataaaaaatgtaaaagaaaaataatattaggaagaacaaagggaacatccttttgtttcttaacaattttttgctaatgaataacttgagctttttttcttttagattgttattttgctaatagtcatagattttagatataataaccaatttataaatattcaaggatagtatatttcataaacataactgtaggtttataataacatatttgttctgtgatatgtttcttctcctacccactaatacaaaatgaatgaaaagaatacaaagcatagtacttttaaatcaatgttatcatttaagtgtaaaaacataagttgtgaggtcaagttattgtaacattctctttgtacattttaatgaaaatttaaattggtgaagagtttgctgatgtgtttaagtgtctaagaagatgaagataagaaagagaaaactggtaaataaaataatacaaccctcaatatatccaaatgatttgtgaatttttagtatactaaaaaccacaaagttagcagtttatttctttgtaattatttttgtttcttctcttctgcatcacatgaaaattttcagtatatctgaaaatattacagattctgtgggctctcaattggaggccttcacataaatttgacactttga

SEQ ID NO: 45063 - DNA, 579 bp, Homo sapiens
ctgcctggcttctgggtggttctgtgttgcattactggaggtctgggtgtggaattttgagaatctcttgatccttttcagtttaattctgaaacagggttcttccttccttccagattacagtgtggacactcacacacagtaagggacaaagaaagtgtatccccttccaaagatccgcccaccaggccccggacccrtaatcaaagcctgatactgggacaatggacccagcggccgggccagccctcccctagttatcaccccagagctgtggctgggctctctttgttccgaaacggagctgatggagcaggacgctgtcgccaggcactgcggggagggggttatcagcccctggcccgcgtcccaccccagaggtgaagtcttcgccccagacaggccctatcaggccctcccagctgctgttattttagatatggcaggaagtagggcctggaaaccgcacggctcccagcccttggcagcagctcagttcccgaggctgcactcagagctggtggcagggagggagaaggcacagcagcctggactgcgggttagagggctgtgccgggg

SEQ ID NO: 45064 - DNA, 535 bp, Homo sapiens
atcttctttttctagcactatgtcagagtctctgtaaataaccaataaatatttgctaaactaagtatttggttaattggttaaataaaatatgatatataatggatgaagtaactctagtgattagtcatgatgttcctggatattggctgatgacataaaaccatgtacatgatcgtggcaggcaaaatagtgggctcttaacgatgtccacattcttatccctgggacctgtgactttacatgtcagaagagactgtgcagatgtgattaggtaaagtatcttgaaaattaattctggattatccacatgggcccaatgtaatcacaaagatcctaataagggagaagggaagaggcaagagagtcagagaaggctacacgccaagtaagcaggccttggagggatrcagccatgagcaaggaacgagaggccttttgaagaaaactaatgtaatatttgcattaaaaaattatgccaaagattttagttcaaattggcagaaggcgcaactgtatcagctttctgtttccc

SEQ ID NO: 45065 - DNA, 606 bp, Homo sapiens
tgcatagaacttgctaatgttataatagttttaaattcataattacaaatttactgtataattggtgctgaaattcttgacctgtgatctttataactgatatattttgcatgtcgaaatgagatagaaattagtaattggctaaacctaataaagaacactacaagatatttcttctatggatatgatrctgtctagttagacccaaaacatagtttatgaaatttgtaaaagggtaaactcccaaagtatagatccaaaaggtaattagacactccacctaaaatcatgccggtttcctttttgataccttgtgctatggtctgaaggtttgtgtcctcccaaattcatatattgaaatcctaacccccaaggtgatggtattaggaggtggagcctttcaagaagtgattaagctttgctccatgaatgggattaacgccctttaaaataggccccagagaaacccctaacccttctaccacgtgaagatgtagcaagaaggcactatgtgccagaaagcagccccttgccaaacaccaaatctgccttgattttggactttcccgcctccaatactgtgagaaataaatttctgttgtttat

SEQ ID NO: 45066 - DNA, 582 bp, Homo sapiens
tgtatagaactggaattgaggaattattcaaattgttaaatctttaaggtctgtcatcagaggaaggtataatagtgttactggagatatcttgcgcagtggtcctctcctttttgaaaccttgtatcgtttctcagcccctagtagaatgactaacaaaatgacttaaaaaaaaaaagatttgtagagcatcttatctatcttcctaacacattttttttgccatttcaatgtggtataatatggaatttaaaacattttattttgtagagrcaaggtcttcatatgttgcccagattagtctcaaactcctggcctcaaatgatcctcccacactgacctcctaaagtgttgggattacagttgtgagccaccacgcctggccaacatgacatttaataaattccaaggctctcgagttttgtttgtttgttgagacagagttttgctctgttgcccaggctggagtggagtggcatggcacaatctctgttcattacaacctcaacctcctgggttcagatgacttgtgccttagtctcctgaatagctgaaattacagtcatgtgccagtgtgccacc

SEQ ID NO: 45067 - DNA, 549 bp, Homo sapiens
gactggtcctctggtttgttagaagcctctgacaaaaccttccrtcttttgtctaccactaccccatagctgacactggagaataatggcttctccttctctttcatctttctaatgacatgcaagtatcttcaaatggtgggattaatgcaaatcctgagagaaaagtctctgagagatgtagtttccaggcgtcatgcccctgaggtacaagagagagctcagaagggtgagcgttgtcctgagtattgataaatggtacctggctcatcagcaactgatgaattatttatgaagaattttcgtataacttgtttttatcacctctagttaaacccactggcgagagagggattcccaccctaggattatgtggattttgagaatggcaaaacacacaactcctaacactagatagatgtggtcaatagacatttagtagtcatatatactcatagctttgggagaagctttctttataccattcagggccacatgggagttgcatatggtaagagtgtgaacaaccagaggccattttataggatc

SEQ ID NO: 45068 - DNA, 603 bp, Homo sapiens
aagaggactgtggaaacaatatgtacatatatgtgcacattgtcactgtaaaccaagagctgaccttgattcttaaatgcagccatcatttcattttaacatgtcttcctagcttatgtcttcatttatttactttcttagggggacagacaaagacttcctgtgaagttaagaatttgaaattttgtccctaagtttaatcttttgttttgctaatttaggtttggccataacacattcaggcaaacaaaaacaaaacaggaatctgggtcaaatgctgagcccccagtgtgagcccaatgcaggtgataaatggattactgagtagtcaygggcttaataagaagaattaaatataagcaattttaaaaaataaattgaagtagaaatctggggcattaaattgtatctgtctgcactttataggattatatttggaccatttgaggggcaatgaaaagatttggcataacttaggtaataagtaatttcaaaatagaaaaacagacagccttttaaaatgtaataaaaagagagatatgttttatgtagacttcccccatactctcatttggcagcttaatatctctacagggaaaacaa

SEQ ID NO: 45069 - DNA, 603 bp, Homo sapiens
aagaggactgtggaaacaatatgtacatatatgtgcacattgtcactgtaaaccaagagctgaccttgattcttaaatgcagccatcatttcattttaacatgtcttcctagcttatgtcttcatttatttactttcttagggggacagacaaagacttcctgtgaagttaagaatttgaaattttgtccctaagtttaatcttttgttttgctaatttaggtttggccataacacattcaggcaaacaaaaacaaaacaggaatctgggtcaaatgctgagcccccagtgtgagcccaatgcaggtgataaatggattactgagtagtcatggkcttaataagaagaattaaatataagcaattttaaaaaataaattgaagtagaaatctggggcattaaattgtatctgtctgcactttataggattatatttggaccatttgaggggcaatgaaaagatttggcataacttaggtaataagtaatttcaaaatagaaaaacagacagccttttaaaatgtaataaaaagagagatatgttttatgtagacttcccccatactctcatttggcagcttaatatctctacagggaaaacaa

SEQ ID NO: 45070 - DNA, 578 bp, Homo sapiens
tgcccttttcaaaattgtggtgtttaaggagatttagtgtttaaagaacatgtggctctcctttgcccttaatattggctatagaatatggagacacttcatttatctggtattgatttgacatttttggtatttcayggtaatttttttcagaaaataaaactttttttctaatccttagtttgaaaaaaggttggttgtgttgccaaaacttgtgttaaccatttcctgctttttgaagctgatcacaatgaataaaattcaatgtgttcttaatggctcagttttattatgaacatattgttgttctgttctgttacataaggatgtctccaggggctgttgaagcctagaggactgttttcctgagcccgtttctttctcgagttttattttaagtgtctactttggtattttttaaaatctttctttttgatcatgtgactgtcatctttaaggccctgggagtgttcatacttattttaatgctggagctgccaaatgaaaataatgacatatatttattgaatatgaacaatgtacaagatattcctttatactctctatatatatattaa

SEQ ID NO: 45071 - DNA, 700 bp, Homo sapiens
taggcagtttgggttaggttgaagacagtccctttagtctgcaagactctgcataactgcagaggaaaatgtgagtttgaagttctggatgtgaggccaaaattagagagataaagcaaagataaagtccatgaaaagaggcaacatgtggataataaaagtggactctgcagaggacacagayttctgtgtccccatatgcaagcaatatgaggatctaagatgatccttgggcctcaacaggacagctgagtaatataatcaagatggggagaccctacacagctatcttcatgacagtaaaacatagtccagcccttttgttctaataaaatggctgcatctttcgggtgcactgatatgttatgttctatgctaagcaaattacatgtcatcttatttcattctcataaaataaaattatatattttatttttcaagaagttgaagcttaaagaaattaagttccttgaccctctataatgctcacatttggatttttattctgatttaaaagatgagagaaaattttactcttaaatgatatatggtctatcttaattcatgtttactaatcatgtacaacactcacaaagaaatgaagagttgagctctaacacatattccagaatgttggtccacgaatgttgataatttaagtgtattaagtttgcctggttagctttttttttttttcaat

SEQ ID NO: 45072 - DNA, 591 bp, Homo sapiens
gcacttgtagtcccagctactcaggagactgaggtaggagaatcacttgaaccggggagatagaggttgcagtgagccgagatcataccactgcactccagcctgggcaacagagggagaccctgtctcaaaaaaaaaaagaaaagaaaaataaaagaaggtggcagacacactccatggaggagaaattcccacccacctgctgttttttttttttttttggagagacagggtcttactctgtctcccaggctggagtacagtggtgtgttcacagctcgctgcagcctcaacttcctggaatcawgtgatcctcctgcctcagcctcccaagtagtcagaactacaggtgcataacaccatgcactggcttaaaaaaaaaaaaaaaggccaggcacggtgcctcatgcctgtaatcccagtactttgggaggccaaggcaggcgtatcacttgaggtcaggagttcgaaaccagcctggccaaaatggtgaaaccccatctctactaaaaatataaaaatgagccaggcatggtggcatgtgcctgtaatcccagctactcaggaggctgaggcaggaaaatcgcttga

SEQ ID NO: 45073 - DNA, 600 bp, Homo sapiens
aacatcacaggataacaggaaacctgcaatgagcaaagccaagcaaagagctaccctgagttacacagatccaagactatcaggatttagtaactcacggctaagaaagtatttggaatttaccctaactaacccagcctcaggtcacccaggaaacctgtgaccaaattccatggtgctaatttctacaacctttatgaaaaggaaatttgcccatgggcactcaagaatccctgtgcatccttttaactgcattgacaaagaaaacwatgagaatcagatcaaaacaacaaccacaaccactaccaccaccaccatgactattttgcccacctccttatgcattgtgttgcatgcaggttgagtatgcttatccatcagactactggaatcagaatcttctcttttggaagagcgtatttttctgaattttagaaaaccatgtgcagagatcaagaaaggtagcatgtgttttataatttttaagtgaactaatatccaaaatctaggttcaaaatataagacagtttgactttgaaattaccaaaatgtcaatactggataggtaaaagtatacaaacatctgtgaccatctctgta

SEQ ID NO: 45074 - DNA, 703 bp, Homo sapiens
tgccactgcactccaagctgrgtgacagagtgagactccatcttggcggggggggagaaagaggtctttaaaacaattcccaaatttgaatataaatttggccttagatatttttaagatttattgttaattttattgtgaatgttacctaaaaagtccttattatttacaggcatatactgatgtatttacaagtgaaaaatcacaatgccttggattttatttaaaatcaaacaaaaataaaataaaaaaactttgtggggggatagataaactgagattggaaatatttgctaatcactggagcttagttttcggcatagatagatgttggatcaatgagtgtttcttgtagtagtctctcttttaatgtttgaaaatatgcataattaggaggagaaaatagtttaattttaagcagattcattttagatgaccacgagatattcaggtatagtttttcagtagaacataatgtaaaaacacagtctagattaattacaaatgaagtatgactagaaatgtataaaaagagtagaagatgagaatgaaaccaacaaacaaaacatggagacaacaacatttagtgggaaggcagaggaaataaagttattggaaggtaccaaaaaggatcagagagatgggaagaaagctaagatgatgttacaaaaaaatggagagtcactaaaatgacccatgtgta

SEQ ID NO: 45075 - DNA, 703 bp, Homo sapiens
tgccactgcactccaagctgagtgacagagtgagactccatcttggcggggggggagaaagaggtctttaaaacaattcccaaatttgaatataaatttggccttagatatttttaagatttattgttaattttattgtgaatgttacctaaaaagtccttattatttacaggcatatactgatgtatttacaagtgaaaaatcacaatgccttggattttatttaaaatcaaacaaaaataaaataaaaaaactttgtggggggatagataaactgagattggaaatatttgctaatcactggagcttagttttcggcatagatagatgttggatcaatgagtgtttcttgtagtagtctctcttttaatgtttgaaaatatgcataattaggaggagaaaatagtttaattttaagcagattcattttagatgaccacgagatattcaggtrtagtttttcagtagaacataatgtaaaaacacagtctagattaattacaaatgaagtatgactagaaatgtataaaaagagtagaagatgagaatgaaaccaacaaacaaaacatggagacaacaacatttagtgggaaggcagaggaaataaagttattggaaggtaccaaaaaggatcagagagatgggaagaaagctaagatgatgttacaaaaaaatggagagtcactaaaatgacccatgtgta

SEQ ID NO: 45076 - DNA, 579 bp, Homo sapiens
aaaaaaaaaaaaaaaaatttcctagctgatcttttcaaaggagttgattgttcccaactaataaataattttattctttttgtttgtttagctctttctgtatgcagatgtgtattttttttttattttccataagttattggggaacaggtggtggttggttacaagagtaagttctttaatgctgatttgtgagactgtggtggcacctrtcacctgagcagtatacactgtacttaatttgtagtcttttatccctcatccccttcccaccctttctcctgagtccccaaagtccattgtgtcattcttatacctttgcattctcatagcttagctcccacattttagtgagaacatacaatgtttggttttccattcctgagttatttcacttagaataatagtctccaacttcatccagatggctgtgaatgccattaattcattccttttatgattgagtagtattctatcatatatgtatatatgtatattatatatacatacatatctatatatatatatatatatatatcactgtttctttatccactcattgattgatgggcatttggg

SEQ ID NO: 45077 - DNA, 592 bp, Homo sapiens
tttycttttcctgatgtatttccaaagcatatattacactcttagtttatgatcttaagaccattttcaaataatttgctaatatagaaaaatggggctgggcgtgctggctcactcctgtaatcccagcactttcggaggccgaggcgggtggatcacatgaggtcagaagttcgagaccagccagactgatatagtgaaaccccatctctactaaaaatgcaaaaattagccagttatggtggcgggcgcctgtagtctcagctactccggaggctgagacaggagaattacttgcacccaggaggtggaggttgcagtgagccaacattgtgccactgcactttaacctgggtgacagagcgagactctatctcacaaaaaaaaaaaaaaaaaaaagggaaaagaaaactgatacgatggtcacttcatctacacactcacttgcaatttctttctcctattgtattcgaggtttaattgcaaatactgagatgaaattgatccagagaaatcttgccaaacaaaccaacaaaagccatagtcaattctatatgtcaccatgattgataaggaaaccagtgctttaatt

SEQ ID NO: 45078 - DNA, 592 bp, Homo sapiens
tttccttttcctgatgtatttccaaagcatayattacactcttagtttatgatcttaagaccattttcaaataatttgctaatatagaaaaatggggctgggcgtgctggctcactcctgtaatcccagcactttcggaggccgaggcgggtggatcacatgaggtcagaagttcgagaccagccagactgatatagtgaaaccccatctctactaaaaatgcaaaaattagccagttatggtggcgggcgcctgtagtctcagctactccggaggctgagacaggagaattacttgcacccaggaggtggaggttgcagtgagccaacattgtgccactgcactttaacctgggtgacagagcgagactctatctcacaaaaaaaaaaaaaaaaaaaagggaaaagaaaactgatacgatggtcacttcatctacacactcacttgcaatttctttctcctattgtattcgaggtttaattgcaaatactgagatgaaattgatccagagaaatcttgccaaacaaaccaacaaaagccatagtcaattctatatgtcaccatgattgataaggaaaccagtgctttaatt

SEQ ID NO: 45079 - DNA, 621 bp, Homo sapiens
ctggcatgcggtctgcccttaataaaaatattcggtgaatgaattgatttcaatattgtttttcagaaaagaaagttgtctatttaccacaaggttaatgttagtcttttgcctttaaatgcaatcttttgsaagactatgttgaaaggaatacgaagactttaaaatggttgaacaattcacatcttttaaggctatacttgaaggaaataataatcttttaaaagtcaaaaatagttccattgtgttaaacataaagagcaaaccaaaaaactgtggccagattattatagtgagttcttatttatctttacaaaatccatgtagaatataactattactagaagttctttctgaggctaacaaggagactatcatcagatttgagaattttttttctggactgtaactcctgtgtattttcttctgtacattcttgactcttggaccagtctccttttctacaaggtgggggattgaatgattgaataaagtactggctgattacctgaaaaactttgaggatccatgctagaccatgtagtacataacaggtatgttggtctaccttagtggatgtcacctcttctgtactgtcactgcgttagtattttgggaagg

SEQ ID NO: 45080 - DNA, 581 bp, Homo sapiens
ggtctgtggttgtctgcaggtccttgttttctggggagttcaggagctccccaaactctcggtggagaaaacaccacaccaccctcatcttctcctgccctagggacctgaacagagctccagacctcactgacagccagctgcttatcagttaagcttccctttgactatggagaggaaagaaagctttgcagatgggagtagagtcagggtatagcattcagacttccctgatcccggaaatacttttaaggattattttaggaattgtatctattatgtttaatttaaatgagaatatcataaaggaaaaaattaagctccctatagctatgacatgtatagggacaaatagagaggctactgagaagagaatagatattttctatggacagaggaatacaatatagtagaggtggttggaaatgtcaccttcactctgtcataaagacttaaactgaaagtgagctcagaggtcatcatctaattcttccccatctttgtatctctaggatttggcatatagtaggtctttaataaatactasatgaatgaatcaacacataacagaataagtgaat

SEQ ID NO: 45081 - DNA, 444 bp, Homo sapiens
cttaaaaaataaaatgagagattttttattccgcttccccaagcagattatgcatcaaccatgttggcaaataacaagcataatctgatcctacttgcataccttgcctcatatcctacttctttttgtttctggagacagagtctagctctgtcgcccaggttggagtgcagtggcacgatctcagctcactgcaacctctgcccaccaggttcaagcgattctcctgcctcagcctcccgagtagctgggattacagacacccagctccatacccagctaatttttgtatctttagtagagacagggtttcactatcttggcygggctggtctcgaactcctgacttcctgattcacctgcctcagcttcccaaagtgctgggattataagcgtgagccacccatatcctacttcttatacattgtagtttgcatcccaaca

SEQ ID NO: 45082 - DNA, 619 bp, Homo sapiens
caatgttttgtattaaggttcattcctttcttcaaacttggctctcaactctttgtctcttttcaccattgtaaatatcattctgaacctctgttctctgctttggtgtagagtcaagaactcctatgataagaaaagacacattcctattggtgtccaaacaggaaacatctaactaaccccaatgggcacaaaacagactgccatgtcgctacctatgaaacacatttaaatatccctatttgctaaaatatatcagagctattaatgttaaataatttaataccccaaatcatwtgggctgcatacagagctgcagaccataaatgttatttcgtatttacagaaataaatattatttcctattttctcactggcaccctcatttgatggctgtcacaaccctgggaagcaggttaaaaagacatagaattagtctcatcttacaactgaggaaacttggagtcttaaatctgtaagtcatggcaaattcatagtccataaggtcagacagatctaggttctaatcgcagggcattcccttgaggtaggttctaaatctctattcaccttagcttcgtccaacctcgtaaaactgttgtgaggtttaaattaggta

SEQ ID NO: 45083 - DNA, 564 bp, Homo sapiens
cattggccctaagcatgaaagagaaaaaaaaaaaagaaagcttatgaggagtttctggaagcatgagaagatgtctgagtatatttaaagagcacataggtccttatatatcaagtaggtacagctcctgtgattcttgggtgtaaaggttggatgcccctttaactaggaccaagattacatgtttttggaaggtggaaggaaatttaatggagaggagagagttggtgaagaattggttggggggcatgagtaaaggcaaattgccaatggaagtaggatgttccaacaactgaaggcatttcatgtttgtattactcaaggaatgtaaaaaacttgaaataattcaattccacaagcaaataagaagtgaggcattttataaagtgcatcaggatcctgaatcaaaggttcattttaagaataaattgcagcagcccagttaaccaaattttgctaatttcagttgcctgctcatttttttccggcaayttggttatcattgccatttatttcagcaattttcttaatgaccttctcagaatgatattctcagatataact

SEQ ID NO: 45084 - DNA, 539 bp, Homo sapiens
tatcaccagtgcacagaatggtgcctggcatatagcagaggaacaattaactttatttaaaataaatgaacaatggagctggtatcacccaacttatatttttaaaactcaccattcacagatttgggaatactkttttttttttccaacttttggaaagcattcccttgactcagtgataatgtggactttcctgttacatttgaatgcttagttacattgtgctgtacaattttactattcaaaactaacgttacacatatttcacattgttttttttttgtgaaattgtaagtttctgttagttgcagatcatatttgacaccaaaacctgtagctgacttatgctctaattggggatgatagctaaacttgtggctgaagatgtctttcattaattaacttttaaattgtggttgaagatgtttttaatcatccaacagaaaaatcagttcccaaatagcatattggttttccatggttttcttttcgtttctcctggagttacttattctgcattgattcattaattcagctta

SEQ ID NO: 45085 - DNA, 602 bp, Homo sapiens
ccaaggagagcagctcaggcagaaaatcaagaagatctgtgatgggtaagagggagtgaatggctctttcttcagtgatttgggccaggattagataaagagatgtgcaatgccaaatgcacacgactgtggcttctagaggtcagtaaggctttagaataactttctcacataaaagtcagccccaactgatttttaatagttgtaagaatatgaatagggagaacttgaatatgcaaaatgtgagggtaactaaaagtggacatgttccccatttcagtctattccatctgagacttttcatcagctgctccagagtaatccaactgcatggctaacttgttttggattttacagaatcgtgttacatgtagctccatagaagcagaaatgactcagtgcagaggatattaatacattaatagattcttaggaagggrcaagcccagcttgcagtcttatttacccagcaactcacaggttttatggtttgaatgaagctcattcatataacagaactgcagcctcaattcacagcacaagtgacgtactgggaacccttatgactgggactccttttccagtggccaaagacgcagtta

SEQ ID NO: 45086 - DNA, 543 bp, Homo sapiens
ttcttatttgtatttacttattatggcaactaaaacctataaccaactcaaaacatgccaaacagggaacattattcagaaaaatatatatactaaatatattaactttgtgattagatgctgctttaaagagcatgccatttttggcaaaaaaaaaaaaaaatatatatatatatatatataaaatggtaaggataaatcttaaaagatatgtttaaaaaattataaatttatgtgaaaatggcaaaatataactgagataaattagagaagacttaattaaatagagagatatatggtgttatatatggtgttcatgcagtgaaaattcaatactgttagaaagcaaattctccctaaattcacctatgagttcaatgcattcccaatccaaagtccggaaagctttycttttaatttgatgaagtcattctaaaattcacatagaaatgaaaaggatttcggagagctaaaccaactttttgttttgttttgttttttgttttttcagacggagtctccttctgtcgcccaggctggagt

SEQ ID NO: 45087 - DNA, 578 bp, Homo sapiens
tggtgagaatgtataataattgcagcaatattatgggtattatcattctgacttactaagtaaccaagcgcttacttggtgtgctgggaacatccaccatgtcccccacacatgagctcatccgatgacagtttgagtcataaagtgtggttttattttctagcctgtttgaggatgtgaatatgtaattccagtgcaaacactctcaaccttgtacctgtttattttaggaaatagcatggcaggctacaactcagagttaattgcaacaaacaaatgacagattgttcaaaagtaggatacatgccagaaatacagatgactaggtcttatgtgtctctatgttagattttctatagcctttgattttgctttcaccctttaacgatttctttcacacatcaccagatgctgctcttacagcttctagtgagaagacaaagtatatttcagcagtggaggctgtgaagttagacacatctgggtttcaatcttggcttcatcaagcctcggttttcacccckagcaagttatttaatttttctaaatctcaatttcctaatccgtaaaacaatatt

SEQ ID NO: 45088 - DNA, 2246 bp, Homo sapiens
atattttatatatataatttttttgacacagtctcactctgtcacccaggctggagtgcagtggtgagattatggctcactgtagctttgacctctcccagtccaagcaatcatccaatctcagcctcccaagtagctgggtctgtaggcacatgccaccatgcctggctaatttttgatttttgattttttgatcccagagatggggtctggctatgttgcccaggctggtctcaaactcctggatgcaagtgatcctcccacctcagcctcccaaagagctgggattataggtgtgagccactgcgtctggcctatcttttcaactaaaaatgtaaaaagatgtctggaggagagacctttgctcagcacaggtgaagaaagtttagtatgtataacttgttcaagttgaggacagacaggtatctttgagccacttggtcatatccttgccacctccctctacctccaatccagggtagtcttccttcaaccaggaatggacatcttactgcaaaaatgtcctcttccttttctaactgcctcagcttcagactctgttgtggctttgaacactttcctcagatgtcttgaagtgtttagaagattataatagtaacagtaataatcgcttacatttatcgggcactaaccatgtaccagacactgagaatttttcacggatcattttacttaattttcagagcaatctatgagttaggtaccattattacttttatctttagagaagtggaaactgagttgccgacagaagttacctgcccacagttacacagctaggaagaggtgaagctaggatttcggtactaaagtctctgtattcaatcccttcctgcttgaaatacttagtgtggtttctgttttcctggctgaaccctggctgacataagtactatccaagagaaagacttgactcagggtgctccaaggattcattggagaaatcagactgaggagggagaagggagtatacaggcaagtgggtgaatgcacgtgtatgagtgttgtatcagtcagggcctagtcaggagacagaaaccacacaataattccaacagggaaggtagaatataaagaattattaactaggaacaggggactggttactacttagagggtaaaagagaactctaatatatctagactagaataaacttagaagaggtgcccctctttggagatggtatggctgaagcactgaatggcataaaagtttgctgaggtcaaggtcaaacaggtcaaccctggtaagtgctggatgtgaacaaaactcattggtaagcttcctgccattgaacctgccaggaagttactgaagagaaccttagctgggaaactttttggggagcttccccaaggtgctactgaagttttctgggggtgacagtcactaagtgttctacatgtgggccaagcattagagctttgccagagtaggaaaaaaggaaggcactcaagaaccaggaagagaagccccttcctccagtgacgtctctccagtgctatctactgacaaagcttaatactgtgctagctaacaagggacatgttaataggttcagcttcagttatcacaagcagggaaattaagtgaggatgtgcygcagagaggcaatacatgggaaactggcatagtgtgtacttactagcaagtcagtttcctttcaacacacctgcctctttgccctggggaaatgtcctgacttgagaagttcacccaaaaacagtattttgcaagccccttccacattcatgaccctgtcctaggcactccgaggaaacaccaaggatcatcatatacaattccttcctttctggaatttataatcaagttggagacagggaatgcatcttaatgttctctaaatacatcctatgcttgcctgccttcctgtctttgctggcagtttccttggcctacaaaaccctcttatttccacctgtgaacatactcccatctccagctactaccacctgtgctacacgtctctctggctgcctggtgataaaatgttctggccttgtgtcatctctaccactagattagaggctggctgaggacggagcacactaccttgctcactgtaggtgccattaaagagtcagtttggtcaatggccctggccaggagggactggctcccttctggttggcaagtatgaaaaaggctggtggaccagagggtcaaagagttataccttctctctcttttttttggggggggg

SEQ ID NO: 45089 - DNA, 592 bp, Homo sapiens
tgtttcagggatttaatggtgattatatatctaatctttaaaataactatatatttttgtcttggggcaaggctgattataacctctacttttacagatgagaaaactgaggcctctttcaggttgcacaacttgcatgtggcagagcaaaactctgaagccaggtgcattttgactccagagcctgtgcagttgctacccactctgatcctcttmcagggtcatgtgaaatgatgtggaataattaagtttattatatcatggcattgaaataccaattaaacactaaaatcatgatgataatataattccaaagaaaaacttggtgttagggttatgggcagtttatgtgttcaacaattacatactttttgatattgatatacaagtaaaataaaggaaaaatattgtattaataacgtttgctgtggatctgcttctgggagggaaagaactgctttaagtagccttggtactaagacaataaaccacggagagccaagaacacatagcctcatgcatagtaacaaaatcatctcatccaaaaggatgatcaaatcaatactaactataggaatatttctaaatttgg

SEQ ID NO: 45090 - DNA, 592 bp, Homo sapiens
tgtttcagggatttaatggtgattatatatctaatctttaaaataactatatatttttgtcttggggcaaggctgattataacctctacttttacagatgagaaaactgaggcctctttcaggttgcacaacttgcatgtggcagagcaaaactctgaagccaggtgcattttgactccagagcctgtgcagttgctacccactctgatcctcttamagggtcatgtgaaatgatgtggaataattaagtttattatatcatggcattgaaataccaattaaacactaaaatcatgatgataatataattccaaagaaaaacttggtgttagggttatgggcagtttatgtgttcaacaattacatactttttgatattgatatacaagtaaaataaaggaaaaatattgtattaataacgtttgctgtggatctgcttctgggagggaaagaactgctttaagtagccttggtactaagacaataaaccacggagagccaagaacacatagcctcatgcatagtaacaaaatcatctcatccaaaaggatgatcaaatcaatactaactataggaatatttctaaatttgg

SEQ ID NO: 45091 - DNA, 491 bp, Homo sapiens
tttccaatgcaccatgcagcctcccacatgagcaatcagatatgtacgtcactagaccctaagaaagtaagctcttcattaagctctttaaagttaaaatgcatttgtggatataagcctcagtccagaaattaatgtgaataagttgtgtttcttattttttttaaataattagcttgtgattctattggaataaagaaaaatcaatgtcagtatttcctccctacctttctagaagttgtatctaagttccagggcaccatggtttgggggagcacctggtcctagatgtcatctgttcacttcagcatccaatgagatgctgccatcctcttggggtgctccctcatccacacacacacacgccacctatgctcacacacttctgtacatgtgttctctttctgrttggtggatctcttgactgcttctataccatagatggagacacaggatctggccttacatttctgtgtcacccaacattatgg

SEQ ID NO: 45092 - DNA, 608 bp, Homo sapiens
atctcttttttccttcaaaatgaagctcatcttcctcaatgtgttttttccacgaggtgcatgaarttatcaacatgttaccaagaagatgaattctgtgtgtgacccgtcagcatcgtcgatacgtaacagtgttatggcagagctccagcataaagccacagcatgacaccagggttggagaggacctaatacctgcagtcttgggcagccaggggatttgttgctctacaccaatttgctcaaatatagaaaacatatatttactgtttcctgtagatgtatcagcagctcctttcccagggatggttgaaaagctttggctccgttttgctgtctgctctctaaactttctacccttctttaacttgctgactatccatttggatgctggctgactgatttctcaatgaacctcctcttcaaattgggctttcacaaattgaacatactatctgtggtgggtagtattgtccacaggtatccacaagtgagggagaaggcagcatattgaatatactctctgtggttggtagtgagaggtgacagcgtgctggcagtcctcacagccctcgtgcgctctgaggcgccttctctgcctgggctcc

SEQ ID NO: 45093 - DNA, 608 bp, Homo sapiens
atctcttttttccttcaaaatgaagctcatcttcctcaatgtgttttttccacgaggtgcatgaaattatcaacatgttaccaagaagatgaattctgtgtgtgacccgtcagcatcgtcgatacgtaacagtgttatggcagagctccagcataaagccacagcatgacaccagggttggagaggacctaatacctgcagtcttgggcagccaggggatttgttgctctacaccaatttgctcaaatatagaaaacatayatttactgtttcctgtagatgtatcagcagctcctttcccagggatggttgaaaagctttggctccgttttgctgtctgctctctaaactttctacccttctttaacttgctgactatccatttggatgctggctgactgatttctcaatgaacctcctcttcaaattgggctttcacaaattgaacatactatctgtggtgggtagtattgtccacaggtatccacaagtgagggagaaggcagcatattgaatatactctctgtggttggtagtgagaggtgacagcgtgctggcagtcctcacagccctcgtgcgctctgaggcgccttctctgcctgggctcc

SEQ ID NO: 45094 - DNA, 566 bp, Homo sapiens
caagtggtaaacattaagggaagattaaaacaactccaatttgacaagacaactaaggtcactgttcatgaagrgtgggctcttgctgtggaaacttggataatttaggatactatagagaagtgtggaatgaataatataaaaagaatggtacaaataccatccacagttccatgatcagttataaaattaagtatgtaatacattcttgggttttcttctcttctgcattgtcatgtatataattgtttgtcttattatcttccatttttcccatcatttttagggtaggctggtttgaataacttcataatttgttatcttatttcaggatattaagacatagttgagactgaagctgaagaggagtgaatatcatggatacctattttggataggaccactgcattttaatttgtgcaacatatatttgaattatatttgacaggatcatgtacttgttactgttactcttttgaagtttaagctttagaaaaggcaggtgcatggatattgaatagtcttaagctggaccatcggctatttcagactggcttactcaggca

SEQ ID NO: 45095 - DNA, 558 bp, Homo sapiens
aggtcaaagaaggtaagtatgatatttggatattaatatctaccacttaatacagaaactattctagcacttgtataggcagtataagacataattttagaactctaaaataaaaactcataaactgaagttaaatatccatttcccactgctatctccttttccttttaacacattgatatcattyggatctgtgtccccacccaaatctcatgtcaaactgtaagtcccactgttggaggtggggcctgttgggaggcaattggatcatcgggcagtttctcttaaatggtttagcaccatctccttggagctgttcttgtgacagtgagtgagttattgtgagtctggttgttaaaagtgtatagcacctccccacctctcactcttcttcctgcttccagccatgtgaagtgctggctcccccttcaccttctgccatgattgttagcttactgaggcccctgcagaagcccagcagatgcatcatgctttctgtataacgtgcagaaccatgagccaattaaactgcttttctttataaattacccagtctca

SEQ ID NO: 45096 - DNA, 558 bp, Homo sapiens
aggtcaaagaaggtaagtatgatatttggatattaatatctaccacttaatacagaaactattctagcacttgtataggcagtataagacataattttagaactctaaaataaaaactcataaactgaagttaaatatccatttcccactgctatctccttttccttttaacacattgatatcatttggatctgtgtccccacccaaatctcatgtcaaactgtaagtcccactgttggaggtggggcctgttgggaggcaattggatcatcgggcrgtttctcttaaatggtttagcaccatctccttggagctgttcttgtgacagtgagtgagttattgtgagtctggttgttaaaagtgtatagcacctccccacctctcactcttcttcctgcttccagccatgtgaagtgctggctcccccttcaccttctgccatgattgttagcttactgaggcccctgcagaagcccagcagatgcatcatgctttctgtataacgtgcagaaccatgagccaattaaactgcttttctttataaattacccagtctca

SEQ ID NO: 45097 - DNA, 558 bp, Homo sapiens
aggtcaaagaaggtaagtatgatatttggatattaatatctaccacttaatacagaaactattctagcacttgtataggcagtataagacataattttagaactctaaaataaaaactcataaactgaagttaaatatccatttcccactgctatctccttttccttttaacacattgatatcatttggatctgtgtccccacccaaatctcatgtcaaactgtaagtcccactgttggaggtggggcctgttgggaggcaattggatcatcgggcagtttctcttaaatggtttagcaccatctccttggmgctgttcttgtgacagtgagtgagttattgtgagtctggttgttaaaagtgtatagcacctccccacctctcactcttcttcctgcttccagccatgtgaagtgctggctcccccttcaccttctgccatgattgttagcttactgaggcccctgcagaagcccagcagatgcatcatgctttctgtataacgtgcagaaccatgagccaattaaactgcttttctttataaattacccagtctca

SEQ ID NO: 45098 - DNA, 558 bp, Homo sapiens
aggtcaaagaaggtaagtatgatatttggatattaatatctaccacttaatacagaaactattctagcacttgtataggcagtataagacataattttagaactctaaaataaaaactcataaactgaagttaaatatccatttcccactgctatctccttttccttttaacacattgatatcatttggatctgtgtccccacccaaatctcatgtcaaactgtaagtcccactgttggaggtggggcctgttgggaggcaattggatcatcgggcagtttctcttaaatggtttagcaccatctccttggagctgttcttgtgacagtgagtgagttattgtgagtctggttgttaaaagtgtatagcacctccccacctctcactcttcttcctgcttccagccatgtgaagtgctggctcccccttcaccttctgccatgattgttagcttactgaggccccygcagaagcccagcagatgcatcatgctttctgtataacgtgcagaaccatgagccaattaaactgcttttctttataaattacccagtctca

SEQ ID NO: 45099 - DNA, 570 bp, Homo sapiens
cagggcagctcagtgagagtctgcgcaatgcctggcctccccaccatggtctcccagggcaggatgcgggcggcagcatgtgcgtcagatcgcgttttcctgctagcagcttctacagcttggtggagatgcgttcctggggccaggctctggccgagcaaaggatctgtattatgccgtgccaggcagcaccacctccctgaagaggtgtctggaactgacaggttttctctgaacagctgtcttgcaatttgaaagacccctacctcaaaacacacaggggaaggaaggaaggcagggagggaaggagggaagaagcaaaccagaggatgggggaccaggagcagctccagccrggattcaggtgacactgggggcaggatgcagtgagggtcaggcaggtgcagcatcgagggtggtcacgtccacatatggcaatttgatgtggggtgtgtggaactcccacgtggagagttttcacacagcaagttttctcatctcccacagtgtccctgaacttgccctcattgtcatcctgcttctgcctccctccaaggacagcacaaaggc

SEQ ID NO: 45100 - DNA, 570 bp, Homo sapiens
cagggcagctcagtgagagtctgcgcaatgcctggcctccccaccatggtctcccagggcaggatgcgggcggcagcatgtgcgtcagatcgcgttttcctgctagcagcttctacagcttggtggagatgcgttcctggggccaggctctggccgagcaaaggatctgtattatgccgtgccaggcagcaccacctccctgaagaggtgtctggaactgacaggttttctctgaacagctgtcttgcaatttgaaagacccctacctcaaaacacacaggggaaggaaggaaggcagggagggaaggagggaagaagcaaaccagaggatgggggaccaggagcagctccagccaggattcaggtgacactgggggcaggatgcagtgagggtcaggcaggtgcagcatcgagggtggtcacgtccacatatggcaatttgatgtggggtgtgtggaactcccacrtggagagttttcacacagcaagttttctcatctcccacagtgtccctgaacttgccctcattgtcatcctgcttctgcctccctccaaggacagcacaaaggc

SEQ ID NO: 45101 - DNA, 546 bp, Homo sapiens
tctgtacacgatccaaagctctcaccaggggagaaagcatacagtaggggagatttaaaagctacagcttgaagtatgtatgttctgaagactttgatagggaggggaagagagagactacttgggatcctattcattggcttgaataaggaataaataaaaccaggaggaacaggctgggacaccatcaagcagacatggacaaatatggatctgtagcagtagatcacaataccagatagtgactttattgaaaccaaaatgccttggctcttcagtcttcatttcacaaataaaagaattcccaagggtgaagtggaggatctaatacaccactccataggttgttgatctagtattttgaggaacatactaggawgcattacaatacctcaccttaaatgtatagaatggagtagcatctcttgatgggatcttctccagctgattgtctccagcacctctgagtcagatctggtgagatgtgcagctactatagagtacatatgtgtacagatgcaccacagagattcaaacacgagggga

SEQ ID NO: 45102 - DNA, 633 bp, Homo sapiens
cctctaaatgcatacaaagaagaaatatccaaagtcttaaatgtaacataatgtgtctttaggttacatctgacaccctttcaaccctaccttacatcccttctatccactttctactccaactatggctatggcaccagtctcacacaggtgtaaccagaaacctgggcctcagcagcatttctttactttctgacctagaggtttttcataacttgtacaatgccaaccaagccgttctgacgctgagccaaccaagccattctggcacaatcacaaaggagtgcaaggcatcagtcccctacagggtgaccctcgacagatgacagatttgatccagtagataaatacacccctcttgcatccttcaggtaaacaaagcatagttacatcttatatactcagaggtccccagcaaaacagagccccagttgccagttgttcccagttgttattaagctggtgagtagtttaataacatatccttggtttgactttttctccttctggatgtcattctatgccagttstcaaccgtgggttatttttctcctctctcccagctcctggggatatttggccatgtcaggagacatttttggttttcacaacttggaggtgggggctattggc

SEQ ID NO: 45103 - DNA, 605 bp, Homo sapiens
gatacaagctttgaggcagataaagagaaaaatggataggtggtgcttgcttctgaaagttatgagcaccaagctgtgcaccagaggtggcagacaatatcacactcacaccctgtggaacatttttccaatatgaaaggagaaatgaaatatatatatattttcatgcaaagttttcatgaatatggctagatattgaagcttgacttttgtgcctagggctttggtttccccagttaagttttaaggaacactagtatcattcttgacacctgaaggtgttccttgctcaagtgtgtatgtgttggggtggggaggaagaggagatgcagcttttaaattttgttaaaagctcagaagaaagatggacctgtagctttatttcacccaaaatttctcaaatttaacttaacatggaatctgagccaygtatttaacgtttaatggaatccacacaatatactgtgaaaatatactgtgaagtatgttagtctagagagagagtaagagagagagagagaggtgtcaaatgggctcatgaggcaactaagatgctaggaaagtggggtgtgtcattggagtgaatttatgtttatttaaattac

SEQ ID NO: 45104 - DNA, 557 bp, Homo sapiens
gacagataaaatgcaggatacccagttaaattggaattacagataaacaatagatacttttttagtgtaagtatatcccaaatgtttgctgaatctggcaagcctacctgtgagtctccccatccctctagcaggctagcacaggcacagctccrtggccggcaggggaagcacagtggaacttgcttggttctctggagtctagactcggctggtacttcattgccttctgttggccaaagcaagtttgtgactttgcccagcccagattcaaggactacaaagtcacattgagaaggacacacagggaagttgaagaattggggcctttttgacagtctgccacagttcctagtagcaaaatcaccaacaaaagagctcagcacagaattctccaagaaaatgtcacttgcccattctattttaatatcaaagatgagggacttcatgaagtgttcagggcacttaactacaggggagaagactcagtttctggtttgactttatcaatcatgttctttgttttcttgggtggactacatcttctctggggctca

SEQ ID NO: 45105 - DNA, 578 bp, Homo sapiens
ttgccatcttggttttggtgggttgtggctggcttctttactgtgtcctgttttatcagctggatctttgtaacctgtatcttgtgtcgacctcccctctcatcctgtgactattcctcctgggaatgcagcccagaagatctcagccttattttacccagctcctgttcaagatggagtcgctctggttccaatgcttctgacattcccatctttgttattactgtgaatacttttttcaaagtataatatatttatgatatcagttattaaggagccctgacactgagataaaccttgttagcatctgctgctcactctggatgcctgccctagtgggagagcccttatgactcccatcctactctgcttttctattgttctgcaacacattgaggaatccaaagagatcctagagataacccatcctcagtcaacacattttcctctctccttttcttctcttctcttctttctttctctctctctctctctctctctctctctctmtctttctttctgacagggtctcactccgtcaccctggctaaagtgcagtggtacaatctcagctcact

SEQ ID NO: 45106 - DNA, 562 bp, Homo sapiens
tggtgagaaataaatttttctttatgaattacccagactgtggtattgtgctatagcagcacaaacaaagacagcaatgaagaaacaatcttaaccacatgtccaagacaataaatgtaaaagatctatattaaaatatgtcatcartgaatttcaggactatttaaacatcagaaaaagctgatcatcaaagttcctgtctaaggatggagggacagcaggaaggtcacaatcaaatacaaaatagatgaatggcctgaagtttttaatagaatggatcaaggtttccaaaattttgatgtataatggcatccaacaaacaatttggtgtctaaaaaaatcattcacatgtgagaacagaaaaaaatgctaatattgaagtgtgttctggttttaagtgctctatttttaagagcgatctcacattgtaagtatgcacagtcattgctgaagatacttaatttctttaaaaaatgataaatatccatttgcatagggttagaggaagcatacgcactccaaaagtagggtggaatatatgtgatgattctccaatagtcaa

SEQ ID NO: 45107 - DNA, 562 bp, Homo sapiens
tggtgagaaataaatttttctttatgaattacccagactgtggtattgtgctatagcagcacaaacaaagacagcaatgaagaaacaatcttaaccacatgtccaagacaataaatgtaaaagatctatattaaaatatgtcatcaatgaatttcaggactatttaaacatcagaaaaagctgatcatcaaagttcctgtctaaggatggagggacagcaggaaggtcacaatcaaatacaaaatagrtgaatggcctgaagtttttaatagaatggatcaaggtttccaaaattttgatgtataatggcatccaacaaacaatttggtgtctaaaaaaatcattcacatgtgagaacagaaaaaaatgctaatattgaagtgtgttctggttttaagtgctctatttttaagagcgatctcacattgtaagtatgcacagtcattgctgaagatacttaatttctttaaaaaatgataaatatccatttgcatagggttagaggaagcatacgcactccaaaagtagggtggaatatatgtgatgattctccaatagtcaa

SEQ ID NO: 45108 - DNA, 562 bp, Homo sapiens
tggtgagaaataaatttttctttatgaattacccagactgtggtattgtgctatagcagcacaaacaaagacagcaatgaagaaacaatcttaaccacatgtccaagacaataaatgtaaaagatctatattaaaatatgtcatcaatgaatttcaggactatttaaacatcagaaaaagctgatcatcaaagttcctgtctaaggatggagggacagcaggaaggtcacaatcaaatacaaaatagatgaatggcctgaagtttttaatagaatggatcaaggtttccaaaattttgatgtataatggcatccaacaaacaatttggtgtctaaaaaaatcattcacatgtgagaacagaaaaaaatgctaatattgaagtgtgttctggttttaagtgctctatttttaagagmgatctcacattgtaagtatgcacagtcattgctgaagatacttaatttctttaaaaaatgataaatatccatttgcatagggttagaggaagcatacgcactccaaaagtagggtggaatatatgtgatgattctccaatagtcaa

SEQ ID NO: 45109 - DNA, 598 bp, Homo sapiens
tgaggacttaacggaatagaaaatcttaatgtcaaagagtaaaaaattgtttcaaatccaatagtatttcaataatgacatcttaaaagaatgtgccctggacttgacaggttgggagctattggtggccttgccaagaacagtttcagtagaaagcagagacaagggccaggttgccattgtaaaggagagaatttctcaaaggttcttactatgctctgggtcatcaaacttcaagaagtactgaattgaaaatttggctyacattatttatttatttatttatttatttatttatttttaatctgttccttcacacttcacaaatcaaatttttttcaagtaatccaaattaacaaaacaatgggatctgtgttcattagaacacacttttagacagatgaatcataagccgtatgtgtttatattgaaacccaaacaaaatgacacattgaaagaaaccatcttaaagggagagcagaagagatttgtaatgaggaataatgttataaataactcctaaaaatgtaaaagtgactatttctaaatatcctcaacttgtaagagaataccagtgttacttgacatttggcccagc

SEQ ID NO: 45110 - DNA, 566 bp, Homo sapiens
acagctagtataagcaagaacacagcctagggtagcaagtgattttcttcaatgaagcaggcatatttcctattttcagtcttctttgtggcaatccctacctatgccactgtggtgcaaacttttcaaacttccttgtttttcttgctaggacactttctgcctctaacttgctttcaggcaattctttctctmgaagtgaaaaatgaaacaaaacaaaaatgtttttgaggtcttggtgaacattataagagtcccagctaaggaattccagacttctccagaaagagacatggaaaagaacaagaatgaatttgagttatcgacatttttgacaatagaagctatataacaggtcaggactatccaagcaggaggtctgtatgacttcctaaggccagagattcaaaaataactaacatttatcctctgctaaacaagttccaagtaactttctcattgctttacatattttaacccatttaatctttttaatagccaatgaggaggttctgtttattattctgattttacagatcagataactgaggcacagaagtgatgca

SEQ ID NO: 45111 - DNA, 570 bp, Homo sapiens
aggggcaacagagaagccccagggtgggagaagagaagccaggcaaggtacccaaggagaggctccactggatcttgtgctctacagtctattgcaaggcagctctggtgaacaattagtcaatgaccctgggcagtgtggctgagttggcacctgagaggtagctggcagaggggtctgagacaatggtctccttagttggcaccacaactccacaaggcagtgggatatgatgtcttcaacaggctctcatcctaaggtcgtgaatactgctagcttgtggatcctgctgcccctcagggctgcacttctgtctcccactggagtaaaaacctgtcttcttgtagctctatgattggcactagttttccttcttttttttttttttttgagatagagtcttgctctgttgcccaggctggartgcagtgatgtgatctcagctcactgcaacctccgcttcccaggctcaagtgattctccagcctcagcctccctagtagctgggattacaggcgcacaccaccatgaccagctaatttttgtatttttagtagagacggggtttca

SEQ ID NO: 45112 - DNA, 570 bp, Homo sapiens
tcggttattaaaatcacccatttcttttcactttttaaaagacaactactagaaaatgacaggcgcctcacattacatttccatgggacagcgctgctccagtgcctcagaaagttgtgaggttggggtcatccgctgtgcccaagcacatgtgtccaatgtggtgccttttcaacattgtttaaggtttaaaagttacctaacagttattaagactatgacgggatgttaggaggtgagtgaaatcaaagatggcactcagcatgtcaatgtgtggttgacaccctggcagtcagagctcaggcacatagagatgggggcatggggcctttctatgaccctcctcaacatgtacacacaccaggccacagaccaagaaccaggccacactcccaagccttgcctggtccattgtttcctgctggtcagagactggacattaagatgtgagaactrgagtgcgcatttttgcaaatgctatggtctgaatgtttgtccttcggaaactcattttgaaacttaatcctcaatgtggcagtattgacaggtggggcctttaagaggtgattg

SEQ ID NO: 45113 - DNA, 546 bp, Homo sapiens
tccctccatcctttttttattcttctctttcttccttcattactttgtgaattacacaatattgtattagctcaaactcttcttaaatttgtctgtaatttttgtatagycttatttccccaacatgccctgccctcaggatgctcctagtctaaatgatgaaactgaaagtatcttgatagtaattcattgtgtcacctgtccaggttatgtcctttacaacttctgtacatcatccaataaacaggcagcttttttttttggcatagtgcagaaaaaaagctatgctgttttggagttatactctttaggttcaaattctggttctgccagcatagttttatgaccttgaggaagtcattttatctttgtaatctcctgtttctttatcttctcaaaaggatagcttaaggttgaatggcagatacaaaagtatagctagacagggaaataagttctagtgttctgcagcgctatagagtgactataactagcaataatttaatgtatattttcaaatagttaaaaagtggattttgaacgtcc

SEQ ID NO: 45114 - DNA, 574 bp, Homo sapiens
  misc_feature (1)...(574): n = A,T,C or G
atgatagttaagtacatgtatgtggtacaaattacaatggaaaacagcaatgattttctgataaatgctgtaatttcttaattacaaagagagataaattcttcanatgaaatatcatacaattagctatcataaaatacacatacttatatantgtgaatatactagggcttcataatttatgggccattgttattattcacacacatgcacacatatacacccatacgtattttatatatatatgarttttatatatattatatatatataaaagactatcctaggaatctgttttgaaattactcacatacatacactacaacaaactgacagaaatataaaacgttctagacaccatcagtttcttttctgctaaaagacacaccatgctccccttgtgaatctatggagttgagggtttctgttatttcacccagcacgtcacctgacacaaaactgaaagagaggtctgttttagcttcctacttctcataatcaggatgaatgagtggaatgaaggatacatgattgcaagagtttggtaaagcaggaatacaagattgctctgctg

SEQ ID NO: 45115 - DNA, 574 bp, Homo sapiens
  misc_feature (1)...(574): n = A,T,C or G
atgatagttaagtacatgtatgtggtacaaattacaatggaaaacagcaatgattttctgataaatgctgtaatttcttaattacaaagagagataaattcttcanatgaaatatcatacaattagctatcataaaatacacatacttatatantgtgaatatactagggcttcataatttatgggccattgttattattcacacacatgcacacatatacacccatacgtattttatatatatatgagttttatatatattatatatatataaaagactatcctaggaatctgttttgaaattactyacatacatacactacaacaaactgacagaaatataaaacgttctagacaccatcagtttcttttctgctaaaagacacaccatgctccccttgtgaatctatggagttgagggtttctgttatttcacccagcacgtcacctgacacaaaactgaaagagaggtctgttttagcttcctacttctcataatcaggatgaatgagtggaatgaaggatacatgattgcaagagtttggtaaagcaggaatacaagattgctctgctg

SEQ ID NO: 45116 - DNA, 596 bp, Homo sapiens
tggtccttggatcatgagagtacatcctgactgaataacagatctggtcctagacagtttagtgttttgtactcaaatttattttcagtcatgtcttcatggtagacattgttttttccattttacaaatgaaaaccctaagacttaaagagataagtaacttatgcaagatcacatagcaaattagtagagctgggattcaaattagttttatttggctctaaattctatgccattttcagtgttctactgccttgataaacttaaaaccgatctgctttctatccagaactgagttcacaataatttatcactcatttggaagaacagatcattgtgctrattttggaatttcccccaagataagctacgtttctatgaatacttactaaacttttttcttccttattctatattaggacgtcttgcatggctggtatacttagttgggacagttgtaggaggaagattaacatataccagtacagatgagcatgatgctatggatggagaattatcctgtcggtaagtaagagctatgtaatttactgaaattcactaaatagttaaaaaaaattagttattgaactagtatt

SEQ ID NO: 45117 - DNA, 1893 bp, Homo sapiens
gtattgacataattttagatgaaggcctctgaggcctctcagaatagctctgttgatcggattctgcattccggtttttctataaaccatagccataatacaattaacactcatgcttcaggcatcattaaagtagaacagaaaatgtcatttgagtgcagaatcatggacagtgtttttttgtttttttttttttaccctaacactttgcaggtctctaacccacacatatttgtacagatttttttttagcaactaacatttatggggtcttttcaaatcattcaagttagtgctcaaagaaaacagaactttttyctgatgtattacagacattgaactcactattgtcattatgttatttagttaaacatgatgtaaactgacaaagtatgggcacaaaaaagaatggttgcccctgtgaacgctaaactgaatgctttagaagactgtacagagatgaattgttgcagggtagcaaatacaactgattcctgctaagcagcaagttgactgacgaaaacagaaaaacatgggtcatctcaacgggagagcagtctaatggccttggggctccgcctgccaccaacatcaggcaataggattgcaggtgaaaagtcactgatccagcaagacagttaagtggaggtcaagtggacaatttccactgtatctactttatatttctgatcccagcaacgtccaggtagagtggaaccctgtccacactctggcccactcctcatcccgcttcttgttctcccaagaggaggaatgcagttctaacgagtgagatcccacgacactgaacacatggtttttttctagtggaaagggtcaaccctcccttcttcacctcactcttcacaacactcacctcttgtcttctgcctcatactggtaacaaaaagttataagggcctgtgctttgagggagtggcaaaataagagggtgtggtagatgaggctagggaagggggcatgtcagtctacggacattggactaaggcattcaaactttaccctataggcaatgaggaataactgagatcgaatctgtgcgaaagaaagatcactcatgcaattgatgcggacaataaatcggaggagaatggaggcaggaaggccagtgaggagcctgctgcattcaccagggaaagagacgatgacgcctaaactgatacaggaagctgaggtgaggatgggggtccgcatagcaccagacctaacaatgggttagacatgaggaataaaaaggaaaaagtctccgagaatgcccaggcttctgtcttggctaactggcttcagccagtaaaatcaggaagacaggaatgggagtggggttggagtcagaaagatgaaggcttctgcattggccatttaagcttgtgtttcctgtgagccatgcagaaggagaaagccaggagccgaaatacattcaaacctggactggaagaaacagctcttctagctgcttgaatcaagtgaaaactaccaactgccttgaggatttctcttttcttaagacagggtctctgtctgtctcccaggctggagtgcagttgtataatcatggctcactgaatcctcagctcaagtaattttcccacctcagcctcccaagcagctggaactacaggcatgcgccaccatgcctggctgattttttaatctttttgtagagatgaggtcccactttggtgcctaggctaatcttgaactcctgagcttaagggatcctccctccttggccttccaaagtgctgggattagaactgaggacttctgattgctgttgttccactcaatacttggcagcagaacaggtagagtggaaaaagccatgcttttgaggtcatccaattctgggtggaaattcctagttctgcagat

SEQ ID NO: 45118 - DNA, 1893 bp, Homo sapiens
gtattgacataattttagatgaaggcctctgaggcctctcagaatagctctgttgatcggattctgcattccggtttttctataaaccatagccataatacaattaacactcatgcttcaggcatcattaaagtagaacagaaaatgtcatttgagtgcagaatcatggacagtgtttttttgtttttttttttttaccctaacactttgcaggtctctaacccacacatatttgtacagatttttttttagcaactaacatttatggggtcttttcaaatcattcaagttagtgctcaaagaaaacagaacttttttctgatgtattacagacattgaactcactattgtcattatgttatttagttaaacatgatgtaaactgacaaagtatgggcacaaaaaagaatggttgcccctgtgaacgctaaactgaatgctttagaagactgtacagagatgaattgttgcagggtagcaaatacaactgattcctgctaagcagcaagttgactgacgaaaacagaaaaacatgggtcatctcaacgggagagcagtctaatggccttggggctccgcctgccaccaacatcaggcaataggattgcaggtgaaaagtcactgatccagcaagacagttaagtggaggtcaagtggacaatttccactgtatctactttatatttctgatcccagcaacgtccaggtagagtggaaccctgtccacactctggcccactcctcatcccgcttcttgttctcccaagaggaggaatgcagttctaacgagtgagatcccacgacactgaacacatggtttttttctagtggaaagggtcaaccctcccttcttcacctcactcttcacaacactcacctcttgtcttctgcctcatactggtaacaaaaagttataagggcctgtgctttgagggagtggcaaaataagagggtgtggtagatgaggctagggaagggggcatgtcagtctacggacattggactaaggcattcaaactttaccctataggcaatgaggaataactgagatcgaatctgtgcgaaagaaagatcactcatgcaattgatgcggacaataaatcggaggagaatggaggcaggaaggccagtgaggagcctgctgcattcaccagggaaagagacgatgacgcctaaactgatacaggaagctgaggtgaggatgggggtccgcatagcaccagacctaacaatgggttagacatgaggaataaaaaggaaaaagtctccgagaatgcccaggcttctgtcttggctaactggcttcagccagtaaaatcaggaagacaggaatgggagtggggttggagtcagaaagatgaaggcttctgcattggccatttaagcttgtgtttcctgtgagccatgcagaaggagaaagccaggagccgaaatacattcaaacctggactggaagaaacagctcttctagctgcttgaatcaagtgaaaactaccaactgccttgaggatttctcttttcttaagacagggtctctstctgtctcccaggctggagtgcagttgtataatcatggctcactgaatcctcagctcaagtaattttcccacctcagcctcccaagcagctggaactacaggcatgcgccaccatgcctggctgattttttaatctttttgtagagatgaggtcccactttggtgcctaggctaatcttgaactcctgagcttaagggatcctccctccttggccttccaaagtgctgggattagaactgaggacttctgattgctgttgttccactcaatacttggcagcagaacaggtagagtggaaaaagccatgcttttgaggtcatccaattctgggtggaaattcctagttctgcagat

SEQ ID NO: 45119 - DNA, 551 bp, Homo sapiens
aaaattttgtagattttctttaggtcttcttccctaaagactggaatagctgcatacatggatggggtttcataaatatgtttttaataaatgaagcatgagctaatgaaatccccagaacagacccatgagggataggtgttatcatccccattttgttttttttgtttgtttgtttttgagatggagtttcactctgtcacccaggctggagtacaatggcgcgatctcggctcactgcaacctctgcctcccaggttcaagtgattctcctgcctcagcctcctgagtagctgggattccaggcatgtgcaaccacgcccagctaatttttgtatttttagtagasacggggtttcagtatgttgggcaggctggtcttaaacctctgaccttgtgatacacccacctcggcctcccaaagtgctgggattataggcgtaagccaccgcgcccggcctatccttcccattttacagaaagggaaatcataatcacgtccagaacttcacacagcactcaaacatagctaacatttgaatttccccttc

SEQ ID NO: 45120 - DNA, 587 bp, Homo sapiens
gacccacacctaagtgtattcgacaaatgaatctatttattttcatttctattccatacgacgcataccagtctgcaactatctttacaatcatatcctgtgaagaatacctgaaggtgcctttctgattgacttcttcaatctatatgcagatttgtgctaagccagtaaataatttgtaacaatttgcattgagtttatggtttctctaatccaaccctgatcatttgtaaattgtttctrttcatgtgcagatcaactgtaataagattgctaataaaagagtggttaataaaatttataatgggaagacaaagcataatttagaggtggggatttttgacataagggcttttccaggccataggcaaaaatagattcataaaattctatttgtttttattttactttctgaagaatacctcgtggtgaaatgtggtcttaaatcctatttcttcctcctagccttcactgctggtcttgagcaacagtgttttctcatgtcttgagaaactttcccagtaatgactcagtctctctgcaacccagtattggtggttaggaaggatataaatggtttgtatgca

SEQ ID NO: 45121 - DNA, 587 bp, Homo sapiens
gacccacacctaagtgtattcgacaaatgaatctatttattttcatttctattccatacgacgcataccagtctgcaactatctttacaatcatatcctgtgaagaatacctgaaggtgcctttctgattgacttcttcaatctatatgcagatttgtgctaagccagtaaataatttgtaacaatttgcattgagtttatggtttctctaatccaaccctgatcatttgtaaattgtttctgttcatgtgcagatcaactgtaataagattgctaataaaagagtggttaataaaatttataatgggaagacaaagcataatttagaggtggggatttttgacataagggcttttccaggccataggcaaaaatagattcataaaattctatttgtttttattttactttctraagaatacctcgtggtgaaatgtggtcttaaatcctatttcttcctcctagccttcactgctggtcttgagcaacagtgttttctcatgtcttgagaaactttcccagtaatgactcagtctctctgcaacccagtattggtggttaggaaggatataaatggtttgtatgca

SEQ ID NO: 45122 - DNA, 584 bp, Homo sapiens
tagctgggattacaggtgcacgccmctgcgcccagctaattttgtatttttagtagagatggggtttcaccatgttagccaggctggtctcgaactcctgacctcaggtgacccgtccacctcagcctctcaaagtgctgggattacagacgtgagccaccatgcccagcccaaggtatatttttaaatcgatatttaagatttctgcaaatgaacatttatatctacacagtacacacataaatcctattaaggaggtgcaacataatctcattctaaactagatcaatctcatgagggaagaaaagtttttgcttattttcatcagatttttaaattacatacctagaagacttagaaaacaaaatagaccaagacattgtcagcaacacatctacagcctggtgttaataagcacaaaagtcataccagggtatgaatctcatggatcctttccttacctgaatagctgtcagtttatgtcttacattcactaggataatgcgtgctaataacagtagtataggcttcgaggtcaggctgtagattgattcaccatctagagtgagcaggctcagaacaaa

SEQ ID NO: 45123 - DNA, 601 bp, Homo sapiens
gttggtcattggagttggaggtaccctgtgtgtggggactggaggaggcggtggggggtggctgtgggaggaggctggaatccctgcrttccccaacccatatgtcccggtcctccacagatacgtctaccgcctctgccccttcaagcttgtctcgcagaaacccaaactcgggggctctcccaccagccttgggtgagtggcttgggctggccccttccctctgcctcctcctggtgccccgacaccggcccagccctcagcaccctgtgtctctcacagcacctggggctcatggattggccccgaccacgacaagttcagtgccatgaagtatgagcaaggcacgggctgctggcagggccccaaccgctccaccaccgtgagtgcctgcaaggcaggggagctggggcggggagacccaggcctggcccagccgaaccctctcgagcacccgtctgcccatccccaggtgcgcctcctgtgcgggaaagagaccatggtgaccagcaccacagagcccagtcgctgcgagtacctcatggagctgatgacgccagccgcctgcccggagccaccgcctgaagcacccaccgaagac

SEQ ID NO: 45124 - DNA, 565 bp, Homo sapiens
atccatcacagaaaaagtgatcatgcctgagacggcctttactgaaataacagtcaatgaggctgaaaaagaaaacaaaaaacacaaataaagaacatatttcagattgaattaacaaatatcttaagcttatgtagtagagtagcaaatataccaattatggtttaagaatgaacacagttgtgagaggtgtaggaagggatgtgacattagtaagcagtggccttgttgctcgagccgtgctggatatcaaatttgcttaaatcagctaaagatctgctgtgtgactgtgtkttttttttttttatctgtggagcaagatgcttcttttccatccctaactgttgaaagaatgctgtggaggttataattactagtagatgggaaaggcaaaaacaatggagggaggagataagaaaagtcagattgtccatgtgacattaatgagaaaataactattaaactatactgaaaatttaaaaaccaagtagatgagaagactggaaagtgaaatgcaactcacttcttgagtttacttagagttgtactaagtcattgcttctca

SEQ ID NO: 45125 - DNA, 1333 bp, Homo sapiens
atcttaattctgttatcttacattcctatttaaagttggcttcattttcattattttcttatataaggtacattttgtttcttagttgtctgcttttgttttccctacttggtaatttggaaagaaacaaatataaagttctctttctgttctcttgatctatagcatacctgaatatagcacagagtacatctgtttctataagtaactatcaaaaacacaaattttctagtacaaaggagagaactagttgatgagataggaacatgaaaacccagcacctcattaacatggaggctgcatactgccccaggggtatgagtacagccttccaagtcatggcaaacagcacatgatgtgtgggccatctgactggctaagaggaaatgaagatttacaaatacatttttttaaagggaatttcctaaatgattagtgagatctcctagtgttggtatatatgagtgagagagagagagagagagaaagtgtgtgtgtgtgtgtgtgtgtgtgtgtgtgtgtgtgtgtgtaggggtgggggaaagagagagagagagaaagaaagagacagggacagagagacagaaagacacagaaaaggagaagggagggaagatacattaaaaatacatagtgggcttatctaagcactcattttcaactctaacaaggtgcctctggaaaaacaaagtaaatgggttggtaaacaatgaatgaaagaaatgtgatatttaagaaaatcatactgcttacatctacatttcgtattagtcatattatagagtttttaaagaaaatataaatagtataggtcttgctaaccaattcctgacacaagagttttaattgggatcattaatttgtttctcttttaagattttcaattacttattaacaaaatatcttcaaattatcagggagcaaataaagttatcaagaagcaaaaaatccttaaatgtattttttaaaaattaaatatatatcaattgcagtaatggacaggcaacatataatttttataatttagactcagtttcttcctatagatcagagctgaaaaatataaacmatgagaaaggagtagaatgcttaagtattttccttcaaacctcatttatgactcagcacagctcaattaaagaataagaaaacaaaatatgcctttacctagaattgccaccagggttagcagaatcaccatatgcttcattccttttcttttatagaaatacaggagaatgcagaaaattaatatttctaaaatctagaaatgaaaaagatggaaaagagtaagttattctatgcaaagtcttcaaaatgtcacacttctcat

SEQ ID NO: 45126 - DNA, 589 bp, Homo sapiens
atagtagacccttataaactcttcccccagctccccctcatgataaacatcttatgtaaacatagtacaatgagctattaatgaatcaatggacctattcgaaattctatcgaatttcaccatttgtccctctacagttcttatttctagtcccatgattcaatctgggatcccatgttgcatttagttatatttccttactctcttccaatctgtgactgatgatgctgayggtagaatatgtgctgattatatgatattcaagagattgttatccatatacccagcaagtatgtgttgagtgacttccatgtgcctggcactatgctagatgttgaggatacagcactgaattaaacaaagatcctgctctcacgggcccgaattaaatcaaattctagctctaacactggctggatgtgtaaccttacccagttaatcaactttctggagtctcagttttctcagtggtaaaacatgtataataatacctaataatagctttttcctttaaagttgggttttggaggttcagctagataatatgtataaatcagttaatggtgtgaatagcatctagtagcagcca

SEQ ID NO: 45127 - DNA, 455 bp, Homo sapiens
aatacaaggtaattagaatctactcataaatatctccaatgacaacaggaatacctcatgtaaaaaaaaatcattttcatagacaaatctttttttcatggtcaatttttmcttttcttcatattgtatccttttaaggtaaatacttctgtcaggccataagtttgctgttttattatttgttttgtgtttgtttcttctgttccttgttcctctgttttttcttgcttttctggggttattagaatatttttatgattccatcttgattaatttatagagtttctgagtgtattactatataaagttttcttagcggttgcccttggcaatacaatgtacatatgtgacttatcaccgtctactggtatcaacattttaccactttgagtgaagtgtgaaaaccttactactagttaggtctctaccttgcttacttttaagtataattgtct

SEQ ID NO: 45128 - DNA, 579 bp, Homo sapiens
cctttggtgttctgcctcccagaccatagtgaagaagaggtgtcatgccctggtagggaacactggcctggaagagttcatggtgttacaggtagttagggctgagtggcgcagcagagtgctctctcccacccgttaggaatgtcgagtgataacattgcctctctaaaagggataaactgggagcccatgccagggagagtccatttcctgatgatccacacctgttgccctaaagtgttaattgaatgcaggcaccagggagaggcaacttcccgggcacgtgcattaagatgcaccgcattaaatggcgggcggggcacagtggctcacgtctgtaatcccagcactttgggaggccaaggcagacggatcacgaggtcaaaagatcgagaccatcctggccaacatagtaaaaccccatctctactaaaaatacaaaaattagctgggcgtgctggcaccttccaccactaacaatggaactgctaagaatggccygcaatgatcctaaatacaagggtgggagagagaagtaccctctttatgtaagtacgttccttatacggcattatttta

SEQ ID NO: 45129 - DNA, 532 bp, Homo sapiens
tgtggatgaactgaaatacagtaacacatatatattactttctgttatctagtgctgggactatgaaacgttagcaatgaggaatcagaagctataaaggaggaagagccaaaggtggattaaaagaagaaagatggttagtctgtcttaacactcatgacatataccctactgactgccttcacctgtgtctaggttttactttaattctcattttaaaaagtgtcggccagacacagtggctcacacctgtaatcccagcactttgggaggccaaggcaggcagatcacaaggtcaggagtttgagacaagcctggccagcacggcaaaatcccgtctctactaaaaatacaaaaaaaaaaaaaaaaattagctgggcatggtggtgtgtgcctgtagtcccagctactcgggaggctgaggcaggagaattgcttgaacccggcaggtggaggttgcagtgagccaaaattgcaccactgcactccagcctgggtgacagagcragactccatctcaaaaaaatgaaaa

SEQ ID NO: 45130 - DNA, 594 bp, Homo sapiens
tctctgtacaatatcaattaggaatcttgtcattgaatttgggagaaaatcctattccaaatgccttcaggygagcttaagaaacactgcaggtttatatgaggctatacactgggatctggctcaaattctctgtatctgattggggacacagcaagatagattagcatggtaagggaacattctcccctgagaaaaactcttctgcctcaatgttattgcctggctgtctttgtgctgggcttttcctgagaactccaataacaatttcgcttctcagtctttcctcctacaatccctaaaactgtgaatcttcctcagattagctctctcctcatgaagcaacacaggtattccaagcttcagatatcttttcaccatttgattaccttgtcttaattttcttatgtattattgctaactgtagtcatcctacaatacacagaacactaagacttaatcctcctatctggctagtaccctttaacaaatctctccctattcctcccttcccccttcccttcccagcctctaggattcttggttctactttttacttctatgggatcaactttttttagcttccatatgtga

SEQ ID NO: 45131 - DNA, 565 bp, Homo sapiens
tcagtcctgttccccaacccagcttctggtctgctgctccagcagacagccctgtgcgtcccgctcctcccacctctcagctttcagggtcaggattggtgcagggaagcacatgctttataacatgtgattattcagacatagggtatataagacaccatttgtattcttgtactgagtcctgcaaatgttaaatttgggcttttggatattaattgggccctttcaaaatggtgattatcctttagttctgggacatgtattttattgtttcattgctaatgtctttctcaacatattctcagatttcttggtttgaaattcatgatagttgatatttaaaaaaaaaatttgcatctatggaacatctttttgccttttttcctactttacatgagagtttcttaactttatattttattgaatttgtcagctatgtttacaattccacatatttcatttgttttctggtcarttttttaatttaattgcttcctattctatatgagcatggtgtctatttttatctctcaggatatattaattatcatctcttaaaggtttc

SEQ ID NO: 45132 - DNA, 545 bp, Homo sapiens
aaaaaaaattaggagagattaaaggaattatcacatgcacaagctattacaaaattaatcagttaaaggtcatgaaaagtaaatgtataggttttggggatgaggagaagctacctgtgattaatttaatggaaaatagaaatagctaaggaagaaagttgtattactattaaacaagctgaaaaatcataattagaaggatagggccaggcacaggggctcagacctgtaatcccagcactttaggaggccaaggcaggtggatcacttgaggccaggggttccagaccagcctggccaacacagcaaaaccctctctctactaaaaatatcaccccccaaattagcttggtacrgtggcgcacctttagtccagctacctgggaggctgaggcagaagaatcacttgaaccagggaggcagaggtcacagtgaactgagatcatgccattgcactccagcctgggcaacagaatgaggctctgtctcaaagagaaaataaaaaggataaagtgaaaattatatgaaagaattattgagagaca

SEQ ID NO: 45133 - DNA, 561 bp, Homo sapiens
cctctagtggaatatgagcatagagttatattactagccaaattttcatgattaagagagaataaaaggattrttttaatacacaaagcctcagaatgactgctttccataaactatgaaagaagatcttaagtatacactccaactttgtaaaaatggatttcaatacaaataaagacatgaatttaaaaaaattagtgtaccaagaaattattaaatgtgttatcaaaacaattattaattcttctaaaaatgagaatttatcattggtattcagaatatgctcaatctgaaagggaaagtgatataaaagtaaaataagtggaaatttgctactttttttgttctttgggaaaatcttatctagtcattgataggaaaacaaataaaataaattaaattattagattctaaaagattgtgagatatatatatccttcttgatataacaaaacaactacaataaaaagttaataaaatataaaaagtcaggaaagaaaaatcaatacagaaatatgaataataaagagtaaaagtaagatttgttggaatcaacagtga

SEQ ID NO: 45134 - DNA, 636 bp, Homo sapiens
tacactgaaccgaacctactgagtggtataacttatcctagcctcccttaaatgtgctcacattagacacttaaattaccctacaattaggcaaaataacctaagacaaagtttattttataataaagtattgaatatcttgtaatttattgagtgtctatactataaatgaaaaacataatggttgtataggtactcaaagtacactttctatgaatgcttgttgcttttgcccactgtaaagtcaaaaaatcccaagtcaatccatcatccttgtaaggcagaggctatctccrtttttaaggcatttatttcagaggcacatcagatactgcatggcttatggaaatgctttgttctacctttagctttcattgttctgcccccacctttttcttctggaatacctttgaccatggcttgagaatagtgttcaacagcagcctctttgtaaaggtgccttgaatatgcttgtcttctcaggcagaggttaaacacctttattctgtgttcctttggctctttggacacccatttactatagcatatataatattttattataattatttgctttatgcctgtcttctccaccagagtaagaactaactcctccaaccaagaattctgccattc

SEQ ID NO: 45135 - DNA, 553 bp, Homo sapiens
  misc_feature (1)...(553): n = A,T,C or G
cagaggaaaaaaggatggagaaaaaactaggacaggtaattttgaaaagagatttaatgtcatgttcagtgcagatagataagaagttctcttccctgaataaatcagcggggggctcgttgaagctgcacattctgattcagcagtcctgagattcttcatttcaaataagttcttgggtgatgctgatgctgctggtctggaacatgatcttcacagtaagattatacacttccccacattgaaattgggaagaagaaatatggagagcagttcaaggcrtaaggggctccggggaacaacataattttgctttaattctccagcttgttttcagtaggggtggaggggaaaagagaggaagtatagaattaacacacttcagctcgcactgccaagaaaagacagaaagcttgttgtaacaacccgtagacactgtaggagaactaaggagacccctggtgtagcaacagttttcctaaggaagacggattgtgaggcaggaaggtgtgnaaagaggaagtcatttatataattttggggtttctgctga

SEQ ID NO: 45136 - DNA, 553 bp, Homo sapiens
  misc_feature (1)...(553): n = A,T,C or G
cagaggaaaaaaggatggagaaaaaactaggacaggtaattttgaaaagagatttaatgtcatgttcagtgcagatagataagaagttctcttccctgaataaatcagcggggggctcgttgaagctgcacattctgattcagcagtcctgagattcttcatttcaaataagttcttgggtgatgctgatgctgctggtctggaacatgatcttcacagtaagattatacacttccccacattgaaattgggaagaagaaatatggagagcagttcaaggcataaggggctccggggaacaacataattttgctttaattctccagcttgttttcagtaggggtggaggggraaagagaggaagtatagaattaacacacttcagctcgcactgccaagaaaagacagaaagcttgttgtaacaacccgtagacactgtaggagaactaaggagacccctggtgtagcaacagttttcctaaggaagacggattgtgaggcaggaaggtgtgnaaagaggaagtcatttatataattttggggtttctgctga

SEQ ID NO: 45137 - DNA, 553 bp, Homo sapiens
  misc_feature (1)...(553): n = A,T,C or G
cagaggaaaaaaggatggagaaaaaactaggacaggtaattttgaaaagagatttaatgtcatgttcagtgcagatagataagaagttctcttccctgaataaatcagcggggggctcgttgaagctgcacattctgattcagcagtcctgagattcttcatttcaaataagttcttgggtgatgctgatgctgctggtctggaacatgatcttcacagtaagattatacacttccccacattgaaattgggaagaagaaatatggagagcagttcaaggcataaggggctccggggaacaacataattttgctttaattctccagcttgttttcagtaggggtggaggggaaaagagaggaagtatagaattwacacacttcagctcgcactgccaagaaaagacagaaagcttgttgtaacaacccgtagacactgtaggagaactaaggagacccctggtgtagcaacagttttcctaaggaagacggattgtgaggcaggaaggtgtgnaaagaggaagtcatttatataattttggggtttctgctga

SEQ ID NO: 45138 - DNA, 551 bp, Homo sapiens
aggacaggtaattttgaaaacagatttaatgtcatgttcagtccagataggtaagaaattctcttccctgaataaatcagcggagggctcgttgaagctgcacattctgattcagcagtcctgagattcttcatttcaaataagttcttgtgtggtgctgatgctgctggcctggaacatgatcttcgctctaagattatacccttccccacattgaaattgggaagaagaaatacggagagcagctcaagacataaggggctctggggaacaacataattttactttaattctacagcttgttttcagtaagggtggaaggataaagagaggaagtatagattttacagacgtcacatcgtactgctaaaaacagacagataacttgttgtaataacccgtgtacastgtaggagaactaaggagacccctggtgtagcaactattttcctaaggaagacggattgtgaggcaggaaggcggaataagaggaattcttttatataattttggggtttctgctgagtaaacctgagtgaactcacttcaga

SEQ ID NO: 45139 - DNA, 550 bp, Homo sapiens
aactaatccattgttgctcaaagtagaagtcttaaactcttattttacttgttcagtcctttggtttccaattccagttttgttatttagtatttaatatcaagctttgcccaattcttcgaattttggcatgtttagcttaaatgagatattacccatgcataccttcagatgaactttagtttcattctttgatgtctataagaaggcagacaaaccaattcagaaacacaaggtaagactggctttgcacagttagtactgtctcctagttgctacccaccctaatacaaaactttatttataggttccaaacctcttcaatgtgttttttcttcattactttacgaatgcataaacagtcatataaaaagataccattataatatttgtgccttactatgaaaatttaaactgtactttatatttcttttatgtgtttgataattccaataattayatgaacatataagggttactggatagataattattaattgcctgaggaatatgctgtaggattttgatgtaaaagtctaatatacaagac

SEQ ID NO: 45140 - DNA, 608 bp, Homo sapiens
taagcatgcatgttttgaatttgcactcattttttatttcaagagtgttttttttttttttttttttttttttttttgagacggagtgttgctgtctcccaggctggagtgcagtggcgcgatctcggctyactgcaagctccgcctcccaggttcacaccattctcctgcctcagcctcccgagtagctgggactacaggaatccgccatcacgcctggctaacgttttgtatttttagtagagacggggtttcaccgtgttagccaggatggtctcgatctcctgacctcgtgatccacccgccttgacctctcaaagtgttgggattacaggcgtgagccaccgcgcccagcctaattttgtatttttagtagagacagggtttcatcatgttggccaggctggtctcgaactcctgacctcgtgatccacctgcctcggcctccctaagtgctgggattacaggtgtgagccactgcgcccagactgttgtatcatttctttatgaatgctgaattgtttagctactgagaaagtatattagttttcttactttcatgtttaaccttatgataaattgcatcagtggaattaacagtgtctgtt

SEQ ID NO: 45141 - DNA, 551 bp, Homo sapiens
agaagacctttgtacagagatgccaggtgagctgagatctcaagaatgggaaaaggtcagctatttgcagagctagaagagcattcctgatggtggatagcagggtcaagggcctgagtgcaaaatagctgactgcatataagacactgagaggttggcgaggctagaatagatggattgaagatcatggtccaaaytggtcttctttacatctccctagaacactgccttaggcttatttatattttggtaggttatatgtcatatgccaacagagaacagtgagactgcaaaagagggaatgtcttttggaggagttgagaaagacttcagaggggagtcacgtcttagggagatgaggagtcagtcacaaagtttggcagagcagaaaggaaaagaaggaaaataactgatatgattagaagaaacagcctgtaaaagatcataagaatggtcactacaggaaaggaagagatgctcagagtggctgaagtgtgggaatacagagcccacaaggaacaagaggagcggcaagagaaagaactggttga

SEQ ID NO: 45142 - DNA, 590 bp, Homo sapiens
aatacatgatcaaaatacgccgaaaaaggaagcttgaataagtgacctcrttgtgatgaagtggaagatgactctgaaataatataattcaatctccgcatttttcagatgaggaaactgaggaacagatgaggagactttcctgaggttgcccagcaggcggaacctggacttgaaccagggagtcccacctcccagtctttacaagttcctttactttgtgctctgggctaattaatgttttaggcagggccatttttgcttcctgggtctcagttcccacttgtaagagggaccggagcaagattctgttctggcattgcttcacagagccacaatcaggcaactcccacatgtccatcctgctcctcaaagcagcaggtcctccctcctctcctgctcagcccaccaccctcgtgtctgagccctgtggcagcacaagaaggcagaacctgacccagcttatagtggtgaccttcaacttcatccagaaatcagtggctctgaaggagtgttccctgtgataaataacaacacacaaaactaaaccatgttagtgaaaatggctattgtgcagtggagtgtgtaaa

SEQ ID NO: 45143 - DNA, 423 bp, Homo sapiens
  misc_feature (1)...(423): n = A,T,C or G
tttaaaaatgatcctatgaattttcttctttaacttgctaaytgaaaatatttccttgacagattttcaaatattgaacaattttgagccctgcatggtgatcaagcagactgtctctccctggctctatctccatgggttacactttgaagggcatccttggggaaagccaatctggaggtggtacccactcgggtgagctcttctttcagagaccacaccagggggtgtctgctgcccaaactcaggaaacagttgttttctgtgttcagcctggcttttatatgattcccagtggggcagtatctcccataccaattgcnnnnnnnnnnnnnnnnnnnnnnnnnnnnnnnnnnnnnnnnnnnnnnnnnnnnnnnnnnnnnnnnnnnnnnnnnnnnnnnnnnnnnnnnnnnnnnnnnnnng

SEQ ID NO: 45144 - DNA, 1902 bp, Homo sapiens
  misc_feature (1)...(1902): n = A,T,C or G
gaatattacctaagcttagttgataaagcagtggcagagtttgaaaagactgactccagttttgaaagaaggtctagtatagataaaatgcttggaaacagcatctcatgctaagaaaaaaaatctctcatttaaaaaattgattcatcaattttttgcatcaatttattgcatcaattgatgcagtaaactttagtgttgtgctattttaagaaattgccacagccagcccagccttcaacaactaccaccctgatcagtcagcagccatgaacattgggctaaaacactctaccagcaaaaacattacaatttgctgaaggctcatacaatcattagcattttttagcaataaagtatatttaaattaaggtatgtacattgttttcttaggcacaatgctattgcacacttaatagactacactatagtgtaaatataaatttaatttgcattgggaaaccaaaaatttgtgtgacttgcttattaccatatttgctttattgtnnnnnnnnnnnnnnnnnnnnnnnnnnnnnnnnnnnnnnnnnnnnnnnnnnnnnnnnnnnnnnnnnnnnnnnnnnnnnnnnnnnnnnnnnnnnnnnnnnnntgccatgtcatttgcattaatctttgagttgagaccaattatgtgatcaagcttagcctaggcagggacacttgagtatttaaggttgagtacactggtttgggttatttgagatgaatgaacctgtaagtggcatcttggtatacagtaaaatgtcytggaacccggggttagaacctgagttcttgtatgggttctgctttagatgagcccaaggaccacaggcaggttgcttcacatccctgggtcttaattttcttatgggtgaaatgaaaaaatcaaactaagatggctggtggaggctgggcatggtggctcacacctgtaatccgagcacttggggaggccgagatgggtggatcagttgaggtcaggagtttgagaccagcctggccaacatggtgaaaccccatcgctactaaaaatacaaaaattagccagatgtggtggcaggtgcctgtaatctcagctactcaggaggctgaggcaggagaatcgcttgaacctaggaggcagaggttgcaatgagcagagatcatgacactgcactccagcatgggtgtcagaaagagactctatctccaaaaaaaaaaaaaaaaaaaaaggaaacgaaaagaaaagatggctggtagagtcttaatcatctctagtgttatttggatataaatttaaagaaaaccaagattatgcctcaatgggagactttgaaggtttgctgcctgatggcctacaccaggggttggcaagccatggccttgtagaggaaaccagcctggcacctgcttttgtatgatctgtaagctaaggatttttttctctttatagttttaaataactatattaaagatagttatataaatacctccatactacctccaattttgattcttttaggctgcaaatcctaatctatttacatctgactttccatggaaaaatgtgtgtactcccatactattcacatcctacatagagagtgcaaaataaaaatctcatggtgacctttagttaccaaagagaggttcttttctacctttctctccaagatggatggatgactgtcatattgtcccatcagttaaattaattgttccttttattttcttcccaatgctttaaacattcttaagttgttattttattagaataatgacagttacaaacttacaaatagttatcaaaagttttaagtaatcacgtttctgtttgactctttagactggcaataggtgcaaccctttctattcctttttgaccatctgaggagaacatttttttttctttataaagattta

SEQ ID NO: 45145 - DNA, 509 bp, Homo sapiens
acaaattttaaattgtcacatcatggtatactgctcattttatcattttgaaaggtattcttttgtcttagtactgcttcttgccactaaatttatttcatctgatgttagtacatctatctcagctttcttttggttatgtcagcctaacagaccatttttacatttttttttcagacttcytcagttcttatttttaataaaacacattcaattacttttaaaattcattttagatatttttattagccgaagtatgaaaatcatttatatttagctcaagatattttgattgtggtctaccactttgctatttttccatctgttgtattttcgacttgctctttcttgccttttttctcaattaagcatttttttctccaatatgcccttataatctcctataagtttaagtatcttttgattttgccctagatattatttcatgattccttgacttattagtgtctgagtataaagtaaaattttcattacttttcttagactat

SEQ ID NO: 45146 - DNA, 509 bp, Homo sapiens
acaaattttaaattgtcacatcatggtatactgctcattttatcattttgaaaggtattcttttgtcttagtactgcttcttgccactaaatttatttcatctgatgttagtacatctatctcagctttcttttggttatgtcagcctaacagaccatttttacatttttttttcagacttcctcagttcttatttttaataaaacacattcaattacttttaaaattcattttagatatttttattagccgargtatgaaaatcatttatatttagctcaagatattttgattgtggtctaccactttgctatttttccatctgttgtattttcgacttgctctttcttgccttttttctcaattaagcatttttttctccaatatgcccttataatctcctataagtttaagtatcttttgattttgccctagatattatttcatgattccttgacttattagtgtctgagtataaagtaaaattttcattacttttcttagactat

SEQ ID NO: 45147 - DNA, 509 bp, Homo sapiens
acaaattttaaattgtcacatcatggtatactgctcattttatcattttgaaaggtattcttttgtcttagtactgcttcttgccactaaatttatttcatctgatgttagtacatctatctcagctttcttttggttatgtcagcctaacagaccatttttacatttttttttcagacttcctcagttcttatttttaataaaacacattcaattacttttaaaattcattttagatatttttattagccgaagtatgaaaatcatytatatttagctcaagatattttgattgtggtctaccactttgctatttttccatctgttgtattttcgacttgctctttcttgccttttttctcaattaagcatttttttctccaatatgcccttataatctcctataagtttaagtatcttttgattttgccctagatattatttcatgattccttgacttattagtgtctgagtataaagtaaaattttcattacttttcttagactat

SEQ ID NO: 45148 - DNA, 509 bp, Homo sapiens
acaaattttaaattgtcacatcatggtatactgctcattttatcattttgaaaggtattcttttgtcttagtactgcttcttgccactaaatttatttcatctgatgttagtacatctatctcagctttcttttggttatgtcagcctaacagaccatttttacatttttttttcagacttcctcagttcttatttttaataaaacacattcaattacttttaaaattcattttagatatttttattagccgaagtatgaaaatcatttatatttagctcaagatattttgattgtggtctaccactttgctatttttccatctgttgtattttcgacttgctctttcttgccttttttctcaattaagcatttttttctccaatatgcccttataatctcctataagtttaartatcttttgattttgccctagatattatttcatgattccttgacttattagtgtctgagtataaagtaaaattttcattacttttcttagactat

SEQ ID NO: 45149 - DNA, 597 bp, Homo sapiens
gtctggaactcctgacctcaggcgatccgcccacctcagcctcccaaagtgctgggattacaggcatgagccaccatgcctggcttccaacatttttgaaaaatgttaagtttacctatttaaatgtggcttttgcccttaatatttctaatattctaatgaaattgcagccaatagttaattctggttaactctaactctgttttttggagggttatctaaggtgtgttacagwtcatattcatataatcagtgattaagctggtttgagaccaaactgcaattattgtgaattataatctatttatttccattaatattcctaaacctttgaagtgtcaaatgaagcctggggtgtataaatcggcctttctcattgataagtcttgagccatatattttattctcttaaaactataagactatgaatatttctgcttaggtttttcgtctatcaatagccacatacatgtgagaaaatctttcatgggtcaagggatagtccatattgttctcaattctctgaagtgctgttttcttcggtattttagccctgtaatctttaatgccttggaatatttttgatacctccatgca

SEQ ID NO: 45150 - DNA, 597 bp, Homo sapiens
gtctggaactcctgacctcaggcgatccgcccacctcagcctcccaaagtgctgggattacaggcatgagccaccatgcctggcttccaacatttttgaaaaatgttaagtttacctatttaaatgtggcttttgcccttaatatttctaatattctaatgaaattgcagccaatagttaattctggttaactctaactctgttttttggagggttatctaaggtgtgttacagttcatattcatataatcagtgattaagctggtttgagaccaaactgcaattattgtgaattataatctatttatttccattaatattcctaaacctttgaagtgtcaaatgaagcctggggtgtataaatcggcctttctcattgataagtcttgagccatatattttattctcttaaaactataagactatgaatatttctgcttaggtttttsgtctatcaatagccacatacatgtgagaaaatctttcatgggtcaagggatagtccatattgttctcaattctctgaagtgctgttttcttcggtattttagccctgtaatctttaatgccttggaatatttttgatacctccatgca

SEQ ID NO: 45151 - DNA, 597 bp, Homo sapiens
gtctggaactcctgacctcaggcgatccgcccacctcagcctcccaaagtgctgggattacaggcatgagccaccatgcctggcttccaacatttttgaaaaatgttaagtttacctatttaaatgtggcttttgcccttaatatttctaatattctaatgaaattgcagccaatagttaattctggttaactctaactctgttttttggagggttatctaaggtgtgttacagttcatattcatataatcagtgattaagctggtttgagaccaaactgcaattattgtgaattataatctatttatttccattaatattcctaaacctttgaagtgtcaaatgaagcctggggtgtataaatcggcctttctcattgataagtcttgagccatatattttattctcttaaaactataagactatgaatatttctgcttaggtttttcgtctatcaatagccacatacatgtgagaaaatctttcatgggtcaagggatagtccatattgttctcaattctctgaagtgctgttttcttcrgtattttagccctgtaatctttaatgccttggaatatttttgatacctccatgca

SEQ ID NO: 45152 - DNA, 584 bp, Homo sapiens
cgtctgcttgatttcctcatatcatatgagcaaaataaattattgaactcatgtycatttttatatgtgcataagggtcatgattgtacttttttctgaaaatttcttttaacacaatacaggaaagaaatcagatatgttctagaaagcttctgaaggcagaacatggactgatgtagtatcataagcaagtaggtttccttagtgtcccgtagtattgtcagaaatgaagaggcaggaagcagtggtgtgggcttcgctggaagttgattccttcactcagagtgctccattgaggctctgtacctctgactgccatatgtaaagggtgctgtggaactggatggaatgctatctttaaagcttaagtctaatttttcatggttctaactcttcaactgagtgtgaatcaagtgaaatagaaacactcagtaaatcattaattaacctaagatgaccaggagcttggatgaacagatgaccacacacttggctgatgaactcttaaaattccttaaaaataagttctgtttcaggaaagcaaggatgttttaatcatcagaaaagtatctcttgccatccct

SEQ ID NO: 45153 - DNA, 584 bp, Homo sapiens
cgtctgcttgatttcctcatatcatatgagcaaaataaattattgaactcatgttcatttttatatgtgcataagggtcatgattgtacttttttctgaaaatttcttttaacacaatacaggaaagaaatcagatatgttctagaaagcttctgaaggcagaacatggactgatgtagtatcataagcaagtaggtttccttagtgtcccgtagtattgtcagaaatgaagaggcaggaagcrgtggtgtgggcttcgctggaagttgattccttcactcagagtgctccattgaggctctgtacctctgactgccatatgtaaagggtgctgtggaactggatggaatgctatctttaaagcttaagtctaatttttcatggttctaactcttcaactgagtgtgaatcaagtgaaatagaaacactcagtaaatcattaattaacctaagatgaccaggagcttggatgaacagatgaccacacacttggctgatgaactcttaaaattccttaaaaataagttctgtttcaggaaagcaaggatgttttaatcatcagaaaagtatctcttgccatccct

SEQ ID NO: 45154 - DNA, 541 bp, Homo sapiens
gtgtgttttagttctaaaagccagaatttaaatagtaaggaatcttaaagaagagggaatcaagtgaagtaatctgtgaaagtgtgttaaaacccataaagcttagttcaaattcaaaattctgtgatcagccaggcgaggtggtgcacacctataatcccaggactttgggaggctgaggcaggtggattgcttgagctcaggagttagagaccagcctaggtaacatggtgagaccccatctctacaacaaatacaaaaattagcccggcatggtggcgcatacctgtagtcccagctatttgggaggctgaggtgagaggatygcttaagctcaggaggtcgaggttgcagtgagccatgattgcaccactgcactccagcctgggcaacagagcaagaccctgtcgcaaaaaaaaaaaaaaaaaaaaattctgtgatcatcattgttggtgtttgggggcttgtcttgaataaaactgatacttgcctggaattttgtaggcttctgggggctgggtattatttcttgttcatgtct

SEQ ID NO: 45155 - DNA, 555 bp, Homo sapiens
cccagactaacaaaaataatctagctttttgtcttgactaccaaacactctggatttttttttgagatggagtctcaccctgtcacccaggctagagtgcagtggcacgatcttggctcacacaacctccacctcccaggttcaagcaattctcctgtctcagcctcccaagtawctgggactacaggcacacaccaccacgcccggctaatttttgtattttcagtagagatggggtttcaccatgttggtcatgctggtcttgaactcctgacctcaggtgatccacctgccttggcctcccaaagtgctaggattacaggcatgagccaccatgcccggcccactctggatttaaggacagttcttccttcaatcagcagccaaagagtcctgattcctgattctaattaagaagtttaacttggtattctatttctgatggaaggatggctaaaagaagggagactcaaacaacagatgaaggcaaaatactctgtactgaattttcaacgtaatcttaaattctatgtttaattgagatgacccaaattc

SEQ ID NO: 45156 - DNA, 458 bp, Homo sapiens
ctagttttatacctraatatgcttactgtactattccctttttaactaagaaatctctagaatccttctacaggcatatcatatgttcctctcccctttttgtactatgcaagtatttttcacaaattttgcacctagaatcttcatgttatattccacatcaactagcatgagagaggctgcttttcattaggcaataagaagcagagaaagatctatactgcaataactctatgataaaggcaggacggtatattttacactgatttcaccatatatcctccgcatcgcaattggaaatgtagattttataatgcttattttgcaattcaggaaactaatgttcgaggcttaacttattcaaagcgattacttgaagcaaaagcttcatgaacttgcccagggttattctgctgctgagggggagagatagcattggaacacagggtttatttgcc

SEQ ID NO: 45157 - DNA, 458 bp, Homo sapiens
ctagttttatacctgaatatgcttactgtactattccctttttaactaagaaatctctagaatccttctacaggcatatcatatgttcctctcccctttttgtactatgcaagtatttttcacaaattttgcacctagaatcttcatgttatattccacatcaactagcatgagagaggctgcttttcattaggcaataagaagcagagaaagatctatactgcaataactctatgataaaggcaggacggtatattttacactgatttcaccatatatcctccgcatcgcaattggaaatgtagattttataatgcttattttgcaattcaggaaactaatgttcgaggcttaacttattcaaagcgattacttgaagcaaaagcttyatgaacttgcccagggttattctgctgctgagggggagagatagcattggaacacagggtttatttgcc

SEQ ID NO: 45158 - DNA, 592 bp, Homo sapiens
cctcccgtagttagtttggccttcacccagaaatgagtaaggacagcttggaggttatagaagcaagatggaatcagttaggtcagatctcttttacgatcataattttctcagttataatttttgtaaggtttgtttcaatcttacaggacaggaaccagagggtaaagtgctttacctgaggctgccagaaagctgggccaggatctcagcccaagcatttcatgctagggatcatgtttctcaccattgtgccatctctgagaaaggtaagagaaaatatcattggcaagttgttaaaaaaaattagagagataaacattgctgttgagrtcattatcatcatgttaccttcttgctcttattattctaaaggtacaataagaaatatgcattaggaattaatgcacaggtgacttgtttttctactgagctcaggaggcaatgaatgtatcatctcattattttacctcaaattttctcagtaagagattgcaagaagtcaaaattgtccttgtagtggaagtagggaatattgaggtggctacacaatcactggtggtcaatatttgcagataattgagttaattat

SEQ ID NO: 45159 - DNA, 1847 bp, Homo sapiens
aacactattaaaaatcttataaaggactcaaacagtgaactgatatataggataatgaaaggatattaacctgagagagcatggtcagaagatcctcactgagatggtaatatcaaagcccaggcctgaggttgagaatgagatagccacagggaggatggaagagagtgagttttgttacaggatgcagaaatgacatggtccaagaacccartaagtctttggattccaggaaccaaaagaagctgacaagtatggccagaactgcagtgtaatatcctgagagacaattgttggtcctagtcagtttattggctcaagctcatcacgttcttatttcaagctcatctccctgttccaggaattaccatcccaatttttccagatgctgcccttcattcttccatttgagggtctcttctttcaaatattttgggaaacggggtatagaatttggactttggtcatgctttccattttcagatgtgtcaatcaggatcccaggagaaaatagaattcctctcagatgtttcaagcgaagtgattttaaagaaaggatcgtttatacagaaatagacatagttaaggaatccaacaagcaacactgggaaaccattccatcactaggcctatggtaacactggaacttaatgagaacggaagccatggaggaggggctgtttgactgaatctgtaatcaacggaggaaaggaactggaaacacagcgtcaaggtgagacaacagaaaacaccctctccttggtctcctcctggtatctcccattggctgaacccgagtggaagccaaagggcatgagagtgatacaatccacagaggtcagtcttctgggccccatgcagggccaagaaaagtggaaaatagttctaagggaagagagttaagtgacgaatgtccatcacagcactcctgtggcaggagcaccgacatcacagcaccaaagcagacagccagtagggaagaaatacccttatctctctcctttccctccaatatattgccggtacctcccactggctaaacccaactataaaccagcctaattacaactataaaacagcctagaagggagcctgtggggtgcagcttgcaagaatcaattttcagagacaaagagtagagcagagacaggtagcgaacagacaggagaaaaagctgaaagagaataaccagcagaatagaaaacagaaaactcatgcttcctacaaatatttattgctgctagctacaggtcaatataggaggtgaccatagttaatggaggggaaattccaaatttctaagaagacagagcaatcttaagtcataagaattatgaatatttgttagaatgaaaaaagaagtagagtgtgatctttcatggtttctcctatcttcatttttagatatgctcatgcctaatctctctattttcctctttcataagagatgaggcattggtctcttcaatggcccagtgcctagagataatgatgagtagtatttagcttgaagcatagactgaagtaggttatttgacatctcactggaagctggaggctgatcatttctagctccaccagttgctctatttacaaatatcttattttgaaaaatgtaggggagtcccacagggcagctataaggcaaagacatatttttcatatttcccagtttgccttgatttttagtggtgccaaataccctgtgtgcactaaaaatcatctttgatatttcttctttcacacctgagggaatttactgatgccagattgaactgacttgtaaggtagttaccaatgtttaattaagatctaatcatgccaagtcacagactgctatatcatgc

SEQ ID NO: 45160 - DNA, 641 bp, Homo sapiens
tgcctgtagtcctagctacttaggagattaaagtgagaggatcactggcacccagcaggttgaggctgcagtgagctgagatacccactgcactccagcttggacaacagagtaagactgtgtctcaaaaaaaaattacatatatatatatatatayacacacacacacacatatatatatcactttatatttctcttgatagcaaatgtgatcctttaagcaagtaagacaaagcttaggggaaagacagagtgacttaaaaataaataagaaattatcctgagaagataaagttgtttctgaaattatattatgtccaatctatattaatagcttttataaacctagatgtgctcttgtatagtcccactttggaaacttacttctctgagcttaaactgaacaatgaaggacttgacatctgccaccctgagtctcagtgtcctgtgactggtgcacctagactagctctgacctactgtaaggaggacatatgctggagtctgtgttgtgatgtcacagtggctttagactaaacaagccatattcctcatccagagacctcccccacctgccctcccaccccaccttcagacctgcactagaacaccccatggatttaggagccactggtaaggtt

SEQ ID NO: 45161 - DNA, 533 bp, Homo sapiens
tttaccttggaagcatggggcctgtgtctattgaactcctcttttgggtcctccagcacttgatgactctgagaacacatgctcctttacttcaggaggcagcctcaaaagtggactgtccttcttcattttggcacggtggtgattccatcgggaggggctttgggccaggtttgtcctgctgtggaggcccacaggcaggtcaagcactgagaaaccctgcctggcctggcaagccttcttctcctgaggatggcttctcctgtggctacaggatcatctatgttggtcaaacrgatggctaagtggcctgaaataatggtacaagacgtttttaaaagatattgggattgctttgactgaaagagaggatgtgagggactggagtgtcattaagagtctcaaaatcaaggaaggtttttatggagacaggttgagcactgctgtgggaaatgctggggtgtgacaggtgggtcactgccgtgggaaatgccgaggtgaggcaggtggaccacagccgtgggaaatgccga

SEQ ID NO: 45162 - DNA, 533 bp, Homo sapiens
tttaccttggaagcatggggcctgtgtctattgaactcctcttttgggtcctccagcacttgatgactctgagaacacatgctcctttacttcaggaggcagcctcaaaagtggactgtccttcttcattttggcacggtggtgattccatcgggaggggctttgggccaggtttgtcctgctgtggaggcccacaggcaggtcaagcactgagaaaccctgcctggcctggcaagccttcttctcctgaggatggcttctcctgtggctacaggatcatctatgttggtcaaacagatggctaagtggcctgaaataatggtacaagacgtttttaaaagatattgggattgctttgactgaaagagaggatgtgagggactggagtgtcattaagagtctcaaaatcaaggaaggtttttatggagacaggttgagcactgctgtgggaaatgctggggtgtgacaggtgggtcactgccgtgggaaatgccgaggtgaggcaggtggaccacwgccgtgggaaatgccga

SEQ ID NO: 45163 - DNA, 514 bp, Homo sapiens
gcacatataatgtggrgaaaagaaaagaagggaaagaaaaaagagaggaagaaaagacagggaaaagagaaaggaaatgataatcaactgtgtcactccagagtaaaagcacatccaggaagccaagtctggagctactgaataatattcttggttggatttttctccttcccctgacctggagtctgtagaagatgagaagactttatatccaagaaaccagtttcatctcaggtacaaacacgcaagttcactctactccatgtaatgtgcatccattgagcacctattacattcaagaactaaaaatgtaccaacttgttcagaaaaagttgtaaataaaataataggattgagcttctcagttctatgaaaaagccaccgtctcttctctcataatagcacctgtgaggttttcttgctgctggaatgtaacatgacatctgcatgtcacaaacacacagaaggattgcatttttaccatgccgttatttccgtattttctcctatatat

SEQ ID NO: 45164 - DNA, 409 bp, Homo sapiens
acccacatttgattatttgtatgggctctctatgtctttttcccaaatttcctacataaaataataatacattgattagaaacagaaaaaagaaaaagaaaataacaaatgagtgaaatgaacatgaawgctgttctgtaaataagttcttgttgttcctttaaagtgttctttatttttaaactttctataacaatatgtcttatctccctaattagctgaagacaggggctatgtaaatacttattcctatcactgtgtcagctggcaataaagtatgtctaccaggatattctagtcattgagggtcctggaggaatttcacagaaggcaaattaagcacatattgaacacattagctaaggggggaattaaaaattagtgaagtacaactttggcaaaactactc

SEQ ID NO: 45165 - DNA, 409 bp, Homo sapiens
acccacatttgattatttgtatgggctctctatgtctttttcccaaatttcctacataaaataataatacattgattagaaacagaaaaaagaaaaagaaaataacaaatgagtgaaatgaacatgaaagctgttctgtaaataagttcttgttgttcctttaaagtgttctttatttttaaactttctataacaatatgtcttatctccctaattagctgaagacaggggctatgtaaatacttattcctatcactgtgtcagctggcaataaagtatgtctaccaggmtattctagtcattgagggtcctggaggaatttcacagaaggcaaattaagcacatattgaacacattagctaaggggggaattaaaaattagtgaagtacaactttggcaaaactactc

SEQ ID NO: 45166 - DNA, 534 bp, Homo sapiens
aacaatgtcatgagactgaccctttccaaactttaactagcttttggccctggggactgaaaccaactatgaaccaaactacaggagctcaatagagacatccagtctttttacatttstcccactgcaagaattagggtggtcgggaatggtctcctcataactaagcaagcaatattatgcttcttctgaattcctgccccaattatttttaagttctgcttttaatgatttaaaagtacttgcatatgaactggtttcatgctcccccacagtgaagaagaggggcatgtatatctttatctgattcactatatatgtagagacagactagtgcagtgagccagccatttaccagctgaatgcccttgggtgcattactcacttctctacatttcatctataaaatggagttaataattatatctacctcatagggttgttatgaggcttaactaagctatttcttatcaagcattcagaacaaaactcagtgagcattacctattcttattgtagtgatggtagacgtgg

SEQ ID NO: 45167 - DNA, 534 bp, Homo sapiens
aacaatgtcatgagactgaccctttccaaactttaactagcttttggccctggggactgaaaccaactatgaaccaaactacaggagctcaatagagacatccagtctttttacatttgtcccactgcaagaattagggtggtcgggaatggtctcctcataactaagcaagcaatattatgcttcttctgaattcctgccccaattatttttaagttctgcttttaatgatttaaaagtacttgcatatgaactggtttcatgctcccccacagtgaagaagaggggcatgtatatctttatctgatycactatatatgtagagacagactagtgcagtgagccagccatttaccagctgaatgcccttgggtgcattactcacttctctacatttcatctataaaatggagttaataattatatctacctcatagggttgttatgaggcttaactaagctatttcttatcaagcattcagaacaaaactcagtgagcattacctattcttattgtagtgatggtagacgtgg

SEQ ID NO: 45168 - DNA, 1756 bp, Homo sapiens
aaggtcacaggaaaaaaaaaatgaaaactgagaacactgatgtagataatgctaagctgggtgggaggtcagaagacaacagaacccttgaggccagagcctgagcttkgtcctttttgatgttcttaatgctcagtcagtacagcagtattcactagaatgcgaaaccctcaatgagtatttgctgaatgaatgactggaaatgaatgaggtttacagattttctaaggactcctcttaaaaattcaattaggcttggaaatagatccaggcagcactacatttatgaagaggttgtttccaagaccttcattgtaaattggcttttgaaactttcaacagcatgacacatggtagtcgggctctcagaccagcctacaaccacctttttaaacccaaggtgtgtctgaagctggtatggagaaacgaagctgtgtttctatagggaaacggatcctcactagtctgattaaaaatgccaggggtaagttcgcctccagaggacagaggacctcttccccatttctcattcctcttgccactgttaggcctgtctctataaagtgattttgatgggctgagaggaatgtgagaagcagcataggcagggctcatttcaaggatcaatagatcaaaggtaaggagagggaaaaacgcagacagcaatgcaaattgctgttcaataggtttgaaaggcttgtggccaccaggtattgaaccagtgtgagtgtgggtgggctggccatttgtagagaagacacatatacagaaggtcaagaccacctccataatcaccactgctcgtgcagtgctgcaatatcttgtatagaagagtacccaatacatgcaaagcacagtgacctatttctctgccattcttttttatttttaatctataaacagcagtagcaattttatccataaccagataaagggtccagatcatttgaaacctttctttgaaccaaaaagtagacaaattggtcagtgttagaaatgcaaaatgcttgtttcccagtgccacaaagaaatagcactggaacataaatgcaattttctcagaaaggcaaaatttactttctgcagaaagggtgcccctcgaagatggaacaatggcgagagcacacctggacaggggaggggcaggagttcttattcctgatgcaggcggcccctactgctgtgttgttccctattggctagggttggaccacacagtctaagccagttccgactggctattttaaagagggcagggatatgagccagagtggcagggtgagtagtttggcgggaaggatggttagaaacaggtaaccaaaggtgacttaggtcagagcaggtgaccaggggtgattcaggtcaaagcacgtgaccaggatgagacaggacagagcaggtgaccaggggaacagatgtgaacctactgaataggactggtgggaaagttgtttactgaaactagaagcaagtgggcagagagaaccaggaagttaaactttgaaatcaagaattaaaaaataagaaagctgaacatactgacatactgattctttgaagagaaactggaagttcactatatttaacactttggcctacaaaccaatagtcacaaaatgtaagtgcccattactttgtaggagagaaggcctctctcaccagattgttgatttttactttgaacgtaattctaacaaatgggtgtcctgttactcttggctacagcagaacagggagcgggaccatgacaggcaga

SEQ ID NO: 45169 - DNA, 1756 bp, Homo sapiens
aaggtcacaggaaaaaaaaaatgaaaactgagaacactgatgtagataatgctaagctgggtgggaggtcagaagacaacagaacccttgaggccagagcctgagcttggtcctttttgatgttcttaatgctcagtcagtacagcagtattcactagaatgcgaaaccctcaatgagtatttgctgaatgaatgactggaaatgaatgaggtttacrgattttctaaggactcctcttaaaaattcaattaggcttggaaatagatccaggcagcactacatttatgaagaggttgtttccaagaccttcattgtaaattggcttttgaaactttcaacagcatgacacatggtagtcgggctctcagaccagcctacaaccacctttttaaacccaaggtgtgtctgaagctggtatggagaaacgaagctgtgtttctatagggaaacggatcctcactagtctgattaaaaatgccaggggtaagttcgcctccagaggacagaggacctcttccccatttctcattcctcttgccactgttaggcctgtctctataaagtgattttgatgggctgagaggaatgtgagaagcagcataggcagggctcatttcaaggatcaatagatcaaaggtaaggagagggaaaaacgcagacagcaatgcaaattgctgttcaataggtttgaaaggcttgtggccaccaggtattgaaccagtgtgagtgtgggtgggctggccatttgtagagaagacacatatacagaaggtcaagaccacctccataatcaccactgctcgtgcagtgctgcaatatcttgtatagaagagtacccaatacatgcaaagcacagtgacctatttctctgccattcttttttatttttaatctataaacagcagtagcaattttatccataaccagataaagggtccagatcatttgaaacctttctttgaaccaaaaagtagacaaattggtcagtgttagaaatgcaaaatgcttgtttcccagtgccacaaagaaatagcactggaacataaatgcaattttctcagaaaggcaaaatttactttctgcagaaagggtgcccctcgaagatggaacaatggcgagagcacacctggacaggggaggggcaggagttcttattcctgatgcaggcggcccctactgctgtgttgttccctattggctagggttggaccacacagtctaagccagttccgactggctattttaaagagggcagggatatgagccagagtggcagggtgagtagtttggcgggaaggatggttagaaacaggtaaccaaaggtgacttaggtcagagcaggtgaccaggggtgattcaggtcaaagcacgtgaccaggatgagacaggacagagcaggtgaccaggggaacagatgtgaacctactgaataggactggtgggaaagttgtttactgaaactagaagcaagtgggcagagagaaccaggaagttaaactttgaaatcaagaattaaaaaataagaaagctgaacatactgacatactgattctttgaagagaaactggaagttcactatatttaacactttggcctacaaaccaatagtcacaaaatgtaagtgcccattactttgtaggagagaaggcctctctcaccagattgttgatttttactttgaacgtaattctaacaaatgggtgtcctgttactcttggctacagcagaacagggagcgggaccatgacaggcaga

SEQ ID NO: 45170 - DNA, 538 bp, Homo sapiens
tctttgcagcttcgcggtctggtccctttctgaaccctcactgggcctttcagcttcatttcacctcacgctgcttcctgctctttcgtctctctgttggtccctcctctctgtctgtaaacatgtccaagggttggggtgaaaatacctttgactgactcttgtttcttttagctccagtcttctctttcctcttagtgtcaaatttctccaaatgattagtttatgaagcagcccctccccrttctttgtccatgacctcagctcttgatccatggccattttgtcttcagcctcccttcctccctccctgtctgcccgccacgatccctaactcctcttgcttctctcttcgtctttggtggctcctgacgccagtgtctagcctatcgtcctatctctctggcctcttgacattttcttcttgtgctttcttttccctaaacatgggcatcctcccaggtccaggcttgatctctcccctagaaaccaataatacctacttcacaggacagaagtaagaattaaatgaaataaa

SEQ ID NO: 45171 - DNA, 554 bp, Homo sapiens
taggataaacacagagggaaatttattattcatttatgtaaattttcatactactttatacaaaatttcataattatcatttatcatatttttattatagtcatttatttatgactgtcaccccttctaaactgtaaggaccttgaaagtaacacagtgtttcatttagctctgtaatcrgtgcctgcatgtgaacatatggtaatcatttaataaatatgcttgtattttttaaaaacttaaattgagaataaactggcaaaattcctaataattaagcagtatgcacatatccaatagaaacaaaatttgtaaataaatggtaatgaatgctattgaagaaaatcattaattacagttactcactgaataagatagggttttttgtttttttggtcagtgacaggcaatatacaatggtaatctcataaggttataatatggcatttctactctaccttttctataataagacatgtttggatatacaaataccattgtgttacaattgcctacagcattcaggacagtatcatgttgcacaagtttgaagc

SEQ ID NO: 45172 - DNA, 414 bp, Homo sapiens
ccaccaggcccggctaatttttgtatttttagtagagacagggtttcaccatcttggccaggctggtcttgaacttctgacctcgtgatccacgcgcctcggcctcccaaagtgctgggattacaggcatgagccaccgcgtccagcctttctaatattttctttaaaacgtcccctttttcaaaattttttcaaattcatggaaaagaggataggaattatggttaaaattagtactaactgatgacattaaccgattaataaccaattaygttcttaaaaactggaaatgatatacaccactagataaaataatcttaaatgttcattgactttatagaattctctcaacattactttttggtcacagataacttctgggttgacaaaagcttttctccagcgccatttcat

SEQ ID NO: 45173 - DNA, 550 bp, Homo sapiens
tttccttattctgaatatacttgtagttttacttctttctgtttatgtacccaattccttatgattattttgtttcttctgcaatatcaagatgttatttattttgagaaatgcttatttttatgactatttattccaatgttttaacaagaagcacagagatttatagtattcttaatagtatgtgcagaagttacatcatttaaaaaacccttgctgtaaagtaggataacttgaatattcattctaataattagactaagtgaaaatctgagaaagagttaattgcaatgtgatagtgggtagaaaggagagaaaaacccactgaagggttcaaatacatgtgaattctactgctttaagagaaataaaacaaataagcctagggaaatattagagtctaaaaaaccctagagttamtctcttttgggaacataaggaggtatacagaactgcagacctctaaacataagtaggaaaaagaaaaataaaagaatattaccaataattaaaggtgccagatcaaaatagtaataaatcaacaaataat

SEQ ID NO: 45174 - DNA, 599 bp, Homo sapiens
tgggcccagttatcaatctgaccagttgataattaatcaacaggtctaccaggcactatcataaatacaaaaagaacataaaacacagttccatcttccaagaatacacagtttatctgaagaggtaaataagaaataagagaaggtacatcatccagtactcagtgatatggactgaaattacaatgagtgataagagattggcaaaacctgagcctgtgggtatgttgaagctggggctgttttcatagtcagttttcttatactgggccttaaggacatatgggattttgctgggcagagaagagaaagaacatctgaggtgtgagaactacaggaacagaggccaagaaacaggcataagcatcactctgacaagatcaagggatcagctgctctaaacactgtaacatttacatgcagccatgtggtcttcacttarcagcatcttccttcatttatgagctcatgccttagttagtgcatatttaccttttagaaaaattgaaaactatgggttttaaagtcagaaaagccctggtctcagatcccagctcaattatttactaactgtgtgaccttgttcaagtttccgtttt

SEQ ID NO: 45175 - DNA, 588 bp, Homo sapiens
agcactttgggaggtcgaggtgggttgatcccctaaggtcaggagttcaagaccaacctgaccaatatggtgaaaccccatttctactaaaaaatacaaaaattagccggacgtggtggtgccagctactcgggaggctaaggcaggagaattgcttgaatctgggaggtggaggttgcagtgagccgagatcgcaccattgaactccagtctgggtgacaacagtggaacttcgtctcaaaaaaaaaaaaaaaaattgggttatcatttccttagtcccctcccacccagcttcaggcattagaattgtttcctgagtgactattgtatattttgtctgtgaggcagtgaaagcataaggcatggctctttcttcacagaacttgaaatctggatgaggagctaatactaacccaaatgcaaaaactgaagtaaaaataaggtttagttgttgctgaccatgagtgcaatagaagcccggggaacctagagctctgcgtgcrctagatactcagtggaaagtgggtgggcaggcagggtcaggactgcattctcatctgaacttgatatggcttgcaacgtgcatgc

SEQ ID NO: 45176 - DNA, 552 bp, Homo sapiens
taaaaattttttcattattttgtcatgctttaaggcttaggaaaggcctagggaaaactcttggtgggcttttgttgtattccagcgttcgtataaaggcactggcttttttttttagcttttactacttaaccattcaatcagtactgaaacagttgttatggaggtctgcattagtgagacctggcctgccgcacagggactttaataagagtagctggaactcagggctaaatggccctgatgtgccctgacactagtgtccctgggtagagcaaagtagacatgcatttcaatctagagtgcccttggtgtttccggttcctggtcatgggatgaaaacatagaatgagagggatccttgttttatcccatttgtagatataaacaaaaaggaagtcatttgttagtgagasctctacaaaaaaagaagcctttggcagagttcctccaggacattttaaggaagagaaacactgagtattctcaatgattcagaacccaaaaaggagacctctgttaggggaggaatatttcctggggtgtgtgtgt

SEQ ID NO: 45177 - DNA, 565 bp, Homo sapiens
tgggacacaattatttatatatatatttttccaacagcacttactgcaatgttttatgtatagtacatacttaataatagttgtcgaattaatgaatagatgaataagtgagtattttaaagaattattagaagtgaagacactaagaataaactgtttttcaaaaagaagtgaaggaaagcattgttaaaaataattttatttttttaaacaaaagaggacatctagatatgttcaaatgagctaaaaatatataaaccagtggagaggaagatactatagatacagaaaacagtgatgtacttgaaggagtcaggtgccagagaaaatgtaacagcaggataaagttcccaatcggaagagttatctttgcaaagatgtattttcggtgcttttcctctttcagaataaaaattatctgcattttgcaaataaatgcagattccagaagaaatgtcacgcataattttctctattttatttatgtgttttaagcttggaatggcttatttgttctcttacacatgccactgataattaaggactattcagcatcagtcrttga

SEQ ID NO: 45178 - DNA, 515 bp, Homo sapiens
gcagaaaaactactatagctgggagaaatttattgtacttagcagtataggatgtagtatatagtactatcaatatttttctgttttatgattttaaaatgactttaattcatataatcatggataaaagaaggggaccttttcctgtatacctcatgtctttgtcctagtaactctctttctaaatggaaactgaatatgctgattatttttaatcaraataaggcatagaaaaatatcttttataactttattatatttactttaatatacatttatatggaaattagttgcacacatgtctttttcattagatcagtttctcaagataggataagccatttaggaatcagaggagcaattaaaatttagatttcttaggttctagttcaattttgtaactaatcttctctggggacagctccctcacaaatattaaaagcatccaagatgattctcatatgcactctatttgacaatcattatgttagactggaagtcatttgggagagtgt

SEQ ID NO: 45179 - DNA, 602 bp, Homo sapiens
cacagcctagatgtatggttrttctattgactggctttcttaccaggaaattgatgggacctctggtctacttccttaggactttctattcaggaagcctaaaaccttgttaaaaggttgccatttgcagtatcattcaagatgttgattagaattaaagctcctgggctaaaagtacccttaaaagtcatctaatcaaaccctttcatttaacaaatgaaaagccaagccccagtgctctcactgggagtgtcagtggctttacttctaccgcatgataccctttaaagatgagactcagagaaacaagctgatttttacccggctccaccaggcttttatcatccatcactgggggagtagacattatatctggcaaaatgccctctgattctctgtttgcgcaaaatagtaccaaaaaaactaattaatccctgccaggcacagtggctcaaacccataatcccagcactttgggagaccaaggagggtggatcacctgaggtcagaagttcaagatcagcctggccaacatggcgagactctgtctctactaaaaatacaacaattagccaggtgtggtggtgcatgcccgtaatctc

SEQ ID NO: 45180 - DNA, 602 bp, Homo sapiens
cacagcctagatgtatggttgttctattgactggctttcttaccaggaaattgatgggacctctggtctacttccttaggactttctattcaggaagcctaaaaccttgttaaaaggttgccatttgcagtatcattcaagatgttgattagaattaaagcycctgggctaaaagtacccttaaaagtcatctaatcaaaccctttcatttaacaaatgaaaagccaagccccagtgctctcactgggagtgtcagtggctttacttctaccgcatgataccctttaaagatgagactcagagaaacaagctgatttttacccggctccaccaggcttttatcatccatcactgggggagtagacattatatctggcaaaatgccctctgattctctgtttgcgcaaaatagtaccaaaaaaactaattaatccctgccaggcacagtggctcaaacccataatcccagcactttgggagaccaaggagggtggatcacctgaggtcagaagttcaagatcagcctggccaacatggcgagactctgtctctactaaaaatacaacaattagccaggtgtggtggtgcatgcccgtaatctc

SEQ ID NO: 45181 - DNA, 602 bp, Homo sapiens
cacagcctagatgtatggttgttctattgactggctttcttaccaggaaattgatgggacctctggtctacttccttaggactttctattcaggaagcctaaaaccttgttaaaaggttgccatttgcagtatcattcaagatgttgattagaattaaagctcctgggctaaaagtacccttaaaagtcatctaatcaaaccctttcatttaacaaatgaaaagccaagccccagtgctctcactgggagtgtcagtggctttacttctaccrcatgataccctttaaagatgagactcagagaaacaagctgatttttacccggctccaccaggcttttatcatccatcactgggggagtagacattatatctggcaaaatgccctctgattctctgtttgcgcaaaatagtaccaaaaaaactaattaatccctgccaggcacagtggctcaaacccataatcccagcactttgggagaccaaggagggtggatcacctgaggtcagaagttcaagatcagcctggccaacatggcgagactctgtctctactaaaaatacaacaattagccaggtgtggtggtgcatgcccgtaatctc

SEQ ID NO: 45182 - DNA, 1671 bp, Homo sapiens
ttggacccaataaggcaaacgcaatgttttttccatatttttggaaaatgtgcattttctttacattaagtggtaccaataaaaaataatgattctcactccgtttatttctataagttagattggcttatagttttccaggacatggttttctatcaagctatatggcaaacacctgggcataaaatacactcagctatttacttccatgtgggaaaaatgggtcaccattcctttcttttgaatctagagcaaaggtcagctgaaaccagttagcatatttagtactcagtatctgccgagaatgagtgttacatcaacaatttgtggtgatggtgagcaagcccaggaagttccttacagatagggagggcaagtgctttccaattccaggctcggtgattctgcaatacatgctggtaagaacatttgactcatcctggaacgggataaagaaacacagaagaccaaataatgaagaaggactagaaaacatttttgtacgtacttcatatgtgaagctactgctctggggggagatccatccagtgaaagcacgggcctgtaaatgctaaagaagcagtggccgaggaggatgaggagatggggaactggggaagtggggaggagggatggagaagggaaacaggagagaaaagaaagagaggggagacgaaaaatggaagaacgagaagagattaaataatggttgaatatggaactcacattgttagagagtcttagaagatctccctccagggctgaggtggtcagaaaaaccaacgtcagcctggaatggcggggcgatcactaagctcaggccaggagccacagctccaccactgctgtaactcgctgtacacaagtttccagctactgatgactaccttttctcaccaatgaaatgtgacaaattccctcctcacccacctctgaggcctgttggaaggctcaaaacaagaagaatgcaaatgagctgtgatagctataaaatattccacatgtggagtgtgaaaggtggatggagtggaagatggtgaattatttcttattccttggcttaagtctcagctctttgtaagtgttcatgttcttggtggctatgtattcagactaaaataaaatcaccttcaatgctttgcccaccaacagtaggagccccagcatctctggcaatatatcagaagattcttagggtggttctatttgtcccagttccctctagctccaatttcccattcttcctgaattcttaaccctgctccagtttcatcttctgcaggtgtcggaatttctcggcccatcactggagcctgccttagtttttgcacgttccccgcagtactacggacactagccttggcaggtagagactttccatgggaatttgarggtatagggtggggttacactgcatcacaacaaccaacctaaaattaaatgccagtgactccttttttaacaccccttgcttgttaaaaactcctcactgccatctctttgcaaagagccccaacccactgccacccagattgaattcgttttccttctcttgtatcccatcaagcatcagcccctccacttctgtcactcttctccctgcccctcttgtttggttctggcctaggggaatcacatctcctggggaatttttttttagatacccatgca

SEQ ID NO: 45183 - DNA, 542 bp, Homo sapiens
cacacacacctgctcacacatgggaacacacacatgcttacacatgttaaaacacatatccactcacatacatgcacaracctgctcacatatacacatacatgctcacacaccccagctcacaccttcctgctcacacacacctgcttacatacaccctcaaacatgttcacacccactcacacatccactgacacacacctatgcccattcacacacacttatatcacacacatccctgcttacatacacattcacacatatacacttgctcacacacctgctgtcacacccccactcacacatatcactcacacatgcctgcttacagccactcacatataccatgctcacatccctgctcacacaggcacacccacacactgctgacacccactgacatcatacgtgcacagctgctcacacgcactgaaatacatgcatgtgttgacagacacacagacatgccgacacccactctcagacacaccagctctcacattcaccttctcacacacccattcacacagctactcgcacac

SEQ ID NO: 45184 - DNA, 613 bp, Homo sapiens
gggggtggtctctccattgcagagctgagatttaaatgcggaaatgtctggtgcagatgcactcaggtctcaccaccaggaatgctgcctctttgggcctgtctcccagggagttaagtcccactgttacgtgttcatgcccagggctgagagccaaggggagcctggctcatcccctttctggattttatcatctctctggtcccatgggcacctgaggctggaattttttcaamtctgatatcctccagcctggaccaggagaagcaggacaactgagaatagggacagggtaggggagctgggaagaggtggtggccgtgggcctggaggcagcagtgagactctaaaaggcttgaagtctttttccaaagagatgctgctttgcctcagggtttgcatgggacttccactggatgggcacacaggaaaactgagttctcatctcagcattgcccctttcttttactttttttttttttttttttttgagacggagtcttgctttgtcaccctgttacctaggctggagtgcaatggcatgatatcggctcactgcaacctccgcctcctgggttcaagctattcttgtgcctcagcctcctgagtagct

SEQ ID NO: 45185 - DNA, 563 bp, Homo sapiens
attacaggcatgaaccactgcaccctgactgattttgtttgttttctcacagacttctaattcacagaatctgcatctcaaaatggggtgaaaacttaaggtcaccttgcccaactagcccctctacaaaaacttcagttaattaatcagtctgcatggatattaggtgtcagggtgtttgtggaagtgacctctacagagttttgacaccacatacaaggatcagaacaaaatttcagggtgagactccaggatccaggctagaagtaagggatggatcccccaagaatggcaccaagggctgtggcctcagagcaccccactggccaaccaaaattgctttaggagagacgacttgagaggcattagacagaagcacgctgcagggagaggtttgcacatgtttgctgtgcagtcaacagtgacagtcctgtrtgcaaatcctgccccatccaggattcgctgtgagacatggaggaggcacgtaaccccactgagattgtttcctcatctgcaacctgggctaacaactgtgcctctctcaaggatgccaaagagttcaa

SEQ ID NO: 45186 - DNA, 583 bp, Homo sapiens
taacatagaacaaattttagaaatagaatgtagaaggcatagcagataagaatgtttgcacagataatgtctaagatatccccagtactaaagatcagtagaataccttggattaaaagcatcattatcatcaaatccagagaagataaaatccataaaaatatatccacacctcaatccaccacagagcaaggacaaaatcaaggttaataagaagtcttaatgctatcagaggttagaaaaagatgatctgtaaagtaacaatagttaaatggtagatttcttttctctcaaaagacactgaaagatattagagtctgatcttcaaattgctgagggaaaaacaactgtagcctaaacacttaaaattagctaaattaccattaartagagaggccaaaataaagatattttcagaactacaaaaactagtttacctgctacatgtgtttgctgaaataactacttttcacagcaagaaaacaactttaggccaggcatggtggctcatgcctgtaaacccagcactttgggaggctgagatgggtggatcacttgagtgcaggagtttgaggcccgcctg

SEQ ID NO: 45187 - DNA, 606 bp, Homo sapiens
gatccaaattgaagagaaagctcagttttcaatggataacgaggacaggaatgacgtgagaatgactatatttcaagtaggataatgtcctaaaataatgagataactgacatagttgagaactacaaaaagttgaagacacaggttgcagaggataacttgtacaccaagagaagcaagccayagcactgaattcttaaatctccatggctacattttggtgccaatgttggaatgcaggcagaaatcagagattccttcaagtgggccaattagccttcaggccccagaactgggtcttacgccgagaaaagatggacaaagaaggctactgttctattgctgcctctggacaaaatgtacctttcactctcagggaacagctgtcatcatagaatataaatatgattcatttctaactaaaaggttgctataaatgaggaccatgtaccatcttcccaacatgaaacttcctaagccataacttggtcactacagatggaattaagagtccttagggtgagaatgtaagaaattgacattcttggggtgcctgattcagttctttcagactattattcagatgcaataaccactatatcaaac

SEQ ID NO: 45188 - DNA, 606 bp, Homo sapiens
gatccaaattgaagagaaagctcagttttcaatggataacgaggacaggaatgacgtgagaatgactatatttcaagtaggataatgtcctaaaataatgagataactgacatagttgagaactacaaaaagttgaagacacaggttgcagaggataacttgtacaccaagagaagcaagccatagcactgaattcttaaatctccatggctacattttggtgccaatgttggaatgcaggcagaaatcagagattccttcaagtgggccaattagccttcaggccccagaactgggtcttacgccgagaaaagatggacaaagaaggctactgttctattgctgcctctggacaaaatstacctttcactctcagggaacagctgtcatcatagaatataaatatgattcatttctaactaaaaggttgctataaatgaggaccatgtaccatcttcccaacatgaaacttcctaagccataacttggtcactacagatggaattaagagtccttagggtgagaatgtaagaaattgacattcttggggtgcctgattcagttctttcagactattattcagatgcaataaccactatatcaaac

SEQ ID NO: 45189 - DNA, 540 bp, Homo sapiens
aaagggactttagaaaatgaaaatgtatatcttgtgcacatatgaagacaggaaatcccactgagtatgtgtgtgtatatgtgtatgtgcacacacatgtgtatctgtgagattactgacaaggtgattctagaaatgtacacagaagcataaaaaatgaagacaggtcccacactcctgaagaatgacagcatgtagggagacttgtcctaccagagatcaagacttattacaaagctatggaaattgacaatgtggtatttgcccaggaatagaaaaaaatgaacaatggaatagaatagagagctgaaaaacagactcacacaaaaatgaagagtagacataacagaactggcatagtasattggtagagaaaaattgattactcaataaatagaaataggtaattttttcaagtggaaaaaaatccttcttacacctctcataggaaaccattctaggaagatcaaagttttaaatgtaattcaatcagtggttattgagcactgtttcaaagagcaaccatgaaagacatgacta

SEQ ID NO: 45190 - DNA, 598 bp, Homo sapiens
gtgtcacatctgccaagataccagcttgccggcaccttcccaattagaggaagttaaacacttgttatcctcatctactgtgtttcggcccttactgttaccatgtttaatttgagccaatccttatcgtgttgttataccttccctcaaactaccttcttgtatttttagtttcccacagtagagaatccttaagaaagtggccttctcactccgccttaaactccccttatcttatcaaataggctttattttgctctctctttaagatgaagcctttcattagattctgatcgaagcttgtccatgtctggtaagtgtttattatggtgttcattttttttgccttgcccattcccattgcagttcgtggctcttttcttccagttgtgcctccaccttttgtgacctttttcaatattgccgtgtctctcttcagtcttaggaagtgctcccagcctctgtgccagcccaggttccacctcagggagtrtgcccctacattccttgatgcctgctacagtttttgctcagccagtttgaagatttgaggtatttttctagctggcaatatttatcctcagttttttgatgcata

SEQ ID NO: 45191 - DNA, 584 bp, Homo sapiens
gtaatgccagcactttgggaagttgaggcaagtgggtcacctgaggtcaggagttcaagaccaacctggccaacatggcaaaaccccatctctaytaaaaatacaaaaatgagccaggcatggtggcacacgcctgtaatcccagctcctcgggaggctgaggcaggagaattgcttgaacccaggatgtggaggttgcagtgagccaagatcatgccactgcactccagcctgggcaacagagtgagactctgtctcaaaaaacaaaacaaaacagaacaaaaaccctactctggaatggcaggggaatggctgctgctgagaagactgttgctaggcccacttacagagtgtccagggaatctagcagcttgatcaggtctcaaggcagtgactgtatggagtctagaagttggcagtcaaacatgtaggtggcttgtggggatggcacatcaaggcttcacagtttgatatgtggcctaagattatcttgctcctttgctgtaaatttgtacagaccacaaggttattcattgaaacactgtctgctgtaaatgcaaaattgaaaaacctaaatgctatgc

SEQ ID NO: 45192 - DNA, 548 bp, Homo sapiens
acatttcaagatttagcaaacatttcttgaatgcatatgtgcatgtatttatgtgtgtgagtgtagagtgggatgtctaaatggtgtgagcaaatggtaccagggtatacagcaaagctgcttgaagccaccaaaaccatcgagtattttcattcctcgatgaaatactgtttaatctgtgctttgaacgtgagataatcctgaaggtagagggtggggagtgtactttgtaaaggctggggcacagaattctagggagtaacatctgtaaagtcayagaggtacatatgaggatggcttgttgaggtgatacggaaacactgtgaactttcttctggggtctcccctgtaagaggctgctccctctctggtaccctgcccagcaatttcattctagctatttcagcagctttgaactctgatctgattcctaagctcattaggcctatgatgttctctacttcctctatacctccctgggctacagttaggagactgtccctgagcagattgctggatgaaggtgaggcccaccatacgtttattta

SEQ ID NO: 45193 - DNA, 548 bp, Homo sapiens
acatttcaagatttagcaaacatttcttgaatgcatatgtgcatgtatttatgtgtgtgagtgtagagtgggatgtctaaatggtgtgagcaaatggtaccagggtatacagcaaagctgcttgaagccaccaaaaccatcgagtattttcattcctcgatgaaatactgtttaatctgtgctttgaacgtgagataatcctgaaggtagagggtggggagtgtactttgtaaaggctggggcacagaattctagggagtaacatctgtaaagtcatagaggtacatatgaggatggcttgttgaggtgatacggaaacactgtgaactttcttctggggtctcccctgtaagaggctgctccctctctggtaccctgcccagcaatttcattctagctatttcagcagctttgaactctgatctgattcctaagctcattaggcctatgatgttctctacttcctctmtacctccctgggctacagttaggagactgtccctgagcagattgctggatgaaggtgaggcccaccatacgtttattta

SEQ ID NO: 45194 - DNA, 186 bp, Homo sapiens
aaacctttccaaaaaagtaaaccagtttatattgctcaaaacaataagcaagaatgcctgctctgttcctttgctgggtatttttgggaygtctgctactttttgggatgaaaatattgtatcttattccttggatttgcgcttccttctgtgagcttgcttgtgaatcctgttttctctttcatc

SEQ ID NO: 45195 - DNA, 615 bp, Homo sapiens
ttctcaggtttcctgggttcttcatcctctaaattcattcccatccacggccaataaaacgtagaatgactcctacaaatcrtatatacaggtactcagagagagagagttgaaatttgctgagtgcttactaaatttcaagttctattctgaacatttcatacatgttaagccattgaatccctattgacacagccattgagtggaagctgactcagcatggctcctgagactaaactcataaacactttgtgacatttcccccaagtgggcccctgattaggttgaagtggggaggttttatagtggcagccaaatataccacccagggaaaatactagagaaactcaacatatgcctcccatttctgtctactggaagtatcccatgcctccatttttctattgcacatcttccaaaatgtaggcccagaagcagaggccacagctatgcctagaactacagaacaactgccactggggtcaggctagtgtatgaaactgcaacaattaggccagtaaaattttaggaatgaaaagttgacactatatctgtatattaagggatacttgctttacagaaatatcagcaaatgaatcaaaaatttacaggcat

SEQ ID NO: 45196 - DNA, 582 bp, Homo sapiens
ctccagcagtccaggccaggcagtcctcctccctgcatgtcctcttatactgtttgagctctgacttttcatgctgtctgtccctccatgtggaaacttgcctttttttttttgttccagacagratctctctgttgcccaggctggactgcagtggcactgtctcatctcactgcagcctcgacttccagggctcaagtgatcctcccacctcagcctcccgagtgactgggactacaggctcatgccaacatgcctggctaatttttgtatttttcgtagagatggggtttcgccatgttgcccaggctggtcttgaactcctgggctcaagcaacctgcccaccttggcctcccaaaatgttgggactacaggcatgagccaccacacctggcctgaaaccctccttacctcattcacactgcctaccctgcatggacacactcttcatgctggctggtctccagcagcccaccctgggctacccctattcattgcatggacatttttctcatccagcttggattttgacatcccatgccaagctgctcctttgcgtatttttaaactatgtgtatttc

SEQ ID NO: 45197 - DNA, 578 bp, Homo sapiens
cacatgtaagccctgtaccagccatctggtgtggagtcccctcaggtcctttcctatgggcggactgcccagaccatagaatagccctcagcaaaggaggaagtgagctggcaggaactgcagaagggatcagtgaccccagaataaaggggctcttccatgtcaaggtacgtggggcttctgaagaacccattgagggttcacaagctgcagattttaatgtgggccagacagaagggtatgaagtcattttatagtaacaccagttagttaaaacctctctctcctcacagctactcctccctgcaacagagtcagaaaaggcggcagaggagtggagcagggaaggaggtgagaggaggcaggagctgcccctcctcctgctgagggccctggctgatccccgggctcctggagatgcctcaccatggaaagaacaggacacatttgttgattagtgtattgaaatgtactttctagtttctgaatcaagacagtgtttcgttccttaaaatgactctaaccttttgaattatctgacaatarttagaaaattcttgagcctgtcagagttttca

SEQ ID NO: 45198 - DNA, 522 bp, Homo sapiens
cttgatttttgagcttactattcatataattttaaaaacctctttttaaaaatataaataataatcactattatgctatrgaaatatattcctacagaagtgatttgctcaacatatttcttgaaacccatatgtacaaataggtgactttttctgcccatggaaatgttaaaatatgttgtttggagttattttattgtgtaagaagtaaatcataaagaagaataaaaacatttcactgaatttgtgtcctatgtgactatcgtattaattatggtaaaacaaaacaaaacataaaagtcaacagagtatttaatgaacattactatctaagtcaatttcaaataaaaatgagattttaaaaattccctttagtaagttactctatttatagtgctttgcaatacctcaattggtaagtctttcaattaattctttctaacaaggtacttaaaaacatacaaatgaattttatctttctaaattaatttttatagaaacttaaaatagacatttaagtag

SEQ ID NO: 45199 - DNA, 569 bp, Homo sapiens
aagccagcgccctggggtgtggcagcccgtccctgctgggtaacagggccagcacgtgctgagctgttgtgctgcagcctccatggtgaagatggaaggagccgggcacacagcatccctgcaaggccacaggtgttgggggtcgctgctccctgccctgtcctagcagccactcccgaggggtcaaggtcctggctggggcagagttgggcaaggaggatgcaggctcatttgctcacccagatcctgcagcccaaccctgagcccagctggaggtgtccagggcagggatgttgcggcagcctggggctctgcaccctccacccttcaccgccacattctgcctcttggcctttacctccaagagctctggggccacaccagccccccaccctgcctggctgacctgggcctgagcctcaccctgaaggytctcacactcactcattcatccaacaaatgtgtattagcacctgctgctaggtgattttccagcgatcctgggttctagcagcaaacaagacaaggtctctgccctggtaggtctgaggccagtatgctgaagggga

SEQ ID NO: 45200 - DNA, 588 bp, Homo sapiens
gtggagtctccactcaccccagctcactggcagaaagggcaggcgtgggtcttggacccacctctggctggtgtcactaggtgccagggctgtcctgcctgggtgactcttttggggcctggatgcccattcccygagtccgagtttctctgaggaagtgcttagggagagcctgtgtgagctgttggccctcagcccctccctgccaccaggtggtcgtggcttcccccagccccagagcaggacccaggtgggacctgagaggctggggtccctcaggcacacggcgctctctggatactgggtctcaccctctagccctggtgaagccaaaggcagcctccccagagccctggccgcctgcccagtcctgtgtggggtctccccccgactgtggtgcgacatttcctggaacgctgcctcctgactgctcggtctcagaagggcctgccttgacggctgttcatgtgacctctctgagtcctcagagttccctggggccctcctgtgtccttgggtcctccctgtgcacacgatcctttctgtgttgcctcccggtgccttggagagggggtggtttgccacgca

SEQ ID NO: 45201 - DNA, 588 bp, Homo sapiens
gtggagtctccactcaccccagctcactggcagaaagggcaggcgtgggtcttggacccacctctggctggtgtcactaggtgccagggctgtcctgcctgggtgactcttttggggcctggatgcccattccctgagtccgagtttctctgaggaagtgcttagggagagcctgtgtgagctgttggccctcagcccctccctgccaccaggtggtcgtggcttcccccagccccagagcaggacccaggtgggacctgagaggctggggtccctcaggcacacggcgctctctggatactgggtctcaccctctagccctggtgaagccaaaggcagcctccccagagccctggccgccygcccagtcctgtgtggggtctccccccgactgtggtgcgacatttcctggaacgctgcctcctgactgctcggtctcagaagggcctgccttgacggctgttcatgtgacctctctgagtcctcagagttccctggggccctcctgtgtccttgggtcctccctgtgcacacgatcctttctgtgttgcctcccggtgccttggagagggggtggtttgccacgca

SEQ ID NO: 45202 - DNA, 508 bp, Homo sapiens
ccccagcctcattcaagcacggacttcaaattcctgtgggaggcccttctctgcctcccaacccactgcaggtgggtcagctactctgtggcctggagacgccaaagaaatgcagagctagaggtggcaggagcacctgcaggaactgagtctgagaaggggcctctgagaaccagcagggaggccccggctccaaagagccgctcctcctcatcacagcctagccgggagaaaggccttcacatcagccccatcaacccacctgaggaatccaaactagacaacacagctgaacgccacagtggagaccagtcagcatgtacgtgtgsacacgttgcgtgtcatcgtgagcatgtatatactcacgtgagaggtcctgggaaactgcgacttcaagcaaaacggcatgattgcagggtctgctgtgcgccatttcccttaaagtcacagtttccaagaacctgtggatagcactgaggccttactgtggatgtgtgcacacacgatc

SEQ ID NO: 45203 - DNA, 1831 bp, Homo sapiens
taagaagcaatagaattaacaaatgtacccaagtgccagatttttcaggggcataaaaaaggatgctgttagtcaatcctatcaagaaaaaagaagaaaacataaatgaaataaaagtctatggggaaaacaaccgcagagacataaaatggcaaataaccacaggaaactggcactgggatacataaaagattttgagactttgaaaacatagaaaatataatttatttwaaaaaagactccaaaagagatgtaaagtctaaacaaattgattaccatagaagaaatagaaagttgtcaaagtcgactttccttaaaaaaaaaaaaaaaaagcatcaggcctagaatgttttataggaggatccaaccacaccaaaaacgaacaggtaattaaacactatttaaactgttctaaagcataaaagaaggaatatttttaacttctttttatgtaacaagcatatcattgatgccaagatccatcatagatggcatggaaagagaaaacacacaccagtgttgtttgggaacattgatgtaaaaatattaagtccctgaattaagcagcacattaggggagtaaatcattgcaacaactgagcggaatggattccagaaatgcaaggatggttgggtattagaaaaacaattagaaaagaggaagaaatcagaggtgcaaacactgggaaggaaaatcattatttacagagagatggatgattttcttggaaaatggaagagagtcaaccagaagcaattgcaaatgctaataccagaattcagtcaagtgagtgggtctagatcaatacagagaaaccatacacacagcaatccactagatgagaagcatgaaagaccccatttataagagcaacataaagagcagaaacatggttggccactgtgggtgatcaagttagggctcacagtgatttcctttagtctgttttcatgtgcaatcgccatgggtgctgtagacaagatttattatggacacgagaccctgacagtgtcgaggctggtggagaagcccacacaaagctggtgtttggcctgggggcccaggtgacctgcaggggaagctggtggctttgccatgttgctgagactaggaggcctagataagctagaggaacagcctcgttggaggggctgtggccggggaccactgtgggctggggactccacttggactgtcagagcacagaagctgactctccttccccacggctgccaagtcctgtgctcctggacctgtcactaccgtggagccaagaagacacagaaaaaagccatcacattttttgcgggtggcgatggtgggtgcctccatatagggtgagtacttggggtggaggggttccctgggccatgggactttcaacactaaaatggggagggtcgtggccacattgggatggctggtcatcctgtttataggacaggatgtagtaaagtgtagtaaagaatctgacccaaagagaagtctagtctttgtccttggttcctgggaggggatctccaggccctcgggatgtcctgcttgagaagagcatctttgtttgcctgtcatgaggggacatttgggtcacgtggtctccttttgacctctggaggggcagaaaactaaaggtcagtcacttgggcatcagtgcatcatgcccacgtgatcgtgatcaagccccagtaaaaactctggacaccaaggctccggggacatctgcttggcaatactcgacgcatctcatcacgcaccattgctgggaggaattcatgcggtccataactccactgggagaaggagattggaacttccttgcactctgcccca

SEQ ID NO: 45204 - DNA, 1831 bp, Homo sapiens
taagaagcaatagaattaacaaatgtacccaagtgccagatttttcaggggcataaaaaaggatgctgttagtcaatcctatcaagaaaaaagaagaaaacataaatgaaataaaagtctatggggaaaacaaccgcagagacataaaatggcaaataaccacaggaaactggcactgggatacataaaagattttgagactttgaaaacatagaaaatataatttattttaaaaaagactccaaaagagatgtaaagtctaaacaaattgattaccatagaagaaatagaaagttgtcaaagtcgactttccttaaaaaaaaaaaaaaaaagcatcaggcctagaatgttttataggaggatccaaccacaccaaaaacgaacaggtaattaaacactatttaaactgttctaaagcataaaagaaggaatatttttaacttctttttatgtaacaagcatatcattgatgccaagatccatcatagatggcatggaaagagaaaacacacaccagtgttgtttgggaacattgatgtaaaaatattaagtccctgaattaagcagcacattaggggagtaaatcattgcaacaactgagcggaatggattccagaaatgcaaggatggttgggtattagaaaaacaattagaaaagaggaagaaatcagaggtgcaaacactgggaaggaaaatcattatttacagagagatggatgattttcttggaaaatggaagagagtcaaccagaagcaattgcaaatgctaataccagaattcagtcaagtgagtgggtctagatcaatacagagaaaccatacacacagcaatccactagatgagaagcatgaaagaccccatttataagagcaacataaagagcagaaacatggttggccactgtgggtgatcaagttagggctcacagtgatttcctttagtctgttttcatgtgcaatcgccatgggtgctgtagacaagatttattatggacacgagaccctgacagtgtcgaggctggtggagaagcccacacaaagctggtgtttggcctgggggcccaggtgacctgcaggggaagctggtggctttgccatgttgctgagactaggaggcctagataagctagaggaacagcctcgttggaggggctgtggccggggaccactgtgggctggggactccacttggactgtcagagcacagaagctgactctccttccccacggctgccaagtcctgtgctcctggacctgtcactaccgtggagccaagaagacacagaaaaaagccatcacattttttgcgggtggcgatggtgggtgcctccatatagggtgagtacttggggtggaggggttccctgggccatgggactttcaacactaaaatggggagggtcgtggccacattgggatggctggtcatcctgtttataggacaggatgtagtaaagtgtagtaaagaatctgacccaaagagaagtctagtctttgtccttggttcctgggaggggatctccaggccctcgggatgtcctgcttgagaagagcatctttgtttgcctgtcatgaggggamatttgggtcacgtggtctccttttgacctctggaggggcagaaaactaaaggtcagtcacttgggcatcagtgcatcatgcccacgtgatcgtgatcaagccccagtaaaaactctggacaccaaggctccggggacatctgcttggcaatactcgacgcatctcatcacgcaccattgctgggaggaattcatgcggtccataactccactgggagaaggagattggaacttccttgcactctgcccca

SEQ ID NO: 45205 - DNA, 1831 bp, Homo sapiens
taagaagcaatagaattaacaaatgtacccaagtgccagatttttcaggggcataaaaaaggatgctgttagtcaatcctatcaagaaaaaagaagaaaacataaatgaaataaaagtctatggggaaaacaaccgcagagacataaaatggcaaataaccacaggaaactggcactgggatacataaaagattttgagactttgaaaacatagaaaatataatttattttaaaaaagactccaaaagagatgtaaagtctaaacaaattgattaccatagaagaaatagaaagttgtcaaagtcgactttccttaaaaaaaaaaaaaaaaagcatcaggcctagaatgttttataggaggatccaaccacaccaaaaacgaacaggtaattaaacactatttaaactgttctaaagcataaaagaaggaatatttttaacttctttttatgtaacaagcatatcattgatgccaagatccatcatagatggcatggaaagagaaaacacacaccagtgttgtttgggaacattgatgtaaaaatattaagtccctgaattaagcagcacattaggggagtaaatcattgcaacaactgagcggaatggattccagaaatgcaaggatggttgggtattagaaaaacaattagaaaagaggaagaaatcagaggtgcaaacactgggaaggaaaatcattatttacagagagatggatgattttcttggaaaatggaagagagtcaaccagaagcaattgcaaatgctaataccagaattcagtcaagtgagtgggtctagatcaatacagagaaaccatacacacagcaatccactagatgagaagcatgaaagaccccatttataagagcaacataaagagcagaaacatggttggccactgtgggtgatcaagttagggctcacagtgatttcctttagtctgttttcatgtgcaatcgccatgggtgctgtagacaagatttattatggacacgagaccctgacagtgtcgaggctggtggagaagcccacacaaagctggtgtttggcctgggggcccaggtgacctgcaggggaagctggtggctttgccatgttgctgagactaggaggcctagataagctagaggaacagcctcgttggaggggctgtggccggggaccactgtgggctggggactccacttggactgtcagagcacagaagctgactctccttccccacggctgccaagtcctgtgctcctggacctgtcactaccgtggagccaagaagacacagaaaaaagccatcacattttttgcgggtggcgatggtgggtgcctccatatagggtgagtacttggggtggaggggttccctgggccatgggactttcaacactaaaatggggagggtcgtggccacattgggatggctggtcatcctgtttataggacaggatgtagtaaagtgtagtaaagaatctgacccaaagagaagtctagtctttgtccttggttcctgggaggggatctccaggccctcgggatgtcctgcttgagaagagcatctttgtttgcctgtcatgaggggacatttgggtcacgtggtctccttttgacctctggaggggcagaaaactaaaggtcagtcacttgggcatcagtgcatcatgcccacgtgatcrtgatcaagccccagtaaaaactctggacaccaaggctccggggacatctgcttggcaatactcgacgcatctcatcacgcaccattgctgggaggaattcatgcggtccataactccactgggagaaggagattggaacttccttgcactctgcccca

SEQ ID NO: 45206 - DNA, 624 bp, Homo sapiens
tggatgctattattatccattttacagatgaggacagtaggcacagatgggttaaagacctgcccaagagtacacagatggtgaatgatgaagccagaatttgaacccaggcagtctttctggagctgcatgtacagcctttactaattccaagcaacaacgttttgaatctatgaattctgtggttagattttgtggtttgcttttttccccatgccttgcatgcagtgcttgagtcacgtttcctctttgatgcctttgaaaagtgactctttggtttggaaaccagttaaaattcttgccctaagaaatggtatatttcaaaacatgagtaaacatagtatgagctgaggatcagtgctttaattgcaaccaattcaattcaacaaagtgtttgttgagtaastactatatgccaagctctgtattgtgtactggggatacaatagagacgctatccttgcctcataggaccaagccaccattactgaggggtttatggtattttcctcaggtgtgttagtgaggaaaaaaatcaggaccatggtgttttctatctatactaagctactaaggaggaacttagaaattaaaactcagaatttaataatgtttatttactcg

SEQ ID NO: 45207 - DNA, 643 bp, Homo sapiens
ctttggaaagtgtgatgggttttattagatttatgtattcagttgaaatcatcttcgacaagctgtttctggagtatgaagtctatatgacaaaaccgtcattaaaataacaaactggagtagttaataatagttaaactagtctctatgcaagtttttatctgccagatttaaaatattcaacacagagaaaaggtgattaaataatggttacctttagaagatagtagttggcactgggaaggggcacaaaaaaaaataagtctggagcgctaacagtattttatgttttcatgagggtagtgatgacagaagtgtatctactttatagaaattcatccgtcacctaaaatttgtgcaccttagtgtrtgcatttcatgtcaaaaatatttgataaaagatttcaactcttagaaggatataatatgtcatagcaggccaaacattctctaacaacaagaaaaataacactttagtattttagttttaaaaacatcagaatcttaacaaacagtcgagaattaacaaattaaaatttcagagcagagaacctttgttaggtgaactggtaatctctagcagaacccttccttgccttcctcttctcccttctgccccaccccaacaatttcccatagcctc

SEQ ID NO: 45208 - DNA, 643 bp, Homo sapiens
ctttggaaagtgtgatgggttttattagatttatgtattcagttgaaatcatcttcgacaagctgtttctggagtatgaagtctatatgacaaaaccgtcattaaaataacaaactggagtagttaataatagttaaactagtctctatgcaagtttttatctgccagatttaaaatattcaacacagagaaaaggtgattaaataatggttacctttagaagatagtagttggcactgggaaggggcacaaaaaaaaataagtctggagcgctaacagtattttatgttttcatgagggtagtgatgacagaagtgtatctactttatagaaattcatccgtcacctaaaatttgtgcaccttagtgtatgcatttcatgtcaaaaatatttgataaaagatttcaactcttagaaggatataatatgtcatagcaggccaaacattctctaacaacaagaaaaataacactttagtattttagttttaaaaacatcagaatcttaacaaacagtcgagaattaacaaattaaaatttcagagcagagaacctttgttaggtgaactgrtaatctctagcagaacccttccttgccttcctcttctcccttctgccccaccccaacaatttcccatagcctc

SEQ ID NO: 45209 - DNA, 570 bp, Homo sapiens
ctcagaggaacaaacagagagtctttctaggtgctttaactttcatttcaacccagtttcacaagatctcactgaacttctgtttcatatcataccctgagcttggagctagggatatcatcctgattgtatcagttgcatctattgctatgtaatgactacctcaaacttattggtatcaaacaaccgccattttactgtgctcataaattctgtgggtcaataattcagatagagccccgcagggatggcttgtatctctttgatatcyggacctcagtggggaaaacttcaagtgctgagggcacttttaaagctgggaaatggaatcaactgaaggtttctttccacatatgtcaggctcctgggttgatattcctccaaggctggactcagctggggctatcaactagagcactccatgtgcctctccacatgttcttggctttttacagtgtggaagctgggttctgagaagcagtggcccgagctgaagcatccagacaatgagtgttcagaagctgccagacttctcacctagccttagaagtaacacagccacattctgtc

SEQ ID NO: 45210 - DNA, 573 bp, Homo sapiens
tctttcaagagcaaagaggtcaaagatgaagctaatttcttaagaacaataaagattttgaacagcctctgtggagtggtgttataaagatccatcaatatagcaatagagaagtgataatctgtaacaaaggatcagtttgtaggaactcactctgcacaattaggacttctccaagcaatagtcaactgatatacagcaggtaagtagggcaattgagcattgaacaatcaagatagaaacaacataaaatcaagagtatgaagagcctgtaaatagttgcaagggaaatgttgaaactaccttaatgttatactataattattaatgttcatgaataaaaaaattgaatatcttttctcttaaaataactttggtgtaggaagaacatacaaatgatatgtagttttaagtgaagkggttctttatttaaataacaagaagtatgatgtctatgctaagaatattatgattctttatttaaataaagcatgatgggtagagaaacaaaagaacacccacaaaaaatcctgaagctttattgaatttttctcctaaagcttacagaggaca

SEQ ID NO: 45211 - DNA, 535 bp, Homo sapiens
aggtcaaacccaagcctagtgtctcccataatgcttccttgactattcctgtctctaaattcctttagcatctagatcattctatgatgttggctctgaaataaaagtgattacttttattttaggaggtcttagggcatgtcagatattgtactgggtgtgttgggtacatttgcttatttaattctatctaattttgtacaactcattgaggtaagaataagtgatcatttctattatacagatgaggaaattaagcctcrtaaaagttaggcaacttgaccaggattccattgtcaagttgctacaggatagttgtacgaataaataaaatggcctagctaaaattgctgtaagagatggatggctttattttcttgttacagtgtgaggtcctttgtgtgtggaccagcagcttacattacgcaagcagtgcctcaataaatctttgttgactggactgtctcccaatcccctgatgccaaaaatgagactcaccagttatctgcagtaaaagatgaaaagacccatccgg

SEQ ID NO: 45212 - DNA, 550 bp, Homo sapiens
atcacgaggtcaggagatggagaccatcctggctaacacagtgaaaccccgtctctactaaaaacacaaaaaattagccgggcgtggtgrcgggcgcctgtagtcccagctactcgggaggctgaggcaggagaatgacattaacccgggaggcggagcttgcagtgagccgagatcacaccactgcactccagcctgggtgacagagtgagactccatctcaaaaaaaaaaaaaaaaagaaaaagaaaaagaaagtgagttaagtgaaatatcacctgcaaggccacagggagtgtcctaaaataatgatgattacacattatttggtgactcagtgcagctgttctgagttcggtcaagtacatttacgttctggaatagggtggctgaggtcacgggcgtgataaattcacaaaaggtagcttgggttctttgtgctaaaagtttctctggccaggaaactgattcaccaaaagtcaaaataaatgtgcatagcattatttagcattcagagctaaaagtggacgtagaaatcattttctttagcca

SEQ ID NO: 45213 - DNA, 550 bp, Homo sapiens
atcacgaggtcaggagatggagaccatcctggctaacacagtgaaaccccgtctctactaaaaacacaaaaaattagccgggcgtggtgacgggcgcctgtagtcccagctactcgggaggctgaggcaggagaatgacattaacccgggaggcggagcttgcagtgagccgagatcacaccactgcactccagcctgggtgacagagtgagamtccatctcaaaaaaaaaaaaaaaaagaaaaagaaaaagaaagtgagttaagtgaaatatcacctgcaaggccacagggagtgtcctaaaataatgatgattacacattatttggtgactcagtgcagctgttctgagttcggtcaagtacatttacgttctggaatagggtggctgaggtcacgggcgtgataaattcacaaaaggtagcttgggttctttgtgctaaaagtttctctggccaggaaactgattcaccaaaagtcaaaataaatgtgcatagcattatttagcattcagagctaaaagtggacgtagaaatcattttctttagcca

SEQ ID NO: 45214 - DNA, 1752 bp, Homo sapiens
gatgccttttcataaagactcacatgccaagggtttacattgtgtacaggtgtgcatacaggtgtgtgtgcaggtgtgtgcactctggtgtgaacagagctcagtgaagagataaatctctacccagggctctgtgtcccacgtgtctgctgcagagtgattgccctgaattcgactgcattcgtgcccactcatgytgtgcctctgcagagtggctggacaggttccagcgagggtggattaactggggagaggcatcctcccctctgatgccttcatctcagtttctcagggaagaaaaaaaaactgactcaaatcaccccagaaagaaaaataattacatattctataattgtttatctttacttggcagaatctctccacctacttctcaagtatttcttactctacttatctattatcctccaaatccccttatcaaaagggcaaaaagataagagaatgttctatcttttggacagagatatcttgccaagaaatcaagctctttaaaactacctatcaaaaggcaaaacctaagacatccgtttcagggaaagatggagtcacagggactggatttactctctttgcttaaataactagaaaaccagacaaaaatataagattttcagacagttggctttgcaggaccacactccctaagcgaaggaaacaaaaagagaaccgaggattgcccatcggccacctggaggaggttccaggccaaagggcagggagggaacacccaaacagaccccagacatcttggtgagcagcaaaggcagaagacagagggtcagggaggtgatgggagcagaaattttcagggcagaatagcagggaggaggcagctgtctcaggagcaggctctgcagagctgtttgtggatctgcacatccacgagaaataaccacgcccaggaaaggccagccaccatgaagaagcgggcaggtgggttctcaaagcacacatggggcttggaatagctcgtgttcctaccaaagtgggaagtctgcatgacacacacacagggcatcgttactgcccccatagtctggaaggcccagccaagtgcctgcctgtggtgctggcttcgttggccagatgctgtgcttagaagcctctgctccagacccagcccacggagcaaaggtgagatagtagcccaaagacagtagcctgtgtaggctgtccagggagccatgaggtgtcccagccctaaagctccaccctgcaggggcacttgataccccatggaaactggccacattatgacatcttctccctttgcatctcaaccatcaaacgatggtttttctaagttaactttgctccttctgagctttcctgcacaagttcagaatgtgaagccacagctgctggtgccccagctccagaagaagaatatggaaagagttgagtgtgccagttttggatcagtgtcactacacacttcaaacagaaaatcaacttaattccaatagtggtttatttttcattcaactcacggaataaaatgaatgtttttagaacttggttcagttgaagatgtaagtacctgatatgactgtgaatgatatagtaagttcagttaagacatacggtaaattcagtgaagaccaaactgtatgtttttgtagggatcttaggaagccacatttaagtggagccctgtgctgtggtttaataatatttttaccaaattaaaaaacctacagaaaagaaacatacttggagttggttgtgata

SEQ ID NO: 45215 - DNA, 597 bp, Homo sapiens
tgcctcttataaaatgccaatgcaataccttgtgttttattcatgaagagcactgcccagagcatcttttctgtttttaagtgaaaatctttctcctattatttgagtccaaatgaatctcctatgtatagagggatacaagctttctacttctagaaccacaaaattttctttttttttgagacagagtctcactctgtggcccaggctggagtgcagtggcgcgatctcggctcctgcaagctctgcctcgcgggttcacgccattctcctgcctcagcctcccgagtagctgggactacaggtgcccaccaccacgcctggctcattttttttatatttttagtagagacggggtttcgccatgttagccaggatggtctcgatctcctgacctcgtgatctgtcctccttggcctcccaaagtgctaggattacaggcatgaaccaccgygcccggcctagaaccaaataattttctaaaagtttcattgcttaatatttcaccacgacaccacttagcattactaatgaccttagacttcacttttgagactccaatgttgattgctattgaccttgtctcttagagaagca

SEQ ID NO: 45216 - DNA, 597 bp, Homo sapiens
tgcctcttataaaatgccaatgcaataccttgtgttttattcatgaagagcactgcccagagcatcttttctgtttttaagtgaaaatctttctcctattatttgagtccaaatgaatctcctatgtatagagggatacaagctttctacttctagaaccacaaaattttctttttttttgagacagagtctcactctgtggcccaggctggagtgcagtggcgcgatctcggctcctgcaagctctgcctcgcgggttcacgccattctcctgcctcagcctcccgagtagctgggactacaggtgcccaccaccacgcctggctcattttttttatatttttagtagagacggggtttcgccatgttagccaggatggtctcgatctcctgacctcgtgatctgtcctccttggcctcccaaagtgctaggattacaggcatgaaccaccgcgcccggcctagaaccaaatamttttctaaaagtttcattgcttaatatttcaccacgacaccacttagcattactaatgaccttagacttcacttttgagactccaatgttgattgctattgaccttgtctcttagagaagca

SEQ ID NO: 45217 - DNA, 481 bp, Homo sapiens
ctatctayctatctatctgtctatctatctatctatctatctatctatcatctatctatccatctatctatcatctatgtatctgtctagctatatatgcatatttctctatatctatatgtctagctaatgcttaaaagtataaaactgtgtgttattacttaggaaaagagtagactatgaaagagggacaaaaatactaatctatgggagcatttccataattagaagttgggagatgatatagaatcagtaaaggaaactgacagaaaatggtcagaaaatagaaggaaactcgaagaagatagagtgattaaccatgtaaattactattattatgcaaagtaaagtggacctttagaaataacctttcactgaaaccccgtctgtactaaaaatacaagaaaattagatgggcgtggtggcgggcacctgtaatcccagctactcaggaggctgaggtgggagaatcccttgaacc

SEQ ID NO: 45218 - DNA, 481 bp, Homo sapiens
ctatctacctrtctatctgtctatctatctatctatctatctatctatcatctatctatccatctatctatcatctatgtatctgtctagctatatatgcatatttctctatatctatatgtctagctaatgcttaaaagtataaaactgtgtgttattacttaggaaaagagtagactatgaaagagggacaaaaatactaatctatgggagcatttccataattagaagttgggagatgatatagaatcagtaaaggaaactgacagaaaatggtcagaaaatagaaggaaactcgaagaagatagagtgattaaccatgtaaattactattattatgcaaagtaaagtggacctttagaaataacctttcactgaaaccccgtctgtactaaaaatacaagaaaattagatgggcgtggtggcgggcacctgtaatcccagctactcaggaggctgaggtgggagaatcccttgaacc

SEQ ID NO: 45219 - DNA, 481 bp, Homo sapiens
ctatctacctatctatctrtctatctatctatctatctatctatctatcatctatctatccatctatctatcatctatgtatctgtctagctatatatgcatatttctctatatctatatgtctagctaatgcttaaaagtataaaactgtgtgttattacttaggaaaagagtagactatgaaagagggacaaaaatactaatctatgggagcatttccataattagaagttgggagatgatatagaatcagtaaaggaaactgacagaaaatggtcagaaaatagaaggaaactcgaagaagatagagtgattaaccatgtaaattactattattatgcaaagtaaagtggacctttagaaataacctttcactgaaaccccgtctgtactaaaaatacaagaaaattagatgggcgtggtggcgggcacctgtaatcccagctactcaggaggctgaggtgggagaatcccttgaacc

SEQ ID NO: 45220 - DNA, 570 bp, Homo sapiens
tgcaaatgcaataagcctttctggtactgataacaaactttactggaaacagtctgaacatcataaacatacttcacaaagaaacctacracactttctcataaatcaataccaggtccaacataaggaggcaagaacaaggacacttggaaccagaaaagttgccagtaactgctgggttcctggaatatggtctctgggtggggctcctgctatggtcgaaatgtttgtgttctccacaactagaattgtgttctccacaattcattcaagtaaaactagagcaaagctaagctggtctgcacatctgctgggtccagctacgtcctgagggtgtcacagctttggagttgtcctggcccttcaactcctgataccctctgaacccacctggtaaggcaggggaatgaaggcacaggatcccgaccatcccaccatcccaagagcatttagcttggttaggcaccccaggggaagccgctctccatttgattcaggaatagcatgtgtgtgtggttttcttttgttttgttttttaaagacagggtctcactctgttggccaggctgg

SEQ ID NO: 45221 - DNA, 493 bp, Homo sapiens
ctgtcatcatcactgaattgccattagaaaatgccctgtgtataaatataatgctgttttatgccaaaaccgttggtgaaaagtcatgcaatgtaaaatatatacagtaattgtcttgggaatcattagccaggggtcaaagaacatcaatactcatgaaaagtgcttagcatgttgacccacctatgcctttttgctgctaaaaaccatccctacmcatggaattgtatggttcccagtaataatacctcattcatgcttttatttatttatttaatgttgcttaaatattcattcttttccaagtaggaatagaacagaaggcaggaaaaaaaaaatgaagcacttctcttgtacaggttgtgaaacatgcaacaacagccccatggtaatgaacatgaaaaattatgctttatcagagtttgggtcagagcaatgcccaaacaagtgtgaggatatgtaacttaggctatattcaagttacacctaaggg

SEQ ID NO: 45222 - DNA, 500 bp, Homo sapiens
cccaatggtaagaggctagcttgatggtcaaacaggctggttttcacatctcagctctaccatcacataccatatgactttggacaaattacttaagcctctctgtatctcagtttcctcatatgtaaaatggaaataatattagcagaacagttgtaagaattaaatgagatgatgtatgtaaatcgcttagcatggttcctgaaacgtaagtgctcaataaatggaaaatatggaggtgagtggttgcctcagacctcacaccagattctgagcactgccacagtattttgtatgaaaggactctatctgcataagattccaggattttggagttgttattgactgtaaagatcaccaagtaaaatcttccattttagaaatcttttctaggatttcttaaatcctccatgtcaagcactagayaggtaaatgaattggttcagtttgcctgtcttgttaatgagaaagccacagtcttttaaataaaattctcttct

SEQ ID NO: 45223 - DNA, 1620 bp, Homo sapiens
gtatcttgcagctgtgagaatgaacaaaaggaacacacacacacacacacacacacaaacacacacaccacacacacacacacacacgcacacccttcacaaagctccttcttcccctttggtcttggcatttgcaatccatctctctggttcttggcttgaggctttcctatagattagcttggattccacttactcccttcagatggtttcaggcagcttgtgccccagcccagccctatttgccagctcaggaagcaggtgtggggggggaataatatatatatatataatatatatatacacacactatatatatacatacatatatatacactatatatatacacaatgtatatatacaatacacacacaatgtatatatacaatacacacacaatgtatatatacaatacacgcacaatgtatatatacaatacatgcacaatgtatatatacaatacacgcacaatgtatatatacaatatgcacaatgtatatatacaatatatacatatatagtatacatgtatatacactatatatacacaatgtatatatacactatatatatacacaatgtgtatatatacacaaatatatatatatttgggggactgtttatgtgtgtgtgtatatatatatatatatatgtatatatatggagggaacaaaaccccaaactatttcaattgcatatcaaaacttttggatatgtctaaagctctactcagaggaagagtcatagtctcaaacacattgttagacaagataagtaactaatagctggcaccaaaggcaaactctgaaatcacagtggcttaacatattaaaggttatttcttgttcagtgtccatgcctgtttccaacagtcattaagaatgtaggctgatggagtagctatgccatctggaattcatggcctataaggcggtggtaaaaatggacgaaagaggagggagaaaacatactggctcttaaccctctcagttcagacaaaacacacatcacttctgctcacaacaaatgggccagagcaactcacatggccgaaaccaaatttcaagggaccctgtgatatgacagagagtagcatgtgtgtatccagtgctccctagcttagctacacattaaacattagacaagaaacaattacaataattaaattgattcatgcatccaactaaacaagaaaaaatacaaaatcatcccaagaaaagtagtaagaagaaattaataataaaaatataatttaattcattaagaacaatttattaactacccaattgatgaaaaggctaaaataaagtagataaattactatatgttaagtatcccttatatgaaatgcttgggaccagaggtgttttggacttcagactttttcagattttggaatatgtgcatatacataatgagatctctttgggatgtgacccaagkctaaacatgaaattcatttatgtttcatatagaccttacacacatagcctggaagtagttttacacaatattttaaataattttgtgtataaaacaagtttgtgtacactgagccgtcagaaagcgaaggtgtcactgtctcagccaccatgtggacaatttgtggttgtttggca

SEQ ID NO: 45224 - DNA, 1620 bp, Homo sapiens
gtatcttgcagctgtgagaatgaacaaaaggaacacacacacacacacacacacacaaacacacacaccacacacacacacacacacgcacacccttcacaaagctccttcttcccctttggtcttggcatttgcaatccatctctctggttcttggcttgaggctttcctatagattagcttggattccacttactcccttcagatggtttcaggcagcttgtgccccagcccagccctatttgccagctcaggaagcaggtgtggggggggaataatatatatatatataatatatatatacacacactatatatatacatacatatatatacactatatatatacacaatgtatatatacaatacacacacaatgtatatatacaatacacacacaatgtatatatacaatacacgcacaatgtatatatacaatacatgcacaatgtatatatacaatacacgcacaatgtatatatacaatatgcacaatgtatatatacaatatatacatatatagtatacatgtatatacactatatatacacaatgtatatatacactatatatatacacaatgtgtatatatacacaaatatatatatatttgggggactgtttatgtgtgtgtgtatatatatatatatatatgtatatatatggagggaacaaaaccccaaactatttcaattgcatatcaaaacttttggatatgtctaaagctctactcagaggaagagtcatagtctcaaacacattgttagacaagataagtaactaatagctggcaccaaaggcaaactctgaaatcacagtggcttaacatattaaaggttatttcttgttcagtgtccatgcctgtttccaacagtcattaagaatgtaggctgatggagtagctatgccatctggaattcatggcctataaggcggtggtaaaaatggacgaaagaggagggagaaaacatactggctcttaaccctctcagttcagacaaaacacacatcacttctgctcacaacaaatgggccagagcaactcacatggccgaaaccaaatttcaagggaccctgtgatatgacagagagtagcatgtgtgtatccagtgctccctagcttagctacacattaaacattagacaagaaacaattacaataattaaattgattcatgcatccaactaaacaagaaaaaatacaaaatcatcccaagaaaagtagtaagaagaaattaataataaaaatataatttaattcattaagaacaatttattaactacccaattgatgaaaaggctaaaataaagtagataaattactatatgttaagtatcccttatatgaaatgcttgggaccagaggtgttttggacttcagactttttcagattttggaatatgtgcatatacataatgagatctctttgggatgtgacccaagtctaaacatgaaattcatttatgtttcatatagaccttacacacatagcctggaagtagttttacacaatattttaaataattttgtgtataaaacaagtttgtgtacactgagccrtcagaaagcgaaggtgtcactgtctcagccaccatgtggacaatttgtggttgtttggca

SEQ ID NO: 45225 - DNA, 561 bp, Homo sapiens
gctccccttgcctataggcacaaagttgaccttgttcttacccaaactgctttgcctgtgaagccttcttctctagtatttcttatgaccaaagtctcctatttttgagatactcacacttccttatccctgcttctactgttcttgtccttattgtggcagctcctcaagtcttcctttttctagaactccttcagacttctcctggctttagttcctctctatccttccactgatccwttacatctacctctgtcttgtcaacacactcagttccattgacctctgttttcctcactgccattgtcagtgatttcctaatctggcatcaatccaagtaccatctttcctgtccctgcacacagggagctgagttgtcctgggccaattacccaaacacaagaaagagaatcctacaaattatggtctcctttcttccaggtcctccatagttcccacccatctctctgtcagtacccagcatatctgtctcctgctttccacagaagctatttcagaatttatttcctctcctctaacctcctgctgcaccaccagcca

SEQ ID NO: 45226 - DNA, 576 bp, Homo sapiens
cttttaaggtgccataaacaagctttagtgtgtgcaatctttgtctctttcgagtttgtggaattgctatagtgaataaggggagttaagatcagtaatatggtgccaaatagtttatataaataatctgtattttttaaatcattaattagatgagcaagcatgtttggtgatgcagacagcctttatccaygggtctttttatgatctctcttttatttgatgtgacaaaatggcaggtcagatatagaaaggggttgatgccgtttctaaattattctttaggcatcggactccagatattttagagtagatggttgtctaagactaactggatgaaagaggctggtggctgcttttaaaaaatgcatggctttttgatgaattgaaagggactcaagctgttgtcttttaaagatgcaagctaaggattctagtctgttgaggtgttacccacacaacaggtgggttaaactgctaggcaggagacagtccaatgagcacaaccatggagtatttaagagggagattttattatttgcaacaaggaaggaggacatctgggatagtttccca

SEQ ID NO: 45227 - DNA, 576 bp, Homo sapiens
cttttaaggtgccataaacaagctttagtgtgtgcaatctttgtctctttcgagtttgtggaattgctatagtgaataaggggagttaagatcagtaatatggtgccaaatagtttatataaataatctgtattttttaaatcattaattagatgagcaagcatgtttggtgatgcagacagcctttatccacgggtctttttatgatctctcttttatttgatgtgacaaaatggcaggtcagatatagaaaggggttgatgccgtttctaaattattctttaggcatcggactccagatattttagagtagatggttgtctaagactaactggaygaaagaggctggtggctgcttttaaaaaatgcatggctttttgatgaattgaaagggactcaagctgttgtcttttaaagatgcaagctaaggattctagtctgttgaggtgttacccacacaacaggtgggttaaactgctaggcaggagacagtccaatgagcacaaccatggagtatttaagagggagattttattatttgcaacaaggaaggaggacatctgggatagtttccca

SEQ ID NO: 45228 - DNA, 1835 bp, Homo sapiens
cattaaatcaggtgtcaggaaatttcatggtcatacctacaataatttttatttttgaattggactattattagattgtttctaatactggattacagtttaattatacttactgctctttaatgcttcataaaatactttttcccaaaaaaaaaacatggcaaaaaataggtttagtttcttatttctattttatttttcagatttcattttgtttttgtrgttacaatattatatgtgacctatacaggggaacattctaatggggaacaaagtgatcatcatattcttagctattatactttggaagtctgaatggtcttcaaaatgaatttggtatactttcttaacctgtgaattaaatgatagcttcaacttactttaaaggtaatgagtaatgctttgctaagactattttaaacacatagaatataataaaatttgaaattgtatgttcaaaaaagccatatattcaattgtttagtgatgtagccacttcccatccaaacgaacactgtagtgttgatgttattggcttggtatcccttcttttctttcgtacctagtctgtttcctccttcatacctccaaccgtcatctttatgaaggacactcttttctgcatttgagtaaaggaagggcaatgaaaatactcatatatatttggccacctaaagaacaaagtctaatttgaaaaatcaaggataaaagccattacttgttaaacaggctaggttccatattatatacattgtgatgataatccccctaattaggaaagaaaaacctgtaacccgaggagatgaagcagcttgcccaagtacagtgactgctgaaattgcagcacaaaactgcctatctatggctgtctttaaagcccatgctctttccctccctctcaaatgactgaaataaatagctaatgagaagatgcaaccaaggtacaaacattccatgaatttatttatctagagcagattacaaccatttgggggagagagcaaatatacatcctcagtaagggcactgatatttcgcccagaaatgacatatcttctggtttgttgttatattagtctgtttgcacactgctataaagaactacccgaaactgggtaatttataaagagaagaggtttaattgactcacagttccacaggctgtacagaaagcatggctgaggaagcctcaggaaacttacagtcatggcagaatggcaaggggaagcaagcatctcttaatatggtgacagaagagagagggaccaaagggggatgtgctacacactttccaacaaccagatctcctgagaaatcattatcacgagaatgacaagggagaaatctgaccccataatccaatcatctcccaccagcctcctcccccagcattgaggattacaactcaacatgagatttgggtggggacacaaaaccaaacagtatcagtggtgtatcagctctttcaaataggatagtgacacgtgcatccacatttgttttttatctgacatgataatatatgaaagtaggtatagagcttattgattaagtccaacaacttaatatcaagatataaaataaaattcattctttgaatataaatgagacagtcatttgtttgtttgcttgtttcagttacattaaactactggtgaatttgaagctgtgatttcatgagcttttggaagaacgggtcctgtaacattgcaaaaaaaaatcatttgaatggaatgtatcaatatgaatatttggtaaatttgcttaataaatatatatatagaagaccttcagatgcacagttataaaattatgattttctgatgagaagaaat

SEQ ID NO: 45229 - DNA, 1835 bp, Homo sapiens
cattaaatcaggtgtcaggaaatttcatggtcatacctacaataatttttatttttgaattggactattattagattgtttctaatactggattacagtttaattatacttactgctctttaatgcttcataaaatactttttcccaaaaaaaaaacatggcaaaaaataggtttagtttcttatttctattttatttttcagatttcattttgtttttgtagttacaatattatatgtgacctatacaggggaacattctaatggggaacaaagtgatcatcatattcttagctmttatactttggaagtctgaatggtcttcaaaatgaatttggtatactttcttaacctgtgaattaaatgatagcttcaacttactttaaaggtaatgagtaatgctttgctaagactattttaaacacatagaatataataaaatttgaaattgtatgttcaaaaaagccatatattcaattgtttagtgatgtagccacttcccatccaaacgaacactgtagtgttgatgttattggcttggtatcccttcttttctttcgtacctagtctgtttcctccttcatacctccaaccgtcatctttatgaaggacactcttttctgcatttgagtaaaggaagggcaatgaaaatactcatatatatttggccacctaaagaacaaagtctaatttgaaaaatcaaggataaaagccattacttgttaaacaggctaggttccatattatatacattgtgatgataatccccctaattaggaaagaaaaacctgtaacccgaggagatgaagcagcttgcccaagtacagtgactgctgaaattgcagcacaaaactgcctatctatggctgtctttaaagcccatgctctttccctccctctcaaatgactgaaataaatagctaatgagaagatgcaaccaaggtacaaacattccatgaatttatttatctagagcagattacaaccatttgggggagagagcaaatatacatcctcagtaagggcactgatatttcgcccagaaatgacatatcttctggtttgttgttatattagtctgtttgcacactgctataaagaactacccgaaactgggtaatttataaagagaagaggtttaattgactcacagttccacaggctgtacagaaagcatggctgaggaagcctcaggaaacttacagtcatggcagaatggcaaggggaagcaagcatctcttaatatggtgacagaagagagagggaccaaagggggatgtgctacacactttccaacaaccagatctcctgagaaatcattatcacgagaatgacaagggagaaatctgaccccataatccaatcatctcccaccagcctcctcccccagcattgaggattacaactcaacatgagatttgggtggggacacaaaaccaaacagtatcagtggtgtatcagctctttcaaataggatagtgacacgtgcatccacatttgttttttatctgacatgataatatatgaaagtaggtatagagcttattgattaagtccaacaacttaatatcaagatataaaataaaattcattctttgaatataaatgagacagtcatttgtttgtttgcttgtttcagttacattaaactactggtgaatttgaagctgtgatttcatgagcttttggaagaacgggtcctgtaacattgcaaaaaaaaatcatttgaatggaatgtatcaatatgaatatttggtaaatttgcttaataaatatatatatagaagaccttcagatgcacagttataaaattatgattttctgatgagaagaaat

SEQ ID NO: 45230 - DNA, 1835 bp, Homo sapiens
cattaaatcaggtgtcaggaaatttcatggtcatacctacaataatttttatttttgaattggactattattagattgtttctaatactggattacagtttaattatacttactgctctttaatgcttcataaaatactttttcccaaaaaaaaaacatggcaaaaaataggtttagtttcttatttctattttatttttcagatttcattttgtttttgtagttacaatattatatgtgacctatacaggggaacattctaatggggaacaaagtgatcatcatattcttagctattatactttggaagtctgaatggtcttcaaaatgaatttggtatactttcttaacctgtgaattaaatgatagcttcaacttactttaaaggtaatgagtaatgctttgctaagactattttaaacacatagaatataataaaatttgaaattgtatgttcaaaaaagccatatattcaattgtttagtgatgtagccacttcccatccaaacgaacactgtagtgttgatgttattggcttggtatcccttcttttctttcgtacctagtctgtttcctccttcatacctccaaccgtcatctttatgaaggacactcttttctgcatttgagtaaaggaagggcaatgaaaatactcatatatatttggccacctaaagaacaaagtctaatttgaaaaatcaaggataaaagccattacttgttaaacaggctaggttccatattatatacattgtgatgataatccccctaattaggaaagaaaaacctgtaacccgaggagatgaagcagcttgcccaagtacagtgactgctgaaattgcagcacaaaactgcctatctatggctgtctttaaagcccatgctctttccctccctctcaaatgactgaaataaatagctaatgagaagatgcaaccaaggtacaaacattccatgaatttatttatctagagcagattacaaccatttgggggagagagcaaatatacatcctcagtaagggcactgatatttcgcccagaaatgacatatcttctggtttgttgttatattagtctgtttgcacactgctataaagaactacccgaaactgggtaatttataaagagaagaggtttaattgactcacagttccacaggctgtacagaaagcatggctgaggaagcctcaggaaacttacagtcatggcagaatggcaaggggaagcaagcatctcttaatatggtgacagaagagagagggaccaaagggggatgtgctacacactttccaacaaccagatctcctgagaaatcattatcacgagaatgacaagggagaaatctgaccccataatccaatcatctcccaccagcctcctcccccagcattgaggattacaactcaacatgagatttgggtggggacacaaaaccaaacagtatcagtggtgtatcagctctttcaaataggatagtgacacgtgcatccacatttgttttttatctgacatgataatatatgaaagtaggtatagagcttattgattaagtccaacaacttaatatcaagatataaaataaaattcattctttgaatataaatgagacagtcatttgtttgtttgcttgtttcagttacattaaactactggtgaatttgaagctgtgatttcatgagcttttggaagaacgggtcctgtaacattgcaaaaaaaaatcatttgawtggaatgtatcaatatgaatatttggtaaatttgcttaataaatatatatatagaagaccttcagatgcacagttataaaattatgattttctgatgagaagaaat

SEQ ID NO: 45231 - DNA, 542 bp, Homo sapiens
aaatatcttggtagttctgaagacccctctcttagcttgggaggaggttggggaagtatcccttgcctctctcatgggagtgaacacaatctttctaaagaaatccttactgtctcattaaaattttagccttctgtacatagactggagttgggtgatgggctaatgctggtagagctggatttttgccaagcaagccctttgcaagccctccatcgatgctctagcttcctctaatagaatgtgtgggtatttggatctatttttcttagatttggggcctcaggctaaactacaaagagcyctattttaacattctattacagggcttttataggaatattttttattgttatttggtactttgtagatattactaagatcttttactgtcccagaggattttgtgtatggagaggaatattggctatttgtactttacttcatccccaatttactattataaatcctttaatttgtgcctgccagggggagacatggtaagtcatcattttaaaaatgttagcttttttttttttttc

SEQ ID NO: 45232 - DNA, 1225 bp, Homo sapiens
aaaaaaaaaatgtttttcacttgctaattcccaggacatggtaaattctctgcagcacactcaggaagagaggaatccacttacatttatcacctactagcagaccctgacacaggctttatgtagaaacacatgcaacccgagccaggctataatattagcaactgtaaaccactcaagcagtagagcagctgaggagtaattagtgaaatgaattaaatcctgaccgtataattaactacagactaattctacatcttgttcattttttgacactgactttcttctttcctctgtgacgtttactttgatwaacctagggtgctctaatttctcccttcattttggacaattagttacttaactgtattttaattcagacatgtatgagtgctgatcatattccaggcacctcttgcgatctgtctgttagaatagttgctcctcaagtgcaggctctgtttccattcatctttgtgttgaaggtgcctgttcggttgttagatgaccactaacttgtgtaaacattcctaagtgcatcttggattttgcatgcattatgtaatttgataggatggctaaggaactcctccattttgaggctagaccacacttctttctagtcactcggctccattgagggaggtctatcgttgtccttctttgtcaatcaaaagcctaaactaccaatgatatgagctttgtccttacagaaatgttgtcaatggacacatttgactggagaattccagaggggtgatggccatactttgacgtgaaaggtacagtggttaactgagcaatgattataggccagagctgtgcagtgaacagattgcacaaacaaatcgtaaatgtgtactcttcattaacccaggccctcgactgcagaggtacagagatcttcaagagctcctctccaaattcaaaaagattagagcaaagcaaatcatcctaaggaaggaggctagtggaaaggtggatttaagtaactgctgctcccaagaacctttgtcatgcgaatgaccacctcccttctctatttccgtttccatccctctctcctttttggtcacatgtactcatccaggcatcctaaacttctcaaataaatgttactttacaaccaaatctttcctaagtgggtagagatgatcttgggatggaaatcagttaagaaatgctagatattatattaaaacaaagaagaggatgctagatcaaa

SEQ ID NO: 45233 - DNA, 1225 bp, Homo sapiens
aaaaaaaaaatgtttttcacttgctaattcccaggacatggtaaattctctgcagcacactcaggaagagaggaatccacttacatttatcacctactagcagaccctgacacaggctttatgtagaaacacatgcaacccgagccaggctataatattagcaactgtaaaccactcaagcagtagagcagctgaggagtaattagtgaaatgaattaaatcctgaccgtataattaactacagactaattctacatcttgttcattttttgacactgactttcttctttcctctgtgacgtttactttgataaacctagggtgctctaatttctcccttcattttggacaattagttacttaactgtattttaattcagacatgtatgagtgctgatcatatyccaggcacctcttgcgatctgtctgttagaatagttgctcctcaagtgcaggctctgtttccattcatctttgtgttgaaggtgcctgttcggttgttagatgaccactaacttgtgtaaacattcctaagtgcatcttggattttgcatgcattatgtaatttgataggatggctaaggaactcctccattttgaggctagaccacacttctttctagtcactcggctccattgagggaggtctatcgttgtccttctttgtcaatcaaaagcctaaactaccaatgatatgagctttgtccttacagaaatgttgtcaatggacacatttgactggagaattccagaggggtgatggccatactttgacgtgaaaggtacagtggttaactgagcaatgattataggccagagctgtgcagtgaacagattgcacaaacaaatcgtaaatgtgtactcttcattaacccaggccctcgactgcagaggtacagagatcttcaagagctcctctccaaattcaaaaagattagagcaaagcaaatcatcctaaggaaggaggctagtggaaaggtggatttaagtaactgctgctcccaagaacctttgtcatgcgaatgaccacctcccttctctatttccgtttccatccctctctcctttttggtcacatgtactcatccaggcatcctaaacttctcaaataaatgttactttacaaccaaatctttcctaagtgggtagagatgatcttgggatggaaatcagttaagaaatgctagatattatattaaaacaaagaagaggatgctagatcaaa

SEQ ID NO: 45234 - DNA, 1156 bp, Homo sapiens
ggtagaaagaatggataacgtaagacacttcaaaaaaaaaaaaaaaaaatcagtcacccagtccagtgcagtcatctacaggatgggaaggaaagcagcactcctttgctttttcttctatagatacagggagaaacagaaagagtttttaaaaactaattttgattagttatgaatgaatatctacctaagtacaagtaaccaagttaaaacaagtttaaaaataggaagatgggggccgggcatggtggctcacacctgtaatcccagcactttggggagtcaaggcaggcagatcactcgaggccagcagtttcagatcagcccgtcccacatggcaaaaccccatccctactaaaaatgcaaaaattagctgggtgtagtggggtgcgcctgtagtcccagctacttgaggctgaggcacgagaatcgcttgaacccaggagttggaagttgcagtgagctgagattgtgacactgaactccagcctgagtgacagagtgagactctgtctcaaaataataataataataataatratattaataataatgataataataataatgagaagtagttgctaatacctgggaattatttcagcttcttcataatatactcaataactatgcataaccaaggttagacattgaggtgaaaaataaaaattccttccctccccaaatgtgtccccaaatccagatgtttagcatagaggtagacaaaacatgcagatgactaaatttgttcattgtccattgatgtgttttgacacaatgggtgaggttatgagtctggagttgtacataaaagcccccatgcttatttatcctatagtttatataataagacagttgccaggaagtgaagagtgcaacagagttaaacagaaggaaatataaacatgatttcctttgaatagaagatatggaatgtcacttctgattgctagcatgagaactttaaaattttcccccaggagagattaataacaaaagaagaacttttttagttcaaggatacacttaatcttccaatatgctggctcaaggctatgccaggaagacctcttcaaatggtttgtgggttgtatagctttcaaggattggttatattactttctaaaaacagtttgaattaagagtctagaatacc

SEQ ID NO: 45235 - DNA, 1156 bp, Homo sapiens
ggtagaaagaatggataacgtaagacacttcaaaaaaaaaaaaaaaaaatcagtcacccagtccagtgcagtcatctacaggatgggaaggaaagcagcactcctttgctttttcttctatagatacagggagaaacagaaagagtttttaaaaactaattttgattagttatgaatgaatatctacctaagtacaagtaaccaagttaaaacaagtttaaaaataggaagatgggggccgggcatggtggctcacacctgtaatcccagcactttggggagtcaaggcaggcagatcactcgaggccagcagtttcagatcagcccgtcccacatggcaaaaccccatccctactaaaaatgcaaaaattagctgggtgtagtggggtgcgcctgtagtcccagctacttgaggctgaggcacgagaatcgcttgaacccaggagttggaagttgcagtgagctgagattgtgacactgaactccagcctgagtgacagagtgagactctgtctcaaaataataataataataataataatattaataataatgataataataataatgagaagtakttgctaatacctgggaattatttcagcttcttcataatatactcaataactatgcataaccaaggttagacattgaggtgaaaaataaaaattccttccctccccaaatgtgtccccaaatccagatgtttagcatagaggtagacaaaacatgcagatgactaaatttgttcattgtccattgatgtgttttgacacaatgggtgaggttatgagtctggagttgtacataaaagcccccatgcttatttatcctatagtttatataataagacagttgccaggaagtgaagagtgcaacagagttaaacagaaggaaatataaacatgatttcctttgaatagaagatatggaatgtcacttctgattgctagcatgagaactttaaaattttcccccaggagagattaataacaaaagaagaacttttttagttcaaggatacacttaatcttccaatatgctggctcaaggctatgccaggaagacctcttcaaatggtttgtgggttgtatagctttcaaggattggttatattactttctaaaaacagtttgaattaagagtctagaatacc

SEQ ID NO: 45236 - DNA, 578 bp, Homo sapiens
gaaaagaaagggtgattaacctgcatgaacatggttcactgagtggaattttagctgtctttcagctacacaggccaagtgctaggcatgctgggggaaccgcaggaagccatgtgggaatgacactaccacactctccacgtagatgaagggtatcttgagtgtaatggtgagcagctgtctctttactcaaatgacaacatgaaagggagaggcctggaatttcagcatttgccaccaacgtttaatgcaaggttaagtggcagctgttcctggtcctgggtcaggaaatgtgtgtgaggggcagggcagcaccagtgagcatagcaaagctgggaccttcaggaaatccaagaacccaaatgcctgaaggttctgggtcttcagaggtctgtccttttactgaaataataaagtgttttctttttttttttgtaatagacggaatkacctaaatgttgaaaaattatttaagaaatgttgtataaaggatcacagcagtcagatgattttgatgaagtgttttattcgagttgatcagtgtttgtaaaaaatggattttcaatgcctaagttagc

SEQ ID NO: 45237 - DNA, 565 bp, Homo sapiens
cacctggctctctgaagtcaaagcttgtttgtcaccatgactttgctcccaggtgccttgtaccttaaaaaggcatgcaaaccgaagcaggaaagtggagcgaataagggaagggcctggaaaaactggaagtaagaactgtaaccttggactcttttcataccccaaaaaaggttttatggatgttgatcagttgtaggccaagaaggtggaaatcatttccgcctgagtgctgagagccacagaggcatcttcgccctgcattttctctcaacttgttctcttttctaagcttggcaagaaaggttcactcagtcctacccaactcatggtggagtatggyatcctgtacaaacaaactgtagcagtcactgggcctctattcaaattgcaccgggtccttttatttcctccctggttcttaggggtggctcaccctaaaacatcattgggtggtagcttggccccattccaaccaagtcacaacaatgaggtgtttactgatctttgggattttttttttcttaaccctaaatcatttcttctcaaacttggtggcacatta

SEQ ID NO: 45238 - DNA, 545 bp, Homo sapiens
tgggtaccatttagtcagctgccagtggcactaggatataaagcaggcagaataacgtgaaaagactagactagactggcttagcctcccagcctacatctttctcctaagctggatgcttcctgctcttgattggtcttgaagttcttcagctttggaacttggactggcttccttgctcctcagctttcagacggcctactgtggaccttttgattgtgtaagatggcctaatgtgggatcttttgattgtgtaagatggcctattgtgggatcttttgattgtgtaagtttaatactccttataaactcccatatatatataacaggatatatatgtatataataggatatatakatatatatatatatatgggcgtttattaaggagtattaaacttcacaataaatatataaatttatatataatataaatatatattatattagaaatatatattatgaatatttgaatatatatttacataatataaatatataatatataaatatatattatgaatatttaaatataaatttatata

SEQ ID NO: 45239 - DNA, 557 bp, Homo sapiens
caatcgtaaaggtggaacccataatacctgccttctgaagtggcagcaaggaggaactgagtcaagatccctagggtcaggagctggacgttagagttgcaaaacctacccaggtgactcaaataagcagtcaatgttgggctccatcccatcaggctctgggaggtggaagggcttcttaggttttaaggcaatgtggatcacctgggatcttgttaaaccacaacttctgattgagcaaggctggagtggggcctgagattccwcgtttctaatgaagcctgcttcctcctccagccctccccgcctccaaggctggtggaccatactctgaatatcaagtaggtcatggtggtgagatgaattttcttttatgtcccaaaggatgtgcctcccccatggagagttttaaacagcagagtgttatgctctgttctattgcctataagaatcagtctggctgctctgtaaagagtaaagctccagcctggcccatatggtgaaaccctgtccctactaaaaatacaaaaattaggcagacgtggtggcacgcacct

SEQ ID NO: 45240 - DNA, 584 bp, Homo sapiens
ctacttgggaggctgaggcaggagaatcgcttgaacccgggaggcagaggttgcagtgagctgagatcacaccactgcactccagcctgggtaacagagcaagactctgtctcaaaaagaaaaaaaaaaatggtttttttcccaaagatatttgcaacttgctcgcttccattcttcatgttacatgtccccactggccccagggctcttgaatttcctcagttcatgccagaggcagttgttgyaggttactcaatagggcttggtgtcatagggtttatacctcagggtcatagggcttatacttcacatctaatttggccaaataattatggcaaaagcttctgtgagccacatagattaaatgatgtagaaaataaaaagtcaaaattattgggaaaataatttccttatagctgcatcaaatgggacaaacttttcttataactgtttggtcttattttcagagttctatttcctggcctgtcttattaacacatcctttgtcgtacaactgaaatatctatagcaataggaattatacagtgagaatattttttgttttaataaaatactattatatt

SEQ ID NO: 45241 - DNA, 584 bp, Homo sapiens
ctacttgggaggctgaggcaggagaatcgcttgaacccgggaggcagaggttgcagtgagctgagatcacaccactgcactccagcctgggtaacagagcaagactctgtctcaaaaagaaaaaaaaaaatggtttttttcccaaagatatttgcaacttgctcgcttccattcttcatgttacatgtccccactggccccagggctcttgaatttcctcagttcatgccagaggcagttgttgcaggttactcaatagggcttggtgtcatagggtttatacctcagggtcatagggcttatacttcacatctaatttggccaaataattatggcaaaagcttctgtgagccacatagattaaatgatgtagaaaataaaaagtcaaaattattgggaaaataatttccttatagctgcatcaaatgggacaaacttttcttataactgtttggtcttattttcagagttctatttcctggcctgtcttattaacacatcctttgtcgtacaactgaartatctatagcaataggaattatacagtgagaatattttttgttttaataaaatactattatatt

SEQ ID NO: 45242 - DNA, 541 bp, Homo sapiens
tctatctacaaggtcaatatacaaaactaaattgtatttatatatatatatatgcagcaaacaactagaatttttaacgatgtaatttatagaaacagcaatgtaaccaagtaaatagtaataaatacagatgttcaaagcatctctgcaggaactatccaaaataaatggagggataaaatacaaatgaacaggaaaactcaatattataaagatgttgttctctccaaagtaatttatagattgaaggcaattgcataaattgtagggaatttgtttttggaaactaattagttgattcttttctatattaaaattcaaagccacatagagtcaagataatcttgaaraaaaattacagaaattgctctaatacttgtatagaattattaaggcctgtaactgtaaaactccaagaagaaaacataagagaatgcctcctgaatgttgattatggtgataattttttgggtatgataccaaaagcacaggcaacaaaagcaaaaataaatgggactacatcaaaccaaaaagcttctgc

SEQ ID NO: 45243 - DNA, 576 bp, Homo sapiens
gccagagaggtcagttgcctcactccaacatctgtggcctgtttcatttctgccttggcctgctccagcctttgcttccatcttgcaatttcttggtcaggcatctctgcaggtygccaacagtcagtgctgtcattcagatcatcacggtttgcccccgaagatctccactgtgctgtgcagcatgtgggaattgttctgcatcagtcacttggggaagttcaggaggctggcatttttatactgtcttcagaagctcacttatgccctgaagggaagacctgttcatttcatttagaaacctcaagcagagggtttggagcaattgaggactggccttggcatggtggatgtgagccatcactggcctgggatgctggccccatcttgtctttggcctttccatgaacctcaccctgggttgaacctcttccggccagctcttccttttttatcaccatatgttatctcctgctcatagaggccaacacagcagtgcatgcctggatcacccagagtatatacagggtaactgactctagtcccaggattctgtacgttactagtagtactgcc

SEQ ID NO: 45244 - DNA, 576 bp, Homo sapiens
gccagagaggtcagttgcctcactccaacatctgtggcctgtttcatttctgccttggcctgctccagcctttgcttccatcttgcaatttcttggtcaggcatctctgcaggtcgccaacagtcagtgctgtcattcagatcatcacggtttgcccccgaagatctccactgtgctgtgcagcatgtgggaattgytctgcatcagtcacttggggaagttcaggaggctggcatttttatactgtcttcagaagctcacttatgccctgaagggaagacctgttcatttcatttagaaacctcaagcagagggtttggagcaattgaggactggccttggcatggtggatgtgagccatcactggcctgggatgctggccccatcttgtctttggcctttccatgaacctcaccctgggttgaacctcttccggccagctcttccttttttatcaccatatgttatctcctgctcatagaggccaacacagcagtgcatgcctggatcacccagagtatatacagggtaactgactctagtcccaggattctgtacgttactagtagtactgcc

SEQ ID NO: 45245 - DNA, 576 bp, Homo sapiens
gccagagaggtcagttgcctcactccaacatctgtggcctgtttcatttctgccttggcctgctccagcctttgcttccatcttgcaatttcttggtcaggcatctctgcaggtcgccaacagtcagtgctgtcattcagatcatcacggtttgcccccgaagatctccactgtgctgtgcagcatgtgggaattgttctgcatcagtcacttggggaagttcaggaggctggcatttttrtactgtcttcagaagctcacttatgccctgaagggaagacctgttcatttcatttagaaacctcaagcagagggtttggagcaattgaggactggccttggcatggtggatgtgagccatcactggcctgggatgctggccccatcttgtctttggcctttccatgaacctcaccctgggttgaacctcttccggccagctcttccttttttatcaccatatgttatctcctgctcatagaggccaacacagcagtgcatgcctggatcacccagagtatatacagggtaactgactctagtcccaggattctgtacgttactagtagtactgcc

SEQ ID NO: 45246 - DNA, 576 bp, Homo sapiens
gccagagaggtcagttgcctcactccaacatctgtggcctgtttcatttctgccttggcctgctccagcctttgcttccatcttgcaatttcttggtcaggcatctctgcaggtcgccaacagtcagtgctgtcattcagatcatcacggtttgcccccgaagatctccactgtgctgtgcagcatgtgggaattgttctgcatcagtcacttggggaagttcaggaggctggcatttttatactgtcttcagaagctcacttrtgccctgaagggaagacctgttcatttcatttagaaacctcaagcagagggtttggagcaattgaggactggccttggcatggtggatgtgagccatcactggcctgggatgctggccccatcttgtctttggcctttccatgaacctcaccctgggttgaacctcttccggccagctcttccttttttatcaccatatgttatctcctgctcatagaggccaacacagcagtgcatgcctggatcacccagagtatatacagggtaactgactctagtcccaggattctgtacgttactagtagtactgcc

SEQ ID NO: 45247 - DNA, 576 bp, Homo sapiens
gccagagaggtcagttgcctcactccaacatctgtggcctgtttcatttctgccttggcctgctccagcctttgcttccatcttgcaatttcttggtcaggcatctctgcaggtcgccaacagtcagtgctgtcattcagatcatcacggtttgcccccgaagatctccactgtgctgtgcagcatgtgggaattgttctgcatcagtcacttggggaagttcaggaggctggcatttttatactgtcttcagaagctcacttatgccctgaagggaagacctgttcatttcatttagaaacctcragcagagggtttggagcaattgaggactggccttggcatggtggatgtgagccatcactggcctgggatgctggccccatcttgtctttggcctttccatgaacctcaccctgggttgaacctcttccggccagctcttccttttttatcaccatatgttatctcctgctcatagaggccaacacagcagtgcatgcctggatcacccagagtatatacagggtaactgactctagtcccaggattctgtacgttactagtagtactgcc

SEQ ID NO: 45248 - DNA, 576 bp, Homo sapiens
gccagagaggtcagttgcctcactccaacatctgtggcctgtttcatttctgccttggcctgctccagcctttgcttccatcttgcaatttcttggtcaggcatctctgcaggtcgccaacagtcagtgctgtcattcagatcatcacggtttgcccccgaagatctccactgtgctgtgcagcatgtgggaattgttctgcatcagtcacttggggaagttcaggaggctggcatttttatactgtcttcagaagctcacttatgccctgaagggaagacctgttcatttcatttagaaacctcargcagagggtttggagcaattgaggactggccttggcatggtggatgtgagccatcactggcctgggatgctggccccatcttgtctttggcctttccatgaacctcaccctgggttgaacctcttccggccagctcttccttttttatcaccatatgttatctcctgctcatagaggccaacacagcagtgcatgcctggatcacccagagtatatacagggtaactgactctagtcccaggattctgtacgttactagtagtactgcc

SEQ ID NO: 45249 - DNA, 555 bp, Homo sapiens
gtacatttaaaaaaaactagcataactggattgtttagtacacaaagaataaatgtttaaggtgatgaccccatttgccctgacgtgattattacacattgtatggttatataaaaatatcttatgtaccccattaatatatacacctactatatactcaaaaaatgaaaaaagaaaaaaacaaggcaacaacagcaayaaaaagaatatagagctcaaaggaccccatcagcacattcttttctgtgtgctcccttccataatgtgtggccactagcaatgcctagtttgaaggatgggaagaatttcccaaaggccagggggaaataggccaccatttcatgcaggtaatgccatgagtaatgacaaggggcaggaagcaggtgaatttttcagggcaagagggaatggcataggctgagagcactgtgctgcctaccatgtggtagcgccttgggagaacaggaggaagaaggcttggccgactgacagcagcagctggaaaggggttgggggttcaactgaggggtagcctttatcccagataagctctga

SEQ ID NO: 45250 - DNA, 555 bp, Homo sapiens
gtacatttaaaaaaaactagcataactggattgtttagtacacaaagaataaatgtttaaggtgatgaccccatttgccctgacgtgattattacacattgtatggttatataaaaatatcttatgtaccccattaatatatacacctactatatactcaaaaaatgaaaaaagaaaaaaacaaggcaacaacagcaataaaaagaatatagagctcaaaggaccccatcagcacattcttttctgtgtgctcccttccataatgtgtggccactagcaatgcctagtttgaaggatgggaagaatttcccaaaggccagggggaaataggccaccatttcatgcaggtaatgccatgagtaatgacaaggggcaggaagcaggtgaatttttcagggcaagagggaatggcataggctgagagcactgtgctgcctaycatgtggtagcgccttgggagaacaggaggaagaaggcttggccgactgacagcagcagctggaaaggggttgggggttcaactgaggggtagcctttatcccagataagctctga

SEQ ID NO: 45251 - DNA, 603 bp, Homo sapiens
gttaaagaacaataccatgcccaagtaaggtttattccacatgtaaggctggtttaatactcaaaagtcaatcaatatgattcaccctattgattgtctagattggaaacatcatacaattctatcaaatgattcaaaaaatgcttttaagaaaaactatacccattcatgatttaaaatttaaaaaccaactctcagcaatgtgggaatcgagggaatttcctcaactgtgcaaagaacatctacagaaacctatagctaaattgtatgtaatagtgacagactcaatgctttcccatgaaatcaggaacaaggcaaagatatcctctccaagtctttctattcaacaaggtrctggaattgtttgctggtgcaataaggtgagaaaaggagttaaaaagcatatacattggaagtaaaaaaaaatgaaactatccatacttgcagaacatgagcctatcttaaagagtctaaaagcaaacttccagaactcatgagtgagtttagcaaggtctcaagataggagggtgcaaagcttcagagggaaaaagttccagggccttagaacaggagaatttcctgcagtaagttctcaggtcctct

SEQ ID NO: 45252 - DNA, 600 bp, Homo sapiens
ttcagcatgtcaacttggaatggcaggggcatatttcccatcagagtaggaatacttcggtttcaagtccctgggccaggagcctgagctccaaaacagaagaagataagatatgagaattaaaggaaatttaaagtgaaaacttataaaactcagggacgccaaccagggagtaggaagtatcctctcctcacacccccataacatcctttacctccataggcctaggccagtcycaaactggaatttgagaagtttgctttctacctgacattttgtaatgtaatgcttaactcattttcattcattttctttcatcataaaataagctcatcaccattttgagattttataaagggttatattttaggcaaaagttgagagtcttttgacttttttaacctttttaaaaattttgacccatgtgtagatcaataaaactaccataaatttaaacataccaactttttacaacatttaaggtaataattgactgtaagaagcatcttatagccttatagacaagagatgactaatgagtcttccaaaggtgttcagcccttgagaagtagtttaaatcataggagaatatagattaag

SEQ ID NO: 45253 - DNA, 600 bp, Homo sapiens
ttcagcatgtcaacttggaatggcaggggcatatttcccatcagagtaggaatacttcggtttcaagtccctgggccaggagcctgagctccaaaacagaagaagataagatatgagaattaaaggaaatttaaagtgaaaacttataaaactcagggacgccaaccagggagtaggaagtatcctctcctcacacccccataacatcctttacctccataggcctaggccagtcccaaactggaatttgagaagtttgctttctacctgacattttgtaatgtaatgcttaactcattttcattcattttctttcatcataaaataagctcatcaccattttgagattttataaagggttatattttaggcaaaagttgagagtcttttgacttttttaacctttttaaaaattttgacccatgtgtagatcaataaaactaccrtaaatttaaacataccaactttttacaacatttaaggtaataattgactgtaagaagcatcttatagccttatagacaagagatgactaatgagtcttccaaaggtgttcagcccttgagaagtagtttaaatcataggagaatatagattaag

SEQ ID NO: 45254 - DNA, 592 bp, Homo sapiens
tttaaaaatgtaatgggagcatcataaaacactctgaactttatttttttctttaccattttcaccaccacctactaggcttaaaagtattctccactctatgtggaaggtcatgtctatacccacaacattgaaagaacttctccccaatcagctgactaattacgatttacctgatgcattaatgtggcacgtgtatcctgtgacatgtaagtagaattaaggcagtagaactttaagaagttaatagatctgcaaactttgccycaggcttttgcaatcagaaactcagggtttgctggagctctacaaaggattttgacatagcctgaggtgagaaccatgaaaatgtgttctgttatggaggaatgtggtaaatgtcctacacgggttagcttcatcatgtgccccagagctgacctgagctgtccggtgggtacctagttcaacagcagcccaggcctgcggttgcagccctgcatgcaccctgcattacctgcgcgctttcaaacactgctgggcacagccctaccctagaccatgtgtacacaccacggttattggtcttcaccgtgcatcagaatggtctgca

SEQ ID NO: 45255 - DNA, 592 bp, Homo sapiens
tttaaaaatgtaatgggagcatcataaaacactctgaactttatttttttctttaccattttcaccaccacctactaggcttaaaagtattctccactctatgtggaaggtcatgtctatacccacaacattgaaagaacttctccccaatcagctgactaattacgatttacctgatgcattaatgtggcacgtgtatcctgtgacatgtaagtagaattaaggcagtagaactttaagaagttaatagatctgcaaactttgcctcaggcttttgcaatcagaaactcagggtttgctggagctctacaaaggattttgacatagcctgaggtgagaaccatgaaaatgwgttctgttatggaggaatgtggtaaatgtcctacacgggttagcttcatcatgtgccccagagctgacctgagctgtccggtgggtacctagttcaacagcagcccaggcctgcggttgcagccctgcatgcaccctgcattacctgcgcgctttcaaacactgctgggcacagccctaccctagaccatgtgtacacaccacggttattggtcttcaccgtgcatcagaatggtctgca

SEQ ID NO: 45256 - DNA, 603 bp, Homo sapiens
gagatccttgaaatagtttctcaataatctcttcaggccgcagggaggttgctgcctataactaagaaaatcgcaaagagtgacacattttcaggaccataatatcctctgggcgggaggcttgtccttgccyctttcacgtttccagaaccctaaactgtgctgcgtagctgcaaccatctcagcccttacccgcaggaaggcactggactcacggattagttgagctccagggatgacactcacctgcaggaaggttgcaggcaccaatgtttgtgcactgcctttaatccttttaaagcaaaaagatatcaaccctttcttactccttctgcaatcgttacataacaggttttcgtcttgcactttaaaaataaatactttaagttgtcggttttctgggttatgttatttaaagtcagatatttattttgaagtcataaatgggtggaacttaaaatcgcttataggaacttgtgaaggcaaggtgtgttgttaagattaatttataatgacactgttaatgacctcggtgtgatttatgtgtgatgctaatgtatgttcttgctcttcaactttctttaaaatttataaccatggttt

SEQ ID NO: 45257 - DNA, 603 bp, Homo sapiens
gagatccttgaaatagtttctcaataatctcttcaggccgcagggaggttgctgcctataactaagaaaatcgcaaagagtgacacattttcaggaccataatatcctctgggcgggaggcttgtccttgcctctttcacgtttccagaaccctaaactgtgctgcgtagctgcaaccatctcagcccttacccgcaggaaggcactggactcacggattagttgagctccagggrtgacactcacctgcaggaaggttgcaggcaccaatgtttgtgcactgcctttaatccttttaaagcaaaaagatatcaaccctttcttactccttctgcaatcgttacataacaggttttcgtcttgcactttaaaaataaatactttaagttgtcggttttctgggttatgttatttaaagtcagatatttattttgaagtcataaatgggtggaacttaaaatcgcttataggaacttgtgaaggcaaggtgtgttgttaagattaatttataatgacactgttaatgacctcggtgtgatttatgtgtgatgctaatgtatgttcttgctcttcaactttctttaaaatttataaccatggttt

SEQ ID NO: 45258 - DNA, 544 bp, Homo sapiens
agtaagccgtcaagaaatgttagcaatcatcatttaggaaaatagtttccttttaaaattcagtcttgaaggttagttctagttgaagaaaggtagactcttcctagatgtaccagtgcactaagacaatatgtgtagaagattatttaaaggaaatatctaatggggttatacaaattagttatgtctggtsttcaaatgaacccttctcaaatttggatatctaaattacagcttaaaaaaattcagaataggtggggcatggtgtctcacacctgtaatcccagcacttcggaaggccaaggcgggcagatcacttgaggtcaggaattcaagactagcctggtcaacatggtgaaacctcgtctctactaaaatacaaaaattagtcaggtgtctcaaaaaaaaaaaaaaattaagaatgaagtctgttaaatggccaactttgtatggtgaaattttggtaaaaactcccactgttttagtgactgagcccttcctattttcatgtagttcatcaagaatgtgcttcatcagtaatact

SEQ ID NO: 45259 - DNA, 544 bp, Homo sapiens
agtaagccgtcaagaaatgttagcaatcatcatttaggaaaatagtttccttttaaaattcagtcttgaaggttagttctagttgaagaaaggtagactcttcctagatgtaccagtgcactaagacaatatgtgtagaagattatttaaaggaaatatctaatggggttatacaaattagttatgtctggtcttcaaatgaacccttctcaaatttggatatctaaattacagcttaaaaaaattcagaataggtggggcatggtgtctcacacctgtaatcccwgcacttcggaaggccaaggcgggcagatcacttgaggtcaggaattcaagactagcctggtcaacatggtgaaacctcgtctctactaaaatacaaaaattagtcaggtgtctcaaaaaaaaaaaaaaattaagaatgaagtctgttaaatggccaactttgtatggtgaaattttggtaaaaactcccactgttttagtgactgagcccttcctattttcatgtagttcatcaagaatgtgcttcatcagtaatact

SEQ ID NO: 45260 - DNA, 616 bp, Homo sapiens
tggctgtataactgcaaagtgggataaacgtttcatcttgattaaacgtaaggtgactcctgacaaagaactgtggttggctgactctgtggagaggcttgcaagatgctgtcatgactacatgtgggagtttgagaaaactgcaagatgcatgttgcaaaaagacatattaagctttctgctgttttccaggcactgtatcaggagctggttgggggagtgatgaacgagatagcatcctgttaacaagsagtagcagacttcccatgttacattctctcaaacagagaggaggtcaggccagatctgtttctcctcaaaaatataatctcaagaaaaatcaactggtcggatcatcactacctaaccacagatctccctccttattcttcacaacaagaatccgtcaaataagtaacgtcatggttaatgctcctccacattcaacctggaccctaaatccctctaaataacttgactctgttcatacacagaccacccactttaccagtctcaaaggatggaccagaacaactatttccttgagttaatgagtgaacctacatctaactgtaaataaaacactaaaaataggtaactattacttactaaatga

SEQ ID NO: 45261 - DNA, 616 bp, Homo sapiens
tggctgtataactgcaaagtgggataaacgtttcatcttgattaaacgtaaggtgactcctgacaaagaactgtggttggctgactctgtggagaggcttgcaagatgctgtcatgactacatgtgggagtttgagaaaactgcaagatgcatgttgcaaaaagacatattaagctttctgctgttttccaggcactgtatcaggagctggttgggggagtgatgaacgagatagcatcctgttaacaagcagtagcagacttcccatgttacattctctcaaacagagaggaggtcaggccagatctgtttctcctcaaaaatataatctcaagaaaaatcaactggtcggatcatcactacctaaccacagatctccctccttattcttcasaacaagaatccgtcaaataagtaacgtcatggttaatgctcctccacattcaacctggaccctaaatccctctaaataacttgactctgttcatacacagaccacccactttaccagtctcaaaggatggaccagaacaactatttccttgagttaatgagtgaacctacatctaactgtaaataaaacactaaaaataggtaactattacttactaaatga

SEQ ID NO: 45262 - DNA, 591 bp, Homo sapiens
ggcatcaatgaactcataaaatttctggcttctttgtttcattataatgttttaagggactcatccatattattgactgaagcaatagtgtgtttatttttattgtagtatagtgttcccttgtgggagactgtaatttaattaaatttaattaacaccacaatttaattgtccattctattattgatgacatataggtagtatccagtttggcactgtgataaacagtgctgccacgaagtggtcatcttacacattttctatcccagacctagaacatcctttttttcaggaagccctgatttctttgaatgtgaaatgatatatgtctgtatgtgtatatctaatgactcatgagttcatgatatttcacaatcaaattcaagacaacataaggattatcataattctgtattccatcactgcactctttcttccacagtgaatcttgattatcaaggtcacaagagatattatttattagaaaatcccataatttttgggaacaaaaagaccaaatagcagatctattatccattctttccagtaactgrggtaggcttcctggaaagaaagaagaaagaacttcta

SEQ ID NO: 45263 - DNA, 550 bp, Homo sapiens
atgtgttctcaccatttagctcccacttatcaatgagaacattcagtatttgtttttctgttcctatgttagtttgctaaggataatggcctccagctccatccatrttcctgcaaaggacatgatctccttgtttttatgtaaagccttgatttcagtaacttaattttataaggcagtttatgtacagttgatacatggtttgaaagaagtatataaaatttgctcattttcaatggcctgaatataaaaattatgtgtataaataaattcaagatgtcccatattattctacatataaaattaatgtcataaaactaccatgttggaaaaatatacactttttactttggctaggcgtactatcaaatccctcttcattaataagggttttaaaagagagaataaagaagagttaaagggaaacatggataaatttaggcagaatgaatgaacaaatgttattggaaacactgaaaaaattatttcagatggcattgtagatgtcagagggttttcaatacaagtatttaagttgacatgaattgca

SEQ ID NO: 45264 - DNA, 930 bp, Homo sapiens
tatcattattctcatttatagatgaggaaagtgagacaaggaccacttgagtcacttctccagtgtcttgtagctattaagtgatagacctagatatgcaactagattgcggtagaactagatcttcatgtctgggtagtcttgctgctgagaacatactcataatcaccacacacctgcacctcagttaccaactctgtgacttccacattttataggacctagtaaaagcctcagttcctcatgagtaattttacatattggtggaaggaatagagataatgaatgtacttacgatgcattatacatactaggaattccatcaatgctagttaatacactagcccaagaagattattggctgtggatcctagtatatctcaggaagctcatagggataaactggggcaacaaggaccagaactatcaatgactttgagatctttgtgttaataagcacagatctttcatacaagggttgtatgttagactgcctcaattttgagatagtgaataaaatctggggatgcaagaaacagcaaactaactcaagttggtttaagcctaaagagaaatttgttcattctcataaaagaattgtgcacgatagagctagtgttcaaataaccatttcagaaatatgtctttttctctcagttttactttcctatatgttgacatatttatttagggtggcaaaggtgggctccataggacatctctccacatttatacctgcatcactttctgaaacttccatcaaaaggcctgtggaatctctcattgatctggtttaagtcacttgtccatccctgagacaatgactatggccatggggatacagtgttctgattgactacacataaccttcccagctcaccctcagttctgcagaggaatatcagggtgstattaccaaaataaagagga

SEQ ID NO: 45265 - DNA, 616 bp, Homo sapiens
gcatgtatacctatgtatgtgttcgtatatatatttgtgtgtatatatgcaaatatgtgtatatatatctgtgcagaaatatatattagcagatgtatatagtctaatattttcttcttgaacctcagtagactttctagggtattccctgtgatgtgtacacaccactttggaagcccacatgctagaggatccactgctgagaacggatctgcagcctgtcacggacagctgatagctatagaagcaggacttgagcaagactgagccttggatacgagaaaaatgtaggggcaggaaagggcaggtagagcaaaggaaacctggcaaaagcccaggaatcagattagttatagacataatcttgctctgaaggctcttcctatgcaagtcagtgaggccttggattttcagatacaacatattccgacagttcagatatattcattgggcaagtatgaayttaacatctactgtggctcagcactgtgataagggtgctgaaggtatgtagtcacttaatccatgattttatagtctgtgatagagatgacccacaccaacatacagcttcaaaaggaataatttgttcatatctgttaatatataaatatac

SEQ ID NO: 45266 - DNA, 475 bp, Homo sapiens
taattctataatatgaactcaattttgcaaaacttcaaagtacgtacaacttttaacttactagggtatacataccagtaataaattcacaacggtagacatgtttgcctactgtaaatataacaaagactaaacaagcagatactaaatcattaagcaattatcagttagtatctttaattttcttatacttctatattttctatagatcatctttgtaacaagaagaaaaccaaccaaatgaaaatgaaatgaattctctcaaaaagaattaagtcaagacaggaagaaggctcgcaaagtaatataaaatatatcttatggtttatgtaaaattcttaataaaataccttctttgctccaagctgcactctggctttgcctttgrgtcaggtggcatttctttgcacgatgactggttttattgagtaggcactgcttcagccctacaggaagaacaaaacctctctggaac

SEQ ID NO: 45267 - DNA, 475 bp, Homo sapiens
taattctataatatgaactcaattttgcaaaacttcaaagtacgtacaacttttaacttactagggtatacataccagtaataaattcacaacggtagacatgtttgcctactgtaaatataacaaagactaaacaagcagatactaaatcattaagcaattatcagttagtatctttaattttcttatacttctatattttctatagatcatctttgtaacaagaagaaaaccaaccaaatgaaaatgaaatgaattctctcaaaaagaattaagtcaagacaggaagaaggctcgcaaagtaatataaaatatatcttatggtttatgtaaaattcttaataaaataccttctttgctccaagctgcactctggctttgcctttgggtcaggtggcatttctttgcaygatgactggttttattgagtaggcactgcttcagccctacaggaagaacaaaacctctctggaac

SEQ ID NO: 45268 - DNA, 583 bp, Homo sapiens
tcataagcacatcacggaaaattgagcctccatcccctcaaacatttatcctttgtgtcacaaacagaagtaaaaactaaaaataaactttaaagtatcatgtgtagttatttatgcagttctgttcctctaaatgcttatattccatcaattttcaaagggactttcctaactgtagcttttgctaaccatggtgattagtttatatcatctcagggtagacgtactgtggcaggaacttacttattccaaatttactatgttctgtattacaatttaaaatcaactttggggctgggcatggtggctsatgcctgtaatcccagcactttgggaggccaaggctagcagatcacctgaggtcagggagttcaagaccaccctggctaacatggcgaaactccgtttctactaaaaatacaaaaattagccaggcgtgatggtgcgtgcctgtagttccagctacttgggaggctgaggcaggagaattgcttgaacctgggaggcagagattgcagggagctgagattgcaccactgcactccagcctgggcaacagagcaagactccatctcaaaaacta

SEQ ID NO: 45269 - DNA, 547 bp, Homo sapiens
agcacttctgctgcataccaaagtactacggtggtctcaagaaaaagtatatgyagtgaatattttttcctggtatacaaaaatccattagtttatacagactgaaatgtagtagtctactttgagtgggtctttgactcatgttccacattttgtaaaagcatgcatttgtcatttggaacatattggttcacagagttttacaagtcttccaaatgttgactcattaaatttgagattccataagtttatctaccacttgtagaatttttctagaacaatgagagagaatatccacaattatatgaaaagggtattaaaatccccctacctttgcaagctatatatttgtgtacagcctcattttcttcatatatgtcaaccaaaagaacataacacaacagattgaatgctgaagcagatatgatcttccagatgtcttatattgttaaacatcagacagataaaacacataaacaagtggctctgggtcctcaataatttttaaaattgtagagtggtctttaagaccaaaatgtttgaaaac

SEQ ID NO: 45270 - DNA, 547 bp, Homo sapiens
agcacttctgctgcataccaaagtactacggtggtctcaagaaaaagtatatgtastgaatattttttcctggtatacaaaaatccattagtttatacagactgaaatgtagtagtctactttgagtgggtctttgactcatgttccacattttgtaaaagcatgcatttgtcatttggaacatattggttcacagagttttacaagtcttccaaatgttgactcattaaatttgagattccataagtttatctaccacttgtagaatttttctagaacaatgagagagaatatccacaattatatgaaaagggtattaaaatccccctacctttgcaagctatatatttgtgtacagcctcattttcttcatatatgtcaaccaaaagaacataacacaacagattgaatgctgaagcagatatgatcttccagatgtcttatattgttaaacatcagacagataaaacacataaacaagtggctctgggtcctcaataatttttaaaattgtagagtggtctttaagaccaaaatgtttgaaaac

SEQ ID NO: 45271 - DNA, 597 bp, Homo sapiens
tgaagcactacaccaacacattcttattaagtcctactgtgcattcagctactcccaaattaataaatactgtgagtaaatttaatatataatatgaataatgagagtgacatcttctaaatttatgtgcattcttttcctattttgagtgttctgtttsccaacatacatcatgcctccttctacttcttccccttttcttttgttaccttcaatcacatctctttcctttcagatactcagattgtacacacatccataaatactctcactcagaaatcttttatatactaacttgcacacgaaacctcctgctcacgtgtttcgatgcttttctcaagcttgactattcaagggaaactcaaaatagaataaagaattgttatagtactccaatataataattaaatcatttatatttttccatctttgtaactctagtaacatattgctaacagagggtgcaacatggggatctaatactgcctttgattcataaatagaccttttctcattggtttacatttgacttaattatgattttacataataaaatgcctttattctttcttcttattactcaagcaatataaattc

SEQ ID NO: 45272 - DNA, 597 bp, Homo sapiens
tgaagcactacaccaacacattcttattaagtcctactgtgcattcagctactcccaaattaataaatactgtgagtaaatttaatatataatatgaataatgagagtgacatcttctaaatttatgtgcattcttttcctattttgagtgttctgtttgccaacatacatcrtgcctccttctacttcttccccttttcttttgttaccttcaatcacatctctttcctttcagatactcagattgtacacacatccataaatactctcactcagaaatcttttatatactaacttgcacacgaaacctcctgctcacgtgtttcgatgcttttctcaagcttgactattcaagggaaactcaaaatagaataaagaattgttatagtactccaatataataattaaatcatttatatttttccatctttgtaactctagtaacatattgctaacagagggtgcaacatggggatctaatactgcctttgattcataaatagaccttttctcattggtttacatttgacttaattatgattttacataataaaatgcctttattctttcttcttattactcaagcaatataaattc

SEQ ID NO: 45273 - DNA, 508 bp, Homo sapiens
taattatgccttaagcagggaaatagggtaatataaaactttatttttattttgtcaaggaagttatattatcttactaaaacaacttcaattttctgatctgtaaattagggataataatggtacccattctgtagtatcttcatgaggatgattgttaatattgtatgaagcataaggaccaatgcctcacasacagtaaactctaaatggtttgaacaagaaaaggagttttgttttaactctcagatgacaattttgttaaataattaaatgcaattaataaaatagggcctttgtatcagtaatctggtctttctaacttgcttcttttctgagcctctgaagccctcttgacctttcccaatgagtattgttatgtggataattaacaaaataaactataattagaccccaaagttattttttctatatgattttatatatcgactgaaattcttttaatcttataatttaatatcgtatgtcataaggtgtgcacaatacc

SEQ ID NO: 45274 - DNA, 610 bp, Homo sapiens
gtttagcccctcacccaggccccacctaagtgagaatttcctgggcacatagcaatggaaatcaacagccacacataaggacaaattcttaaacctctgtaaatgccccatggttgttgtttctttgtgtgttttctttgttttgttttgtttttatatccactttcctgtaacgggaaaggcgatgtgatatcatggaagacacctaacctaagacgcttagctgcactaccatgtaccggttctgtggttttcagcaaatgatttacctcttctgagcatgtgaaatggcaatcaaatcctttaccctgtctacctttcagaaaccctgtgttccattctttattacaaaaattacttcctgaatcttcacaacaactctattatgtggatacaatyaagcacacgaggtaggacattcagtgccttgtcacaagactccagctaataaatgccaagattggaatgctttcagagcccgtgctctctcccctagaccatgataattctcagtagccataatgtgtataaatgggctttgaaaactataaagcccgttacagacgtaagcaactattagtcatcctttcaaccaaaaatacctatgcat

SEQ ID NO: 45275 - DNA, 616 bp, Homo sapiens
atgatggcaaaaaaaaaagattattccactaggtcacaattcacccatatattttatacttgacgtatctaatataaaatgaccaagaaaagtaaaaaataaaatgattggtaaaaaataggcaaatgcaaattaagagaaagaaaatattgagatactaatatttgacatggttaaaatcaagcttcaaactgtggaacagcaacarcaagaacatgaaacaatgaagtcatgattacaaagaatatctaaactttcataaatttctgtgcatccaatttttcttttttgagatggagtctcactctgttgcccaggctgcagtgcagtggcgtgatctcaactcactgcaacctctgcctcctgggttcaagcgattctcctgcctcagcctcccgagtagctgggactacaggtgtgtgccaccactacaggcatatgccactaggcctggctaattttttttgtatttttagtagaaacgaggtttcactgtgttagccaagatggtcttgatctactgaccttgtgatctgcctgcctcggcctcccaaagtgctaggattacaggcgtgagccaccgtgtcaggccgcatcgaaatttttaaaaatgaaa

SEQ ID NO: 45276 - DNA, 568 bp, Homo sapiens
gaaactgtgcctcttcaccattgcctggagtagacagaataatggccctccaaagatacgccaatcggaacctgtgagcatgtaccttccatggcagaaagagactttgcagatgtgattacattaaggatcttggaatgggggttgggttatcctggattatccgattgagtccaaagtaatcacaagggtccttgtaagagagaggcgagatggtcaaggtcacagagaggagctgggaccatggaagcagaggtcaaagtgaggcactttgaaggaggaagatcccacaagccaaggaaggcaggcagcccctggaggctggaagaggccaggagacagactctcccgyagagcccctagaaaaaaagcatttctgatgacaccttgattttagcccataaggcccatttcagatttctgacttccaggcctagaagatagtaagtttgtgttgttttaagccactgagtttgccaccacttgttacagcagcaacgtggaactcatacatcacctcttccttcaggcctttgtgatccctggcactcgctcttcctcctctgag

SEQ ID NO: 45277 - DNA, 555 bp, Homo sapiens
ttatcagcaaatcagtaccattcccactgtgagtatcgtaggcagacaggtgaagcttctgatttatctcttgagagttttccttctacagtattaacccattttgcatcatgccatgtattttccccacagaaactaatatgaggcactcggcaattacccagaacttcccaatttcaattatgatagtatttcctaggaatgttttcttcaattcttttgtaacagctattaagttcaataaaatacacattggctgcctacaataaacccaggccctggggatagcagggagggtgccctgcagaaacatgagtcacggtttttcctttccagcatatgtaatctgcatgaggtaatgagcaactgaaatcaaatggcacgtcttcatattttcttctacattttaacaaggttttcaaggatggtctagcaagcagtgataaattgagttaaaagagtcaactttataataaaagatatttttaaacttaaatgatmtttttttccccgttctttgaggagactaacaaaaaggcagagtaggatgggaag

SEQ ID NO: 45278 - DNA, 609 bp, Homo sapiens
cagagggaggaagtcagaaatgcagatgatctgtggggaggtgcgggtgcccagggcaagagagagggaggaggatggagactccagggcktggaagaggagatatgcaaaatgccgaaccctagaggggtgccagctcagtcaccctcaaggcagactggcccaggttcccacacctccttgtcccacagtcaagtccaataaaatggcaggggtggcggggggaggggggagtagagacacagagccctctgtgatgttcacttgctgatggttttccctgagaagggactcagaatacgccatccccaggccgggtgcagtggctctcagcactttgagaagctgaggtgggcagatcacttgagtccaggagttcgagaccagcctgggcaacacagtgagatcccatctctatataataaatattaaaaataaaaaaaatttttaatttaaaaaattaaaatgaatttaaaagaaaattttaaaagataggatgctcattgcaacctccaccttttaagctcaagctatcctcccaccttagccttccaaggagctgggactgcaggcgcgtgccaccacactttggcgttaaggattattctg

SEQ ID NO: 45279 - DNA, 609 bp, Homo sapiens
cagagggaggaagtcagaaatgcagatgatctgtggggaggtgcgggtgcccagggcaagagagagggaggaggatggagactccagggcgtggaagaggagatatgcaaaatgccgaaccctagaggggtgccagctcagtcaccctcaaggcagactggcccaggttcccacacctccttgtcccacagtcaagtccaataaaatggcaggggtggcggggggaggggggagtagagacacagagccctctrtgatgttcacttgctgatggttttccctgagaagggactcagaatacgccatccccaggccgggtgcagtggctctcagcactttgagaagctgaggtgggcagatcacttgagtccaggagttcgagaccagcctgggcaacacagtgagatcccatctctatataataaatattaaaaataaaaaaaatttttaatttaaaaaattaaaatgaatttaaaagaaaattttaaaagataggatgctcattgcaacctccaccttttaagctcaagctatcctcccaccttagccttccaaggagctgggactgcaggcgcgtgccaccacactttggcgttaaggattattctg

SEQ ID NO: 45280 - DNA, 609 bp, Homo sapiens
cagagggaggaagtcagaaatgcagatgatctgtggggaggtgcgggtgcccagggcaagagagagggaggaggatggagactccagggcgtggaagaggagatatgcaaaatgccgaaccctagaggggtgccagctcagtcaccctcaaggcagactggcccaggttcccacacctccttgtcccacagtcaagtccaataaaatggcaggggtggcggggggaggggggagtagagacacagagccctctgtgatgttcacttgctgatggttttccctgagaagggactcagaatacgccatccccaggccgggtgcagtggctcycagcactttgagaagctgaggtgggcagatcacttgagtccaggagttcgagaccagcctgggcaacacagtgagatcccatctctatataataaatattaaaaataaaaaaaatttttaatttaaaaaattaaaatgaatttaaaagaaaattttaaaagataggatgctcattgcaacctccaccttttaagctcaagctatcctcccaccttagccttccaaggagctgggactgcaggcgcgtgccaccacactttggcgttaaggattattctg

SEQ ID NO: 45281 - DNA, 555 bp, Homo sapiens
tcttctgactctcacagcccaccaaaagacagatgcatcatcctgacttttggctgagccataccatggcccagcagcctgaccttttgtttactgggtcccactctgtaggagcgtgttatgcacggccccatcccacatcagaattttcaggtctaggtatttccaaaaatttccatcagaatagagaaacatgaaaaaggagaccattttgttttgttttgagactgagtctcgctctgtcacccaggctggagtgcagtggcatgatcttggcccagtgcaacctctgcctcccaggttcaaatgattctcctgcctcagcctcctgagaagctaggattacaggcacctgccaccatgccctgctaatttttgtatttttggtagagacgggttttcaccatgttggccaggttggtctcaaacttctgacctcaggtgatctgcttgccttggccttccaaatttctgggattacacacatgagccaccrcgcctggccaaccatttgttttatgataaaatggtctggtcatgcaatcccagtggaga

SEQ ID NO: 45282 - DNA, 478 bp, Homo sapiens
ataaatgtgtgtcatggtggttttccgcacagatcaaccagtcaccaaggtattaagcccagcatccattggctgttcttcctgattattgactattcttcctggataaccaaagggaattggttattccctttcctcatcaacccctgcccctccgacagtccccagtgtgtgtcattccccaccatgtatccatgtgttctcattgtttagctcctacttctaagtgagaatatgtggcagtcaccatatcttgagaatggacattggctgcagagcaggagcagagtccagaaggccccygctgtgccagacattaactctgcagttgccgaatttagccttcaattttctagattgtgtgagagaattggggtgatggctattgtataattttaacaaccaggataaccagggttctggtgcactctcactgaatactagcttgattcccattgaatatagattgaaaacacct

SEQ ID NO: 45283 - DNA, 562 bp, Homo sapiens
tgtctcagcctcctgagtagctgagattacagatttgcgccaccatgcctggctaatttttgtatttttagtagagagggaagttctaccatgttggccaggctggtcttgaactcctgacctcaggtgatccacccacctyggccacccaaagtgctgggattacaggtgtaagccaccgctcctggccaataactttatttatttattattttatttatttatgtttttgagacagagtctggctctgtcgcccaggctggagtgcagtggtgtgatctcggctcactgaaagctcagccattctcctgcctcagcctcctgagtagctgggactacagacgcccgccaccacgtccggccaatttttgtatttcttaagtagagacggggtttcaccgcattagccaggatggtctcgatcttctgaccttgtgatccgcccgcctcggcctcccaaagtgctggggttacaggcgtcagccaccgcacctggcccagaactttattataggtgggacacacataccaaaagaatcagtgcaccacaatgatctaattc

SEQ ID NO: 45284 - DNA, 540 bp, Homo sapiens
cccaggttctttgtacttactctttctcttttaatagtgaactttattgagactttcatctggcttgtacaaacttcaggaagttcctgagactacttcaggttttcataattcattagaaagacttatagagctgagaatagccattatactcatgaatgcatactgttacactgaaaggatattgattaaaactagcaacagaaaaacagggcagaatttaggataaccaaaggtagaattttcatttgtcctcatagtggtatcatgtggacagtgttcatttctccctaaaacagcacttgatgatatgcataaaatgttgtcaacataagaatgctatactaagcattaatatccaaagattttattggggatgcatcagatacacaaggctgracactcacactactgaccttagactccagcccctttagaagttgagctgttactctgtggcccaagaccccctataataaatcacatcattaatatagaatatttagcatggtcccaggccctcaggaaaacaaagtcatt

SEQ ID NO: 45285 - DNA, 527 bp, Homo sapiens
tttaaaaagtaaaaagtaaactattagtgttatatgcaagatcattttaagaaaataattttttcccagcatatggggaaagattgggwtaaatagcacttatgtggacatcaccaaaaaattcacatacagaaaaaatatgtaacacaattgctcaatcctaaatataaatttgagcaggcactgagtatgtcctttggagggaaatatactaacactcatatatttttattattctggtttttccactaattgtaaaagaattactaggtattttattacactctcctctgtagaaagcctacttagtatctttctattcaaagaaatccacaagagtggggcaataatgatacaagataccttgagctgaaaattttacattacctcttactgagtaatatagtatttaaataagtttttttctctgtctatgagaaaattagcttttgcttatgttagtgacagaagaggaaattgtcgcagagaacaagcaattttgtgtgacgctcacaaaagagggagga

SEQ ID NO: 45286 - DNA, 527 bp, Homo sapiens
tttaaaaagtaaaaagtaaactattagtgttatatgcaagatcattttaagaaaataattttttcccagcatatggggaaagattgggataaatagcacttatgtggacatcaccaaaaaattcacatacagaaaaaatatgtaacacaattgctcaatcctaaatataaatttgagcaggcactgagtatgtcctttggagggaaatatactaacactcatatayttttattattctggtttttccactaattgtaaaagaattactaggtattttattacactctcctctgtagaaagcctacttagtatctttctattcaaagaaatccacaagagtggggcaataatgatacaagataccttgagctgaaaattttacattacctcttactgagtaatatagtatttaaataagtttttttctctgtctatgagaaaattagcttttgcttatgttagtgacagaagaggaaattgtcgcagagaacaagcaattttgtgtgacgctcacaaaagagggagga

SEQ ID NO: 45287 - DNA, 592 bp, Homo sapiens
cagttacttttgcaccaacctaataccaaaaaagttattatattacctattttaatgttctcaacaaaatattacctattctaaaagtattacctacctctaaatatattacctattctaaaaatattacctatttctaaaaatattaccttttctaatgttctcaacagaaatttggaaattgaataaggtaaagaacattgcgacacttgtatcatgctcttccttcatgccattcttatcttccttttttctttcataataaatactgcttgtatgacctgaaaagacacatgagaaaaaatttaaggctgtatgtatatttctttacaaatgacagatttaacatagtacagtgtgatttgcctaagcaaggagagaaatcagtttttttttttatgtgcagggaacttggaaaatatattactttaatcagaattttttttaaaaaatcagaatcaatttgggaaraatctagaacaccacaaatgtctaacagaagatagatatatatcatttttctgtccgtatttatctcttatttcctgtcccaaaatagtggcaaatcttttaaagtacaattcatgcatta

SEQ ID NO: 45288 - DNA, 1433 bp, Homo sapiens
aagagggcagtcagtgggaacaaagccttgggttcaaaagttctgatgcaatttctgtcttcagaattctatcaaactgagctggaaatatttttatccaaatcctcctaagatttcaggtagcctccagctatgctgaaccactttgacactgtttcaaaccttccatttcttttatgcctgaagtatgggtttgccttatcttaaaatgcacgtgtatgcatgcatgcacacactgcacccaacaaaaagactacagaaaataaaagttatagaaatctttaagaatatcagaaaagattagctttatatcctgctgtgggggcctcattcacgcyttctcatgagtttgttcatccatagaaatgaccttagaaacagggatgtgttataaagctttattctaaaacacattttaattgactttctaaatttaagatggttctgtttttaaccattttcagacattttgtgtataccttaaattattgaaagtctaatgctttttcagcagctggcacttttcagtcagaaagtccatcccatcttatttaaataatcagatgcgtgatgactggcaacaaaactatttgtaattatgattacaactaaaggttccatacttctactaaaatttttagctgcctcaatccacatttccatgtgaaaaagggcatttgcatgattaaatctgagaaccatattttagtcattttacaaatgttcaccagagtaatttaaatatatgtgttaaatgcaaaatatttttagacgatagtgtcaaaaatatagtgagtgactgatgccagaaaaaaagtgtaactttatgaaaattcaaatttgctacatattttaatcaactttaaatttcttttcagatgtattatttgaagctttatggaaagcaaatagaagttaaactctaaatcatcactatctaatataaatttctgcttgttgaaatgtagtatacctgttctgttcattacagtagccatgagtcacccatactcatcatttgaaatgtggctggtgtggccggtgaactgatttttaaattttatttaatgttaattaacttataaataaccaatgaagctagtgactactgttatcagacaatacaatctatagtctgaaagtacttatagttgaaatatctcagtgtatattaacctttcaacaattaagtgttgctgcttctgtattttttgcattattaatgaatcaataaatataaaacacagaggaatcagcattcatacagacacacacacacacacacacacgtgcatacatatgttgtttcagtgcttaaaacaatcgatatagtaaaaatccattgctgctaaatgaggagagaatcttcaagtaaccagatactttctcacaggtgagttctggttctccagagatggatctctgttaaatgt

SEQ ID NO: 45289 - DNA, 545 bp, Homo sapiens
gcacatacatctgtccctgcagcctgagtcaaacagtcacagagaggaagaggaggaggaggaaggatgcgatgggcactgaggtcttgggccggctcccctccctatctcgggggagacccctcgtgtgatcctgccatcactcacccttccgcctccatcctccatcctcccacgtggatcaggaggacgcccactgcacagagctgtgatgagcatgaacaaaagacggcaggagctcatgccaaggtgctgagcacggggcctacggagtgcttctttctgctgcggctgacatcatcaaacaagaggttgacatggcttccggagaggatgtcattcgctgataaactgaaacatgtgacctagaatctactgtgaaggtctaagaacaaaccaacaaaccaaatggttttgtttgtttttcaaacaccatagcctgttttttcttttttttaatgctctaccgtgtgtcttagtttaatttcaaagtaagtccaataaatacacaaaatcacaggactgagcatkgagcattgtttccc

SEQ ID NO: 45290 - DNA, 558 bp, Homo sapiens
tgcattaattcattcacattaatctatatgcttatagatagatatctatattatatatgattagatattgaattagatatagatacatctcaaagactcactccaaacctaatgaagtataatcctcaggtaaggaacgaygattctgggattttttaaatatcagaaatgaaccctgtgggcagctacggatgagaacctggtttacaccaagttaaaatggttctcattgtaagaagcaaaaattaaaattcacattttaaggtcagtggttggccaaattgtttcttccctctaaaacttgaaaactactactatgaaattctaaaggtaatagtgagctcactatgtcaaatgggggcggggaagcaagtcttctttaggagcagatatgagagtagtttgagccatatgccccaaagctgcacagcagatttgttaaggccccccagaggggtataagccctggttaggaattgttcctgtaggaacattcatttgatttctcatttactggagtatcctggtgactttaatgaaagcaaatcttatgcaaat

SEQ ID NO: 45291 - DNA, 591 bp, Homo sapiens
tggggcctggagctcacatgacctcctcggtctcagccagtcgcgtttgtgcaccaccgaggcttagccaggtgtctggctgaaggtggagatcaagcagagtgctcctgaggcacgaggggcccccactggctttctcacccttccccaggcgaaccttgcactgtcctgtcctgcagatgaggtgtgcagtgggggccgctccctgaggtcccacccccgcgttacccacttgaccatcgacctccaagtcctctgcatctctctcaggrgatcttccctttcaccacccgactcttatttttgtttttaatagccttaatgtttttagagaagttttacactcatagtgggatggatgggaaggtacagagagttcccacagaccccctgccctccccatgacatgcacagtcccccactgtccacaaccgcctccagagggtccatcagttcaatgggtgaactatacggacaacgtcattgtcacccagagtccagggctcacaggaggattagctgtcagtgtggtgatcctgtgggtttgggcaaatgtgtaaagacgcaggcccaccattctagtgtcatgca

SEQ ID NO: 45292 - DNA, 591 bp, Homo sapiens
tggggcctggagctcacatgacctcctcggtctcagccagtcgcgtttgtgcaccaccgaggcttagccaggtgtctggctgaaggtggagatcaagcagagtgctcctgaggcacgaggggcccccactggctttctcacccttccccaggcgaaccttgcactgtcctgtcctgcagatgaggtgtgcagtgggggccgctccctgaggtcccacccccgcgttacccacttgaccatcgacctccaagtcctctgcatctctctcaggagatcttccctttcaccacccgactcttatttttgtttttaatagccttaatgtttttagagaagttttacactcatagtgggatggatgggaaggtacagagagttcccacagaccccctgccctccccatgacatgcacagtcccccactgtccacaaccgcctccagagggtccatcagttcaaygggtgaactatacggacaacgtcattgtcacccagagtccagggctcacaggaggattagctgtcagtgtggtgatcctgtgggtttgggcaaatgtgtaaagacgcaggcccaccattctagtgtcatgca

SEQ ID NO: 45293 - DNA, 591 bp, Homo sapiens
tggggcctggagctcacatgacctcctcggtctcagccagtcgcgtttgtgcaccaccgaggcttagccaggtgtctggctgaaggtggagatcaagcagagtgctcctgaggcacgaggggcccccactggctttctcacccttccccaggcgaaccttgcactgtcctgtcctgcagatgaggtgtgcagtgggggccgctccctgaggtcccacccccgcgttacccacttgaccatcgacctccaagtcctctgcatctctctcaggagatcttccctttcaccacccgactcttatttttgtttttaatagccttaatgtttttagagaagttttacactcatagtgggatggatgggaaggtacagagagttcccacagaccccctgccctccccatgacatgcacagtcccccactgtccacaaccgcctccagagggtccatcagttcaatgggtgaacyatacggacaacgtcattgtcacccagagtccagggctcacaggaggattagctgtcagtgtggtgatcctgtgggtttgggcaaatgtgtaaagacgcaggcccaccattctagtgtcatgca

SEQ ID NO: 45294 - DNA, 620 bp, Homo sapiens
ttttatgattctatttttgtaaatcaaataatgtgtatttataaacatataaaagattgcatgtctaatcactaaaatttcaagagtagtagttgtcactgtgtggtgggattatgagtaattatctgcactttctggatatatgcaatgaaaaacaagacactataaccctcacatgaactcacttgactccatattttgcctcttttttcagaaatataagccgtacaacaatggagctgccaatcaaaagtggcattacatgaaaaatataaaagcacttgtggcctttcatagcactgccttggataaggaaattacatcagcaaattatgctggtgtctgtacatcatctgtgattaaagaagaaaacattgatcaaccagtaagtggttccttcctctcaaagataaaagaaaaatagggtaaaagagagtaatttaataaaatgagaaaatttttttccctagaaaactttatgttcctacaagttgaatgctgatktttgagtgaaatcacttagactctgattctggtaggaaagaatgaaggaaaattgtgagagaaaaagaattaggtagtttatattaatctaatgtacttaaaatttttataattga

SEQ ID NO: 45295 - DNA, 596 bp, Homo sapiens
ttttcctgatatgtatcctttatcattttcttttttctttttttttttgagacaaggtctcattctgtcacctaggatttcccaccytaacttcccaagtagctgggactacaggcttgggccaccacacctggctaatttttgtattttttgtacacacagggttataccatattgcccaggctggtctcaaattcttaggctcaagcaatccacccacctaggcctcccaaagtgcggagattacaggcgtgagccaccacaccctgcctcattttcatttttgacactttccgtgactgtatagaatgttccttcttcaaattaaaagtaatttaaaaactatttgaggaatgccatgatacaagaatgcttaatagtaatagcacattgtagaataggagcccaaacaactaaaaacacagaatttttagaacagcgatatcttttaaaatgtcaaatcaaaacaaacaccattttaagtttacttaaatatttaaaatgattgtactgagaaccattgtctgtatgtctttagtattgttgaaaggagttagccagcttgctttaggcagaaagtaaaggaagggtccccg

SEQ ID NO: 45296 - DNA, 596 bp, Homo sapiens
ttttcctgatatgtatcctttatcattttcttttttctttttttttttgagacaaggtctcattctgtcacctaggatttcccaccctaacttcccaagtagctgggactacaggcttgggccaccacacctggctaatttttgtattttttgtacacacagggttataccatattgcccaggctggtctcaaattcttaggctcaagcaatccacccacctaggcctcccaaagtgcggagattacaggcgtgagccaccacaccctgcctcattttcatttttgacactttccgtgactgtayagaatgttccttcttcaaattaaaagtaatttaaaaactatttgaggaatgccatgatacaagaatgcttaatagtaatagcacattgtagaataggagcccaaacaactaaaaacacagaatttttagaacagcgatatcttttaaaatgtcaaatcaaaacaaacaccattttaagtttacttaaatatttaaaatgattgtactgagaaccattgtctgtatgtctttagtattgttgaaaggagttagccagcttgctttaggcagaaagtaaaggaagggtccccg

SEQ ID NO: 45297 - DNA, 529 bp, Homo sapiens
ataagagatgatctctgatgtcaagaggtttctaggggaagaacaactcattaaaaataagtgcaattaagtattacatcagagtattaagtacagttaaacaagtagaataaatggctagtgcaaccagagccacccgaaaagaactcatggatgaaatactaagtggacaggagaaagcagtgctgaacataggagggaaggggattttaagygggagaataggtttcagcaaaaactcagaggcaggaagcatctctcgtctgcacacgaagcataagacatctgaaacatggactggcaaaataaaccaggagctcagggagccatgaacattcctagagagcacttgagggattgactgtaatgatggtaatattttcctacattttactgagattttctttcatgcggttttgtgtactttcccttttccctaatcagttcaagctatctgtcagcctggtagtgaaagaggattagaattgttacaacaggaatgagaaaagaaagaagcattcatgttcat

SEQ ID NO: 45298 - DNA, 615 bp, Homo sapiens
ctacaagccaaggaatgccaagagttgccagccctgatcaaaagctagggagaggcatgaaaaagattctcctccaagcctgctaattccttgatttcagacatctagcctcyagaattgtgaggagataaatgtgtgtttgaagccacccagtttgtggtactttgctctggcagccctagcaaacaaataaaccttccgtcaccatggttacggcctctcctgctagcgctctctctctctctccccttaaccctttcctcctaccccccacagcggctctgcagtgccactggcctccttaaccttggggtttgagtggagttccaagcaagttctcacctcaaggtctttgcacttgcttgccctcttctcccttatgttcacatggcctttccttagtcatacatttttattgggggaggggtggtgacattttaaagaacacactcacccttcaggactgtgtccctcttggaaattaatgaattctgcccaatataaaaggaatgcctattaaaaagtaatacctaaaatctccgcaaatactcactagaaggcaaaccttctgcaaacacatcactgaggagcatacacactagagctagattgaat

SEQ ID NO: 45299 - DNA, 616 bp, Homo sapiens
ttatattggtgagttaagacttctcagtaaacatgttactgtttaaactagagcttttaatcagaagagagtaataaaatttagaagtcttacaaatacaaggaatagaacgccactatttaaatttgggatcaaaagaagaatgctgttggtatatgtgccatttaactggcctttatcatggtctttagataatccagaattacttgaaatattactcacgagcgtgtgtgcagggtttcaggtgtatgttaagaatgcctggcagcacgtcttctggcaagatgcccacgtttgtgtgcatactcaaaggccccaggtttccaggtgcccaagcatcttagtggtgagatgcagaaagaatgcaagtagtatttcctttcatcttatcatcgagtgtaaaatgttccgatgaatatggtagcaagtgtcttccttcctktgaaatatgagttttcatcagctgttggatatgctcacgtaactaagccaagcaaaatccaacacaaatttaaaagttgcttggctacctctttagaaaatttttgttatgtaatatacattttggaagtttttaatgtaactgcccaggtgtgcagattttcagctggagatt

SEQ ID NO: 45300 - DNA, 632 bp, Homo sapiens
tcacaaagaatataaacaaattatgcgaataggattaaatttttttaatgttctttctaatgttgaagtggtttatatggtttactacagtagtaataaactctatcaaaacatatagtaaacagctgattaaatatatatggatgataaactgcagcttggttggagttttgcacgatttagcgggttggcaggagtcaccatcttactttttaaccacaggattccctctgcttaatcttaagaagatgaaggctggccaagtgyggtggctcaggcctgtaatcccagcactttgggaggctgagatgggcagatcatctaaggtcaggagtttgagaccggcctggtcaacatggtaaaaccccatctctactaaaaatataaaaattagctgggcgtggtggcatgcggctgtagtcccagctacttggggaggttgaggcaggagaatcacttgaacccggaggcagaggttgcagtaagctgagattgcgctatcgcactccagcctggccgacagagcaagactctgcctcaaaaaaaaaaaaaaaaaaagatgaaggctacaggcagtggctcacgcctgtaatcctggcactttggtaggccatggtgagaagttcccttta

SEQ ID NO: 45301 - DNA, 549 bp, Homo sapiens
gaaggttttatgtagaaatgattctttttagggagtctgctctcattaaaaaaaaraaaaagaaaactacctaatttctatccaataacaatataatttataacattccctttaaaattctgttcaataatatatgactcgtagacttaattaaatgcagtccttagaaaacaatatacatagctctccccatggacactgcctatttaaaatagatgacacaaatccattcccagctctctgggcactgccatgggtgttcagtcaccaaaagctggcaaagacccagggcttatctaattttatcaagtacttagtataaaccatctagttctaaaagagcacaccagctgtttaactgagtctgactcatcagcaagtttaagaaccactggctttctgcagaatccttatttttgtttgttgttcaagctgtgaaaaaagtaagtagtcaaatcaaaaatagcaactctagaatggacttaagctagtcccatgctacttccaacctgaaggaaactcagagctaggacttcaaggtctttcctc

SEQ ID NO: 45302 - DNA, 549 bp, Homo sapiens
gaaggttttatgtagaaatgattctttttagggagtctgctctcattaaaaaaaagaaaaagaaaactacctaatttctatccaataacaatataatttataacattccctttaaaattctgttcaataatatatgactcgtagactwaattaaatgcagtccttagaaaacaatatacatagctctccccatggacactgcctatttaaaatagatgacacaaatccattcccagctctctgggcactgccatgggtgttcagtcaccaaaagctggcaaagacccagggcttatctaattttatcaagtacttagtataaaccatctagttctaaaagagcacaccagctgtttaactgagtctgactcatcagcaagtttaagaaccactggctttctgcagaatccttatttttgtttgttgttcaagctgtgaaaaaagtaagtagtcaaatcaaaaatagcaactctagaatggacttaagctagtcccatgctacttccaacctgaaggaaactcagagctaggacttcaaggtctttcctc

SEQ ID NO: 45303 - DNA, 1519 bp, Homo sapiens
tgcctgtatcaaaacttctcatgtaccccataaatatatatacctactgtgtacccataaaaatttaaaaaatttgaaaagaaaaatcccttccctaaatttttattgagttaaggagataagaaacaaaattrtaaacatgtatttaagctgctgtctttacccagaaatcctgagtgggctcatctcttcacaccttgtcaacaatgggtgcttttctcatttatttagtaaatggatttccctgaaatccgtactatgttctaattgctttgacaactgagattattcatattattggattctggtctaaactacttgttcatataactaaaagcctaaaggacaatttcatgatttgtggcagattctcacatttagccatttggtttaccctaaatttgcttccattttttagtagtgctctattgtaatgcagatggaaaacatcacaatgttctagaagggaactgaaatgaaaatgaattatctatacctatctccactccacttatgtaagggaaattgaaagataatcacttcatgggtatccatttaaaataaaagccacttttcttttcttattgcttgtgaaaattcaacccatcttttgaacaaatttagcagtgatttacaatttttggttaaaaatgccagacttaagatttcaaaatgcactcctttgttagaaaacaatgatttcatcaaatggtaaccctactttgtcttaatagttaattcacaggttggtgaatctatttattattaaatgtaattcaaaggttattttcacagtaaaagcatacagataaaaattagccccttctcataaataccagagtcctagtctcccctctcagaggcagtggactacattaaatttattattacatacgttttgagaaattatttatgtgaatacaagcatatatatgaatatgtaagcttttttcatataacaagagcatttttgctgttccatgccttattttattaactgtacatttctgaagatttgactgtatcagcacatttagatcttccttatacttttaatatttttgtgaaaatagaataaatacagagaagtgcacaaaacatagctaaatgaatcaacacaaaacaaaagcccacaagataaccacctggtttgccaggcaatcaagcactcctaggctttcacaaggctccttcatgtcccctccaagtcactaccttctctgtctctgtcaaaggaaaatactttctagcttctagcttctatggtaatcctgtccttgcttttctttagtgttatacctaggtgtacatccttaaacagtacagttaagttttgcctgttttcagaatgtcaggtaattcaaatcatacagtaggagttattttgtgtctgacttactccgtgctttctattcatctcatctattctagggcttttatatgctctaaatttttccttctttctgggccttgctgcaaatttgtaattctgtttctccccctacctctttagaagtta

SEQ ID NO: 45304 - DNA, 571 bp, Homo sapiens
tagaaccctgatgttttactgtattactagtatcctcatattgcagaggaatatctaacaatgtttaaaatgcacataagaatatcatttaaaatgatgggatacatataaacaggtgagatataaaaataatggagtaactatgcttacatgggactccacttggtcagaagttctttgtcaaccccwttcccagacttgatctcagaaagccttcatagtagctacttacttctttggaatgaaatgaaattcattgaggaaggaatcttatatgagtttagacttcatgagtctttggaaccactgctacctgcccattatggagaattcagaaataatggcagattaaaaactaactgattttacactgaataagcgattccagtaggaaaggaaacatgaaatttcttaggctttaacatactttcatgtgtgtgtaattagtattatagtaactatacatttcttgttactatacgtaaaggacacagttctgtaacaggtattatttgtagatgtttagcactgcatatgagctgtgtttattatgagctacctagtttacatg

SEQ ID NO: 45305 - DNA, 529 bp, Homo sapiens
tgcataaactgcctagagcagaaggaacaggtggtaaaagaaattattttaacagcagtagaaagaaatgaaggaaaaaaaatacacccatctaaagagtgaactattagtaaaaaaatgggccttactcagttytatgactgtaatatctcttttaaacgtttcactacccctcaggaatgattggagtgcttttaacttatttttaaagcccacacataactatggcactacctatttccttaacttcctatctctgtggcatcatctaataaacacatctcagaaaagatagcttccttgaccttggatttggaggaaatatcttgggagagaccaaagggaactgttctttctgatttttgattacttggagtaagttctattttatatactaacaaaatggacatactgttaacaaaaatggacataaaaatagattaggttgtctacaacaaaatgatcagtgacataattttccatagtgaattcaaagcaaatgcaaatagtataatattttacttgtgaa

SEQ ID NO: 45306 - DNA, 599 bp, Homo sapiens
cagtgagccgagatcacaccattgcactccagcctgggtgacaagagcgagacaaaaataaataaataaataaataaataaataaataaataaataagaaaagtggaagatcttttaggtcagctggtaggatatgtagaattgtacaggatatatgaggcatcaatccaactttctggcattatttcccattccttttcaccttcccaccttttccccaaattctaaccattccattttacagtgttcctcaatgattacacttattgattacattataaataatcttccctagccaaaaatgactttgtcccttctttatacttttccgtaccttccagatttccagtattaatcatttactcctctctgtgaagcctttcacatctactttgttgtgagtcctgtatgtgtgagatacacgaagataaggcacagtccctccatgttttcaacgagttcaggacctagaaccaagggtcccaatggactcagtgcctctcttgcagcactcacttgtcagttgtaaatcagatacctrtttgtacacgtctaacactgccttcccaaagttatgagcaccatcaccttgacatatt

SEQ ID NO: 45307 - DNA, 615 bp, Homo sapiens
ggctggcacacggtgcgcacacacactggcctgcgcccactgtctggcactccctagtgagatgaacccggtacctcagatggaaatgcagaaatcacccgtcttctgcgtcgctcacgctgggagctgtagacsggagctgttgctattcggccatcttcgatgcctgacatttttaaggctaggctggcaaacaatccatgaagaccgcctccagagaagagactcatattacgtaactataatagcttgggtttatggagaatatttcttagcacttaacaagttaactcactttatcctcttcgtggtccatgtctgtgaaacacacagcaattcctgcctgttttccagtaggtggagaccaaatgtgctttttatttatttatttatttcattattattatttttgatggagtctcgctctgtcgcccagtgcaatggtgtgatcttggctcactgcaacctccgtttcctgggcttaagtgattctcctgcctcagccttccaagtacctgagaccacaggcatgcaagaccacacctggctaatttttatatttttagtagagatggggttttgccatgttggccaggctcatctcgaactcctgac

SEQ ID NO: 45308 - DNA, 897 bp, Homo sapiens
gggtgtgcaaagtggtggggaggtctctgtccaccttgaggctccccatccagcggggtcttttcacctccagcacccagcaggtgggagggagagagcacagtggaggcccactgctgccttcagagctgattcccagagttctacattccccttcgactcataatccactggtcacaaggacttgagtgccacagccttgcacgtagacagagaagttttgatggacagctgcattgtggcacgtggatgtattaactagatgttctgtcgtcccaggagggtcttgcatgttctccccacctattcaagcctgtctgaaattgatgctctcttttcccttccaggaaatgtggtgtcctctgatcctccttccttcctgagaactggggtccttgcagatccgccaagtccagaggtgcccagtggccctgcatttccttccaccagagtcagctgaattcagatcaaaacttagaagaacgttcctccctccacgggactcagccctgaggctggggtggagctggggaccagacccagtggaaccctcattgtttatcctctctcatctctgatctcaggcactcaggtcccaaccgttctcttcctagcctctttacttctatggaaatcactcagacattgagagacccctgttgtgagaggttgggagactcaagctctacaarcacaagccaatctcagctgaggctgagcctgaactattccttgtgtccctgcaacaattctccttctcagcactggcaaatgatgtttgtttcccaaaagcaaggaacatgtgaggagcagagtgatatttccacttaggaccaaaccttccaataggtacaacttccctcatgccattagccctccttgatccagagaggagac

SEQ ID NO: 45309 - DNA, 383 bp, Homo sapiens
atgagcaagattattgtgtggtgaagagaggcctctcataaagttcctgtccaggtaggtgaccaagagctgggcaggtgggagtccctgaactccrtagatcaattggggacctctttttgggaagggggaagcctcttgttgtgacctccctggggacttgggatccatacagtcctttgaccatcctcttacccccttatacacttccctgctactgggggagaagtaggttgtattaggttaaaatcaaactctaagttccatgtctttgggcttaatacttgacattgccactctccagccttgtgagatgttgcatgatttcatcagtgtaaaagctggctaagttaatgctggctattgtaacacagaaacacttt

SEQ ID NO: 45310 - DNA, 518 bp, Homo sapiens
tgtagaaattttggttagcagttacttcttcagcagtttgaattggtccctttcactgtgtccctgagtcacaattatattttgggagtgagtggtgacaaatatcttaccattttgatcatagccttcagatcttaggttagratatgaaccgaaattctaacactgagatggagacagtgactggatgggattgtcacagaaaagaggaagtaagagtattgagtgtggaggagaaatcatacacagtcgccctttgggatccatgggacattggttccaggatcctgcacagatactgcatccacagatgctcaagtccctaatataaaatgccatagaatttgcatatagcctacacatagactcctcccatatattttaactcatctctagattacttacaatacccaatacaatgtaagtgctgtgtaaatagttgtgatgctgtattgttcagggaataataagaaaaaaaggcgtatacttattcagtacaaaggcaaccattttttcca

SEQ ID NO: 45311 - DNA, 518 bp, Homo sapiens
tgtagaaattttggttagcagttacttcttcagcagtttgaattggtccctttcactgtgtccctgagtcacaattatattttgggagtgagtggtgacaaatatcttaccattttgatcatagccttcagatcttaggttaggatatgaaccgaaattctaacactgagatggagacagtgactggatgggattgtcacagaaaagaggaagtaagagtattgagtgtggaggagaaatcatacacagtcgccctttgggatccatgggacattggttccaggatcctgcacagatacygcatccacagatgctcaagtccctaatataaaatgccatagaatttgcatatagcctacacatagactcctcccatatattttaactcatctctagattacttacaatacccaatacaatgtaagtgctgtgtaaatagttgtgatgctgtattgttcagggaataataagaaaaaaaggcgtatacttattcagtacaaaggcaaccattttttcca

SEQ ID NO: 45312 - DNA, 571 bp, Homo sapiens
agcaaaagaagtagaagaaagttagttccaatgatggggaaaaaatagaatagaaaattagtaaagtaattccagaagaatgagagtaaaacaacaatatcattgttttggaaaaagattgaggaaagaaacagggattttagaggctatactaatctaggttgagccaaaacataccattaaaaagcaggctttgggattcagtgatgctctgattatgaaaggaggaaagaagagaatggtaagtgcaacatttagcrtacagagttgaggaaaatagaaatactataaagcattcacgtcaacacagtagataggttacatggaacaccaagaaacattggaagctcgctaccaaaaggacaaatgttagtgaggggcttgggaatttctgattttataagaaggaaacaaacttagaattatttttatttaaatgaaggtttgaaaatacaaaaataacagccctgcttatccacaaaggaggaagttcaggatagagattagaccaaaggacgagagatgctgaaacaactgagaatgaatggaccattgtgctaaaactggaaaa

SEQ ID NO: 45313 - DNA, 609 bp, Homo sapiens
aagaagaaacaaaatcttaatttcttcatcaagtgtaaaactgtggactggactctggaggaataatacataaaaagacacacaggcaattttttttttaagttttattgagaaatattaataacataccacagaagccacccattgaaactgtaaaattcaacggttttcagtatatttgcacagttgtgcaracagcaccacaataaattttagatcattttcattaccctgaagaaaaccgcatatccctccatttccccccaactcccctaaccctgggccaccaccaatgtactttgtttctatgtattggtctattttggacattttatttaaatggaattacaaaacgtggtctttcgtgactggcttctttcacttagcatcatattttcaaggtttactcaatgtttcatgtgcagagggggcactttatgtaaggataaacctaggagggaggtgcttattgattttgaaacttcactccaatattgtaaaagggaaatgattggtttcaaatagaggaaaaacctattcgggctaaaatcctcccttttcgccagtttgtaatgtggggttttattgcgaagaatggcaaggttttta

SEQ ID NO: 45314 - DNA, 598 bp, Homo sapiens
gctataagatcaaaatggaaactgacttattttaacacaggggtcctcaacccctgagccatgaactagtcactggtccatggcttgttaggaaccaggcaacacagcaggaggtgagtggcaggtgagtgagtgaaacttcatctgtatttacagccactcctcattactcacattaccgcctgggctccacctcctgtcagatcagcagtgacattagattctcataggcattcaaatcttattacgaactgtgcatacaaggatataggttgttcactccttatgaaaatctaatgcctgatgatctgtcactgtctcccatcacccccaaatggaaccatctagcctcaggaaaacaaactcagggctctcactgattatacattatggaaacttgtataattatttcattatgtattacaatgtaacaataatagaaataaaatgcatgataaatgtaatgcacttgaatcaccctgaaaccatccccygaccctggtccatggaaaaatagtcttctatgaaagtgaaccctggtgcaaaaaaggttggggactgctgctttaacaaacccaaaacctaaaactccacaaaa

SEQ ID NO: 45315 - DNA, 600 bp, Homo sapiens
  misc_feature (1)...(600): n = A,T,C or G
acatttttccaccaaccaagttttaaccaaatattatgttataatttttaaatgacattttatcactatatttatgcatcaaataatagttcatgttattatcaaataataacttatttattatgtataatatttacagtgagtactgacttcagctgtaatcaaaatataaatttaaccagtctatgggggtcttattttactttaatgatgaaaacataggttcaaaccccagcctgtttgatccagtatttgaccaatgttattctccaatacattgctatgtaagattgyaagtggagatcctttcctcttttaaaatgaaaatgaactattgaaggtcactgtgatatttctgaagaactagggattttatcactggggagcatttaaatgttccttaaaccaatcttgttacagctggacccctcgaccagagtctgtctctgaggtgttgctctatctttcaacagcctcctcttgttgcacaagacaacctnnnnnnnnnnnnnnnnnnnnnnnnnnnnnnnnnnnnnnnnnnnnnnnnnnnnnnnnnnnnnnnnnnnnnnnnnnnnnnnnnnnnnnnnnnnnnnnnnnnnc

SEQ ID NO: 45316 - DNA, 607 bp, Homo sapiens
ttatttacatttttaaaatcatctcttgctaatggtagaaaagatgttagggcttttcatctatccacctgtacttttcaacaattttcygaagatgtgataaagtaatttcaataaacctttttaatatattccaccttttattggatatcaccgtcagcactcacaatttgttaattgtgtcatttgaggtaggaacaatgaaagcaaaatggtagtttaacagaacggtgcattaaattgtcaaataaagatttatgactaagaccccagatttaaccctgggtagctatactcacttttcctatttgacgcaacatcatactcctgttttttgtggttccccagttaattcatgtttctttaaaatagtaataacatgtgagagcttttctcttagtgttctttatattaataaactcaaaaatattttctgacaataagcattaattttcccacatcattatgcacaagctttaatattaataatgtttatttgtaggtgcagttaactacaatctatctgtgtttataattctatgatattgatatatggttttcatgttaataattttagtggaattatctttccagaaatcagccccgt

SEQ ID NO: 45317 - DNA, 607 bp, Homo sapiens
ttatttacatttttaaaatcatctcttgctaatggtagaaaagatgttagggcttttcatctatccacctgtacttttcaacaattttctgaagatgtgataaagtaatttcaataaacctttttaatatattcyaccttttattggatatcaccgtcagcactcacaatttgttaattgtgtcatttgaggtaggaacaatgaaagcaaaatggtagtttaacagaacggtgcattaaattgtcaaataaagatttatgactaagaccccagatttaaccctgggtagctatactcacttttcctatttgacgcaacatcatactcctgttttttgtggttccccagttaattcatgtttctttaaaatagtaataacatgtgagagcttttctcttagtgttctttatattaataaactcaaaaatattttctgacaataagcattaattttcccacatcattatgcacaagctttaatattaataatgtttatttgtaggtgcagttaactacaatctatctgtgtttataattctatgatattgatatatggttttcatgttaataattttagtggaattatctttccagaaatcagccccgt

SEQ ID NO: 45318 - DNA, 607 bp, Homo sapiens
ttatttacatttttaaaatcatctcttgctaatggtagaaaagatgttagggcttttcatctatccacctgtacttttcaacaattttctgaagatgtgataaagtaatttcaataaacctttttaatatattccaccttttattggatatcaccgtcagcactcacaatttgttaattgtgtcatttgaggtaggaacaatgaaagcaaaatggtagtttaacagaacggtgcattaaattgtcaaataaagatttatgactaagaccccagatttaaccctgggtagctatactcacttttcctatttgacgcaacatcatactcctgttttttgtggttccccakttaattcatgtttctttaaaatagtaataacatgtgagagcttttctcttagtgttctttatattaataaactcaaaaatattttctgacaataagcattaattttcccacatcattatgcacaagctttaatattaataatgtttatttgtaggtgcagttaactacaatctatctgtgtttataattctatgatattgatatatggttttcatgttaataattttagtggaattatctttccagaaatcagccccgt

SEQ ID NO: 45319 - DNA, 1736 bp, Homo sapiens
gggactataacttatttgtctgttcaatactcagtgtctagcccagtgccttgttcaagacatacatataacatatgtgttttaatgtaataaacactacataaaaataaagatgacaaaatgaagtgtttgtttattgcttttgtttgttggtgtgttcagatatttgcttaatttgtgtgttttgtagaaagagatcaagaaaagtgaagcgtgtcagttttcctagaagaaacagcagggaagaaacaatgttaatagtccattccccatgcacactgaccagacttttggtgctcatgacatgagtattaacctccacatgcagcaacgagggaattctaaacaaggtagcccatgcttaactctgttgtatgacaaataaaagctaaaacatgcttttggaaagcacaaatgaagctagtaactaattaatccacctcgtgtaagccaattgtcggttaacaattgatctaaaatgttgggactgttttaaaaagatttgcaacttagtaaatcatgattgatatattagaatgaatatttttccttgggaaattttatcttctgaatttccatttctatataagtctcttactttacatattatgctctatagaaatctttaccatatatttagtcttctatgatacatatacacacttctataatatatatacatacataaatgcacacatgttatagagaactgatttaacacaatccaaattattgttcattttaataagacattcgtaagtctgattttcttttattccttaaaatgtaaacagccattcatatacaccttttatgtacacacttgtttaattaggagaagctattccaacctgatcagattattctaaattgtatataataactatgatcaaaaagctatttggaatagtttgattaaaatcagtgcagacctagaattataatggtaaacataattatttcacaatagctattccattaaatgtcatactgctgtgctggtgggaaatcgctgatgaaaataaatgtgttgaagatagaaaataatggtcaacaatccatttcaatgtaattgtaggagatggaatagaaaggctttcagttttgatggttttgatagcagatgttctaaagctccctggtggctatgttttcagagataaatgcaagtgctcaaatggaaatgcattcaggttcaacagaacacctgaaaatctttttaacaactccgctcactgtttcattgctcacttttggatttaattaaaggataagtaatgttatctttagtcaaaartaaacccacttaagggccgggtgcaggggctcacagctgtaatcccagaactttgggaggctgaggcgggtggattgcttgaggtcaggagttcgaggccagcctggccaacatggtgaaaccttgtctctactaaaaatgcaaaaaattagccaagtgatgtggtgatgcacacctatagtcccagctacttgagaggccgcagcagaagaattacctgtggcagaattgcttgaacccaggaggcagaggttgcagtgagctgagatcatgccactgcactcaggcctgggcactctgtctcaaaaaaaaaaaaaaagaaagaaagaaagaaaagtatgccttttaagagacgagacagaaaactgcctatgactttcacatgacattgctagattctgtatgtccacatctgtctgtcattagctgctttagtttg

SEQ ID NO: 45320 - DNA, 1736 bp, Homo sapiens
gggactataacttatttgtctgttcaatactcagtgtctagcccagtgccttgttcaagacatacatataacatatgtgttttaatgtaataaacactacataaaaataaagatgacaaaatgaagtgtttgtttattgcttttgtttgttggtgtgttcagatatttgcttaatttgtgtgttttgtagaaagagatcaagaaaagtgaagcgtgtcagttttcctagaagaaacagcagggaagaaacaatgttaatagtccattccccatgcacactgaccagacttttggtgctcatgacatgagtattaacctccacatgcagcaacgagggaattctaaacaaggtagcccatgcttaactctgttgtatgacaaataaaagctaaaacatgcttttggaaagcacaaatgaagctagtaactaattaatccacctcgtgtaagccaattgtcggttaacaattgatctaaaatgttgggactgttttaaaaagatttgcaacttagtaaatcatgattgatatattagaatgaatatttttccttgggaaattttatcttctgaatttccatttctatataagtctcttactttacatattatgctctatagaaatctttaccatatatttagtcttctatgatacatatacacacttctataatatatatacatacataaatgcacacatgttatagagaactgatttaacacaatccaaattattgttcattttaataagacattcgtaagtctgattttcttttattccttaaaatgtaaacagccattcatatacaccttttatgtacacacttgtttaattaggagaagctattccaacctgatcagattattctaaattgtatataataactatgatcaaaaagctatttggaatagtttgattaaaatcagtgcagacctagaattataatggtaaacataattatttcacaatagctattccattaaatgtcatactgctgtgctggtgggaaatcgctgatgaaaataaatgtgttgaagatagaaaataatggtcaacaatccatttcaatgtaattgtaggagatggaatagaaaggctttcagttttgatggttttgatagcagatgttctaaagctccctggtggctatgttttcagagataaatgcaagtgctcaaatggaaatgcattcaggttcaacagaacacctgaaaatctttttaacaactccgctcactgtttcattgctcacttttggatttaattaaaggataagtaatgttatctttagtcaaaaataaacccacttaagggccrggtgcaggggctcacagctgtaatcccagaactttgggaggctgaggcgggtggattgcttgaggtcaggagttcgaggccagcctggccaacatggtgaaaccttgtctctactaaaaatgcaaaaaattagccaagtgatgtggtgatgcacacctatagtcccagctacttgagaggccgcagcagaagaattacctgtggcagaattgcttgaacccaggaggcagaggttgcagtgagctgagatcatgccactgcactcaggcctgggcactctgtctcaaaaaaaaaaaaaaagaaagaaagaaagaaaagtatgccttttaagagacgagacagaaaactgcctatgactttcacatgacattgctagattctgtatgtccacatctgtctgtcattagctgctttagtttg

SEQ ID NO: 45321 - DNA, 1736 bp, Homo sapiens
gggactataacttatttgtctgttcaatactcagtgtctagcccagtgccttgttcaagacatacatataacatatgtgttttaatgtaataaacactacataaaaataaagatgacaaaatgaagtgtttgtttattgcttttgtttgttggtgtgttcagatatttgcttaatttgtgtgttttgtagaaagagatcaagaaaagtgaagcgtgtcagttttcctagaagaaacagcagggaagaaacaatgttaatagtccattccccatgcacactgaccagacttttggtgctcatgacatgagtattaacctccacatgcagcaacgagggaattctaaacaaggtagcccatgcttaactctgttgtatgacaaataaaagctaaaacatgcttttggaaagcacaaatgaagctagtaactaattaatccacctcgtgtaagccaattgtcggttaacaattgatctaaaatgttgggactgttttaaaaagatttgcaacttagtaaatcatgattgatatattagaatgaatatttttccttgggaaattttatcttctgaatttccatttctatataagtctcttactttacatattatgctctatagaaatctttaccatatatttagtcttctatgatacatatacacacttctataatatatatacatacataaatgcacacatgttatagagaactgatttaacacaatccaaattattgttcattttaataagacattcgtaagtctgattttcttttattccttaaaatgtaaacagccattcatatacaccttttatgtacacacttgtttaattaggagaagctattccaacctgatcagattattctaaattgtatataataactatgatcaaaaagctatttggaatagtttgattaaaatcagtgcagacctagaattataatggtaaacataattatttcacaatagctattccattaaatgtcatactgctgtgctggtgggaaatcgctgatgaaaataaatgtgttgaagatagaaaataatggtcaacaatccatttcaatgtaattgtaggagatggaatagaaaggctttcagttttgatggttttgatagcagatgttctaaagctccctggtggctatgttttcagagataaatgcaagtgctcaaatggaaatgcattcaggttcaacagaacacctgaaaatctttttaacaactccgctcactgtttcattgctcacttttggatttaattaaaggataagtaatgttatctttagtcaaaaataaacccacttaagggccgggtgcaggggctcacagctgtaatcccagaactttgggaggctgaggcgggtggattgcttgaggtcaggagttcgaggccagcctggccaacatggtgaaaccttgtctctactaaaaatgcaaaaaattagccaagtgatgtggtgatgcacacctatagtcccagctacttgagaggcygcagcagaagaattacctgtggcagaattgcttgaacccaggaggcagaggttgcagtgagctgagatcatgccactgcactcaggcctgggcactctgtctcaaaaaaaaaaaaaaagaaagaaagaaagaaaagtatgccttttaagagacgagacagaaaactgcctatgactttcacatgacattgctagattctgtatgtccacatctgtctgtcattagctgctttagtttg

SEQ ID NO: 45322 - DNA, 574 bp, Homo sapiens
tgaaggagagtctagaaatgtaactgttggcatttctgtctcttcttaacacaaaagttcaccaattaagggtatggaatgaaggctaacttttcctaaatgcatttccctcatcctttagaactcttcttttgctaattcatcatctacacatacattcattcacctacatttaaaaaaaaatggaaataaaatgagaacaaaatgaaatattcctatacctyatgtaagccctccccaaaagaataatatgcttttaacttataaaacctatcctcaaaggaagaaacccaataagtcaccttattaattttggagttacatttattcttctctttaagtcacaatctcatctgaatttgctgtaatctaaggaatcgattatgaagataatcactattgacatgccttttataaaatataagggagaatgaaaagaaaaaacgaatgcatgcatcacagagctggaactaatatatggatagccatgatatctttttctttaactagacaccagactatggttagcagtaatgggtttctttctccaacattttttttaaatttatttttt

SEQ ID NO: 45323 - DNA, 574 bp, Homo sapiens
tgaaggagagtctagaaatgtaactgttggcatttctgtctcttcttaacacaaaagttcaccaattaagggtatggaatgaaggctaacttttcctaaatgcatttccctcatcctttagaactcttcttttgctaattcatcatctacacatacattcattcacctacatttaaaaaaaaatggaaataaaatgagaacaaaatgaaatattcctatacctcatgtaagccctccccaaaagaataatatgcttttaacttataaaacctatcctcaaaggaagaaacccaataagtcaccttattaattttggagttacatttattcttctctttaagtcacaatctcatctgaatttgctgtaatctaaggaatcgattatgaagataatcactattgacatgccttttataaaatataagggagaatgaaaagaaaaaacgaatgcatgcatcacagagctggaactaatatatggatagcyatgatatctttttctttaactagacaccagactatggttagcagtaatgggtttctttctccaacattttttttaaatttatttttt

SEQ ID NO: 45324 - DNA, 574 bp, Homo sapiens
tgaaggagagtctagaaatgtaactgttggcatttctgtctcttcttaacacaaaagttcaccaattaagggtatggaatgaaggctaacttttcctaaatgcatttccctcatcctttagaactcttcttttgctaattcatcatctacacatacattcattcacctacatttaaaaaaaaatggaaataaaatgagaacaaaatgaaatattcctatacctcatgtaagccctccccaaaagaataatatgcttttaacttataaaacctatcctcaaaggaagaaacccaataagtcaccttattaattttggagttacatttattcttctctttaagtcacaatctcatctgaatttgctgtaatctaaggaatcgattatgaagataatcactattgacatgccttttataaaatataagggagaatgaaaagaaaaaacgaatgcatgcatcacagagctggaactaatatatggatagccatgatatctttttctttaactagacaccagactatggttagcagtaatgggtttctttctccaacattttttttamatttatttttt

SEQ ID NO: 45325 - DNA, 538 bp, Homo sapiens
tcggccttatattacattttctttgtggacaatctcacatacccttggcttctatctatactacttgttcttaagctctgaactttgagttatcttttagctagaaattactgcttcaactgtaacattttgaaaattgaagtattcacttttgtgggggcaaactaagccttcttctgcattcatttttttgacaaatggcaccgcagacacttgattgcctaaacaaagaatcaggtagatctccatatctcttctgtataactgactcatcaaacaatcatgtcatgttaatttctacttcctatctttccatttgtcccttcttctccactttctatgttataggctgaattgtgtccccttacaattcatatgttgaaatcttgtcccctggtacttcatagaataatactttatgtggagatagggccttttaaaagtaattaaagtaaaatgaggctrttgcgtgaagcccaaatccaatatgactggtgttcttataagaagggggagagacatctagaatgtgtatgta

SEQ ID NO: 45326 - DNA, 538 bp, Homo sapiens
tcggccttatattacattttctttgtggacaatctcacatacccttggcttctatctatactacttgttcttaagctctgaactttgagttatcttttagctagaaattactgcttcaactgtaacattttgaaaattgaagtattcacttttgtgggggcaaactaagccttcttctgcattcatttttttgacaaatggcaccgcagacacttgattgcctaaacaaagaatcaggtagatctccatatctcttctgtataactgactcatcaaacaatcatgtcatgttaatttctacttcctatctttccatttgtcccttcttctccactttctatgttataggctgaattgtgtccccttacaattcatatgttgaaatcttgtcccctggtacttcatagaataatactttatgtggagatagggccttttaaaagtaattaaagtaaaatgaggctattgcgtgaagcccaaatccaatatgacyggtgttcttataagaagggggagagacatctagaatgtgtatgta

SEQ ID NO: 45327 - DNA, 1169 bp, Homo sapiens
cctacaggatttttgcaattgaaatkaagacctattggttaggaatcattaagattgtaaaaatttgagcctgaaagctgatgatgcaacatccctgagtaggaaagactgagttgatattaccattaatatgtgtttctgaaaagccagagtggaaataatttcatatgtcagaaatcacaggcattttatcagcctcccagacttacaaatacccacttgctattgccagtcaggtccagtgtgtttagtttgcaaattaacacttccctcctgtgcaaagttttatgagaaggttaacaaaacatttgaaggagctgtgaaaaggaagttacatgcagcacaaaccaggcaaccaagagcttttggtggtcatcactgaagatggaaactgtggcagatggaagtctctgcttcttgaagagaaactatgcattgagtatgcatgatctgtgtgcctggatatcatctttacctgctttgttctgtatgttgtcaaagaggatcgctttggggagcattgtgtctgtacactctggatgaacccctttgaagcaggaggtaggatggaatacttgtgcttttgtttaaaacatgcctggggcctatattgacaattttgttaggttctttattaaaaatgtatttgaataaaccataattaatttataccagaagagcaaaacagcagacattgtgccttttttcacagattatggctgaatggattctaaccagtaaatctgtacatttgaattttatttcctggatcttttctcattaagtccaatggagtgatgagcttgggatggaggctttatagaggtatcttttaatatacttttgataaagcactaagaaaatttataataattttaattgataatgcggaagcagaggagcagaacagaagatagtttctcagtgtttagagaccttgaatttattgtttcctttgcaaagtctattagtcacccctgacaagaagcctgcaatttcaggtgtttgcagtttcctgacccttcatagctactctctgtgggatctttatctggcctggctgctgagactgtggctgttttatattcattatttgattaaagactcaacaactttattaaggaggtatcgctctagctttgcagctgggagtttcagagagggaagtg

SEQ ID NO: 45328 - DNA, 602 bp, Homo sapiens
cttactgttctgccacaaaggagtttatttwtttttttttggtatcaaaagtcatgtttcttttaggaaatcagattcagaatattttagtaatacatagtggttaggagcatagatttggagagaagtaaacttggccttgaatcctggctctggtaccacctggctgtgtgaccttggctaagttacttaaatatctctgaacttctctaataataactcttaggttagagaactgctgtgagaattttaaaaaatacattaagtatttagcatagagcctagatcatagtaagaatttagtaaatgttagttattcaataaatattgttatacatttaattcaaatttgctactaaaccttctataaatcataatacatgttttaaatgtgttattccaaattattttctttaaaatatataataagtagcatcagtcagcaaacattttttattgcctactctgtctaggcagggtactgaatattggagaatgaagattgaataaaaaattctttttttttctgaatgtttaacacttattctatctcctgaattgctacagctccagactatgaattttggctgttactgttcttg

SEQ ID NO: 45329 - DNA, 602 bp, Homo sapiens
cttactgttctgccacaaaggagtttatttatttttttttggtatcaaaagtcatgtttcttttaggaaatcagattcagaatattttagtaatacatagtggttaggagcatagatttggagagaagtaaacttggccttgaatcctggctctggtaccacctggctgtgtgaccttggctaagttacttaaatatctctgaacttctctaataataactcttaggttagagaactgctgtgagaattttaaaaaatacattaagtatttagcatagagcctagatcatagtaagaatttagtaaatgttagttattcaataaatattgttatacatttaattcaaatttgctactaaaccttctataaatcrtaatacatgttttaaatgtgttattccaaattattttctttaaaatatataataagtagcatcagtcagcaaacattttttattgcctactctgtctaggcagggtactgaatattggagaatgaagattgaataaaaaattctttttttttctgaatgtttaacacttattctatctcctgaattgctacagctccagactatgaattttggctgttactgttcttg

SEQ ID NO: 45330 - DNA, 580 bp, Homo sapiens
cctccgcctgctggacagtgcctgggccccacaacggagcacagtcccttctgcatgggtcgcctcccggggagaggcattgctcaggctcagggaacaaactggggagggtcagacagggaggctggtggggcacccatgaccagcaccctccaagcttgctcagcagccttccccctcccactgctgtttctctttctgtctccccgtctgtctgtctttctcagtctctgtctctgcctaccagtctctctctctctctcttagtctctgtctctccctttctgtctctctctcagtctgtctctttctgtttccctttctctctccctcagtctctgtctctctccctcttagtttctgtccctctgtctctgtctcagtctcygtcactcacttctctcagtctccctcagcctctgtctcatggccgtgaccctccaaagcccatggacacgtggtgccctgtagtgatgtgtgcagtgatgtgtgcagcgatgtgtgctgaccctgccctgagtggcagtgtcacggggagaggtgagtgcagcacccatcagctgtccaacacggtcagtgc

SEQ ID NO: 45331 - DNA, 563 bp, Homo sapiens
gaacacaagtgcccagaaacatttagaaaaattctaatgaaaacagaaaaggcattttcaaattagctgagagaaacgagaccaaaggaaagactgacccagtatttggatacattatgtgatgaaccttaatgcagggaggaaagtgttatctttcagttaatttctcaacttctggagagcttagaacagacctggctaggaggaaattgaatctgaggcagatgaggagatagtggtgccttgatgcttccagtgattgggtcagcagaaccaggggtgggagatgatctctctttttgttggcagatggtggtctctgctgtagctttgtcccctggtgacgggactcaggcagcaacccccatcattggcaatacccccacctctgagaatgtggagaggacttgtgaagacaatgttgtcccaagcagcacagcccaggtactgacaggattcagagctagaggtttcttagaggtcagggttgtrgaagcagcagggactgcagctgcatagtttgtgtatgtaacaggctagtatctcttgttctagactcatcc

SEQ ID NO: 45332 - DNA, 551 bp, Homo sapiens
tgtaattatataacctttgaccaacatctctttatcctcccaacccactagccatcaaagcctctggtaaccaccattctactctctacttctataagatacactttttttagattccacatgtgagtgaggtcatgcagtatttgtctttctgtgcctgttggtcaaaggatataactacagttagggaggaaaaacatattttaaatgtccagaatagacaaatatatgagacagaaartagataagtgattgcttggggccatgcagtaaggaagagaagataggggagaggaatgaggaaccactactagtggttatgaagtttcttttatgggtgatgaaaatgttttaaaatggactggggtgatggttgaacaactgctgtgaacttacaaaaaaccacgggattatacattttaaatggatagattgcataaaatgtaaattatatctcaataaagctgctcagtcttttaagacaaatattctgttatttgcaacaacatagataaacatggatgacattatgcttagtgaagtaaagtggg

SEQ ID NO: 45333 - DNA, 546 bp, Homo sapiens
ctggggaaagaagggtaaagacaacaaaatcactgccctaacattcatgaagacctgcacaccacattgttggttcctgtacgctgtcctgggggtaacaggagagacttgagcaggaatgcttcacagagcacaggatgcttgagctgtgtcttaactgagaggagtttcccaggagcatgttcttgtccctttctgtgacccagctctcatccacatccagtcagttctcaagtcccactgaggcagcctaggcaggggctacttctcctttttcttttcttttatttttttgagacggagtctcgctctgttgctcacgctggagtacaatggcgggatctcagctcactgcaacctctgcctcccgggttcaactgattctcctgcctcagcctcccaagtagctgggactacaggcgcccgccaccacgcccagctarttttttgtattttgtagtagagacggggtttcactatgttggccagactggtctcaaactcctgacctcgagatccacccgtcttggcctcccaaagtgctgg

SEQ ID NO: 45334 - DNA, 1294 bp, Homo sapiens
tggtgctatgaatgtgaagattactaaaacactgcttctgcctttcaggagtttagagtctaatggatggaacacagaagcaggaaaaaaattgctgtagaatatgataaagattaatagaggtatgtacaaagcacattggggatagagggaagggagtcgggagatactttctgtggtactgggaatgcgtttaccaaatattaatatttgttaaatgaatattggtaaatggtcaatagatgggtgaatgaatggatgaagagaaaaaggagctgacaggaaagtgagcacaggcagtctaggaaaaccagtttgaagaaaagcttaatgaaagggtatgttaaagttgcaaagcgtgagaagagcaaggtgccatggaaagagacttaacagggtgctgagaggtgaagcttgtgagagaaggcagctgttcatgaaaggctttttgtgccatgctaaggagcttggacttgatgatcaagaagctgctggaccaggggagagataaagggagagctatagtttagaaatgtcatttgggcaatgatgtgaatgatggtgtagaaatgtaagactagaggtggaacagaaaaatacacttgaaggtatttttaatacaatgaaacttttytaggagtctgcaataaagactgacagattggaaagatacttaaaaaacaaatcagcaggacttagcaggttattgaatgtgggatgctggcaattttaaggaaaaaatagtgttcacggtactcctttgtaagtatagacatgcctctgcagagaaccatttttctgaaattgatatatacagataaattgcaatggatagcttgctagctatttggagaagtcacctggaaaagtcatattgcaatttaaatatcataacgatggagtataaagtttggactggacagtatcaatatttatataaattcaattatgaatggaatattttgaaatattttgtgatttaaaatagacaattcattcaaatgtatttatcaccgaatttatcaagaaaatttgttcaacatcgatacaataggaaataactatagaatggatgttgacaaatgacaactcatggagcaaacccagtgcccacacttccccacctgtttttgtaaataaaagtttataaataaagttttattggaatacagctatgctcattcatttatatattgtccatggctgctgtcatgctacgatggcaggggtgagtagtcatgagagagactgcaagcagttcattggtttgtgtaagataagaggtagatcatgc

SEQ ID NO: 45335 - DNA, 1294 bp, Homo sapiens
tggtgctatgaatgtgaagattactaaaacactgcttctgcctttcaggagtttagagtctaatggatggaacacagaagcaggaaaaaaattgctgtagaatatgataaagattaatagaggtatgtacaaagcacattggggatagagggaagggagtcgggagatactttctgtggtactgggaatgcgtttaccaaatattaatatttgttaaatgaatattggtaaatggtcaatagatgggtgaatgaatggatgaagagaaaaaggagctgacaggaaagtgagcacaggcagtctaggaaaaccagtttgaagaaaagcttaatgaaagggtatgttaaagttgcaaagcgtgagaagagcaaggtgccatggaaagagacttaacagggtgctgagaggtgaagcttgtgagagaaggcagctgttcatgaaaggctttttgtgccatgctaaggagcttggacttgatgatcaagaagctgctggaccaggggagagataaagggagagctatagtttagaaatgtcatttgggcaatgatgtgaatgatggtgtagaaatgtaagactagaggtggaacagaaaaatacacttgaaggtatttttaatacaatgaaacttttctaggagtytgcaataaagactgacagattggaaagatacttaaaaaacaaatcagcaggacttagcaggttattgaatgtgggatgctggcaattttaaggaaaaaatagtgttcacggtactcctttgtaagtatagacatgcctctgcagagaaccatttttctgaaattgatatatacagataaattgcaatggatagcttgctagctatttggagaagtcacctggaaaagtcatattgcaatttaaatatcataacgatggagtataaagtttggactggacagtatcaatatttatataaattcaattatgaatggaatattttgaaatattttgtgatttaaaatagacaattcattcaaatgtatttatcaccgaatttatcaagaaaatttgttcaacatcgatacaataggaaataactatagaatggatgttgacaaatgacaactcatggagcaaacccagtgcccacacttccccacctgtttttgtaaataaaagtttataaataaagttttattggaatacagctatgctcattcatttatatattgtccatggctgctgtcatgctacgatggcaggggtgagtagtcatgagagagactgcaagcagttcattggtttgtgtaagataagaggtagatcatgc

SEQ ID NO: 45336 - DNA, 594 bp, Homo sapiens
ccctggctggccctccagagggtggccaaaaaaataaataaataaaacacaaaagaaagatatacatctacagaagctgaaattcctctgtttttctactttatcttattacttcttccctttttctctaaagtagctgaaccacatatgttaagagtcattgtaatactgaaaagaatggaaaacaggtgttcgaacaaaacttggccatgctattcatggcagcactactcacaatagcccaaagtagtaacagcccaaatgtccatcacctgctgaatggataaagccaaatgaggtctatccagacaatgggatattagtcagccatagaaagagatgaagtactgatacaagctacaatgcagatgaaccttgaaaacataatgctaagtgaaagaagccagacgtgaaatacccacatgwtgtatgattccatttatatgaaatattcagagttggcaaatccacagaaacagaaagcagaccgggggttgccaggggttgggggtcagaggggaatgaggagtgactgcttaatgggtacaggttttccttctggggtaactaaaatgcttgtaactagatagtgat

SEQ ID NO: 45337 - DNA, 594 bp, Homo sapiens
ccctggctggccctccagagggtggccaaaaaaataaataaataaaacacaaaagaaagatatacatctacagaagctgaaattcctctgtttttctactttatcttattacttcttccctttttctctaaagtagctgaaccacatatgttaagagtcattgtaatactgaaaagaatggaaaacaggtgttcgaacaaaacttggccatgctattcatggcagcactactcacaatagcccaaagtagtaacagcccaaatgtccatcacctgctgaatggataaagccaaatgaggtctatccagacaatgggatattagtcagccatagaaagagatgaagtactgatacaagctacaatgcagatgaaccttgaaaacataatgctaagtgaaagaagccagacgtgaaatacccacatgatgtatgattccatttatatgaaatattcagagttggcaaatccacagaaacagaaagcagaccgggggttgccaggggttgrgggtcagaggggaatgaggagtgactgcttaatgggtacaggttttccttctggggtaactaaaatgcttgtaactagatagtgat

SEQ ID NO: 45338 - DNA, 1814 bp, Homo sapiens
tatgcatcaccactggagcccgcaggcgtggtcatggagccgggaaggaatgtggacacctgcagaacttacctccctgtcctctctcatggaaaatgggaacagactaggtatctgctccatgacatcaagtgacttcatgggatccagaccttcccccaggctgcatggaagccagcatatagccagacaggtgtgatatgtgaatgtccctctggcctgccaggctcccagacacagatccttgatatctgtgcaggcacctccactttatgtggagaagcagctgagccaaccttaggattcatgagtacctaccacagctcactgtccttttgaaataaactctccagctctttggaatgttttctgttttcatggtggtgaaatctgaaaacgtctctaggtgaaaagacattaagtaaagacaaaacccctccactggtcctcaatctaggaataagcccagagatgtttttaataaatggggaatgcaaaaaaaaaatgcggtaaaatatcagtgactctcctggcacttagaaataaaggaccacagccactgcagccacagtggtgttatatgggacaaacactgagcactcatttgctccttcatgccttacttcagtaagtacttactgagctctcactatgtgccaggcactgtaccaggaataagacacagtggtgagcaaaacagatgtcatctctccacttgtggaactgtcacccgggcagcttgggtcaccatcactatcatcgtttctcgagccctttctctgggtcaggcaaggtgctacacatttcacagcttcatccttacagtaaaggctgaggcaggtaactgatggttcccattttacagatgagaaaactgaggcagagacaggttgagcaacatgcccaagggcacgtggccagtaaacagaacagctggaaattgaactcaggctctgctgcctcctcaagtgcacactttcaaccgctttgctgcactggcctgagggcctgagccctggaaaattcctgccgactagcagaaggaggtttgtaggtccagttccagatccagcttacagggtctctccaggaaacccagggccacgaagcctaagaataaggtatgctgcagaaaagctcaacaccaagagaaaataatagcaacaaagcaacaggaggcatttagcctggtggaaagtaattacctgagctataatgtacatatctactagcaaaaaatactagctatcatgtttcccctcctccagcaggctggtacagtcctctactttttttttttttttaactttctttttcccactgccaagcaactgattataaactgaaccaatctcatcatggcattttctaatagaaaacttttcaaaggctkcccattgcttataggataagcttggactccttaacctggctctaaaggtcccacacggtctggcccccacctgcctctctggcctcattctattggcttatccccttgccacactctgtccacataagcctcttttcatttaccacagaagccatgttttctcctgcctcagtgcctttgtgcatgcagcccctgctgcttgcaatgttcaccgccccctttttttcacccagttaattcctcctcttctttcaactctcaggaaaccactgggcagagggcactccagcctgctgcccatctccttcttagttttacataaaaggagggggaactgatggtaggattacttagtgccagtgagattgcttgagacgtggttatgggatgggtacttctccagggaagctttccctggtcc

SEQ ID NO: 45339 - DNA, 1814 bp, Homo sapiens
tatgcatcaccactggagcccgcaggcgtggtcatggagccgggaaggaatgtggacacctgcagaacttacctccctgtcctctctcatggaaaatgggaacagactaggtatctgctccatgacatcaagtgacttcatgggatccagaccttcccccaggctgcatggaagccagcatatagccagacaggtgtgatatgtgaatgtccctctggcctgccaggctcccagacacagatccttgatatctgtgcaggcacctccactttatgtggagaagcagctgagccaaccttaggattcatgagtacctaccacagctcactgtccttttgaaataaactctccagctctttggaatgttttctgttttcatggtggtgaaatctgaaaacgtctctaggtgaaaagacattaagtaaagacaaaacccctccactggtcctcaatctaggaataagcccagagatgtttttaataaatggggaatgcaaaaaaaaaatgcggtaaaatatcagtgactctcctggcacttagaaataaaggaccacagccactgcagccacagtggtgttatatgggacaaacactgagcactcatttgctccttcatgccttacttcagtaagtacttactgagctctcactatgtgccaggcactgtaccaggaataagacacagtggtgagcaaaacagatgtcatctctccacttgtggaactgtcacccgggcagcttgggtcaccatcactatcatcgtttctcgagccctttctctgggtcaggcaaggtgctacacatttcacagcttcatccttacagtaaaggctgaggcaggtaactgatggttcccattttacagatgagaaaactgaggcagagacaggttgagcaacatgcccaagggcacgtggccagtaaacagaacagctggaaattgaactcaggctctgctgcctcctcaagtgcacactttcaaccgctttgctgcactggcctgagggcctgagccctggaaaattcctgccgactagcagaaggaggtttgtaggtccagttccagatccagcttacagggtctctccaggaaacccagggccacgaagcctaagaataaggtatgctgcagaaaagctcaacaccaagagaaaataatagcaacaaagcaacaggaggcatttagcctggtggaaagtaattacctgagctataatgtacatatctactagcaaaaaatactagctatcatgtttcccctcctccagcaggctggtacagtcctctactttttttttttttttaactttctttttcccactgccaagcaactgattataaactgaaccaatctcatcatggcattttctaatagaaaacttttcaaaggcttcccattgcttataggataagcttggactccttaacctggctctaaaggtcccacacggtctggcccccacctgcctctctggcctcattctattggcttatccccttgccacactctgtccacataagcctcttttcatttaccacagragccatgttttctcctgcctcagtgcctttgtgcatgcagcccctgctgcttgcaatgttcaccgccccctttttttcacccagttaattcctcctcttctttcaactctcaggaaaccactgggcagagggcactccagcctgctgcccatctccttcttagttttacataaaaggagggggaactgatggtaggattacttagtgccagtgagattgcttgagacgtggttatgggatgggtacttctccagggaagctttccctggtcc

SEQ ID NO: 45340 - DNA, 578 bp, Homo sapiens
ttttcttccctctttctctctttttctctctttatctttttctttctttctgtctctttcttcttactttcatctccycctccgtccctctttctttttctctttcttctttctttctttctttctcttccttttttctttttctcctctctttctttctttctctctgtttctttctctttctccctctttctttcttttcttttcttcttcctttattttctttccttacaatgagggaatgactaaatatactggaaaaaggccaggaatcacatgcagcaggaataccgaaagaatgctccttactcaagagggagttgttacagataaatccagaacaattagaccgtgttacttccttttgttaaggcagccatctgaggttatagctaatgtaaaggagggcattgtcagtaagaagtaaagtgaggctgctattaaaatgaaacaggctgtgctctgcttggtggcctctcacttcagccggctcttcagtgataaccactgccctccaggagaattgggcaggagagttggaacccctcccagagcacaatgtgcctcgccagtcttcc

SEQ ID NO: 45341 - DNA, 570 bp, Homo sapiens
  misc_feature (1)...(570): n = A,T,C or G
aggctcacaatccaggctacacgggctcagtgctttccagtttgcatagagaggtgcacaataggcctgaagggaggtgctgatcactgggtcttccatgaatgatagctctaaggctaccaagggattaagtgactggttagaaaaaaacaaagaattccctcctttgaatcctagtaatttatgactgcttttgtttctaattagaaaaaaaaaaaagcggttctcaagaatttctgtcgtgattctagccccagaaaaacccggaaagaatagctgaaaccatttaaggtagtgtctgtcccaggcycctctgattcttccagaagttgcaatctcaggttggagacaaggaaagaggctacattctgaatacttctctgagaggaaatttttttttttntttttttttttttgagacagagtcttgctctgtcacccaggctggagtacagcgactcaatctaggctcgctgcaacctccgcctcctgggttcaagtgattctcctggctcaggctcctgagtagctgggactacaggcgcatgccaccaagtccagctaattttt

SEQ ID NO: 45342 - DNA, 1577 bp, Homo sapiens
attaaaaacagaacatttaaataaaaagcaatttgctttgcctgtaattgaattccccttgctgttattgctaattattgacaatatttgtgatggactaagaggcttttgcattcagagacaaattatttttctgctatatcttagaacagacagtgggctgtctttttgatatcatagtctgttaccatggaaataattgtgatttgagaaatgtatcagcaacatgcaaaaaaaaaaatctctatacagagaatttccttttctttactgctatgggcattgtacagtcttgcatagtaagtgcatgataatgacttcccacatttatataatatgtctttgttttacaatgtcctacacaatagataaagcatggtatatgcaactataaatgaaagactactaaagtaaattgaaagcaataaagtgaaatgatcctatatttcagaataaatttacaattaaattagaataaaaattctgctttcaaatttctcaatgttgagaagattcttataaatgagagtgatcwcaataagaaaatatcaatgttttattttaaaatacatttcttatttttgaggtcattactcaattagctatttatcaatctttttgacattttttgtattttgctatgaatagacagtctatttatctggtaaaacaaatatcttctctttccagagcactggaagagaattccctgttttccatatacttcaccctaatttggaggagatcacggagagaatctatttcatagaaaatttagtctaagatggccttatttggagcctaaggtggatctgacttggaaaagaagagaattgagaaaatacatgaaataccttaggatgagcaagagagaaagagattagatagaaacaacagggtttggttcttcactttctggtttcttgattcaatttctggagagtaaatctgtcctgccttttgccctactccttccttttcaacttcactttcatgttaccaggctggaagcaaatataggcaacagtatttatatataaattccacagggaagcccttttattctcacggtcagcttctatgtctaatctaaatttactgacatgccaggtgtctttaatttgaaatgtttctcttttagaaaaaaatgaggcattcaataattggaatagcagtatttggaagaacaggaagatttgaggaatcgcatggcactgtgcaatgaaatgcctgcctcaaccaaccatcttctgtgaaaaaaatacaatagcctctttggttataaggcaggactaggtttattatgcagtttaggtccatttttccaagagaaatttgggagagaagatatctgattataagttggtaatattacgtgattttcatattgacatcaattgccatgtagccctttgcagcttcatatgtcctagccttttcttgctctacgaggattttagaaaatacatgatcctgaaaaccttgactagaaaggaactttgttaaatagcagaggagtgatgtagttacagaaactcagtgcagagagtatttgtaaaaactagattaagtggatt

SEQ ID NO: 45343 - DNA, 591 bp, Homo sapiens
cattaatccagaaatatgcattaaaacactgcacagctctgtgaacttgatgcactgagatttataaatagtcttctgaaaatccgcttatattcaaagacattatgctaaggcaaaatataagtaattaagggagggtgacgaattggaggtaataataaaaaatagtcatgtagaaaattataaataatgactaaggtgaaaaagaaaagtgaaagtactgaatgggtagaaagggaactcaattttgrttctaagcattagtatgaaaagggcctaatgccataataaccccattccaatgcttactacctgtgggtactgttaagttactatacttcattatgctttactttcttgatctgtaaaattggcataatagtatcttctgcaaaggctatacatgttttggtaaccagaaaagattttaaaaaagtgattggaacataattagaactcacaaatatgttgttatgaaatctcaatgtttgaacttacgttaaacttgtatcacaacctcctaaataaagcagggatttcttttaccacatgctaaacaggttcccaattagcttcagcacaaattcttat

SEQ ID NO: 45344 - DNA, 615 bp, Homo sapiens
tgcgtgcatttttttccccatgctctctgtgtaccagggatcatgctgggctcataaattagttctgggcctggcatggtggctcacatctgtattcctagcactttgggaggcccaggcgggtggatcacctgaggtcaagagttggagaccagcctggccaacatgatgaaaccccgtctctactaaaaatacaaaaattagccgggtgtgctggtaggcgcctgtaatcccagctrcttgggaggctgaggcaggagaatcgcttgaacccagggggaggatgttgcagtgagccgagactgggccactgcactccagcctgggtgacagagcaaaaactctgtctcaaaaaataattaattaattaaaagaaaaagttaattctggtctccgtgaagccactaatagctcctcaggcgacaccaggagtttagccataccccaggctctcagagcttaagctccgcggggccagctgcagttacggtgcatcccaggcatccagggacacgctgttgggatccaggccacatggtttccaaaccattcccacaggagtgtgtccctgtatagggttcactgtgtccgggtgaccctcactgacctgggtcc

SEQ ID NO: 45345 - DNA, 615 bp, Homo sapiens
tgcgtgcatttttttccccatgctctctgtgtaccagggatcatgctgggctcataaattagttctgggcctggcatggtggctcacatctgtattcctagcactttgggaggcccaggcgggtggatcacctgaggtcaagagttggagaccagcctggccaacatgatgaaaccccgtctctactaaaaatacaaaaattagccgggtgtgctggtaggcgcctgtaatcccagctgcttgggargctgaggcaggagaatcgcttgaacccagggggaggatgttgcagtgagccgagactgggccactgcactccagcctgggtgacagagcaaaaactctgtctcaaaaaataattaattaattaaaagaaaaagttaattctggtctccgtgaagccactaatagctcctcaggcgacaccaggagtttagccataccccaggctctcagagcttaagctccgcggggccagctgcagttacggtgcatcccaggcatccagggacacgctgttgggatccaggccacatggtttccaaaccattcccacaggagtgtgtccctgtatagggttcactgtgtccgggtgaccctcactgacctgggtcc

SEQ ID NO: 45346 - DNA, 553 bp, Homo sapiens
gaacaaacattactcatctgagaaataaaagagaatccagagtccatagaatctagggtacattgaagtccattgtaatattctgcttactttatatatgtaagaaattttccataataaaaaaattaaaacaaaataaaacaccaaaaaaatcactgaaccccaaactgttcttgacctccacatttcttgccaggactgttctttcactctcctcccttccattgccaaacttcctaaaagcattgcctacactaactgcttccatttgttcatcttccattcatttctcaacccactgcagtatgtcttgtctcaacatcgtcctaccaaaactgctcttgcaaaggctaccaatgaccttcacattcctaagtgcaaygaacactcatcagtccccatttcctttgtcttcttggtagcatctgacacttttcatcactcccctacccaacatttggcttttgtgactccattttctttgagttttcctcctacttctctgtggctccttctcagtctcttatgttgggtaagtcatcccgccattatg

SEQ ID NO: 45347 - DNA, 457 bp, Homo sapiens
ccttttaatttctgctctctagacagggttaagtaaaaaaaaaacaaaatgatatattgcttggtggttttatcaaagtagcaacatgcctaagagtcactcttactttcgaaatatgatttgttttgttgtttttcagcaaaaccattcattattgcttcargtttaaattatgcccgaaacattgggctttcatttttaacctctctttgcttcagtttctctatttgtaaaatggggatagtgcctacctcagagagcacttgtgaggattgaattgatgtgtgtaaagcacttagaagaatgcctggtatgtggtgggaacactaggcatttgctttcactgtcattattctttgaacttcatctttgatttttcttgactccctccaatataatcacatatcctactttctctacctcataccagctacccttcccaatttcctgcttgtaa

SEQ ID NO: 45348 - DNA, 589 bp, Homo sapiens
tgccagactcagtagtctttgtaaagtttcttcaccaatgttgatggagatagtgaacagtttgtatcatgatgagtagtttcatagagaaatttatggaatacctatttgaattcatctggtgccaccatcagactatcttgggagtgtcagagattacctgagcgaagggttagaccaggtagcttcaattctttctttataaaatctcaaactaaacaattattattgtatagtggcttatttggaatccacctatagatttatcttttggtactttagataggattataaccttggtaaagactcgtttggcataatgatctactagataatttcttttaacttccatattgccccttcttgcatggacctaaaccattatcatagtcatctgtctaagaagtaggagtgcctctaaaagttccttaactatagtctattttttttggtyggtgttgtcagctacctagaaacccctttgtttccaaagcatctcctaatcatgtattactccagaagcgtgtttgttatcagtatatatccctctctgaacttcggtgaatggaaaagctctagcaagtgcagt

SEQ ID NO: 45349 - DNA, 546 bp, Homo sapiens
tgcttaagggaatgaatgacttagtcccagttcaattcagtaagaaatcaactccatgcttgctctacctaaaccatccatggatccaaggctaccatcattggagagcctcctccatccaggtgcttcccrtgtgatattccctgaaaccctgtggcagcccccggaggcagaggaagctaacacatcacccaatgccatacaggtgggcaggggccagctctgctttcctaccagaacagtttgagcctgaagccagctcctgtgtgccatcctggtccttccctgctgggccaagattcagttgcctctgtccccttggaagggttctccagtgtttccatgagcaggcaggtgaggtaggctaaaaactgagttttaaacaaacaaacaacaaaaaaatcccattgatagggttacacaacacaaattatcaccctcaaatttcagtggggaagaatggagacatggaaattgaaaatcattctcatcatgatgaatggctttattgactttcagtaacatcacctgtgccacaatcggctg

SEQ ID NO: 45350 - DNA, 561 bp, Homo sapiens
tagagagcaaagtgatgagaattggtatggaagtgactttaaagtaaatgtaatgtgctaaaacacacaacayatgacgtcaaaatgtttatcatcactagaaaaatgaaaacttatgcacaatccctttcaaaattattatacattgacatcttaatgtggttttatattaaaatgtatcacaaggccaaatatcaaatatttgaacccatctatagtttgggattattgaaacatttccttcctttcatggtcatggaaaattgagagttggctaaacagcctctacagcaggagaggggatgaccaggaagatgggtatgctgtcggaacctgtaaaccagaagcccgggaaggggtgagaggccattagcaccaaaggaagtaattaattatcaatgtgtccagagagataatctattataagtagccctattaaaatataaagggaaaatataggtccttaaaaaaagacagtatgttcatgctggagggtgaaaatgaataggaacttttattattaaactaatataccatttgattaaaaagtgagctatgtaa

SEQ ID NO: 45351 - DNA, 790 bp, Homo sapiens
tatctcattttcatacgacttctggttcaagtacaaaataccacgctgtggacccattcacaaagccataagggtgcctacccctgtcttcctctctccattcattcattttttgtttaacaacattcctttgttgaatacctgctatgtgctagacaccagcagagcagtttacaatttattctatttatctgttaacctacactcattgagatcttaagagacctatcagctataacaaaaaaaggagcactcagttcaaattcacattggttactttgtaggctatgtgttagatgtattgaaaatatgtatagctgttttaaggatattgttctttgctagttaattctttactagcatggaacacagttttttwaaaaaaaaaaaacaaaaaacctaaatgcacatgttgctatgtcatttatcatcagtagttggattacttaggaaccataatgatcttccttgctgctattgcttacattgcgacttttcttctttccccaggaaataggatcttattaaaaatattcagtcccatagcaaaatatcatttctctgtgtaagcttgatgttttcagtattcaaactattttatgtggtttgtaaagttgacaaaacagtggcttctggaatgaagcatgttttgagcctacacactgtgagacctatgactttaatatttagcagtgatagagaaaaccacccaaggaatgcttatttaatgggcaggaaattttcgaggctatgagacctgacattttgtcttttttgtcagcgccgtccc

SEQ ID NO: 45352 - DNA, 542 bp, Homo sapiens
gtaagaactatctgccttcattctawctgatgaaaattaaagcacaaatttcctttttataaagggatacttttatttgtaaaggtcccccactcccatgcccaggagaggaaaatgactcttatcactagagatggtaccaagatgtgtctggtttacaaagaagccttatctaccattagtttaccccatacattttcttgtcatcattccccaagttacctctctgggaaccaaaacctcactttcttttatctagtcactttcccacaatgtatccctctttactgcccctttgggcttaccctgcttctagtcactttcctacttctagtcttttcttcctcaatctctgcttaccctatcagcttaaatatttatttttgtgaaatgctccatgcacataaaacatcaataaagtttacatgacttttctcctgttaatttatcttttgaatttagttcacaggatcccagagtcagaacctgagaaagtagtggaaaagttttttccctcctctatacttacgaaaattgtttcc

SEQ ID NO: 45353 - DNA, 542 bp, Homo sapiens
gtaagaactatctgccttcattctatctgatgaaaattaaagcacaaatttcctttttataaagggatacttttatttgtaaaggtcccccactcccatgcccaggagaggaaaatgactcttatcactagagatggtaccaagatgtgtctggtttacaaagaagccttatctaccattagtttaccccatacattttcttgtcatcattccccaagttacctctctgggaaccaaaacctcactttcttttatctagtcactttcccacaatgtatccctctttactgcccctttgggcttaccctgcttctagtcactttcctacttytagtcttttcttcctcaatctctgcttaccctatcagcttaaatatttatttttgtgaaatgctccatgcacataaaacatcaataaagtttacatgacttttctcctgttaatttatcttttgaatttagttcacaggatcccagagtcagaacctgagaaagtagtggaaaagttttttccctcctctatacttacgaaaattgtttcc

SEQ ID NO: 45354 - DNA, 630 bp, Homo sapiens
cacctctctctctagtggagaccagtgttaagggaatgaaagtgcagagttcatctgctagatgattactttatgttacagggtaggggaagaatggggcttcattcgagctactggaagaattaggaccaaaatttgagaagcatgcccctttgaaagcaagcacataagtagttggctgcctggttaagtgtcaggatgttcccaggtcttgttttatattattgttcatctccacttattacagagataggcaattccagattaaaaacatacataagtagcctctaatcaacaaaggggcagtagttttgttgcctagaaactggaggtacaatggtgaacaaaacaccacgcctgcttgagtgaataagtggcttcaaccatctaatatttaaacaactaccaagtggcaggcaccatgctgggctcaaggatacggtgaaaagacagtccttgcattwttgaacttacatcctagtgaggggaaaaataaaattactgcataacaaagtaccccaaaacttggtaacttgagacaacaatgattgctcatttctcatattgcaggttgcgtatttgggcagggctcagctgtgtggttcttctaccctatgtcacctggagtta

SEQ ID NO: 45355 - DNA, 575 bp, Homo sapiens
ggctgagcctggcagctcgaggctgcagtgagccgtgatcacgccactgcactccagcctgggtaacatagcaagaccytgtctcaaaaaaaaaaatttttttggggggggccgacatgatgcaaatagcatctaactgtggtcttggtttatgtgtacatatttcctgaatacctacatggttgaacgtttgccttttttttttcttttgagatgaagtcttgctctgttgcccaggctggagtgcaggtggtatgatctcggctcactgcaacctctgcctcctggggttcaaatgattctgatgcctcagcctcccaagtagctgggattacaggcgcccgccaccatgcctggctaattttggtatttttagtagagatggggtctcgccatgttggccaggttggtctcggactcctgacctcaggtgatccacccgtctcagcctcccaaagtgctgggattacaggcataagccactgcgctaggccggtttttgttgtgttttgagacggagtctcgctctgttgcccaggctggagtgcagtaacactatcttggctcactgcaac

SEQ ID NO: 45356 - DNA, 587 bp, Homo sapiens
aacataagattttttaaaacaaaattttaaaacctgagctttcatttaaaacatatccagtcctctctaataagcaatcattactcacctaagactgctgtgcgctcaagaggtctgactagtttgtaggtcatcataaatgctaattccagtcaacgaattactgctacctgtagcaccattttaagacatagtctgaggaataatccagtttaatctcaacagtactattaactacctcataaaatattaggcaagttctcctcagactatttcatctgtttaaaaagaaaagggtaamtgtgtgtgtgtgtatacatacatgcaatatatacaaagcttctgtatacagccggtactcaacatattgtctcctgtcccttctgctttttattgttcattaaactgttactataagctctgaaaacattctcctgttataaaggaaaaaatatgccaaaactcaagtctaaaatctacaatagtagcaaaagagaacatattaaaatcaagctgatgactagaaaatggtttgtaattctcacatataatgtaaacacatcccccaaactattactaaggtgaca

SEQ ID NO: 45357 - DNA, 587 bp, Homo sapiens
aacataagattttttaaaacaaaattttaaaacctgagctttcatttaaaacatatccagtcctctctaataagcaatcattactcacctaagactgctgtgcgctcaagaggtctgactagtttgtaggtcatcataaatgctaattccagtcaacgaattactgctacctgtagcaccattttaagacatagtctgaggaataatccagtttaatctcaacagtactattaactacctcataaaatattaggcaagttctcctcagactatttcatctgtttaaaaagaaaagggtaactgtgtgtgtgtgtatacatacatgcaatatatamaaagcttctgtatacagccggtactcaacatattgtctcctgtcccttctgctttttattgttcattaaactgttactataagctctgaaaacattctcctgttataaaggaaaaaatatgccaaaactcaagtctaaaatctacaatagtagcaaaagagaacatattaaaatcaagctgatgactagaaaatggtttgtaattctcacatataatgtaaacacatcccccaaactattactaaggtgaca

SEQ ID NO: 45358 - DNA, 588 bp, Homo sapiens
cttggattctgtcctttgtccccactgtttcattaaaagctctcattctttcatgctattacacactaccaaactccttaacatagtattcagagcctctggtatctccagcctcatttagtcccccatacccccttccacaacacacacatacatacccctacactccatgctacctaattgctggaagttccttagatgtgctaggctttctctccctttctcctttggaagttatataagatgctttctttttgttcccgttctttcttttccttactattgctaattctttcagtctccaatcatttgtcactgcttccaggaaacctctctrttcaggctgggttagatgtattctctgagtgctctcaaagtagcctgtgtatatttttctcatggcacttacagtattgagctttagttatccgtgtaccagtcctcatcgcctcaaccatgctgtatgttccttaaggctaaagaccaatgttatattttcctttgggcttcctattgcttagcacagtacctggcacatagctgttacccataaatgttaattgaattaatgagtaaatgtattcacca

SEQ ID NO: 45359 - DNA, 537 bp, Homo sapiens
gaagatgtaaagtttttcattttcagcaaatgagttcctttttttttttccttttactttgttttctttttggagacagagtctcratctgtcacccaggctggagtgcagtggtctggtctcggctcactgcaacttccgcctcctgggttcaagtgattctcctgcctcagcctcctgagtagctgggactacaggtgcatgccatcatgcctggctagttttttgtattttaatagagatggggtttcatcgtgttgcccaggctggtcttgaactcctgagctcaggcaatctgcctgccttgtcctcccaaagtgctagggttacagacgtgagccaccgtgcctggccaaattagttccttttgttacctagcctcctttgtcagttatctatgcattaaacggttttcagtgcctggtcttcagcattggattggatgatggctgatggaagaaaaaaaaacagtggttataccttggaatttagttttcagttactggtgaattttagatccaaggagactactaaacc

SEQ ID NO: 45360 - DNA, 567 bp, Homo sapiens
gcctggaaagttatgcctcacaaccctcaacccataaccagtgattgatcaggtatggatacgaaaaaaaattcttttcttctttttctctaagtataacataacacaaaaacaaacaaacacactattctgtggtgtacttattgcaccacaatttagactacattgttttgtttccccctacctcatctccctttaagagttctacagagaacactcccttaatcaattactcgcacaagaaaaccatctcagattctgcctgtaagtaatccagtttaggaacctttggtattaggatgcagactctgaagaagagaacatcaaattagattattcactggctggatagcaatgaggttccatcgttgggggtaaggagagtaytgataagtcctgacatgttctagatgtgccaacattgagatttttatctcaggtgaactggaatgaaatactggtgaaggacatgctacgctttatgaaccataaaattgcacttaaaggtgagggaaaatagtgtttataaggactttggaagtaggcagctgttgctgagtaccactg

SEQ ID NO: 45361 - DNA, 1798 bp, Homo sapiens
tgcatgttgttacctaaatactgtcagatacagtgattaagaatgggggcttttgaattgcaaagacctgggtcttgagtgctatctgctactatttatctgtgtagatctaaatatttttctaaaccctttaagccttaatttcctcatctgtaaaaagtatataatgggatttatacaacagggatgatggaagtaattatcaatataatatataaaatatgtttaaatggtgtctaacatatagtatgtatttaaatattaataattatttagttagtaaaaggaaaaagtgacagaaacacctgttagaaagtccagttcttaagaggttctatttaattaaaggaatcagacaactattactataaccttaatcaaacatagagaacaactgagcagttattcactaggagaaggcacagcagtatttaggtatattctaaagtcaacctctggagaattgattgtgaacttcgctcttgacatgatggctaaataaacaattacttattaactgctgcctggaggttcactttttaatcttctgaactagtgataaagtgaagatttaaaaatcaggctatagtcaatttgcagctaaggtgagaaagtaacaggaaacggggaggcttgtgtcaaatggcaaaaacacaatttagttgttgaccaagaagatgggctaaggagacattttttaaggctaaatatacttggaacaatttaccttccatggatgggtgactaggacactcctcaataccatttaatgactttcacctgaagggcaccagagcatcgccttaccctaatttgctcttttatttccattgtgagagcagcacctcaattacctgtgtatttaatgttgacaatgtgttatttatatgatggatacttctctgagggttgtagaaaattggatgtttaaatgatcacaatcactagacattctgataaagagaaatcctgagagtcaaaaaagtctcaagaatcacgacagacctggtcagctctcataggtaaagtcgtacagtcaaaggtctgaattctggcttgccaccaacaaacagtgtgactgtggacaagagcatgcacatctatgactcccaatttctttatttgtaaaatgaaaataaaagtatcaatctcactagggtataagtaggcaggtcagagccagagaatgagttttttccccttgcatctgtgtttactccatatttagaattcatagccctctaatctcaaagaactgacaatataatcaatctttagcaagcaacagttttaatatggacttttaaggttgtctaatgctttaaagaacgacttctcaccaagtcttctttgtgatactctcccaatgtccttcagaatacaattgtattacttaagttaaattgtgttcctgtctttccaaggagttcataccccaactatccttcctgttaagaactggtagagatctcagagatacaataaagcmctttctcactctttgccttatcttccccagctatgagcttctgatgatttactttcattaaatctaaatctgacaatgtaattaattttgtacattactgccagtaggggccagctaccctagggggattagtgataactgttaaataaaatttcttgcatttaaaacaaaagaaagttttagaacatattactgaaaatcaatttcttcctgtcagatagtccagaacattttaaatcttttctcatttgctcaatgtctgataagcctcacacatcctagatatcttgtgtaatgctatactaagtg

SEQ ID NO: 45362 - DNA, 469 bp, Homo sapiens
tagtatgttctacactgcaagaatgactggttacctgtgctactgaggatccagtttgccaaaagccaatatctccatgcccatagacaacctttgctatacaacaattaactatgaatctcaatggcacacaacaatagcatttatctcttattcatttgcatgttggccgaggttcagctgtttaggctgactcagctttggtcttgtctcaaagataaaatttgagtttatgtttgctttctcatttttcttggaccagtgtttaaccaacgtacattcgtatcacaatgaaagacaaaacaacaaaaagaccaagctgaactttgcagacaaaatttattgcatgctcacagcatgactgcttacatattattgctcaaagaaagtagcagggctaaaaccaaagtgaagaggtaggaaaatataactctccctcctaaaggccatggcaakagtatgtatacat

SEQ ID NO: 45363 - DNA, 565 bp, Homo sapiens
gtcagtgattctcaactggtggcaattttgtctcccaggargtatttgacagtctggaggcatttttgattgtcacaatttggggcgtgctattaatatgtagtgagcaaagattacagatgctgctgaacatcctacagtgcataggctagtttccctcaacaaagaattatttggcccagaatgccagtaactctgaggtcgagaagctttgagttaagttctggtaaggcaaattcatggtactcttggtggtcaactttccttcccacagtatcaggctactaaattcgcactaaaacaatcaatatttgaatgcgcacattgctctaaaagttatatgacctaagtttattttcctactttaatgtaatgacatctgacccttctgcatcgaaacaacattaatggtggtgaatataaacaatattattgtttgttagagtatgagataagattatttgatttcccatgtctattttaaattttcgaagaggaaggatagtgaatcagcaaaaagttaataacagctattataacatgtcttacctttatggtaaaaaat

SEQ ID NO: 45364 - DNA, 565 bp, Homo sapiens
gtcagtgattctcaactggtggcaattttgtctcccaggaggtatttgacagtctggaggcatttttgattgtcacaatttggggcgtgctattaatatgtagtgagcaaagattacagatgctgctgaacatcctacagtgcataggctagtttccctcaacaaagaattatttggcccagaatgccagtaactctgaggtygagaagctttgagttaagttctggtaaggcaaattcatggtactcttggtggtcaactttccttcccacagtatcaggctactaaattcgcactaaaacaatcaatatttgaatgcgcacattgctctaaaagttatatgacctaagtttattttcctactttaatgtaatgacatctgacccttctgcatcgaaacaacattaatggtggtgaatataaacaatattattgtttgttagagtatgagataagattatttgatttcccatgtctattttaaattttcgaagaggaaggatagtgaatcagcaaaaagttaataacagctattataacatgtcttacctttatggtaaaaaat

SEQ ID NO: 45365 - DNA, 1816 bp, Homo sapiens
tgcatatttgctagaaaaaaattgatgaaaagacttatgaaattatctgagctgyctttatgttcaaggaaaagtgctagaagacaaaaacctgattataaaagtattaatgaatgtattcctcctgtttttacttaaatactcccattctgaaagccagctattcaggaattttcacttagttatttcaaatgagcatttatttcactgcatttccaaatatcctggctatttttcttctatctatctccctctctttgattttctcagttatattttgggaggattgtgctttccctaggacaatctggtaactaatctgaagtgctatcatatacattatctataaaatagtatctagcttgtaaagtcatcaagtttaaatgagatagtacatgtaaaactacttttttcaaagagtatatttttaaaacaaccttcagaatattaaacaaaaggatttgttgtgatataaattttaatataagttctgcagctgagacttctttgtagatgtgtttcttctggcactcttcaaataataccacagtggtaatctatgatttctctctgtctgtgcccagaaatttacctgatgacccaaaagaaaaaaatatatactgaaatagaatttgctatactaggttgtaaccctggtttatacttctaaatattctattactaagaatatatccattcattcaacaaaattagcatttactatatgctcattatttttcaaggcactgaagagatgtcagtgaaaactgtagattaaaaaaaacccaaccaaccaaataaatcagcactgtttgcattctgttgtctcacctgatgtcaaatttcaagtttaagtctatatatatatatctcccatctttttaaagtagcctcatctagctctatcattcatagatttatctgaactgtgtttgagtacactatttcttacagtgttaattcttggtgtattacatgtatttacctattatctgtggattaattatatttttccaaatttatttgttaaaatatgttagcacatcaagatccgtattaactttgtccatatgttcattattttatagctgtgaactacgtatcatttcttcttttgctgctccaagttggatagtcttggcttgctatttattcatatggcagtccacatcaattcacaccattttagcgtcactctcactgaccttttcttgttccaaatatcctaatgaatatggagtaatcagaacataacacaggattccaggtgcagatgtgccacaatttaaattctggcaagatattttctatgttgttttaaatacctatttttcttggtttgtaaaatgttttattatgtaaattttccaacatacgaaagggttgaaaaaattgtgcaatgaacacctgtatatcatccactcagattttaccactaacatttaattatgcttgttgtattacatatctatccttctaatcaatcataaatccatcttatgtatttacatatttaaagttaaatttaaaacatcaatatgttattaagaaaatcataaaagagagaaaatatatttactattctttaagtggaagtggatcattataaaggtcctcatcctcatcttcttcacataaggaagagaaggaggaggaaaaggagaagttggtcttgttgtctcaggggtggcagaggtgggaaaaaatccatgtataagtggatctccacagttctaatgcaggttgcacaagcatcaactgtattttatttcctacaaggtaaaatttacaagcaatgacatgcacaaatattaaa

SEQ ID NO: 45366 - DNA, 329 bp, Homo sapiens
aacctaacctaaaaaactaaaccaaatcaaagaaaccaaaacaaaaacctcagataagagaggagtactgtatatattaagaccctagaggacagagtcaaaggatgtatttggttataatctctcagcatcttcatttccaaaatgacatctctcacttgaaaagcaagggggctaattgaagcaattatatagatcamttaagcaaacagaacaatacctttggtttgaattattctttttttaaattttattattattatactttaagtttaagggtatatgtacacaacgttcaaggtttgctacatatgtatacatgtgccatg

SEQ ID NO: 45367 - DNA, 655 bp, Homo sapiens
taataaatgccatcccaagatattatggcccaaatagattcttacaacccgcaaggggactggccwgcagacattcaccccagcagcatgtgtactgggaaaacactgcaggcagcatggggccatcacaggcaaagcagaccgtcaagaggggctgtatagactgtagaggaccatgaagcacttaaaaccaacaggttgggacgtacacatgggaggacaccttaaaacatgagtgaaaaaaaaatagaaaatgttttaaaatgcaacatttatgcaaattaaaatacacgcacagaaagcaaaattcattttacaagaattcgttgaatacactgaagatggatggggattctgagaatggagtatggggatgaaatagatgaatgaatgaatgaatgacaggtagcagtaatgcaccatgaacatactatagggtatgattaccttagcctcccactctcgaagtgcaattgaaaaataaaatgcaatacagtaatggcataatattcttatagtagctggtgagtccaccttaacaggaatatttttaaatgtcacctgctatattaattttcagaagttcctgtaactaatgaccacaaaggggtggcttaaagcaacagaaatttatacacgcaaagtgttgaggcca

SEQ ID NO: 45368 - DNA, 655 bp, Homo sapiens
taataaatgccatcccaagatattatggcccaaatagattcttacaacccgcaaggggactggcctgcagacattcaccccagcagcatgtgtactgggaaaacactgcaggcagcatggggccatcacaggcaaagcagaccgtcaagaggggctgtatagactgtagaggaccatgaagcacttaaaaccaacaggttgggacgtacacatgggaggacaccttaaaacatgagtgaaaaaaaaatagaaaatgttttaaaatgcaacatttatgcaaattaaaatacacrcacagaaagcaaaattcattttacaagaattcgttgaatacactgaagatggatggggattctgagaatggagtatggggatgaaatagatgaatgaatgaatgaatgacaggtagcagtaatgcaccatgaacatactatagggtatgattaccttagcctcccactctcgaagtgcaattgaaaaataaaatgcaatacagtaatggcataatattcttatagtagctggtgagtccaccttaacaggaatatttttaaatgtcacctgctatattaattttcagaagttcctgtaactaatgaccacaaaggggtggcttaaagcaacagaaatttatacacgcaaagtgttgaggcca

SEQ ID NO: 45369 - DNA, 1560 bp, Homo sapiens
gattagctggagaacatatagggaagaggatccagggccaaytggagagggcaggctctcccagaactgacctgttccaacctatccccatcctccgggagctagcatcacacagcaggaaggaggctgcctcttcaagccaaagcgcttgagcttgaattctaattcctctacattttagctgtgaaaccccaattaatccatgccaattgctgtcattttcattatctgtaagatcatcacaattattctttccgagaagattaaacaaggcaatgcatgtgaaagctatctttgtattgtccacgagtaacaacgaggattcctagaacccagattttgaattttaagtatcattctatgataaaaggaattgatctggagaagtgggtgattctaggactaaggcaagagaagtataggatgagcctggaataccttgtggtgtctgaaagtaaggatgtgctcaggaaagatggaaaagatgggggaatgttggaaggacatggaagccaacttgaagggctcctgatggccacaccttggacaatttaaacaacaggatatatgacagtcatgacgggctctatcgcctaagcaaaataagaacctgtgggttcatattgatataaatattcaaataagtaaataaagaaaaggggaaggctcttccttgtagtagaatctcaatttaggaatgtataaaataatgtaaacctttttaaaatcattgtttggcaaacactacagtacaaattctttcactcaagtgtcattgatgcttgccaaaatgagtgggtgaaagaataacgagaagcaggatattcacagtctcgaaatttggtgccataaaacccttaatgattacaaagaaaaaacatactaactttatagtggataaaccaggcagacactaggtgactttcacaagagtgaacatcactggcaatgacacatggcgtgattctgggctcttgatatcaagaaggacacaaaatcactttcataatatttcttcaaggaatgtatagctggaatttaatcatgaagaaacattaggcaacccaaattaagcggttctttacaaaataactgaccagtccccttcaaaagtgtcaaaatcatgaaaaaatgggaaggactggagggcttgttccagattaaagatgagggatcttgcaagcaaatgcagactgagatctcgaatcagatcctagaccagagagaaaggaagattgacagatctgaaagagggctggagatgaaccaacaggaccacgtggatgtaaatgtgctgcctgtgaaccttgttctgtggacactcacagtcggggtagctgtgaagagtataaggggtaggtgaagagtacaaggaaattttgcattctttttgcaatttcaatacatctaaattatttcaaaattcaaatttgaacatttttaattaaataggaaaacaaacttggctttgtatttgacatacaagaaagatgctcagcaaatggcgttcattattccttttaacaagaagaactgatggctgggggtgcttttagccca

SEQ ID NO: 45370 - DNA, 1560 bp, Homo sapiens
gattagctggagaacatatagggaagaggatccagggccaactggagagggcaggctctcccagaactgacctgttccaacctatccccatcctccgggagctagcatcacacagcaggaaggaggctgcctcttcaagccaaagcgcttgagcttgaattctaattcctctacattttagctgtgaaaccccaattaatccatgccaattgctgtcattttcattatctgtaagatcatcacaattattctttccgagaagattaaacaaggcaatgcatgtgaaagctatctttgtrttgtccacgagtaacaacgaggattcctagaacccagattttgaattttaagtatcattctatgataaaaggaattgatctggagaagtgggtgattctaggactaaggcaagagaagtataggatgagcctggaataccttgtggtgtctgaaagtaaggatgtgctcaggaaagatggaaaagatgggggaatgttggaaggacatggaagccaacttgaagggctcctgatggccacaccttggacaatttaaacaacaggatatatgacagtcatgacgggctctatcgcctaagcaaaataagaacctgtgggttcatattgatataaatattcaaataagtaaataaagaaaaggggaaggctcttccttgtagtagaatctcaatttaggaatgtataaaataatgtaaacctttttaaaatcattgtttggcaaacactacagtacaaattctttcactcaagtgtcattgatgcttgccaaaatgagtgggtgaaagaataacgagaagcaggatattcacagtctcgaaatttggtgccataaaacccttaatgattacaaagaaaaaacatactaactttatagtggataaaccaggcagacactaggtgactttcacaagagtgaacatcactggcaatgacacatggcgtgattctgggctcttgatatcaagaaggacacaaaatcactttcataatatttcttcaaggaatgtatagctggaatttaatcatgaagaaacattaggcaacccaaattaagcggttctttacaaaataactgaccagtccccttcaaaagtgtcaaaatcatgaaaaaatgggaaggactggagggcttgttccagattaaagatgagggatcttgcaagcaaatgcagactgagatctcgaatcagatcctagaccagagagaaaggaagattgacagatctgaaagagggctggagatgaaccaacaggaccacgtggatgtaaatgtgctgcctgtgaaccttgttctgtggacactcacagtcggggtagctgtgaagagtataaggggtaggtgaagagtacaaggaaattttgcattctttttgcaatttcaatacatctaaattatttcaaaattcaaatttgaacatttttaattaaataggaaaacaaacttggctttgtatttgacatacaagaaagatgctcagcaaatggcgttcattattccttttaacaagaagaactgatggctgggggtgcttttagccca

SEQ ID NO: 45371 - DNA, 1560 bp, Homo sapiens
gattagctggagaacatatagggaagaggatccagggccaactggagagggcaggctctcccagaactgacctgttccaacctatccccatcctccgggagctagcatcacacagcaggaaggaggctgcctcttcaagccaaagcgcttgagcttgaattctaattcctctacattttagctgtgaaaccccaattaatccatgccaattgctgtcattttcattatctgtaagatcatcacaattattctttccgagaagattaaacaaggcaatgcatgtgaaagctatctttgtattgtccacgagtaacaacgaggattcctagaacccagattttgrattttaagtatcattctatgataaaaggaattgatctggagaagtgggtgattctaggactaaggcaagagaagtataggatgagcctggaataccttgtggtgtctgaaagtaaggatgtgctcaggaaagatggaaaagatgggggaatgttggaaggacatggaagccaacttgaagggctcctgatggccacaccttggacaatttaaacaacaggatatatgacagtcatgacgggctctatcgcctaagcaaaataagaacctgtgggttcatattgatataaatattcaaataagtaaataaagaaaaggggaaggctcttccttgtagtagaatctcaatttaggaatgtataaaataatgtaaacctttttaaaatcattgtttggcaaacactacagtacaaattctttcactcaagtgtcattgatgcttgccaaaatgagtgggtgaaagaataacgagaagcaggatattcacagtctcgaaatttggtgccataaaacccttaatgattacaaagaaaaaacatactaactttatagtggataaaccaggcagacactaggtgactttcacaagagtgaacatcactggcaatgacacatggcgtgattctgggctcttgatatcaagaaggacacaaaatcactttcataatatttcttcaaggaatgtatagctggaatttaatcatgaagaaacattaggcaacccaaattaagcggttctttacaaaataactgaccagtccccttcaaaagtgtcaaaatcatgaaaaaatgggaaggactggagggcttgttccagattaaagatgagggatcttgcaagcaaatgcagactgagatctcgaatcagatcctagaccagagagaaaggaagattgacagatctgaaagagggctggagatgaaccaacaggaccacgtggatgtaaatgtgctgcctgtgaaccttgttctgtggacactcacagtcggggtagctgtgaagagtataaggggtaggtgaagagtacaaggaaattttgcattctttttgcaatttcaatacatctaaattatttcaaaattcaaatttgaacatttttaattaaataggaaaacaaacttggctttgtatttgacatacaagaaagatgctcagcaaatggcgttcattattccttttaacaagaagaactgatggctgggggtgcttttagccca

SEQ ID NO: 45372 - DNA, 1560 bp, Homo sapiens
gattagctggagaacatatagggaagaggatccagggccaactggagagggcaggctctcccagaactgacctgttccaacctatccccatcctccgggagctagcatcacacagcaggaaggaggctgcctcttcaagccaaagcgcttgagcttgaattctaattcctctacattttagctgtgaaaccccaattaatccatgccaattgctgtcattttcattatctgtaagatcatcacaattattctttccgagaagattaaacaaggcaatgcatgtgaaagctatctttgtattgtccacgagtaacaacgaggattcctagaacccagattttgawttttaagtatcattctatgataaaaggaattgatctggagaagtgggtgattctaggactaaggcaagagaagtataggatgagcctggaataccttgtggtgtctgaaagtaaggatgtgctcaggaaagatggaaaagatgggggaatgttggaaggacatggaagccaacttgaagggctcctgatggccacaccttggacaatttaaacaacaggatatatgacagtcatgacgggctctatcgcctaagcaaaataagaacctgtgggttcatattgatataaatattcaaataagtaaataaagaaaaggggaaggctcttccttgtagtagaatctcaatttaggaatgtataaaataatgtaaacctttttaaaatcattgtttggcaaacactacagtacaaattctttcactcaagtgtcattgatgcttgccaaaatgagtgggtgaaagaataacgagaagcaggatattcacagtctcgaaatttggtgccataaaacccttaatgattacaaagaaaaaacatactaactttatagtggataaaccaggcagacactaggtgactttcacaagagtgaacatcactggcaatgacacatggcgtgattctgggctcttgatatcaagaaggacacaaaatcactttcataatatttcttcaaggaatgtatagctggaatttaatcatgaagaaacattaggcaacccaaattaagcggttctttacaaaataactgaccagtccccttcaaaagtgtcaaaatcatgaaaaaatgggaaggactggagggcttgttccagattaaagatgagggatcttgcaagcaaatgcagactgagatctcgaatcagatcctagaccagagagaaaggaagattgacagatctgaaagagggctggagatgaaccaacaggaccacgtggatgtaaatgtgctgcctgtgaaccttgttctgtggacactcacagtcggggtagctgtgaagagtataaggggtaggtgaagagtacaaggaaattttgcattctttttgcaatttcaatacatctaaattatttcaaaattcaaatttgaacatttttaattaaataggaaaacaaacttggctttgtatttgacatacaagaaagatgctcagcaaatggcgttcattattccttttaacaagaagaactgatggctgggggtgcttttagccca

SEQ ID NO: 45373 - DNA, 586 bp, Homo sapiens
tggacacaaagtcgagtttgggtttttttaaaatctggattaaaagaaattttaaattccaactttctttacctgattctctctgtagcactggccttttgtaatatatatttttccagccataggaaagagctttttaatgctcagatcccaagagctaaggaagtagatggctatttatgttctgccaggaatctttatgttcagtgagaggaagtgcaactgcttaaaactcttaacttctctctctcactttagaaagtcaagcagaaaaaaaatggattaatttgacagatagcacagaataagaaaaatattagaaacaagaagaggccatttttcctatagaggctcatttcattctatataccacttccctgggatatctgctaattgttagcagaaagagtaatgttatctattttttaaaatttcactcttgagtactayggagataatagctaaatgatggagaaataactttctttcacggtagtagtttaagaagggtaaaaagagctcaaaggcagatgtttgatgacatgagaaaattcagcgacaaatgacaaatttgatatttctatag

SEQ ID NO: 45374 - DNA, 586 bp, Homo sapiens
tggacacaaagtcgagtttgggtttttttaaaatctggattaaaagaaattttaaattccaactttctttacctgattctctctgtagcactggccttttgtaatatatatttttccagccataggaaagagctttttaatgctcagatcccaagagctaaggaagtagatggctatttatgttctgccaggaatctttatgttcagtgagaggaagtgcaactgcttaaaactcttaacttctctctctcactttagaaagtcaagcagaaaaaaaatggattaatttgacagatagcacagaataagaaaaatattagaaacaagaagaggccatttttcctatagaggctcatttcattctatataccacttccctgggatatctgctaattgttagcagaaagagtaatgttatctattttttaaaatttcactcttgagtactacggagataatagctaaatgatggasaaataactttctttcacggtagtagtttaagaagggtaaaaagagctcaaaggcagatgtttgatgacatgagaaaattcagcgacaaatgacaaatttgatatttctatag

SEQ ID NO: 45375 - DNA, 560 bp, Homo sapiens
ttgaggcctctgaagttcaaaccaacaaaggagccttttaccatatgaagcttaagggcagtgttaagactgcggctttaaccagttaggaaattgcttgaccttgcctgctgtgtagtcccctgtgacttagtccccagttatcttcctccaggcaggaggagttctgatagggagtagggtggggctgatcccgcaccaaaagatagccatcgattacatcttttattttctcttcttcttgtgtcacaaaggtgatactcccctttagagaatattctggaaataaggagacatttttggttgtcatgatgacactgtcctggcattgagggatgtgggtcagggatgctagacatcctgaccccctgcaacatgtacaggaaaatgaagaactgtatgtgactttyaaatgttctacaggacattcatgtagatgaaaaacctacttacaattgtctgtacttagaacctatccttgtgttccaaataaatacagtgtttttgttgaattttccaggaatacagctaccacgtaaaatgagggaagattgttattt

SEQ ID NO: 45376 - DNA, 564 bp, Homo sapiens
ttgaagggctataccccaagagtgagagtaaactaaaaacaaactagccatagtagggaatcaaggccagcttcaaattacttaaatacctgattggcttaaagtggccttggattactaatgtcctcaccccagttgcctaaaataagcaaacttcactttctcaggaaaaaaaataaaatcacccatagcctaaaattatatctcaaaatcttaatatataatatccaagacccaattaaaattaccagtggtcccttaagattaaaatggagctgaaaaattcctattgcctagtgatgttgaaggtgacataatgttctagtgcaatrtattaccttttctatatttatataggattacatgcacaaatacttagtattgtgttacaattacctacggtactgagtgcagtaacatgctgtacaggtttgtagcctaggaacagtaggctataccatatagcctaggtgtgtagtaggctgcaccatctaggtttgtgtaaatgaactctgtgatgtttgcacaatggggaagttgcctaacaatgcatttcttagaatg

SEQ ID NO: 45377 - DNA, 563 bp, Homo sapiens
tgaagattttttttttctttctggtttggggaaaaagtgaggcgccgtgggctgtagcaggaatcaggaatgattcctctataagcaaaaagatatctgcccagtgaagtctcagaaaaaaattaggtcttggaaattatagaggaagtcttattgccaggattagaataagaagaatagaacagtaccgtgktctctattcccaaaggtttgatattggtttgtttaagatagttttagctgcaagtaataaaaacctgaaacaaactggcttaacataaaggaaaattattatattatatcctagagatcccagaaataagtcaggcttcagaggtggtgagtttagcaacatggagatggcccatgttgctgtctccatgtcaagggcgcgtgttctctgtttctctcataccctgcctaggaccattcaggctatttctttttttcttttctttttctttctttctttcttttttctttttcttttttattttattttattttattttattttgagacaaagtcttgctctgtcacccaggctggagtgcaatggcaac

SEQ ID NO: 45378 - DNA, 1704 bp, Homo sapiens
gtggactgttagaaatctggacatttcaatagtatatcacatcatagtacttgtgtgggatatcatgagtttttctgttcaatgtcaatatctttacattgggcagcccaaagagtcatgccactttatctgcagttctcaaggtatttcagaattcatcagaaagatttaatcaatttatcttccacaattgacctccatgactggtctattttaagtacagtggaaaaaacaagttatttaggtatctcattacccagataaaaatcctttatttgcctcttaatggttctatgaatttaactatctatgttacctacctctatttgtattctcctctgtaaataggtagaaataataacaattgttattgtaataaaataggtaaaaatcatcctcatcatactcatcattatcattacctacctaatagaattattgcaaagattaaaggagatgagatactcacttttgattataaagggccatataatgttaaaaactaatgctgttcccagttagtattgtcctgtattttgagaggtgctcaaatgcaatctgagagtatgtattgttcttttgtttagatttcccttaaaaattattttagtgagtgagtgtgattatatcttgactatctcattaggagaaaaggaattcacatgctgacataagtaggtaagggatatggaaattatatcttaataacaaaggaacacctagagatgtattttataataggaatgagcattgggaatgccttttgttcttctaaattaaggaataccttggagcagatctttgtctttcttctatttagtacccaaacttcctttgggaaatgtcttctgctgggactgccaaccatagttctgaaagtctctgatgactttgggatccagccctagtctagcacaggccatgcccagaccttagggactgatcccaggttgagcatgagttttacgttagtaatcagtattttcccaagtgtttttcatttagagcttaagaaaaggcactgtaccttttgattttgtttatgggagtatattaataggggactggaagaaggaatcttccccacaagtagttggaattgagataaagaaagaaatagggtgaaggtgagctccaagttcctacactcagttgtgccagatgcaaagaccaataaattcattttttttctatttttgatttgagcctgtgtcttactgccaatactcctgaatcatcaacctttttttttttttttttttttttgagatggagtctcactctgtcactcatgctgtagtgtagcggcatgatctcggctcactgcaacctctgcctcctgggttcaagtgattctcctgcctcagcctcctgagtagctgggactacaggtgtgcaccaccacacccagctaattttttttttgtatktttagtagagacagggtttcaccatgttggtcaggctggtctcgaattcctgacctcacgtgatccgcctgcctcagcctcccaaagtgctgggattacaggcttgagccaccacacctggctaatggtcaacttcttatacatagtatctgtatttgaatgctggtgtagaggagagaaaactgtctctctaccctttgagggtttgataattaagtctatgaaataaactgacaggtagacagattaacaggagaaaagccattttaattac

SEQ ID NO: 45379 - DNA, 1704 bp, Homo sapiens
gtggactgttagaaatctggacatttcaatagtatatcacatcatagtacttgtgtgggatatcatgagtttttctgttcaatgtcaatatctttacattgggcagcccaaagagtcatgccactttatctgcagttctcaaggtatttcagaattcatcagaaagatttaatcaatttatcttccacaattgacctccatgactggtctattttaagtacagtggaaaaaacaagttatttaggtatctcattacccagataaaaatcctttatttgcctcttaatggttctatgaatttaactatctatgttacctacctctatttgtattctcctctgtaaataggtagaaataataacaattgttattgtaataaaataggtaaaaatcatcctcatcatactcatcattatcattacctacctaatagaattattgcaaagattaaaggagatgagatactcacttttgattataaagggccatataatgttaaaaactaatgctgttcccagttagtattgtcctgtattttgagaggtgctcaaatgcaatctgagagtatgtattgttcttttgtttagatttcccttaaaaattattttagtgagtgagtgtgattatatcttgactatctcattaggagaaaaggaattcacatgctgacataagtaggtaagggatatggaaattatatcttaataacaaaggaacacctagagatgtattttataataggaatgagcattgggaatgccttttgttcttctaaattaaggaataccttggagcagatctttgtctttcttctatttagtacccaaacttcctttgggaaatgtcttctgctgggactgccaaccatagttctgaaagtctctgatgactttgggatccagccctagtctagcacaggccatgcccagaccttagggactgatcccaggttgagcatgagttttacgttagtaatcagtattttcccaagtgtttttcatttagagcttaagaaaaggcactgtaccttttgattttgtttatgggagtatattaataggggactggaagaaggaatcttccccacaagtagttggaattgagataaagaaagaaatagggtgaaggtgagctccaagttcctacactcagttgtgccagatgcaaagaccaataaattcattttttttctatttttgatttgagcctgtgtcttactgccaatactcctgaatcatcaacctttttttttttttttttttttttgagatggagtctcactctgtcactcatgctgtagtgtagcggcatgatctcggctcactgcaacctctgcctcctgggttcaagtgattctcctgcctcagcctcctgagtagctgggactacaggtgtgcaccaccacacccagctaattttttttttgtatttttagtagagacagggtttcaccatgttggtcaggctggtctcgaattcctgacctcacgtgatcygcctgcctcagcctcccaaagtgctgggattacaggcttgagccaccacacctggctaatggtcaacttcttatacatagtatctgtatttgaatgctggtgtagaggagagaaaactgtctctctaccctttgagggtttgataattaagtctatgaaataaactgacaggtagacagattaacaggagaaaagccattttaattac

SEQ ID NO: 45380 - DNA, 547 bp, Homo sapiens
ttctttcttttgtgaagaaaacamgggattgtagtcactatgactgatttcagaatagtagctaaagatgaagtcattgctttctttcaaagcagaaattgtaaaattaaataatttggaataatcacagaaataattacattaatatgaatagcaaatagcaggtgataatttgtgtagcatttacagatactgtgacccttggttttagaccttgtgcagtgtttttctctgtcaggtacatgatgctgggagagcagctctctaggagacctctgatgacatcatgtcactgtcctctgaggccacaacacagctgccatgccacacacaggctcaaaacacacagtggggcatagccaaaaagttcacaaagtaaagaaatgtcaactttctacgttttagcattcatttgcctgcattaaccaacattgtgcaatatataaagtctaaagcccatgtgagagataagacagaattatttgcatttctgctgaaattaagcatgatgaagtagaaacttattacttttaaaaccaaaaaatga

SEQ ID NO: 45381 - DNA, 583 bp, Homo sapiens
actattaaaattcataaatattactttacatgttttcttctaaatcttatttttgttccaaagagagtactgcaatttacttaaccatkttatcaatatatggtatttaggttcttcctgatactattcctattttaaataatcttaggcaaatatcgtcattcataaattattttccttctttggacttttataagataaatcatcaaaaaaaggattaacagattaattgtataaacatttaaaaaagttttataacattgtttctccttaacattgcattaacctctaataatatctttaataagtgttcattacagaaaaattggaaaaaaatataaacaatagaaagaatatgaaagtgattaccacctagtggtaagtactcataatgttttaaggtaagtttataaatacatttaatgcttttgaaacatattgtcaaaactcttgcataaatacttctaaaatttgcatcattactaattgaaaactaagctaaatgtttatttgcattggggactgtcattatttttgacttttgttaatttaaagttgaagcgtggtgtccattaagatacct

SEQ ID NO: 45382 - DNA, 579 bp, Homo sapiens
tgcagggaggaaaaggtatgagttatctcaatgaataggaaattacaccaattcaatcaatatagcatggtgttatgagctgaactgtgtcccacaaaattctataatatgttgaagtcctaacctccatcacctcagaatgtaactgtctttggaaataggtctttaaaggaggtaattaagttaaaattagacagttgtggtggcccttaattgaatacggttggtagccttttaagaggaaatttggaaatacagattttttatttatacagatctttatttttatatctaccacttttaagcagatgatattcaaaaatcttccttggtatactgattcacaagaaaaaaayattgactgaaccagccaccaagtttaactatacaaaaacactaaaaacacggaataactgggagttcagagatgctccacttgactgtcacccagaagctgactgctcccagcgtaaactcggtaaagccggaacaaggattttcttgatgctgggaaaaagttgtgtagaactctgttcttggtgccagagttgagcctggacactaggatgttcaggagat

SEQ ID NO: 45383 - DNA, 561 bp, Homo sapiens
gcaaaagggacctgtagaattatgtggaaacacttagaagtttaacaggttttgtttgaatggttgtgccttttatgctttgcctgaatcatttagccaactcagactaatagataataagatgctgccaaggataacactggttctgtcatgcawctacagtactaagatttaaagctaaatgaatgcattcttgtaggaaaaataatgactagaggaattcagcattcacattgaaagaaaattttgtgaaagaaaaacatctgtcattgttgtccgcttttctaactgtaataaagatatgtaggtgatatagttgcaattgaaaagcaaagtcttttgtgtctgatcagctcttgacaatggatgattaaccatctggctaatcgcaagttatttaatgagagagtttctttataattttttttcatttaagcattattaattctgtagttgcaaggatcattttatgggatagctgttataaaatattttaaaatcactgatattttcacaattaatatttaatactcacagctttgtgtttctaggccttgtctt

SEQ ID NO: 45384 - DNA, 561 bp, Homo sapiens
gcaaaagggacctgtagaattatgtggaaacacttagaagtttaacaggttttgtttgaatggttgtgccttttatgctttgcctgaatcatttagccaactcagactaatagataataagatgctgccaaggataacactggttctgtcatgcatctacagtactaagatttaaagctaaatgaatgcattcttgtaggaaaaataatgactagaggaattcagcattcacattgaaagaaaattttgtgaaagaaaaacatctgtcattgttgtccgcttttctaactgtaataaagatatgtaggtgatatagttgcaattgaaaagcraagtcttttgtgtctgatcagctcttgacaatggatgattaaccatctggctaatcgcaagttatttaatgagagagtttctttataattttttttcatttaagcattattaattctgtagttgcaaggatcattttatgggatagctgttataaaatattttaaaatcactgatattttcacaattaatatttaatactcacagctttgtgtttctaggccttgtctt

SEQ ID NO: 45385 - DNA, 491 bp, Homo sapiens
tcgggcagggatgagaggggcatctggaaactgcgggagaccctaggctgtgtagacccatgtggggtccccactgggtttcttgttggctctacctgcacccatgctgacagctggcgagcccacccgcccccaggtgctcagcctcctcccaccgggatgcaggggcttcactgacctgcttgccggatggggccgctgtctgtgcttcctccaaagccaaacttgtcacagaagggaggtgcccagtgggcctcgcagtggcagttcttcctgttgttgcacacctttcagggcagaggggagggacgtggggttagggcatatgctctgtgcatcaccacagcagaagcaaggggggccatggtcagagcccccccccaacactgacacagccagactcagcacacgccatggtgygaataagcccaaagccggcactacacaccacacaggggcgaccaaacctgaggctgtgaagatgcatcatc

SEQ ID NO: 45386 - DNA, 586 bp, Homo sapiens
gagaagctgagagactgtggcccagctacttaactttatgatgatctagttgtgtaggaaagaacttggcatgtatggcacagatcagtgactggttaacatgtccattgggctgcctttttcaaatattgggtattttatacaaggttttgatygatattggaccacattcagaaccctactaaatcatacaaagggttactttatttaagatattttaatgtttggataaaatgagagcaatgtttttagatacttgaactactaagcctgttggtggaaaaataaaaggattagacttctcttctgcacttatatactgttggtaggaacgtaaattagttcagccacaaattggaaagcagtttggagatttctcaaagaacttaaactaccattcaacccagcaatcccattactgaatatgtattcagaagaaaataaattgtcttgccaaaaaatacgtgttcacatgttcattgaagcactatttatgatagcaaagacacagaatcaacctaggtgcccatcaacagtggactggatgaagaaaatgtggtacatatatactatggagtaccacaca

SEQ ID NO: 45387 - DNA, 495 bp, Homo sapiens
cattttattacacgttttttcaaacagcatgcccrccaaaacagaaaacactgcacatatgggctgagatcaaatgctttcaccatttagttgatatattctgacaggaggcagaaacaagatggtctacttttatttaggctttccttttggatctcagattttttaagttattaattaataaaaggccagaactcttcaggtacattctttaagactcgttacagcaagccttattgctcaaacccttcccagcaatgagtatttctcaaagctgtctaactatgtaatttatgatcatgcatatgcaaagttttcaaatccacaactaatggaacagaatacacatcaaaatttaacagtacagtttgaaagttttggatgggtaagttgattatttttagagtgatacgatttttaggactcacttgccaatatgcttatattactagtaaattacagttgacattaatgtctggcattcatgcacaatct

SEQ ID NO: 45388 - DNA, 557 bp, Homo sapiens
tatataactcaattaccaaaatgagacaaggtcaaaccaagaaaatttatacacagatacacacacacacccactcatacactttcactaatttaatatcacatagtatttcctaacaagcaatcacaatacgtcaatgacaaaaagcaataaacctttatttccaataaatctgtgagttggctggtcaattcttctgaactggcacaggyttgctaagctcagctgggcttgttcaattagttgatggggctggcttgtcaagatagccttacctaaaggggcttggacactacaggtggactcaaattccagcagactagttcaggcatgtccctgtattaatctgcttttatgctgctgataaagacatacccaagactgggcaatttacaaaagaaagaggtttaatggactcacagttccacatgcctgaggaagcctcacagtcatggtggaaggggaaaggcacatctcacatggtggcagacaacagaagagagcttgtgaaaggaaactcccctttttaaaaccatcagatcttgtaatatttattc

SEQ ID NO: 45389 - DNA, 195 bp, Homo sapiens
acagactcaataaacaactagtaaatgttgaggcattcacacatccacccaggtagcaaacccccactaagagtatgcagattatgggggacaagtgggtggagtwcaccaggggtgagcagatggccacatagcgatcataggccatggtcgccagtaggaagcattcagacgtcccaaacatgactacagaac

SEQ ID NO: 45390 - DNA, 1053 bp, Homo sapiens
tactacttggccttgctttcatatgctaattaaacgcacatcactgacatttataagctattttacccaggttcttatgtgttcgttttttaatgtttatataaacatttggcggagcttctaagaccttaggactaacgttcaaagtcacatgggtttgtaggtttgagttactcaatattctgttctggctgtttgtattagaaaatcatctaggtttcattttttttgtattgtgactcaatttgctaatatctacattcatgataaatagataaataaccagcactataaataacatagcctttaaattatgacatatgcagatattctgtactgaaaaagctcttaattcacttcttttcctaaattgtcagcttaagcagagtattagcttctcttcctagaccaggagtccaaaactgggagttgctgggagttaaacagcrgccttgtctttaatacgagtagctgataagtacttattacagaactacttctttgtttggattccccaaggtgggtttcacattcaggaactatttgcaccatttcgagttactgtgcttcaaaaatccttatattattttttagattattagatttagaatttggtttttgtagatatttgggtttcaaggtgatgtcattagaaaccatttactattaattttctttaaagctaagtagttttactgttcatacttactattcaaatatagctttaatatttcataaaacattcaatgtttaaaagttgaaaatgaaagaccggagaaattctactatgactaggaaaaacattgagagctcagctccattttgcatatttaaacttcccacatatgcccttttgctttagagcaaaaggcaggaagaaaaaggcaggagggcttcatttgttcctcttcagtcttccaatccagagcccataggtctagtttctgcttctttccctctaaattcaccagctgtcatcctcctcctgtgtgctcacatttgtcccttagcatgatcccatagtagtctcagttgtacctaaagaaatacaat

SEQ ID NO: 45391 - DNA, 844 bp, Homo sapiens
tgagtttgatccttagaatcatggacatttccctgtgcttatttctattgtgtttgtatgttcacttccctgtcctcttttataactttttctacgcaaatcatcaatttgcatgtcaagagaaaggagtagagaacacggattgcttcatatttgggtgctttcaggatgatgtgacagaagggcaaggtaagyagtgagctgaagattctcctggcaaaaattcagatgaccagggacaaaaaaaaaaaaaagaaaatgagtgattttactaattaatttattttacttatcacaccttttggtggaccccacattaagaaaattcaatgcataggaaatccaaaccttcccaatcacttggaaacttccattctcatcctcaatcctggcttaaacttgtatcccatgaagacacctcactgtagggatgcaatgactgttctatctaggttgtcttcactccttactacaccagtctaaatttcaaacatagcccattttatttcctcaaagaatccagctgccgggtaccctattgtgaaatagatttaactggtgatatactttggatgtgtgtccccacccaaatctcatcttgaaatggaatccccattgttgaaggtgggacctggtaggatgttattgtaccatgtgattgaaccatgggagtggacttctcatcagtgatttatcaccatccccctgggtgctgtcctcatgatagtgagtaagttcttgggatatctgattgtgtaaaaatgtgtggcacctcctgcctccctcttgctcatgcttttgctttctgagttgcctgctcttgttttgcctcctgccatgattt

SEQ ID NO: 45392 - DNA, 534 bp, Homo sapiens
ttctcccagtctagatatttgccatgagttccagatatctgtgtccgattacctaacatctccacttacatattcactaggcattcaaaggtgacacgatcaataactaatattcccctataaacgtttcttcaatatagttactatttcaataaaattcaactcaatctttcttttatctcagaccaaaaacctgctatctctctctctgggaattgctaaattactcatcttcaagtgatttcagagagaaataacctaaacttttacaatgrtggcagaattggtcattttgaagagattatgcagagggaggaaaaagattccaagaaactggagttaaacagaatatcagagtcttcaaaaggataaaattataagcactgaatttgactctgatcaattctagaacatatttttccctaaacagtcataaaacatgaaatatatgtgctgttcattaagttccaacatgaattcattaagaaaagacataaaacatggatcacttttaaatatcctgtctggtcaccc

SEQ ID NO: 45393 - DNA, 534 bp, Homo sapiens
ttctcccagtctagatatttgccatgagttccagatatctgtgtccgattacctaacatctccacttacatattcactaggcattcaaaggtgacacgatcaataactaatattcccctataaacgtttcttcaatatagttactatttcaataaaattcaactcaatctttcttttatctcagaccaaaaacctgctatctctctctctgggaattgctaaattactcatcttcaagtgatttcagagagaaataacctaaacttttacaatggtggcagaattggtcattttgaagagattatgcagagggaggaaaaagattccaagaaactggagttaaacagaatatcagagtcttcaaaaggayaaaattataagcactgaatttgactctgatcaattctagaacatatttttccctaaacagtcataaaacatgaaatatatgtgctgttcattaagttccaacatgaattcattaagaaaagacataaaacatggatcacttttaaatatcctgtctggtcaccc

SEQ ID NO: 45394 - DNA, 593 bp, Homo sapiens
agaaagaggtggcatctttcccagcacccagcaccatacaagttgtgcagacatggctctcagctatatgcccaacttgtgtgggcataaagaatgctttttccaagcattcacctgggtcccatcacccaccttgcctgtggactagcttcacagcttcagggtgttccgaactcatttgttccccactgctttttattaaggtgacatccttattctagtctacagagacctctctttcttgttttctagaacaactatgctgattaattttaaaaatagttttgtttgctactggaaattcagaaattgagaaaattacatggtctgtttaggagctcattgtcacaaaagagagtcagatagctataatagaatatggcactatgatataggaatgyccagggtatggaggaaatcaagcacaatggggtttagggagggggatacttagcctggcttgtggcagtgagggcatgtttttcaggcatatttgtggaagtgagggcatgagctgattcttgagagctataagtacatcaggtgaatgagtgaaaaaactactctgaacagaagaatctgactacacaaca

SEQ ID NO: 45395 - DNA, 573 bp, Homo sapiens
agtaaatgaagtttgtggctaactggtttttaatttgtgtttctaaaatggatatatatatatatatatatattttttttttttttttttttttcctcccatagctttcccrtggtttggcatggacattgggggaactctagtaaagctctcgtactttgaacctattgatatcacagcagaggaagagcaagaagaagttgagagtttaaaaagtattcggaaatatttgacttctaacgtggcatatggatccaccggcattcgggatgtacaccttgaactgaaagatttaacactttttggccgaagagggaacttgcactttatcaggtttccaacccaggacctgcctacttttatccaaatgggaagagataaaaacttctcaacattgcagacggtgctatgtgctacaggaggtggtgcttacaagtttgaaaaagattttcgcacagtaggtatcttttactcaaaactgaaaattgatacctgtttttaaatatgagagtaggtttccatctagcatgttccttaattctccctgcacatgcagtgggaaatatgtatcca

SEQ ID NO: 45396 - DNA, 566 bp, Homo sapiens
cacttaaaagggcatgtgctattccaagttcgaactcatagattctttgatggagtagaggtttagtgatcttacaatgtctcttaatattggaaatacacatttttaagtgaaatctctagattttaaaatattggtagctaatccaaagtttttaaataccatatgggccaaccaaaacatatctgctagctagatttggcctgaggggctccagtttgcaacctctataagtgaatctcaacattctttcataataggtaaaggttgtctcaactacagctatccagcctaaatatgtttttgttttttttttttccttaagaatttcacagtagtgagatgctgcttttggtatgaggaaaagcaaatttagaagcttcattgcccaggtgctgggtcataatatgatggtgactctgatttcctgtggatctgtgaagttcagtattatacttattttctccagtaccccaggaatttcttyatagctgtatggggtaaatattgtcctaagatttgataaagcaaaaaaatctttttttaaagggcaaagtcaatttcca

SEQ ID NO: 45397 - DNA, 587 bp, Homo sapiens
gccaaacttctgtctcatacatacaggcttaagtctttacagaaaaaggcatctacgtctgagggaagaataacastccccatgatatcagtgggccaggggaggtcctcaaatgccggtgggtcctggacccccgcaggtgtccagactcttgacaccgtcttgagaatggattcaaggatgagttggaaaatagtgaaagtatggagatttgttgcaaagggaaaaagtacacacttaagaaaggggattgcgggcgtactcaagagagtcacacagtggggtgtgcggtttctctctgtatgggtttcttcaaccaaggggtggaatatttatgacaattcttggaaaaagatggagatttcttggaactgtggtgccactcgtttttacaccaaatatgggtgttcccagaactgtcattgcgctggtgggtgtgatttagtgtgttaatgagcatataatgaggtcctaggtgaaacctaggtcaaatccagcaccactttgggtctagttggtcttagccagcttggtgcacaccctgtttttcaggggttcatcagcccataacccctactcatgggaaa

SEQ ID NO: 45398 - DNA, 587 bp, Homo sapiens
gccaaacttctgtctcatacatacaggcttaagtctttacagaaaaaggcatctacgtctgagggaagaataacagtccccatgatatcagtgggccaggggaggtcctcaaatgccggtgggtcctggacccccgcaggtgtccagactcttgacaccgtcttgagaatggattcaaggatgagttggaaaatagtgaaagtatggagatttgttgcaaagggaaaaagtacacacttaagaaaggggattgcgggcgtactcaagagagtcacacagtggggtgtgcggtttctctctgtatgggtttcttcaaccaaggggtggaatatttatgacaattcttggaaaaagatggagatttcttggaactgtggtgccactcgtttttacaccaaatatgggtgttcccagaactgtcattgygctggtgggtgtgatttagtgtgttaatgagcatataatgaggtcctaggtgaaacctaggtcaaatccagcaccactttgggtctagttggtcttagccagcttggtgcacaccctgtttttcaggggttcatcagcccataacccctactcatgggaaa

SEQ ID NO: 45399 - DNA, 584 bp, Homo sapiens
tgcatttctataaataaaaaattaagcatgcacttctagtgtacaatatgtacttgttgatagattatatatatatatatatatacaatgatattaactattagacatatttttaaatacaaaaaatagaaattaggaaaggagtaygtaataagaaagttacgatattttctttcaggtcatcttgcacaacttcactttgaagcccacagactcagcttggaggttctcaaactttaatgtgcatcagaatcacttggagggtttaaaccacagaatgcagggctctatccctagagtttccaattcagtgggtcaggggtggggcctgatcatttgatttgtgttaagttcccagctgatccaggaaccataccttgaaaaccactgggttagtctgttacaaccatatgtctgtaaacacattaaaacaaaattgtttttaaatgctagatatagagaaagtaccataaggttaaagtttgatattataagtaggcatttcatggtttgagttatttgcaggaaacagccagtgtgacatatgtagtgccttattaaatgatgaacatgctatgtaatat

SEQ ID NO: 45400 - DNA, 584 bp, Homo sapiens
tgcatttctataaataaaaaattaagcatgcacttctagtgtacaatatgtacttgttgatagattatatatatatatatatatacaatgatattaactattagacatatttttaaatacaaaaaatagaaattaggaaaggagtacgtaataagaaagttacgatattttctttcaggtcatcttgcacaacttcactttgaagcccacagactcagcttggaggttctcaaactttaatgtgcatcagaatcacttggagggtttaaaccacagaatgcagggctctatccctagagtttccaattcagtgggtcaggggtggggcctgatcatttgatttgtrttaagttcccagctgatccaggaaccataccttgaaaaccactgggttagtctgttacaaccatatgtctgtaaacacattaaaacaaaattgtttttaaatgctagatatagagaaagtaccataaggttaaagtttgatattataagtaggcatttcatggtttgagttatttgcaggaaacagccagtgtgacatatgtagtgccttattaaatgatgaacatgctatgtaatat

SEQ ID NO: 45401 - DNA, 579 bp, Homo sapiens
aaccaaaagagtagtgtcagtaaacatccaaccactatcgggggaaccagtccccaatatttcaacataggttcttttctattttccataagtgtcggccgctctgagaaataaagggaaagagtacaaaagagagaaattttaaagctgggtgtctgggggagacatcacatgtcagcaggttctgtgatgccccagagttgtaaaagtagcaagtttttrctagcaattttcaaaggggagggagtgtatgaatagggtatgggtcacagagatcacatgcttcaagagcaacaaaaggtcacaaggcagaaggtcagggcaagatcacaaggtcagggcaaaactagaattactaatgaagttccgtgtcccgctgtgcacgcattgtcattgataaacatcttaacagggttcaagagcagagaactggtctgactagaattctccaggctggaatttcctaatcctagcaagcctgggggcgctgcaggaggccagggcatgtttcatcccttatctgcaactgcataaggcagataccctcagagtggccattttagaggcctcccctgggaa

SEQ ID NO: 45402 - DNA, 596 bp, Homo sapiens
gaacatgctatatttgtctttccgtgcctggcttatttcacttagcataacattctccatttccatccacattgtcacaaatgacagaatttccttcttttttaaggctgaatagtatatgctccacattttctttatccattcatctgttgatggacatttagattgtttccataacttggctaatttgaatagtgctgcaatgaatatggaagtgcagacgtctgttcaacaaactgatttcagatcttttgggtctacactcagaaataaaattgctggatcatataaatctatttttagctcttttaccacgctccataaagttttccataatggctgtactaatttacattttcaccaatgatgtacaagagttccctttcctccacatggaataaatttttatcttggactttataacagtktttttttttaagtgcaaaaaatatctccattaaaatatgtgagatgtttatttaaaatgcagattcaccagagcttgaatatcagacattttaatagatgaataaaaacatgtatcagacactttaatcaataggtattaaaatttaactggtttcaggaaataatta

SEQ ID NO: 45403 - DNA, 525 bp, Homo sapiens
ctatcaggagaatagaatgggaaaactgcccyatgatttgattacctcctaccgattccctcccaccacaagtggggattataggaactataattgaaggtgagatttgggtggggacacagccaaaccatattaattgtattgcaaaatactaataagaaaataggagaaatttgtgtcttattctgtatctatgttacacaaatcataaacctaaaattgagctaaaatatccttttgtcttaaagctacgaaaatccaaaagtataaaaactcttccactgttgacaatttagaagaggttacagtcgtacaggccagagaataagtatggtgggccaagcaaagagaccattgctagtccctccctatctctacctctgaggctggaaccaaacttaagcaacgggagctctcccaaaggagttaagcatgccaaggccagaaatgagcaagggcagtatgacaaaggactttagaggtggttgggtctccttggctttcatttcaagggtactgtcacct

SEQ ID NO: 45404 - DNA, 611 bp, Homo sapiens
gggagaactttttatattattatataagtttgcactttgtcacttctattctttattgtcttccattagtctcaactcttattgcatttttacttgtacatttgaatttcctttgaattttgttcatttgctaacatattttaaatggtatttggcctgtagtctttatataccttccaactttttctaatcttgttttataaaaccgtgtcttcttacttgctagagggaattacaaatatatttctatttagttgtgagtatacaatttttagtggtgtttgattgctcttagtctacaaggtgatgaaaagaattgtgacttattttctytcacctatgtaaccttatgttgattttctttttcttgtgctcattctgtattgagggtgcatcagtctaggtttagtgtttcccagaaaaaaaaaagtgcgtatatagcacttggctcttcttgggtactgttagcatacctggagacctaattcaagtaccttcccagaattcttacactgtagaaatttttagcctcatataagtaaaattcttgccctttaaaaatgatcataacacagggtgagaaaatatctttataagaacaatagaatgca

SEQ ID NO: 45405 - DNA, 1819 bp, Homo sapiens
cctagagggcttgtgaaaacacagacgctgggccccacccccagtttcagcctctgttgatggtctggggtagggtccagggagaattctctttctcaagggagggtcagtcattttgttctgttctgcccttcgactgattggatgaggcccacccacattaggaagggtgatttgctttccttagcctacagatctaagtgttaatctcatgcaaaaaacaccctcacagaaacacccagaatgacgtttggccatatatctaggcaccccgtggcccagtcaagttgacacataaaattaatcatcatgtatatgtccctgtttaaaatgcacacaaaggtttccagtgtctgataggactttatggagggagagtaagggatgtgcaaacagaggggctctcgtttccctagcccccacgaggccaggcctcaccagatgtgtgagccaaggtgaaccacaagcccctgcagtcagtccaggaagacctgcaggtgccaacttctccccttgggcaggtcctgggccagattctccatctacacccaacccccagccagggcagccccggggtccccactgggcaggcatttggacttgctgctctcagcgcttccccagacccatcttgaacccattagccaccaaactcacaggggctggaggagattccattttccatggagagagagggagagaaaggcctcactaaaggaataatctctcctttgttccctcgagctctcggctcctccagtgaaacccctccctgatgcccctatctgatttcagaaaaggaaaatggagccaggagaaaaaagagacaaagggaccatgtgggtttaagggagcgggggctgtgttgagagaaaggaacaggtgaggaagggaatggggtgagagaggagagaggtgagaggctcctgtggggagaggccctgctggccctagagaggacaggcctcactcctctctgagcactgagccttccacttcttcacaatgaaaaaaagagcacaggacgaggagtcctggctgtgaaactgatcagtgtctctctgcaggctcatcatacttacattctgagcctcagacacaaactgctctgccagccccaaagctgtcctggagatcaaaatcaagtgcaattaaattgcattgaaagtgattcattcaaatgaaaaggataaccaatgataattggatttcccgggatgtgaggttgaggccttgcagagggaggctgtgaggcccatcagggaggggattgaacccacattcttcccttcctgggcagtccatgccagcctctggtctcaggatctcctgcagaggcaagctcatccttggaggttccttcttccttcccctagcatccagtgagctcaattcatggccttggctcatttcatctgctggggagctaagctgctcctgcctgcctcaacagacacagcctgtaaaagcctgactgggcctagagccccagcccttgcctctaggctttctgccctccatggcttgggggaagcaccaccctmggagtcaggacaccgtgtactagtccagctctgccactgcctgtctgaggcctcagacacagcacttctctccctggccttggatcccacatttgaggctggcccaaggaacctgcatgtttcctcccagctctgatgtctcgaggcctgttcccaggtaaccagaaacatctggaatgcagggttccctgtctaagcagctgttatatgtgggatgcacacaggacaaaagggtttctgttgccacaaggctaggccaggggaaagttttatgc

SEQ ID NO: 45406 - DNA, 1819 bp, Homo sapiens
cctagagggcttgtgaaaacacagacgctgggccccacccccagtttcagcctctgttgatggtctggggtagggtccagggagaattctctttctcaagggagggtcagtcattttgttctgttctgcccttcgactgattggatgaggcccacccacattaggaagggtgatttgctttccttagcctacagatctaagtgttaatctcatgcaaaaaacaccctcacagaaacacccagaatgacgtttggccatatatctaggcaccccgtggcccagtcaagttgacacataaaattaatcatcatgtatatgtccctgtttaaaatgcacacaaaggtttccagtgtctgataggactttatggagggagagtaagggatgtgcaaacagaggggctctcgtttccctagcccccacgaggccaggcctcaccagatgtgtgagccaaggtgaaccacaagcccctgcagtcagtccaggaagacctgcaggtgccaacttctccccttgggcaggtcctgggccagattctccatctacacccaacccccagccagggcagccccggggtccccactgggcaggcatttggacttgctgctctcagcgcttccccagacccatcttgaacccattagccaccaaactcacaggggctggaggagattccattttccatggagagagagggagagaaaggcctcactaaaggaataatctctcctttgttccctcgagctctcggctcctccagtgaaacccctccctgatgcccctatctgatttcagaaaaggaaaatggagccaggagaaaaaagagacaaagggaccatgtgggtttaagggagcgggggctgtgttgagagaaaggaacaggtgaggaagggaatggggtgagagaggagagaggtgagaggctcctgtggggagaggccctgctggccctagagaggacaggcctcactcctctctgagcactgagccttccacttcttcacaatgaaaaaaagagcacaggacgaggagtcctggctgtgaaactgatcagtgtctctctgcaggctcatcatacttacattctgagcctcagacacaaactgctctgccagccccaaagctgtcctggagatcaaaatcaagtgcaattaaattgcattgaaagtgattcattcaaatgaaaaggataaccaatgataattggatttcccgggatgtgaggttgaggccttgcagagggaggctgtgaggcccatcagggaggggattgaacccacattcttcccttcctgggcagtccatgccagcctctggtctcaggatctcctgcagaggcaagctcatccttggaggttccttcttccttcccctagcatccagtgagctcaattcatggccttggctcatttcatctgctggggagctaagctgctcctgcctgcctcaacagacacagcctgtaaaagcctgactgggcctagagccccagcccttgcctctaggctttctgccctccatggcttgggggaagcaccaccctaggagtcaggacaccgtgtactagtccagctctgccactgcctgtctgaggcctcagacacagcacttytctccctggccttggatcccacatttgaggctggcccaaggaacctgcatgtttcctcccagctctgatgtctcgaggcctgttcccaggtaaccagaaacatctggaatgcagggttccctgtctaagcagctgttatatgtgggatgcacacaggacaaaagggtttctgttgccacaaggctaggccaggggaaagttttatgc

SEQ ID NO: 45407 - DNA, 548 bp, Homo sapiens
tgaacattcaaatgaatatctctgactaatctcaagtgcatttgaataaaaaatagaacaattttgatgttccaagttgaattaytaagtaaaaatattcagttatcagatagttaattaagtggaactgactgtattcattaaaatatttgttccaaacaaatgtatttaacattcagatattatgcagaataggtgacaattgcatatctccatggagatcaataatgggattcagatcattgtgtaaagagtctgcaagtttaatgcagagagaatgtcattattatttctctcttaatgatggtcattatgcgcaaacactgattgaattccatttgttacctgcatttgagctgagaggaataattacaatttaagtgtctccattaaaattcataaaagaatatgaatgcaaaaattatacttgaaactgacaaaatgtactttgaggatataaattgtgttttctgataggcctcttaaaagtattaaaaatagcttcattttaataagatgacatataaagatcatgtgttatcctcacc

SEQ ID NO: 45408 - DNA, 579 bp, Homo sapiens
tttgaagacccaaacaccactccaatgaaaattatcagaactggcagttgccttccaaatctcaaatcttcattgttctcttcccctctaactagtttatatatccctttagtgactccaaactaactctctgcctgactaagccacttctggtcatggcaccaccacccttcatgttatcctgttttgtacccttaaatcacatttgattctcttctcactccctcttcagcctagcaaagtagaacacacctgagatctggagttaggaagacctgagttcaaacctagtctccatttactagccaggtgaacctgggtatggtcattaacattgcagctccaaatccatcaattattcagtggtgacaacatttcccagctatgggaattaaataaaagcatgtgtctaaaatatctgatatgtagcaggtgtttcccttaaacttctccataaaattaattgttctacgtcaatgacactgcctacatctttcaaatctacattaaatattcrttttaaatttttctcagtggagatatttcacctcactgagccttaaagaatattgtttgcac

SEQ ID NO: 45409 - DNA, 1157 bp, Homo sapiens
tttcctactgtataaatccattgtaaaggaaatatatgatatattaggaggtactgacccatgaaaacaaggccctgacttattttggactataaaatctagagtgtctcaaagatgaggggaggtaatagaggctaccagcctactctgctcaaaatgacatataactttcctaatcaacaacaaaggggatcacaaatccaaaaactctgaggtgacttctaatcaaaagggacctgtgcaactctcttcttatacttttgcattttgcaaccctagttaaaatgtagaaacacccctagattgctagactcctaaatgacaagacaggatgaaaactgggaattctcttaagaatataaaatatttgatttcaagaacagtctataccaacagcttaatagattcacactttctttttttgtaagtaattattttaaaatataaatgataaatacatacaggattaacaatgaacaaatttttttgtagagatttttgacatccagtgattttcttrgagcggacattcttcctccatacactaaaagccttccatttccggaacagtgaaaatatgggaatcttagtgagttctctgtgatacagatattcctgttcccatcgatcaatttcgataaattcaatgtcttcattataaatgtgtgttactgccctttggctaatagtatagtagtcatttttattgatgttctcataacttacaactctataaacaaataaaaattgggactaataaataaagtattcaatacaaaatgaagcaattgcattgcttttttattctacagagataaaacatttctggaaagcaaatattatttaaagttaaaaaattctaaccaactactttcacattaaatacattactcaagaaaatgagttaaacaagttgtgcttattaaaaagatttcacaactgtggcaatattggcttgatgatttcagttacatgatttttacattaaaatgaattgactataaattaataaaatttaatagttctacattaaaactatctggagctattattaactcttcagaaactattcaatattaatagcataaaagaatttggcactattaagtaatgacagaattatgagaaagataaaaggaaacattaattaggtgaga

SEQ ID NO: 45410 - DNA, 537 bp, Homo sapiens
ttcactcttattatttaacataaatattggctatttatagccaggtcgtcaaggcagtcattgcttcccccatcttattatttctctcactctgacttgggaagtggggacttgaacctggaagagggagagaggtccagtgggggtggcccccgcttcttggaacctggtctccttagggacagaaattttcctaccccatttayactctggttatcttgctgagaagcttattgcgtcttctccatcttggtattcttatacgtgcatgttttctctcccagtacgtttgaatttgaaagaaccgtgaaggctctgagattttacccttcttgcaagctagcaatcattttcactggtgctggcagaagataggagattcctgggtcagagacaaaggacagttttttactgacagcagtaagagtagccaaggtagctgcacttttgtgctggttccctgagccccagatcccccagggcaatgtgaagagggtcaggtgatgcctgcatgtgcatcgaccgcaggagaggaag

SEQ ID NO: 45411 - DNA, 1715 bp, Homo sapiens
tgcccatggcttgtcgctggatggaggaggggctcatggggatagaagggaagtcatggagccccatgctcatgcccagagcgccatcttcaaagcaatatttaattaaatattaacttattctgcctgggtcaaaaactgctatgcccatatgcaatgtaggatgtgttttcaagaaccacagctacatatttgggaatggaaacgtacaaatgctttaaaaaaatctaattctgtgatactaactcctcaaactctgagtcaattggggatctcctaaaagacgattttgagataaccattgatatcctcagttcagctcatagaaaacgatctcaaaatgaagacccataattraggcttcaatagccttcctagcctataaattcacagaaaaaatatgaaggaaaaaaatgtgtcctgaatgaaatcagactttcagtaattacaaacttctcatgctgatgaagccctgaacacttaaacatgtagaaactgatttgaaagggataaaagaaattctgacttacaatcagtagaaatgggatggtttgcaggaatatctcacattaaaaccttattaatactacagtcagtggcaaagatcgcattctactgttaacaaagaacccaatcaaaatctataggtctactttggccatgaagttctgtttcttcttccatttaacctatacccaaattaaaacttgatcatctctctctcagaatagaaacagaaaaaaaatgtcgggacaagttgaaaaacaaatgttccagaaaatccgccaactaaagatctcattgcgaatgctgtgcaacagctttttagaacagaacaatcctgcttgaggaatctgaagggggccacgggactggcccaaatgctcttcacccccagctggctcccacgccacttctctgctttctcagctcagcatgagtgttccccctgtaaagtcagggcggttttgttctaggagatcatggagtcaagcagttctcaaaggcacctcccacgctctaaacacatcccaagggtgagttattgggagaccagagaggatgagatcaggacaagggaactgaaccagaaaaggctgaagaaaactaggacatattgagagagcaagtgtgctttgggggatggagatggccacactgctgctgctgcaagccctgcataggagggacaggagaaacagcagttgcaggaggtggcctggtcaaacatccccaacttaagccctccctgtgctgacactgccacccaacagccatgcagcccccacccccccaggcaggcccacgtgggactgcagctccttctgcctgccaggcgggtgacaggaagactgctgagaggatgatgccacagttggggccagtaaatgttctgccaactgaaacaaacaggagatctaacaggcactatcagtgggagttttcaggaagccaagtccaaccaggctctacgatggcagagcaattaagctgagtgggctcttcccagggcagagaagcctgcctgtctccagccaccatcctatccccaagctaacacaggaaacctgaaatagctgtaatttggcttgaaagattaaagatgcacacaaaatcattaagagaaaaagataattgtttctagagtgaatactgtattgaacagctcttagaagacacgtataatggaacatgcaagagaatttactattatt

SEQ ID NO: 45412 - DNA, 544 bp, Homo sapiens
gaagatatgggagctgtggccttgaaaatttatgcttatggaaaaactgggaaagtataggtgaaggacaaaaagaatgttataatttatgtagccaatatttgacaacttctcataacaaaaatttaactgtgaaaggagatgaagaacatagaatatttctgaagaagcctcagtttctgccasctactcctacagaaccgtgtattcctgtgagtaaatatcaacatcaatttttggaatctgtcttttgtaataaaaatcagataaattttagccatgactcaaatattagtaaacatcagaatactcattttgtagaaaactattacaaatgtaatgaatgtgagaaagtgttttatcaatcctcaaagtatccatattcaagaaaagccttacaaccctaatgaatgtggtgaaacttctgacccatcctcaaaacttactcaacatcgaagaacttatattggagagagctcacaaagatgtaataaaaaatgtataatagtctttagtcagtcacatctgaagagacataagataa

SEQ ID NO: 45413 - DNA, 544 bp, Homo sapiens
gaagatatgggagctgtggccttgaaaatttatgcttatggaaaaactgggaaagtataggtgaaggacaaaaagaatgttataatttatgtagccaatatttgacaacttctcataacaaaaatttaactgtgaaaggagatgaagaacatagaatatttctgaagaagcctcagtttctgccagctactcctacagaaccrtgtattcctgtgagtaaatatcaacatcaatttttggaatctgtcttttgtaataaaaatcagataaattttagccatgactcaaatattagtaaacatcagaatactcattttgtagaaaactattacaaatgtaatgaatgtgagaaagtgttttatcaatcctcaaagtatccatattcaagaaaagccttacaaccctaatgaatgtggtgaaacttctgacccatcctcaaaacttactcaacatcgaagaacttatattggagagagctcacaaagatgtaataaaaaatgtataatagtctttagtcagtcacatctgaagagacataagataa

SEQ ID NO: 45414 - DNA, 544 bp, Homo sapiens
gaagatatgggagctgtggccttgaaaatttatgcttatggaaaaactgggaaagtataggtgaaggacaaaaagaatgttataatttatgtagccaatatttgacaacttctcataacaaaaatttaactgtgaaaggagatgaagaacatagaatatttctgaagaagcctcagtttctgccagctactcctacagaaccgtgtattcctgtgagtaaatatcaacatcaatttttggaatctgtcttttgtaataaaaatcagataaattttagccatgactcaaatattagtaaacatcagaatactcattttstagaaaactattacaaatgtaatgaatgtgagaaagtgttttatcaatcctcaaagtatccatattcaagaaaagccttacaaccctaatgaatgtggtgaaacttctgacccatcctcaaaacttactcaacatcgaagaacttatattggagagagctcacaaagatgtaataaaaaatgtataatagtctttagtcagtcacatctgaagagacataagataa

SEQ ID NO: 45415 - DNA, 544 bp, Homo sapiens
gaagatatgggagctgtggccttgaaaatttatgcttatggaaaaactgggaaagtataggtgaaggacaaaaagaatgttataatttatgtagccaatatttgacaacttctcataacaaaaatttaactgtgaaaggagatgaagaacatagaatatttctgaagaagcctcagtttctgccagctactcctacagaaccgtgtattcctgtgagtaaatatcaacatcaatttttggaatctgtcttttgtaataaaaatcagataaattttagccatgactcaaatattagtaaacatcagaatactcattttgtagaaaactattacaaatgtaatgaatgtgagaaagtgttttatcaatcctcaaagtatccatattcaagaaaagccttacaaccctaatgaatgtggtgaaacttctracccatcctcaaaacttactcaacatcgaagaacttatattggagagagctcacaaagatgtaataaaaaatgtataatagtctttagtcagtcacatctgaagagacataagataa

SEQ ID NO: 45416 - DNA, 611 bp, Homo sapiens
tactagattccttgttcaatgaagaattcccttttgatttttcctaaacatacattaatatcacatcaatttaagaataatattttggattcacatgttttatagttaatactttactataaaagagggctgagttagagcattttttttcaataactccaatttaattttttttgtaatttagtaacttttaaggctatagcatttcttaagaaatttatgtttttatcagttaatgatacatgcctaataattattttccaacatttaaaagaaaatgttttattatatttaaagacacaagtgcaacacaattgagttcagcacttgtcactaaaccttaattttcacatgcaaacacaaatatatatgcccaaatatgttcatttatacctgaacctacgtatttctgtatgaattcacacacatcttcacaacacacatcacatatattcagatttatttctatgagaacacattcagagtcactctatgaataaaaagcaataaaggaaattaacttctatagaatatgggatcttctaaaaacagtgtactrcacacacagatgtatgcttgtgcacactggtgatctgtgttcacagtggtaa

SEQ ID NO: 45417 - DNA, 553 bp, Homo sapiens
acagaacgagactgtctcaaaccaaacaaacaaacaaacaaacaaacaaataaataaataaaataaaaaagctatgagttgatgaatctatctcaaatctattcttcatccagagtcctcattccaagtgaactacgcacccagcatcatgagctgcctaaactgttgaccagagcatcagctcacgcagccccagggagatccctgatgttcaggcactgttgggggaggaagacaaggtacaaagaaaccaacaggagtcaatgtcaagratttcacaggggataggaaattttgatttggttcatgcagcttggattccttcagaaagccttgaactgccaccattagaaaaggaggcacacacatacacacacatgcacacacccacacgccctgcctgggagaactgacattaccaaattccagaaaaccgaaaacaatcttatcctaacagggagagagacatcatggagaacatggcatttagtaaggagaaaaggaaatatagctaatgagtttgaatggaagaagaacctaaaaataagtaggc

SEQ ID NO: 45418 - DNA, 584 bp, Homo sapiens
cctatattctaggagaggcctatcatattcccctaaggagcttgtagtcttgtgaatgaaacagatatgcaaacaaatatttccagtacaatgtgataaattgtctctcagatttctaaattgggtaagtatgtgtatgatgatgccctaaccaagatatggaacgctgaagaaggaacaggttgaaggaggagagatggagggagatgttaaattggatttcacacgctcacaggacattcaggctgaagtttctagtaggcagttctaaatgcrgcttataagatagatgaggaactccttgccagaaaatattatttcatcatgttcctattagagggcgaggcatggtacaaatatattttgataggagaggtgaataaacaaaagattgagagtggaggctaccctggtaggacatcaggttggggaaaagtaagcttttcaagagcagctttcctaattctcaattttatttagagtgtgctctgattataacaatatgtggatggtgtggagactttctgagagattaaccagtgaataagtctttaagagaagaatgcttgctcatcgactgggta

SEQ ID NO: 45419 - DNA, 507 bp, Homo sapiens
actgatgagatgaagactgcaaagacttttaacagttctggaagatttttaatcaatggtcaatctcactgtgcttttcccattcctcattcatctttctatcgtagtttctgctgagtatatgtgagctttgtgttagactgggagcctcttagagaaagacatcatttcttaattacttttgaattcccccattcccgcaatayagtagaagctcaagaaatacatgttaagtgagcaaataaacgcatcactttgttttgttattcttatcccgtttcccaggagtgattcataatatatcattaggttacaataaaagaagcttgtgtgaatctagcagggccagcaagaacttgagagcaaataaacagactgcattttaccccacaaacaggctaaagggagactagaaagtcaagaggatggagtcagttttggcagctgccaatgaaaagcagcaaagtccctgggattttaggccaagaaagaagccctgaggcttca

SEQ ID NO: 45420 - DNA, 438 bp, Homo sapiens
ttcataatgaagaaatactttgcactgtaaagtatctaatagaatatctagaatttagagggagaagagacaaatacttgtgcctttgaatgaatwatatatttaaaattactcaataaacttaaaagtagaacctgaccttcctgttctcatttgagtgtttttaacaatgcaaatgttcatcatacgactttcttttttcaaacaggatatcattatttcctggagggttttttagatgcactactatgtggaaatagctctgatgcagggtaagtcaataatttgtgtgtatctgtgtatatttgtatgtacacatacatatgtgtatcttttctctctttttatagaaactgaagataacagccaactaattttattgacattaatttgctatatgtaaggtttttgataaagtatgagattatgtaaatatta

SEQ ID NO: 45421 - DNA, 438 bp, Homo sapiens
ttcataatgaagaaatactttgcactgtaaagtatctaatagaatatctagaatttagagggagaagagacaaatacttgtgcctttgaatgaataatatatttaaaattactcaataaacttaaaagtagaacctgaccttcctgttctcatttgagtgtttttaacaatgcaaatgttcatcataygactttcttttttcaaacaggatatcattatttcctggagggttttttagatgcactactatgtggaaatagctctgatgcagggtaagtcaataatttgtgtgtatctgtgtatatttgtatgtacacatacatatgtgtatcttttctctctttttatagaaactgaagataacagccaactaattttattgacattaatttgctatatgtaaggtttttgataaagtatgagattatgtaaatatta

SEQ ID NO: 45422 - DNA, 438 bp, Homo sapiens
ttcataatgaagaaatactttgcactgtaaagtatctaatagaatatctagaatttagagggagaagagacaaatacttgtgcctttgaatgaataatatatttaaaattactcaataaacttaaaagtagaacctgaccttcctgttctcatttgagtgtttttaacaatgcaaatgttcatcatacgactttcttttttcaaacaggatatcattatttcctggagggttttttagatgcactactatgtggaaatagctctgatgcagggtaagtcaataatttgtgtgyatctgtgtatatttgtatgtacacatacatatgtgtatcttttctctctttttatagaaactgaagataacagccaactaattttattgacattaatttgctatatgtaaggtttttgataaagtatgagattatgtaaatatta

SEQ ID NO: 45423 - DNA, 630 bp, Homo sapiens
ggtccaggcaggcagatcatttgaggtcagtagttcgagagcagcctggccaacatggtgaaactccatctctactaaaaatgcaaaaattagctgggtgtggtggcgcgtgcctgtaatcccagctacttgggaagctgaggcgggagaatcgctcgaacccgagaggtggaggttgcagtgagccaagatcgcgccactgcactccagcctgagcgacagagtgagactctgtctgaaaagcaaaaaaaagggaaaacaaaggtgcttcagctggaaggactcagaaatgtaacagaggtctacagtccrgtaagtaaaacaaagatgagatcagaaagacaaagtacctggaagggaaaccaccttggaccaggatggaagtgtgcagaagtggtatggtgaagtgcgatggaacaaacaagaactacacttagcagtctttccattggctatttcaatttacacataagagtagggttggtgttccatattaacaccaatatagacagaatccattcttatggtcggtgcacatgccaaaccattgttaattattttgaatattatccttgcatcagagtcaattatgtgataagcacagaattatatacctggtgcagggggaag

SEQ ID NO: 45424 - DNA, 523 bp, Homo sapiens
tcagtacttgggacaaatcatttaggaaagaaagagaagaagggaagttacatttgtaaatgtctggaggtactagagactatgctaaggactttacatatgttctaaaaaactctaaatgctctaagaaactctataaaatgttactgttcaacatattacaatgttgaaactgagggtggacaattacaatgttgaaactaaggkttaagttttgaagagaaggtgaaggttaaagaaagacagagagagagttggcggctctacagcaacacaggtctattgcaagcgcaacctgcagaggtggggaccaggtaaatgtcagagcccactgaggcctacagactgggataattataggtctgggtgggagtagtctgggcggtttggcttgctgcccggaggatattgattagatgttcttatgatcaggcagtttggccctgtttccagcggactgtgataggatgttcctgggatgtttgcccagcaggatatgataaggaagtcaggtggctgggca

SEQ ID NO: 45425 - DNA, 630 bp, Homo sapiens
gcatatacaatacctgcacatattttatatgcctgttttagatatattattgaaactcacatgttctaatagataaggcgctggtgatttttctgtatcactttaaatcattccctaattcaaatcaagcttgagtggttgctgctaaagattcaggcatgcctctttttttgattttgagtacattgtgtttgcatgaatttctgtcttgcagagccattaacaagttcttaaattattctagtctgactgccagcaaagcttcccacaactttttgcttttgacaaggttatttgcagaagaggagtgccccttttcttkgaagagctgtcatgtccattcatcataggaccgttttgtgtaagcttccaatttgtgctttctggtaaccgtctaaacagcatttctgatatctgagatctacttcaaaaacctacttagtgccagcatgatggatggtgtactttacaacttctttgtaattcatcgtgcactagaaaggtgacatagtttaccccatcataatgacaggtgggtcagtaaaagggtcctaaggagagttgtcctgtcagatgcaaaatacatattaaaatggatacataaataatttagcatgtgtaaggttagct

SEQ ID NO: 45426 - DNA, 571 bp, Homo sapiens
ttttctaaatttgcatgatagctaacacatgcctcaactcaatagataagcagtgactattaaggtaattcacaagtgctatacatacttttcaccactaggaggaagttgaaaaaaaggcttggaaaggtagggatgatgtgtgtctgcgagtgcagagaatccaacatctgacacagttcttcctaatacatawcatttcagataaaacacagtataattgacagaaaaaatcacttcttcttggtctcttctgcttcccctttgaactcttggatctagttattatgatagatgactcctatcaagtttcatcttttgctccttcacgttaaagtgatagccaggctatagcaacagtgaaaattacaacttgaattacttacaaggtatcagaagggaaaaaaaaattcttcaaagcagctgaaaactcttcttcaaagtttattagcactaaggcaaggacattttactgattacctgttcatccaaatattccacttgtttagaaaggcaataataaaaccattcttgaacttgagaaatatttccaaggagaaacatcataact

SEQ ID NO: 45427 - DNA, 571 bp, Homo sapiens
ttttctaaatttgcatgatagctaacacatgcctcaactcaatagataagcagtgactattaaggtaattcacaagtgctatacatacttttcaccactaggaggaagttgaaaaaaaggcttggaaaggtagggatgatgtgtgtctgcgagtgcagagaatccaacatctgacacagttcttcctaatacatatcatttcagataaaacacagtataattgacagaaaaaatcacttcttcttggtctcttctgcttcccctttgaactcttggatctagttattmtgatagatgactcctatcaagtttcatcttttgctccttcacgttaaagtgatagccaggctatagcaacagtgaaaattacaacttgaattacttacaaggtatcagaagggaaaaaaaaattcttcaaagcagctgaaaactcttcttcaaagtttattagcactaaggcaaggacattttactgattacctgttcatccaaatattccacttgtttagaaaggcaataataaaaccattcttgaacttgagaaatatttccaaggagaaacatcataact

SEQ ID NO: 45428 - DNA, 571 bp, Homo sapiens
ttttctaaatttgcatgatagctaacacatgcctcaactcaatagataagcagtgactattaaggtaattcacaagtgctatacatacttttcaccactaggaggaagttgaaaaaaaggcttggaaaggtagggatgatgtgtgtctgcgagtgcagagaatccaacatctgacacagttcttcctaatacatatcatttcagataaaacacagtataattgacagaaaaaatcacttcttcttggtctcttctgcttcccctttgaactcttggatctagttattatgatagatgactcctatcaagtttcatyttttgctccttcacgttaaagtgatagccaggctatagcaacagtgaaaattacaacttgaattacttacaaggtatcagaagggaaaaaaaaattcttcaaagcagctgaaaactcttcttcaaagtttattagcactaaggcaaggacattttactgattacctgttcatccaaatattccacttgtttagaaaggcaataataaaaccattcttgaacttgagaaatatttccaaggagaaacatcataact

SEQ ID NO: 45429 - DNA, 571 bp, Homo sapiens
ttttctaaatttgcatgatagctaacacatgcctcaactcaatagataagcagtgactattaaggtaattcacaagtgctatacatacttttcaccactaggaggaagttgaaaaaaaggcttggaaaggtagggatgatgtgtgtctgcgagtgcagagaatccaacatctgacacagttcttcctaatacatatcatttcagataaaacacagtataattgacagaaaaaatcacttcttcttggtctcttctgcttcccctttgaactcttggatctagttattatgatagatgactcctatcaagtttcatcttttgctccttcacgttaaagtgatagccaggctatagcaacagtgaaaattacaacttgaattacttmcaaggtatcagaagggaaaaaaaaattcttcaaagcagctgaaaactcttcttcaaagtttattagcactaaggcaaggacattttactgattacctgttcatccaaatattccacttgtttagaaaggcaataataaaaccattcttgaacttgagaaatatttccaaggagaaacatcataact

SEQ ID NO: 45430 - DNA, 547 bp, Homo sapiens
gtgacaaagtaatcttttgaaaaagagagagttgaaaaaagaatcttcaaaaggggacagtgatcatgaaggcgctggaaggagaaggagactctatgtcagtcaggaaatctgcaggtatgtttgatgtaactcaccatggcaagacaagagaaatcaagctcacagatgaccagaaatcatgtagaaagcacacacatgggcacaattgcactgcagatctgtaaaacaaatagtgtggcttttagacataacttagttgatttcatagatctttatgaaaattatttagtattcctgcctatgaggtcaacatgattgagttctcaatcatgcagatgaaaaaactgagatgcgtaacaatagaggcactggttccagaggctcccaggggatgcagggggaaaaagggaggccccrgcctcagacagtgcagtggtcctggctgcctccccttgacccaaggaaatggaatggctgcttctggctttgtctgccctgcagaggcctaaacctacttctgattttacaaagtctgagctcccaa

SEQ ID NO: 45431 - DNA, 547 bp, Homo sapiens
gtgacaaagtaatcttttgaaaaagagagagttgaaaaaagaatcttcaaaaggggacagtgatcatgaaggcgctggaaggagaaggagactctatgtcagtcaggaaatctgcaggtatgtttgatgtaactcaccatggcaagacaagagaaatcaagctcacagatgaccagaaatcatgtagaaagcacacacatgggcacaattgcactgcagatctgtaaaacaaatagtgtggcttttagacataacttagttgatttcatagatctttatgaaaattatttagtattcctgcctatgaggtcaacatgattgagttctcaatcatgcagatgaaaaaactgagatgcgtaacaatagaggcactggttccagaggctcccaggggatgcagggggaaaaagggaggccccagcctcagacagtgcagtggkcctggctgcctccccttgacccaaggaaatggaatggctgcttctggctttgtctgccctgcagaggcctaaacctacttctgattttacaaagtctgagctcccaa

SEQ ID NO: 45432 - DNA, 465 bp, Homo sapiens
cattttcctccttacaaggcaggaccttgtacaattcacgtatccactctgaacaacatgctcacttgctctcttgtcttattgtctttccactatactcttctaacagaatatgggcatggattaatccagttatcaatctctttggctccctcaggagagttggaggcaatgttgggttgattkcaggctgggactcaagtatgtctgaatcttcctttactgttgatcccttccccaacccctgcacagaaacagccacagcagaatgggagtcaaaaatatcttttgttagtaagcaaatacttggtgacttccactaaagggctccttgttaaaagcttaaagaagaagatttgaacatggaagctaagaggggaagttaatgttggggttaccgtctcctcagggatgccgaagcagtggcctccaccaggcttcttggtcaacactctaacttactaa

SEQ ID NO: 45433 - DNA, 465 bp, Homo sapiens
cattttcctccttacaaggcaggaccttgtacaattcacgtatccactctgaacaacatgctcacttgctctcttgtcttattgtctttccactatactcttctaacagaatatgggcatggattaatccagttatcaatctctttggctccctcaggagagttggaggcaatgttgggttgattgcaggctgggactcaagtatgtctgaatcttcctttactgttgatcccttccccaacycctgcacagaaacagccacagcagaatgggagtcaaaaatatcttttgttagtaagcaaatacttggtgacttccactaaagggctccttgttaaaagcttaaagaagaagatttgaacatggaagctaagaggggaagttaatgttggggttaccgtctcctcagggatgccgaagcagtggcctccaccaggcttcttggtcaacactctaacttactaa

SEQ ID NO: 45434 - DNA, 614 bp, Homo sapiens
gtggagattgttgctatgttaattactgtgctacccatgtatggaaagcatgaatattgttctctatttctgcttttactcttcaagtttctcagatataatgacttcctctttatttgcaagtgtgaattcaagagttacttaatgagataggtcaaaaaacacatttaatatttcatatgggattttctcttatcatgttcaatgctgataatagctggacttktatttcatgtatgaatgtatttattccttaaaaccttgtgtagtacataaccattattattctcatattatgagtgactaaactacagaacacagagtgtcaagtaactgcagacacaggctgtgtacataaccagtatattgaagaacccatatttaaacccatttatctaataccaaagctgggttcattcaagacatccaagaagcagacaccaagacagaataaaaaacataagtattttatttcagaaattgtctatggtaaaatgagaaagaagtcagaaaagaattggagagatgtcaaactactatataagtcattacagaatttttaaaaaggaaaggaaagggtggatgcaagtgatctggacagcaaggcaatctaa

SEQ ID NO: 45435 - DNA, 1856 bp, Homo sapiens
attatagtctcctcgtgaacttacattactaagtacttttaaaatacaaatgcttctctaataatcatattgataatattcctttttttaaattgtataaagacattctgctacatctgaagttattaaaaatgaactctgaatatttttaatacctccagaacactgtccttcttatttaaaattataacccccccaaaataaaataaacttaggacccttatatactgaatgcttattgagcgcttgccactttatttagttcatgtaaccctcacaaaattgaagaagaaattggtgttgtccttgtttaaaagtagaagatatggaagcttgcatagagacattttgtaaatagcagaaattgaatgcaaatacttgtgcttgtaaytttaaaggagctgattatgattattctgtttgattactatttatattcatatatgaccagaaaaaaagccacacacctccaggaattcttaaaggtcccacaaaattgagtaaacacaagtactcaccaaagtgatttaaggctactagaaattttctgtgggcagcctcatcagagttctctgcaggtaacatagacagaggtggtgtttcatttttcattctacatttactacagaaagaggtatttacattattcctttgttagagctgaagatcaggtagggaagaagtgcattacttttctagcaactggcaatttattttatgtaagatataatgagactacatttccaaaatgattaccaagtatattcccaatcaatggaattgaaaggtacatcatcagtaagctttcagagtccatcttttgtatactacgaagattcttgttatatttcatatttaatttccatgtttaactgcttcttccagtaatcactgatgaaatgtcggtttggtgaaagtttctaacttttgctggtttcattaaagttatgctttaacttactttgataattatatatcatgtttatatgacactattgttatagcataactgtactgtacttgatattctatctaatatactctatgatgtgttagaatacattaataggcccctgcctaacaacaggtatgtgctgctaaacacagtgctgtgtccaaatgtaaaactaattcatgactaaggaacattgtaaaaataacaggcatgaaaaataatgggattctctaatttatttaacaagtgtaataatcatactataaaaatgtgagagactattttgttaaaatgaaaacattttctagtgaggccatatttggataaatacactgcacagattaatgtttctgtttctcactttcttcatttgtcttaataaaggatttaagaaagaagttttcaaaggcaacttcttacttaatattttatcaaggatggtatttttgcaaaaatagggtcactcatatctttattacactggaataacaacactggtagataaacataatattaaatggccaataaattgtttaaaacagcatttgctatgctgtgtcttataggagttgtcttttctaactacctttggcccagttattttacgttttagttagaaataaatttctgattttatttctaaaaaatgtgctttctacagacatgaatctacaaaaaacatgaaaaatatgatttgttaaaataaatgtgacattaaaataaaagtgtacgattatataacttatagctatacatcgtataatgtgtggttatctcagaaaagtgaatactttgttctttagttaataagaaaaagaatttagctgttctaccagaaagttcctacaacagaaaagatctgttttgaatgtaataaatgagcctgtagctaagaaatgca

SEQ ID NO: 45436 - DNA, 529 bp, Homo sapiens
actatcacaatgcacaattatagttagcattatatattatatatattacatatagttagcaatattatattattgtcatatattctactgtagtaatttgaaaataattctctataaaaggtacataccaatttttaaaattatgtaaattggctggctgtggtggctcatgcctataatcccagcacttttggagtccgagacaggcagatcacctgaggttaggagttcgagaccagcctactggtgaaatcccatctctactaaaaatacaaaaattagccaggcatgtggtatgtgcctataatcccagctactcaggaggctgaggcaggagaattgcttgaacccaggaggttgaggttgcagtgagttgagaytgcaccactgcactccagactaggcaacagagcaagacgccatctcaaaaaaaaaattttatatatatatatataatgagtgctttatgtttatgaggtggtttaatttactaattgcatttaaatatggaattatttgcatattgtgt

SEQ ID NO: 45437 - DNA, 576 bp, Homo sapiens
tagctattgctatttaaagttctgtgctttgagaaaaaattatttcaaatargcagcatagaattcgttacaatataattggactctcagtagttgttctattgagtaatctgctattgtttacacataatttgaagtataggtcaaatttatccttgacaattaagtacagtttttcaatgttgtgttgtaattgccagtgacttgtagtatacttgttcttgcttaaataaagtagcactttttgttcgatgaatttatttccagtcgttcaaaaattttattttcagtggttaccatgtagcaatccatgagacttaaatagtatcacaaacaatgtaattacattaagcatttcatatgccagtgatatatttgtagacatagaaagacgtggtggtgttagaatttttaaaacataattttagttactttcaaaaattgcaaaatacagcctttttcttttaatttactggtaaaatatcagcccagcctaccatccctttctgcatggactatagcaataacctagtaatagcttcaattgcatctctgccaaattatgaccaaagattc

SEQ ID NO: 45438 - DNA, 576 bp, Homo sapiens
tagctattgctatttaaagttctgtgctttgagaaaaaattatttcaaataggcagcatagaattcgttacaatataattggactctcagtagttgttctattgagtaatctgctattgtttacacataatttgaagtataggtcaaatttatccttgacaattaagtacagtttttcaatgttgtgttgtaattgccagtgacttgtagtatacttgttcttgcttaaataaagtagcactttttgttcgatgaatttatttccagtcrttcaaaaattttattttcagtggttaccatgtagcaatccatgagacttaaatagtatcacaaacaatgtaattacattaagcatttcatatgccagtgatatatttgtagacatagaaagacgtggtggtgttagaatttttaaaacataattttagttactttcaaaaattgcaaaatacagcctttttcttttaatttactggtaaaatatcagcccagcctaccatccctttctgcatggactatagcaataacctagtaatagcttcaattgcatctctgccaaattatgaccaaagattc

SEQ ID NO: 45439 - DNA, 534 bp, Homo sapiens
ggaacagggtttgatcaggaaagggcataaggtaattttctaggtgatggtcatgktgtatacatcagtagggttttgggttacacacatgtatctattcatcaaaactcggcaactaatcacttgagatttgtacatttcatgatgtatcagctttatagcagaaggaaaaactaagccagtgttgagctctgttaatgatatgcacactggagggtttggggtcggggcatgatagctacaatagtctttgagttctataaaatatctgacagattaatagatgggcagatgaacacattaggtggtaatgcaaatatagtataatgttaacagtagcgtctcttaatgggcatatggggggtgttcagtgtaaatctttttcaccttatatttgaaattttttagaagaaattgttggcaaaaataaaagtaaaaatagctaagctcttcttttctgcccacctcatcccatcttcttttctctttccttcctctttaaggtaatttctttcttagaggtgatggtatcat

SEQ ID NO: 45440 - DNA, 534 bp, Homo sapiens
ggaacagggtttgatcaggaaagggcataaggtaattttctaggtgatggtcatgttgyatacatcagtagggttttgggttacacacatgtatctattcatcaaaactcggcaactaatcacttgagatttgtacatttcatgatgtatcagctttatagcagaaggaaaaactaagccagtgttgagctctgttaatgatatgcacactggagggtttggggtcggggcatgatagctacaatagtctttgagttctataaaatatctgacagattaatagatgggcagatgaacacattaggtggtaatgcaaatatagtataatgttaacagtagcgtctcttaatgggcatatggggggtgttcagtgtaaatctttttcaccttatatttgaaattttttagaagaaattgttggcaaaaataaaagtaaaaatagctaagctcttcttttctgcccacctcatcccatcttcttttctctttccttcctctttaaggtaatttctttcttagaggtgatggtatcat

SEQ ID NO: 45441 - DNA, 653 bp, Homo sapiens
gaaagtcacaactcggccaactggttatcttgcttaatgctgtctgttcaacagcagatttgacttgagccctggtttactcattgtgaaatcagcaataccactctggacaagttccccaaccaccctgaacttcaattccctcagccttgaattcgcgagaaccattgttaattgacaggcatcatctgctgacaggttcaccttccatttcgtaggcaagygataaaaagcctgagctccgcggtttgccaagtaaaaagtatttgtgcatattgttactttgaatcctcatgagaactcattgaggatgaaagttgccttcattccatagacgaggactaagcagaacctggactgtggaccagcaatctatcctgggctcctgtggccacacgccccgcttcccccacggtcacctgaagctggacttaccactcgcctcgccatcatgggacaaaaactttctagggggtgccgtgctaccttgaatgattttatagacctttgttctgcaggatgtggtgtataagctgagatgtctgtgttgaaggtggggcagagttatttatatcagacatgtataatcaataacagtttcttttctttttaaatgacagttttattgagatgtaattaacatatcctttgat

SEQ ID NO: 45442 - DNA, 525 bp, Homo sapiens
tgatattaaaattcatagaaataagtgttgatttgatcatccaaccaatcatttattgagtgtccattacaagtcaaattgtgttcttgagaacagctcaggaaatgaatgtttgacactgatgtacataacagaaatgcaaacataccactaaaaacatcagacctcttatgacaatccagattctcatgtaagctctattaagctctttcaaggtgagaattgatcatttcaaaaaaaaaatcattttaacaggtcattcttgagacagaaaagtggaattagaagctcatatattgctgtttcaggagctaaaatcttaagtgctgtatttaatcaattgacagccatataattcttagttttatataccgatattcatcaaaaattaaaaaccttgaaaattaytcctgtctcattctactaatcaatttaaacatttcatttattttgttatgtttcctcattttacttggccttgaatacttctttccagcccagtattaaatttaattgagatctaat

SEQ ID NO: 45443 - DNA, 835 bp, Homo sapiens
tgccaggcattgactggggttgtgatgatgaataaatcagtcaggatgtcatagactgytgaggaaaattgaggccaactttgtctgaatttgataagtgctaggatggcagcaggaacagagtgttgtagcagaaattcttcctgggggcgaaggaagggggctcagagaaagcctccctgagggagtagtgttaggttagaacttgctgagaaaatctatcacgtgtcctcagcacttgccatcctcactaaactcccattctggaaactgcccagaccactggcccaaagatcttttctttttttctggaaacttccttccctgcaagtcctctcctggattgcagattggatgagagggcagtttttgctgaatgaaggctcgttttttatttttattttttccctttgatgtaggtgtctcaggtccatccagtctgcaggaccagctgtggagaagccccatccttaaaattccccagtgccttctccacccaagcaacagtgctctcgggataacactcatatcatgagtgggatgtgctgtctcctagggagtggctggaaaggagaagtgatttatgatcactccaactcctcactgaaacaatgaaaaacaatttttacaagtggacattagtaaagagagtcacctctagtcctattcagtgaaactctactaataaagaccaccgttggtaccttcatgttccaacaattagggtgtttataagtatatacacgattattcatacctgtaatgaaagttcattgttatgccccaacatggccagagagtttgtctagtggtcaggggtataattatactttta

SEQ ID NO: 45444 - DNA, 1634 bp, Homo sapiens
  misc_feature (1)...(1634): n = A,T,C or G
ctgtttttgaatactgtgagtgctgactgtatcaataaagataggctgtgatgggaaacatttgctgttatgtaacaacatgcttgaatgcttaggtcggaagggagatatcacacaagtaagaatggccataatatgaagagaagcaaaacagtggcagagttcgtagagggcagtgattcaagaggtcaggtacgcaggagctcagggattttctttcttttctccttccctccttcctttagtttatctttcattctttctttctttcaacattccaggaccatttagaaggcacttatgctctccctcaaggatcttatggtatagtagcatgattgattttacataattgctttaaataaatgttcaaatcacttggtaggtgatattcaaacataattttatgaaactaaatagacaagagactgaaataattataacattaatggatttatagtaaatactctgaatattttaaaatacattcacccattttgaaagagcacatgcagataaagtgacacacaagatccacatgtaagtgtttgctaagaggggaaaatggcaatagagcatgaggacaggagaggatgaaaatcaatcaaagaagggctttgcccaaatggatgtaagggaaacgtgagctctgccatggtatctgaaaaaaagaaacccaaaaaggtgaggtgggagctgggcatggtggctcatgcctgtaatcccagcactttgggatgctgcggcaggcagatcccatgaggtcaggagttcgagaccagcctggacaacatgaagaaaccttgtctctactaaaaatacaaattagcctggtgtggtggcaagtgtctgtaatcccagctactggggaggctgcagtaggagaattgcttgaacctgggaggcggaggttgaagtgagctgagatcatgccactacactccagcctgggcaacaagagtgaaactccatctcanaaaaaaaacagaaaagagaaaaaagaaaggtaagttagggctgaaaaaagaactttagagtcagtgcaaaagacaaccaccctcctctaaaaggagctgaagatgactccctgtattcccccacccttgcttggagggagacactccctgnnnnnnnnnnnnnnnnnnnnnnnnnnnnnnnnnnnnnnnnnnnnnnnnnnnnnnnnnnnnnnnnnnnnnnnnnnnnnnnnnnnnnnnnnnnnnnnnnnnngcttgtaaccatctcttctgtggcttggccttttcagtgattttggctggtgagaggctcctggctgttcctgcttgggaggcccctgaggccagcctctcaggaggagtgattctttasctgcactcttgggaaaatgtgttagccattcgggggctggagaatatcctaatcctagagtcactcaatattttcattttttgctttattgtaatataatttatatactatgaatctcacccatttaaagtgtacacatcagtggcttttagtatattcacggtcatgttcaacactagtcacaatatatttgaaaaacattttcgtcacttcttaacaaaaccccctactcaaaatcagaggtcctcattcttgctccccactcccaagccccatataaccactca

SEQ ID NO: 45445 - DNA, 1848 bp, Homo sapiens
tccttggctcacagctctttcctcatatcactctgacctcggcttttgcctccccgtttttcttactccaactctccttcctccctctttcacatttaaaagacctttgtgattccactgggcctacctggataatccaggacactctccccatctcaagatcagctaattagcaaccttaatttcatctgcaaccttcattccccactgccatgtaacatgtttatttacaggttctagggattctgacatagacatctttaggggccatcattccgcctacaattgtgggccgatgtcttccttctctcccgacctcagcaggttgggtctgggtggacacttgaaattggtagaacagtccacagttgggatgagtcaaacatgactgagtacttgactgtgaagttaggtagaactcagccttgctcagctatcgcaggccacgtacatgctggttagtgaacagaaggaaacaggaggttgcagatacagggagacaagtagcagcaagagacagaccagagatagagaaagtagttctgatgattttctttttttgagacagagtctctgtcgcgcaggctagagtgcagtggcacgatctcatctcactgcagcctccagctccctggttcaaggaattcttgtggctcagcctcccaagtaattgggattacaggtgcacattatcacacctggctaatttttgtatttttagtagagatgagatttcaccatgttggccaggctggtctcagactcctgacctcaagtgatctacctgcctcggcctcccaaaatgctgggattataggcgttaatcccagcactttgaattggaaaatggattttctaaactgaattagaaaatagtaaaaactgggttcggatttagtttcccactccgctattttctttccagtatatatttcagaccagtaaagaagagaggtaaataaccaattaagaaaagtttccttgctggatactgagatgtttgatggttcctgccactcctactggcacttagtacatttgtggtctattatgcagcttagcaattttgaaaaacatttttattctctttagctcatcccttcttaaaaataaatattaaggttttggggagctgaggatacgaaattcgtaatgtatacaacagctgaccagttcctgtcaataaaatatgacaattaaattcagaagcgaggccctttccttgcttatcttgtttagtgagacaagctcattcctaagcagtcccggccaatatgactttgaaatagtcatccctggaatccatttcgggtttctttttggacccaagagctgagctgaatttggacatcaggccaaggctgaacagcaacagggttcaggccatttctcattaggaaattactgcctctaaaccaggcccaaagtgagcactattgattttttaaatactttttttattaacaattttggggaggtataatttacatatcataacttcacctgttctaattcagttgttactggaaatggggtcttggaactcatgcaagaaataatttggggtgagtccacagagtaaaccgaaagcagatttattgagaaagtaaaggaataaaagaatggctactccataggcagagcagcctcaagggctgctggttatccatttttgtgattatttctcratcatatgctaaacaagtggcagatattcatgagttttctgagaaaggggatttcccagaactgagggttcctcttccttttagaccacatagggtagcttccagacattgccgtggcatttgtaaattgtcatggtgctggcaggaatgtctcttagca

SEQ ID NO: 45446 - DNA, 550 bp, Homo sapiens
ggaatttggctaacaacacatgacttttgggggacgtaaacattcaatccattgcaacttccartatttagttacaaaaaaagcaccaattccctcgtacttgctgtctcctgtgtttctccctccctttccttgtccttctctgtccctcctcctctcgctgcctctgtcacagtcctctaactgaggaagcaagctttcatgtcaggagctacccgacatagaggcccacatggcaaagaactggggaacatccaggccaacagacagaaaggaactcaggcttagtccaaactggttctgccaatacctacatgagtgagcttgggagcagctcttcccacagcccagcctcggttgagaccacagtcccagcttcatgggagaccttcaggcagaggcacccaggtaagccatgcccaggttactgatccacagactgtgagatattaaatatttgtactttcacattgctaatgttgtgagaagaatgggtaactcacctagtctaccaggccccaggatctggccctgccatcatttccctcct

SEQ ID NO: 45447 - DNA, 579 bp, Homo sapiens
ggtaataatttttaaaggttgcaaagagccttatttttgagaatgttgaatgcctagacagaaacccacttggttccaaagaaaaacgtcaacctcatctcccaaattatcctccagcttggataaaacaaagcctctttttagttaacaaaatggactgtcatcactgttccctctctttttcctgggtatgattgtgttcatgtccataatcctcttagtgttgagtgagggataatggctttctctacatctgggtaagagagaaggagccaacgcctttcatgtgcttctgtgccatttattcctacctgttttagggctcaagggtatcttgggatttcctccctgcagagaagtggagtgggaagcacggtggtagaacactcctctgtattgattgggactgactagaatgtctgtcccagtcagccagagtgagattgtagagtgagaatttccaaattaccattggagtgagaagccatggtcagaaccgtggaatcaggtrtgaaggataaggcaaagcagtgaagaggaaagcatttaatgaaaatgaaagctgagctggggagggtg

SEQ ID NO: 45448 - DNA, 552 bp, Homo sapiens
gtaaacacaatcttcttgccttccctgaaaattagaggagggcgggtgcagactgggtctcctctggggaggccctgcactggactgaccgtaacctgactggcccagccctcttggttcacactgggagggaagacccagctggccctggactcttctttggctctgaaaggcagayttattttatctcatggagttaggctagaggccatcttgtcagagggaatgatgtcccttgaagtccatgaggcttctcgagatgatccctagggctggtatgcagcaaacaaccatgactgcatttgtctctgatgcagattcctaacttctgatatgttcaaaactctgcttcctggattgccagttgctctcttaacaaatgcagcgtgattcttttgataatttgaggggaaaaaatgtctctgtgttgtgtttcccgctcctccctgctggtgatccacagtaaggggttgaacaatcaatcctctgacatttttttgcttaagaaatagttagttacaagatgtggccgggcacggtggctcacacctg

SEQ ID NO: 45449 - DNA, 630 bp, Homo sapiens
gcctatttaacacacacacattcacagagaaggtgccatttggcctgggcttgaaggatatgtaagagtttgttcaaaaaaaaaragaaaaaaacaaaaaagaaagagatcttgtgctccttctctctctctctctgtgtgtgtgtgtgtgtgtgtgtgtgtattttactttgatattgctgggattcctctctttcactacagtctggactgaatcatttcacacaagtaaatttttcagatgactgaagcctaaacttttaaaaaattttaaccatttggaatggagatatttctgtaacttactactcactttccctgaactctttgactcttcctacagaaaataactctgtcttgatgactcactggcatcattaggaatcactaagattgtcctgtgctacgatccagcgagaactccaggagccgtagagatctttgtgactgcctgccccacgcagaaaaacctcagagactcctgagctggttttaagagcatttttgtcttcttccttgctgtcagactctaaataattctgtgaataatttacaggcctccattacctcctctgtcaggtcaattctaatttaatatatttgctgtgtctattggctggggggggagtg

SEQ ID NO: 45450 - DNA, 1711 bp, Homo sapiens
atacctaacttcttttccaaatcttagactagaagaagacatcagacccaaatcagaagactcagattctacttcaggttcttactatttgttgtttagcctttatcagatgaaattataacaatgagttcaatttattaatctgtagaacgattagagaggaccttgaagtttctcctcatttataatctccctttgtggcctgacataactttaaaggctctgtctagtcatcttcagagtatcatgtagggatgaacagagatcaaatgtgccagttccaaaagtacagcaggaaaagcataatgagatatacttattgttataagtggtcatttaaaattgatgatgagtgattgcttttatgaggatacaaagacaaccattcctttggtttacagaagcattagtaagtaaaaacagtaatattggacttaaaatttgcttgctttctaaacagagtaacaccaccatttgaaaaatggtayaatgttacccacccatcccccaaacaacataataaaaagatcataaaacctctccaaacaattttctgaagtaactaacacataggttgagctttccatgcaatagctcggttaaagctcaaaataatgcagattacacccattcaccagaaatggaaaaaacataaagagcagtgactggtctcatcaaagcaacaggcagaattaaacagcattcaaagctgttaaccaccaggtttaccttgtgcgaccaccagaagacattttctcttttttgattccaaattcagtcctaagtgaaagcacctacgtttgaaccttttgcccccaaagacacaggaaatatcttattaacagtatgtctgacaataacgctctgaaaagcaaaacagaaaatggaacccttgctttttaactactatgaatacagaattaaataaaaaataatatagaaaggtgaggaggtgagctctggagtcagataaaatttagtttaaatcccaattccatgacttaccaattttgtgacttttggaccagttacctaaactttctaaactttaatttcctgatatgaaaaatacatagtaattcaggcaatacatacaactcgtaagttgtgaagattttatgagctaatatatgtagtacttagcaacgtgtgtaacacaacaagcacatttttcattatcatttaatattaataattaaaaatagactaatttgaaaacaccaaaaccagaaaaaaaagaatctctttaacactctactttcagttcagaaacagttctgatcccaactctgttgtttaaaataacagcacttcacaagaaaattgacggctctcttctggtaatcaacaataactggagatgttggtcaatgaattcctcagctggtcccctgataatgcactctagagtatctgagtttgcaaatcctgccaaaagagtaggggtttctcttttgtctaaaaagattctatttttttctttctctggagttgtgtgaagttaaaaaacaaaaacaaaagtcagtatgcacgtaatttacagatgctgcctctctaaaatccacaaaaaaaaaatcaaaatggtcaataatatatgtcagtggtcctgctcactataaactacatataaaaacaggttagctttaaggtaataacatctggaaaccagagttcttcaaccattctagctgaaacagtctttggtggtcat

SEQ ID NO: 45451 - DNA, 2736 bp, Homo sapiens
atttctagaaaccgcttttgtctaaaaggggctggaaacaaacaagaaaagtcttccaaatgaaaagaaagggataattgccctgcactaaaacttatattcaccctacaamtacagaagatatccttagtttcttttaccaccttaatcatatttgagagagagtgagagtatttaaagtgcttgactattaaaagcaattaataaaattgcagtgaacagccttgcttccctagagttattattgacttaaagcttttacttcactgtgattagcaaataagaataactgtataaacagcaatgaaatggatttttcttccctcataaagagaaattgtcaaattgtcatatagatggcaacttagtggagtgattgtgattgtcctagactgtttttttttgtttgttttttttttagagacagtcttgctctgtcacccaggctggagtgcagtggcacgatcttggctcactgcaacatctgtcccccaggttcaagcaattctcctgctcagcctcccgagtagctgggattacaggcacatgccgccatgcctggctaattttgtgtgtgtgtgtgtgtgtgtgtgtgtgtgtgtgtgtgtgtgtgtgtatgttttagtagagatggggtttcaccgtgttgcccaggctggtctcgaactacagagctcaggcaatccacctgcctcggcctcccaaagtgctgatattacaggagtgagccaccgtgcccggcattgtcctagactctttatgtaaagtatctgccttaatcaaatcaaccaagttctgcaaacatgatctatctacttgaatttggaggccattttctaatatagaaacttcaatataatgactgtagttgttataaggcattgccaatatatctataaaggaggtgtttttttttattttcctatgcaggtttttagtagatagaaacatagtcagaaaataggtagatgggcattggtagagatataggtattgctagatggagtgataacaatttctcatattttacatgccattagtatgtaggtcctatatttgaatctggaacaatcaagtgagactatttgtaacatcagccctgaacaccagcagcattctatcctcacctttgcaattacccactctggcctttcttataaggcataagcaatatcatatattctcattcaaatcttgccttctttagaatttaaaccctggaggataacaaccttttccccaagagggccagagggagatatggcaaaaatgtcatgtcacttcaggaattccatcaaatggcccaacttcagagcagaggtattctaatcttgatactgtctaagcaaccaagtcctaaaatgtccagtttgctgagaaccatctttgcatttacttactatgaatattttattcatgtatttatttttaatgattgacccactgttctgtacctgcatggagtcaatgttagtttgtaaattcctataggtcagagaatatgttattttaactctatcttatccccatctcatctttcaattttgtatttaaagaatgagtacttaataaataatgctgtcaatgggttcagtaaaataccttagtaagcttttggagcacactatattcttctaccttagttaactgccaatacattaaactctctttttatttatcttgaattgatcatttccccccatttcctataaaatacttagcaaaaggcttgctaatagcaaggggcccaatatatgttaatcattcttttgagaaggtatccagttcttggacttcagattctgtcatttctatattataaacctgaccatatcactcttggtcgtttgagcttgggcaagtcatttaatctgtctacagataatagtacatttttcatagcctttgctatgaattaatgcatgtaaaccacttagcatagttcttgccacataacacaaacttaaaaaaaatactaccattctaattacttttggcaggtcatttgacactagcattccctttggagactcatgcaaactttgccctttcttggcataacctggcctctttgctctctttctgcctacgtccacccactgttactctgctgcacatatttttcttcctcccctgactctttaaaggtgaatatgcttcaaagtttctgatctgagaatgttattacttttacaatacattctagacttagactatctcatttactctcaaaggtttgcacttttatctcatcacttcagtgtatggcattgcctcataattttcagagtaaaaaaagaggccataaggcaggaataccttcatcttgccactgtcaaatctctaaacccacctgtatctgtcctgtcctcgttgtttcacctcttttgcaacataggatgcatctttcctacaaaaacaaaggccgattccttcacctttaccccagattacccactttacccctgtacctcagcttcagcctggttcaggacttttgtcatacctgttttcctctcttttcctacttagtctctccctttctgaattcttcccctaggcattcaatatgcttaacagttcctatatgtaaaaccacaagcaacaataagaatgccttccattttgcccacatctttctgtttactgctctaattttttttctccgctttacaatcaagcttccaaaagcattgtccatgtgctgtcaatcaagcttccagaaagcattgtcca

SEQ ID NO: 45452 - DNA, 2736 bp, Homo sapiens
atttctagaaaccgcttttgtctaaaaggggctggaaacaaacaagaaaagtcttccaaatgaaaagaaagggataattgccctgcactaaaacttatattcaccctacaaatacagaagatatccttagtttcttttaccaccttaatcatatttgagagagagtgagagtatttaaagtgcttgactattaaaagcaattaataaaattgcagtgaacagccttgcttccctagagttattattgacttaaagcttttacttcactgtgattagcaaataagaataactgtataaacagcaatgaaatggatttttcttccctcataaagagaaattgtcaaattgtcatatagatggcaacttagtggagtgattgtgattgtcctagactgtttttttttktttgttttttttttagagacagtcttgctctgtcacccaggctggagtgcagtggcacgatcttggctcactgcaacatctgtcccccaggttcaagcaattctcctgctcagcctcccgagtagctgggattacaggcacatgccgccatgcctggctaattttgtgtgtgtgtgtgtgtgtgtgtgtgtgtgtgtgtgtgtgtgtgtgtatgttttagtagagatggggtttcaccgtgttgcccaggctggtctcgaactacagagctcaggcaatccacctgcctcggcctcccaaagtgctgatattacaggagtgagccaccgtgcccggcattgtcctagactctttatgtaaagtatctgccttaatcaaatcaaccaagttctgcaaacatgatctatctacttgaatttggaggccattttctaatatagaaacttcaatataatgactgtagttgttataaggcattgccaatatatctataaaggaggtgtttttttttattttcctatgcaggtttttagtagatagaaacatagtcagaaaataggtagatgggcattggtagagatataggtattgctagatggagtgataacaatttctcatattttacatgccattagtatgtaggtcctatatttgaatctggaacaatcaagtgagactatttgtaacatcagccctgaacaccagcagcattctatcctcacctttgcaattacccactctggcctttcttataaggcataagcaatatcatatattctcattcaaatcttgccttctttagaatttaaaccctggaggataacaaccttttccccaagagggccagagggagatatggcaaaaatgtcatgtcacttcaggaattccatcaaatggcccaacttcagagcagaggtattctaatcttgatactgtctaagcaaccaagtcctaaaatgtccagtttgctgagaaccatctttgcatttacttactatgaatattttattcatgtatttatttttaatgattgacccactgttctgtacctgcatggagtcaatgttagtttgtaaattcctataggtcagagaatatgttattttaactctatcttatccccatctcatctttcaattttgtatttaaagaatgagtacttaataaataatgctgtcaatgggttcagtaaaataccttagtaagcttttggagcacactatattcttctaccttagttaactgccaatacattaaactctctttttatttatcttgaattgatcatttccccccatttcctataaaatacttagcaaaaggcttgctaatagcaaggggcccaatatatgttaatcattcttttgagaaggtatccagttcttggacttcagattctgtcatttctatattataaacctgaccatatcactcttggtcgtttgagcttgggcaagtcatttaatctgtctacagataatagtacatttttcatagcctttgctatgaattaatgcatgtaaaccacttagcatagttcttgccacataacacaaacttaaaaaaaatactaccattctaattacttttggcaggtcatttgacactagcattccctttggagactcatgcaaactttgccctttcttggcataacctggcctctttgctctctttctgcctacgtccacccactgttactctgctgcacatatttttcttcctcccctgactctttaaaggtgaatatgcttcaaagtttctgatctgagaatgttattacttttacaatacattctagacttagactatctcatttactctcaaaggtttgcacttttatctcatcacttcagtgtatggcattgcctcataattttcagagtaaaaaaagaggccataaggcaggaataccttcatcttgccactgtcaaatctctaaacccacctgtatctgtcctgtcctcgttgtttcacctcttttgcaacataggatgcatctttcctacaaaaacaaaggccgattccttcacctttaccccagattacccactttacccctgtacctcagcttcagcctggttcaggacttttgtcatacctgttttcctctcttttcctacttagtctctccctttctgaattcttcccctaggcattcaatatgcttaacagttcctatatgtaaaaccacaagcaacaataagaatgccttccattttgcccacatctttctgtttactgctctaattttttttctccgctttacaatcaagcttccaaaagcattgtccatgtgctgtcaatcaagcttccagaaagcattgtcca

SEQ ID NO: 45453 - DNA, 2736 bp, Homo sapiens
atttctagaaaccgcttttgtctaaaaggggctggaaacaaacaagaaaagtcttccaaatgaaaagaaagggataattgccctgcactaaaacttatattcaccctacaaatacagaagatatccttagtttcttttaccaccttaatcatatttgagagagagtgagagtatttaaagtgcttgactattaaaagcaattaataaaattgcagtgaacagccttgcttccctagagttattattgacttaaagcttttacttcactgtgattagcaaataagaataactgtataaacagcaatgaaatggatttttcttccctcataaagagaaattgtcaaattgtcatatagatggcaacttagtggagtgattgtgattgtcctagactgtttttttttgtttgttttttttttagagacagtcttgctctgtcacccaggctggagtgcagtggcacgatcttggctcactgcaacatctgtcccccaggttcaagcaattctcctgctcagcctcccgagtagctgggattacaggcacatgccgccatgcctggctaattttgtgtgtgtgtgtgtgtgtgtgtgtgtgtgtgtgtgtgtgtgtgtgtatgttttagtagagatggggtttcaccgtgttgcccaggctggtctcgaactacagagctcaggcaatccacctgcctcggcctcccaaagtgctgatattacaggagtgagccaccgtgcccggcattgtcctagactctttatgtaaagtatctgccttaatcaaatcaaccaagttctgcaaacatgatctatctacttgaatttggaggccattttctaatatagaaacttcaatataatgactgtagttgttataaggcattgccaatatatctataaaggaggtgtttttttttattttcctatgcaggtttttagtagatagaaacatagtcagaaaataggtagatgggcattggtagagatataggtattgctagatggagtgataacaatttctcatattttacatgccattagtatgtaggtcctatatttgaatctggaacaatcaagtgagactatttgtaacatcagccctgaacaccagcagcattctatcctcacctttgcaattacccactctggcctttcttataaggcataagcaatatcatatattctcattcaaatcttgccttctttagaatttaaaccctggaggataacaaccttttccccaagagggccagagggagatatggcaaaaatgtcatgtcacttcaggaattccatcaaatggcccaacttcagagcagaggtattctaatcttgatactgtctaagcaaccaagtcctaaaatgtccagtttgctgagaaccatctttgcatttacttactatgaatattttattcatgtatttatttttaatgattgacccactgttctgtacctgcatggagtcaatgttagtttgtaaattcctataggtcagagaatatgttattttaactctatcttatccccatctcatctttcaattttgtatttaaagaatgagtacttaataaataatgctgtcaatgggttcagtaaaataccttastaagcttttggagcacactatattcttctaccttagttaactgccaatacattaaactctctttttatttatcttgaattgatcatttccccccatttcctataaaatacttagcaaaaggcttgctaatagcaaggggcccaatatatgttaatcattcttttgagaaggtatccagttcttggacttcagattctgtcatttctatattataaacctgaccatatcactcttggtcgtttgagcttgggcaagtcatttaatctgtctacagataatagtacatttttcatagcctttgctatgaattaatgcatgtaaaccacttagcatagttcttgccacataacacaaacttaaaaaaaatactaccattctaattacttttggcaggtcatttgacactagcattccctttggagactcatgcaaactttgccctttcttggcataacctggcctctttgctctctttctgcctacgtccacccactgttactctgctgcacatatttttcttcctcccctgactctttaaaggtgaatatgcttcaaagtttctgatctgagaatgttattacttttacaatacattctagacttagactatctcatttactctcaaaggtttgcacttttatctcatcacttcagtgtatggcattgcctcataattttcagagtaaaaaaagaggccataaggcaggaataccttcatcttgccactgtcaaatctctaaacccacctgtatctgtcctgtcctcgttgtttcacctcttttgcaacataggatgcatctttcctacaaaaacaaaggccgattccttcacctttaccccagattacccactttacccctgtacctcagcttcagcctggttcaggacttttgtcatacctgttttcctctcttttcctacttagtctctccctttctgaattcttcccctaggcattcaatatgcttaacagttcctatatgtaaaaccacaagcaacaataagaatgccttccattttgcccacatctttctgtttactgctctaattttttttctccgctttacaatcaagcttccaaaagcattgtccatgtgctgtcaatcaagcttccagaaagcattgtcca

SEQ ID NO: 45454 - DNA, 2736 bp, Homo sapiens
atttctagaaaccgcttttgtctaaaaggggctggaaacaaacaagaaaagtcttccaaatgaaaagaaagggataattgccctgcactaaaacttatattcaccctacaaatacagaagatatccttagtttcttttaccaccttaatcatatttgagagagagtgagagtatttaaagtgcttgactattaaaagcaattaataaaattgcagtgaacagccttgcttccctagagttattattgacttaaagcttttacttcactgtgattagcaaataagaataactgtataaacagcaatgaaatggatttttcttccctcataaagagaaattgtcaaattgtcatatagatggcaacttagtggagtgattgtgattgtcctagactgtttttttttgtttgttttttttttagagacagtcttgctctgtcacccaggctggagtgcagtggcacgatcttggctcactgcaacatctgtcccccaggttcaagcaattctcctgctcagcctcccgagtagctgggattacaggcacatgccgccatgcctggctaattttgtgtgtgtgtgtgtgtgtgtgtgtgtgtgtgtgtgtgtgtgtgtgtatgttttagtagagatggggtttcaccgtgttgcccaggctggtctcgaactacagagctcaggcaatccacctgcctcggcctcccaaagtgctgatattacaggagtgagccaccgtgcccggcattgtcctagactctttatgtaaagtatctgccttaatcaaatcaaccaagttctgcaaacatgatctatctacttgaatttggaggccattttctaatatagaaacttcaatataatgactgtagttgttataaggcattgccaatatatctataaaggaggtgtttttttttattttcctatgcaggtttttagtagatagaaacatagtcagaaaataggtagatgggcattggtagagatataggtattgctagatggagtgataacaatttctcatattttacatgccattagtatgtaggtcctatatttgaatctggaacaatcaagtgagactatttgtaacatcagccctgaacaccagcagcattctatcctcacctttgcaattacccactctggcctttcttataaggcataagcaatatcatatattctcattcaaatcttgccttctttagaatttaaaccctggaggataacaaccttttccccaagagggccagagggagatatggcaaaaatgtcatgtcacttcaggaattccatcaaatggcccaacttcagagcagaggtattctaatcttgatactgtctaagcaaccaagtcctaaaatgtccagtttgctgagaaccatctttgcatttacttactatgaatattttattcatgtatttatttttaatgattgacccactgttctgtacctgcatggagtcaatgttagtttgtaaattcctataggtcagagaatatgttattttaactctatcttatccccatctcatctttcaattttgtatttaaagaatgagtacttaataaataatgctgtcaatgggttcagtaaaataccttagtaagcttttggagcacactatattcttctaccttagttaactgccaatacattaaactctctttttatttatcttgaattgatcatttccccccatttcctataaaatacttagcaaaaggcttgctaatagcaaggggcccaatatatgttaatcattcttttgagaaggtatccagttcttggacttyagattctgtcatttctatattataaacctgaccatatcactcttggtcgtttgagcttgggcaagtcatttaatctgtctacagataatagtacatttttcatagcctttgctatgaattaatgcatgtaaaccacttagcatagttcttgccacataacacaaacttaaaaaaaatactaccattctaattacttttggcaggtcatttgacactagcattccctttggagactcatgcaaactttgccctttcttggcataacctggcctctttgctctctttctgcctacgtccacccactgttactctgctgcacatatttttcttcctcccctgactctttaaaggtgaatatgcttcaaagtttctgatctgagaatgttattacttttacaatacattctagacttagactatctcatttactctcaaaggtttgcacttttatctcatcacttcagtgtatggcattgcctcataattttcagagtaaaaaaagaggccataaggcaggaataccttcatcttgccactgtcaaatctctaaacccacctgtatctgtcctgtcctcgttgtttcacctcttttgcaacataggatgcatctttcctacaaaaacaaaggccgattccttcacctttaccccagattacccactttacccctgtacctcagcttcagcctggttcaggacttttgtcatacctgttttcctctcttttcctacttagtctctccctttctgaattcttcccctaggcattcaatatgcttaacagttcctatatgtaaaaccacaagcaacaataagaatgccttccattttgcccacatctttctgtttactgctctaattttttttctccgctttacaatcaagcttccaaaagcattgtccatgtgctgtcaatcaagcttccagaaagcattgtcca

SEQ ID NO: 45455 - DNA, 534 bp, Homo sapiens
attactttttgtattttgtctacaggttttagttgtaatcagttagggaattaagctatagtatgcttatccatattggctggcaacagcactttttataaacataattttggatggttacattgtaattcactttatgratattttaaaatttaaaatggcttctctatttaggaacacttgagtttgttctttggttcttctaaatagcattacagagaatattattaaaataaacatttctctaaatctgattatttctttaaaagaagttcttataaaccaaatcactagatcaaaacataagaaagcatataattcactaggacaaagcatttttactgccaaggcactttgactttatcttggaagtgataacacatgtgctgtaatgacattatcagtgttgtggtttacacaaaaagctctggtggctagaagaatgagctgaaagggaagaaggaggtggaaaaatcattcaaaagtcaattacaatgttttgagttagaaactctaagtgtacgaactaaggca

SEQ ID NO: 45456 - DNA, 534 bp, Homo sapiens
attactttttgtattttgtctacaggttttagttgtaatcagttagggaattaagctatagtatgcttatccatattggctggcaacagcactttttataaacataattttggatggttacattgtaattcactttatggatattttaaaatttaaaatggcttctctatttaggaacacttgagtttgttctttggttcttctaaatagcattacagagaatattattaaaataaacatttctctaaatctgattatttctttaaaagaagttcttataaaccaaatcactagatcaaaacataagaaagcatataattcactaggacaaagcatttttactgccaaggcactttgactttatcttggaagtgataacacatgtgctgtaatgacattatcagtgttgtggtttacacaaaaagctctggtggctwgaagaatgagctgaaagggaagaaggaggtggaaaaatcattcaaaagtcaattacaatgttttgagttagaaactctaagtgtacgaactaaggca

SEQ ID NO: 45457 - DNA, 737 bp, Homo sapiens
tgaagtcttcaattaaatctgaaattaacaaagatttactgatcgaatgaaaccctcttccctaggaccaagctgaacagcaagaggacagagatataagactaagtcaagacgtttagtttagtggatgagatagtaaagtaataaaacaatcagctcctgctgaagttatggacgggtcctctgtgaagatctcggaaggaatctaaatttgacttagagatgaggagaatgtgcaaagcttcgttgagaagagggtatgtaaaatacgctataaagcgtgagtagcacttttagttcactgaagaattgttaaaaaaaaaaaaaaaaaaaaaaaaaaaaaccggaggggagccgggctcggtggctcacgcctgtgagccagcactttgggaggccaccgaggctggcggatcacgaggtcaggagatggagaccatcctggctaacacggtgaaaccccrtgtctactaaaaatataaaaaattagccgggcgtggtggcgggcgcctgtagtcccagctactcgggaggctgaggcaggacaatggcgtgaacgcgggaggcggagcttgcagtgagccgagatcctgccactgcactcctgcctgggcgacagagagagactccgtctcaaaaaaaaagaaaaaaaaaagggagaggaggggaggtattccacataaagaggcaaatgtgaagaaagacatgcagaattggaaaagaatacagttgttaaa

SEQ ID NO: 45458 - DNA, 737 bp, Homo sapiens
tgaagtcttcaattaaatctgaaattaacaaagatttactgatcgaatgaaaccctcttccctaggaccaagctgaacagcaagaggacagagatataagactaagtcaagacgtttagtttagtggatgagatagtaaagtaataaaacaatcagctcctgctgaagttatggacgggtcctctgtgaagatctcggaaggaatctaaatttgacttagagatgaggagaatgtgcaaagcttcgttgagaagagggtatgtaaaatacgctataaagcgtgagtagcacttttagttcactgaagaattgttaaaaaaaaaaaaaaaaaaaaaaaaaaaaaccggaggggagccgggctcggtggctcacgcctgtgagccagcactttgggaggccaccgaggctggcggatcacgaggtcaggagatggagaccatcctggctaacacggtgaaaccccgtgtctactaaaaatataaaaaattagccgggcgtggtggcgggcgcctgtagtcccagctactcgggaggctgaggcaggacaatggcgtgaacgcgggaggcggagcttgcagtgagccgagatcctgccactgcactcctgcctgggcgacagagagagactccktctcaaaaaaaaagaaaaaaaaaagggagaggaggggaggtattccacataaagaggcaaatgtgaagaaagacatgcagaattggaaaagaatacagttgttaaa

SEQ ID NO: 45459 - DNA, 515 bp, Homo sapiens
ttgaattttttttctatccatccaccctttttcaagcaaaaggtggaatttttttctaggaaccacattgctccttgattcccacaatttgtctatgagcttttcaggccacagaaaatcataacactcaattcccctgaccatagcaatyggtttatagtaaatttcaatacaattaatctcaggatatattctgaacaaaatctcttgctctctgatacagccctaagagttgctagcagcccttctgaggccactagtgaatgaggttttgtgaggatggagttaatacagaggaagcagacccaacagacaggaggaaaacccagtcctaaattgtttaatccagtcctgaagctaggtctactcttcaatcattctgttacagattaattcattcctttcattcattccatttttctttcccccttaggcaaattacatttggtttttgtcacttatgaccaaaaaaaaaaaaagaaaaagaaaaatctgaaaaaaaaatttaaaattca

SEQ ID NO: 45460 - DNA, 603 bp, Homo sapiens
aaattgtctttgtttgcagatgacatgattgtacatttagaaaacccattggctcagccccaaatctcattaagctgataagcaactttggcaaagtctcaggatacaaaatcaatgtgcaaaaatcacaagcattcttatacaccaataatagacagagagccagatcatgagcaaactcccattcacaattggtacaaagagaataaaatacctaggactcatccctttttatttccccgtatacactggactgccagccgtatcaaaagacccatatyatgatctttctttttttttttttttttttttttttgccatggtgccattgcatatcccccgaacatctttatccttctctttcacttggcttactcttgcttgttaaggttgagatcaagaatcttcaggtaaaccttagatccactaatattgtctcgggagagccccctttgcaatcacatttcctctacttacctccattataaccctgtctgtactctttgtagttctgggctcctcataactgtctctgccacttttgtgtgagttccttgaaatcagcctgtatgcccagtgttaggattctctatgaggcataac

SEQ ID NO: 45461 - DNA, 620 bp, Homo sapiens
gctcacatgcctagccctttgggaggctgaggcgagaggatagcttgaggccaggagctcaagaccagactgggcaacatagccagattctcatctctacaaaaatgaaaacaaataaaaattagctgggtatgttcacacatgcctgtagttagagctacttgggaaacttagtggggggatcgcttgggaccaggagttcaaggctgcagtgagctatgatcgtaccactgtactccagcatgggtgaaagagtgacactctgtttcaaaataaataaataaataaaaaataaaaaacactatgaactttcctttcattgttatttctctacccagaccataaggattatgaagttggcatagaaatactagattgcggagaggtaagtgaagagtgaccagttgtatgtgtgacaaattatcctggtaacaatacgttgtcttagatgaggttattggcttcaaagccacaagataatttctcccccatgaaacctagaaagagttgctaatttctatgggaaatagaccatttayccactaaatgtacatttcagcctattttgtcactctgattctggtaagggtacaatgatgttaggtcttatttgagtacat

SEQ ID NO: 45462 - DNA, 2253 bp, Homo sapiens
tataaagtctacagtagtgtacagtaatgtcttaggccttcacactctctcaccactcactcactgacccacccagagcaacacgcagtcctgcaagctccattcatgggaagtgccttatataggtgtactttaaataaaatcttttataccatattttactgtgccttttctaggttttgatagtttagataaacaaataccactgtattaacaattgcctacagtattaagtacagtaacatgccgtacagatttgtagcctaggagtaagaggctagaccacataagcctagtatgtagtatgtctgtagtatgttttgccatcagggttcatgtaagtgcactctgtgatgttcacacaagtacaaaatagtctaataatgcatttatcaaagtatccctgtcgttaagcaccacatgtctatatttggaatccagaatcgtctagttccagagactatttggactacaacagtaattttaaaatgttttcctcttttagcaggtgaattctttggataaaatcctccctgtaagcctggtataatcaacagataaaggaggggcatgtctgagacaagtcagggtgggagatgccctgcgcctccaaccctacctcctttgctcgctcctcatctcctctctacagctctgcagcagcctcggtgcatctctcctgagacttaggtctcaaaacaacaacaaattaagaagcttgaaaaaacactgcattgcatcaagctgccatattctcaccttcagcaaaatttccatatggctccccaagaggaggttctagaaagccactaggaatgtaaatgagtacaaccacaatgaagagcagtttgggatttccccaaaaaactaaatacagagctaccatatgatccagcaatcccactgctgggtatattcccaaaagaaaggaaatcagcatgtcaaagagatacctgcacatccatgtttgttgcagcactgttcacaatagccaatatttggaagcaacctaagtatccatcaacacatgaatggacaaagaaattgtggtacatataaacaatggagtactatttattcatgaaaacaatgagatcctgttatttgcaacaatatggatggaactgtggtcatcatgttaagtgaaataagccaggaacagaaagacaaacattgtgtattcttactcatttactgaatgtaaaaatcaaaacaactgaacccatggagatagagaatggaaggatggttaccagaggataggaagggtactgggggatcagggagaggtagagatggttaaagggtacaaaaaataattagaagacctagcatttaatagcatgacagtgtgactatagccaaaataatgtatttgtacattttaaaataacttaaaaaacataattgaattgtttgtaacacaaaggataaatgcttgaggagatggataccccattttccatgatgtgattattatgcattgcatgcctttatcaaaatatctcacataccccataaatatagacacctactgtgtacctacaaaaattagaaattaaaaattaaaaaaaaacttagaaagccaccaagacattgtaattgtggatgaagttccagtgagcatggagggcattcaatgctattactcccactaatattcgatactattactgaatatacagaaactgaagcccagaaacacccagctggattcgatggcagggcttgaatccaggtcctgtgacattcaatccaatgtccttggtatacctggaagactgatgggtatgatcaatggccttcctgatgggtcaggtgcccctaacagggagcacagagataatgcacatcaattcttttctatcatggcacttggcacaatttgtaatcatttacttatcagtgtgtttgtttatattttgtctccttctccagactgtaaattccttgaggacagaaacagtggcacttttacttttgtattacttagcacctaacatacaaaagtcttcaattaggctgggatcrgtggcttacacctgtaatcccagcactctgggatgccaaggagggaggaaagcttgagcccaggagttcaagaccagcctgggcaacatagcaaaaccccaactctacaaaacatacaaaaattagccagatgtggtggcacacgcctgtagtcccagctacttgggaggctgaggtaggaggatcacctgagcctgagaggtcgaggctacaatgagtcga

SEQ ID NO: 45463 - DNA, 614 bp, Homo sapiens
aggcatcctagtactcctatttcaaggcgtggtgtttatcatttcttaagaaggaatatccattaatttaggatataatagttttagaccaaagataactaatgtcaagaggaaactttctatatcagaagaataactggccttcagtcttaaaagaacagtcttgtaagaaagtcagggtgtatttcaagaacgattctgagcacttggtcagtgattcttaatgggttgtgtttctctctgtaaatcctcggtagaggtggaattaattttatttaacagattcatcaggcgcttattggacacagagcagagccctgggttttcaggtgttcgaacttggcattgtgcattggggcactaaactatyaacctaaaaccatctgaagtacacttaaaatataatttccttgacaatggttatctagattacttaaagattaggtgatctggtgtgagtataactttggcagaagtttctgacatcataaattctgaatccatccagtgattgaatagaaagaattgttcacttcccaacatattaaactttcaaaggtctgtgactctgccatacaagccaggcatttccaagagctcggaagtcactgtta

SEQ ID NO: 45464 - DNA, 559 bp, Homo sapiens
tttccctcatcattaagccctgagccttatcatcagcctattctgcatctgactatatgaaatgagtatctttacacgatactaaggagactgtagtagttagtcttacaagataaggacgtccttccctgctttaactcccctgacattctccctatataagcatgtcgcatccagaaattgagcttattttttgctcsccttgaacctgagctggacttttgacaggctgtgatcaatcaaatgtggcagaagtgatggttatgttctcggacttccaagcccattaaaggactggcagatttctctttctcctcttggaacccagccatcatgctgttaggtgcccgagcaacatgaagaggtcacatgaaggaggactgggtgctctagtcaaaatcctaagctgatatcctagcctatggccagaatccaatgccagttgcatgagtgaaccatattggttgttgcagaatgtggagccttcagatgactccagccaatctcacgtggagaagaaaagctgcctcgctgagcccatcaacctccagattatgaa

SEQ ID NO: 45465 - DNA, 564 bp, Homo sapiens
tgcagggagtcatggctagaagtgggatgcagcggaggtgcccaagaactgaatccacaaaaagtcattaattgccaaaatgactgagcaaattcaaatgacccaaatgcattcgctcgtaagggcaatttgcttctaggaaactggaaggagagaggggtcactgaagccgaagccacatagcggatgacaaacaggataaggaaaagcaagaaggcagacagttcaactctgtcagcatcaaagattcagacccaacaaaarcgcttatataaaaggctttgcctataaacatgtttatttaccttctatttggatggatttctaaattttcctggagagtccaggttattgaaaataactgcactgccagtgtctcttggtttaaaggtctgctaaaaattctacaaaaaaactagcaacaaaagccttgaatgtctcaacatatttcatccgtctcatctcagaggtttcaccaacacccaaatgtccagctgtttacatgtgcaatttatgactccttcagtgtgtcgtcctcttttgggttctctgctgtgtgggata

SEQ ID NO: 45466 - DNA, 597 bp, Homo sapiens
tgagctactgcgcccagcctaactttttctttttatttttctttattattatactttaagttctgggatacatgtgcagaacgtgtaggtttgttacaaaggtatacatgttccatggtggtttgctgcatccatcaactcgtaatctacattaggtatttctcctaatgctatccctcccctaggcccccaccccccgacaggccccagtgtgtgatgttcccctccctgtgtccttgtgttctcattgttcarcttccacttatgagtgcgaacatgaggtgtttggttttctgttcctgtgtcagtttgctgagaatgatggtttccagcttcatccatgtccctgacacaacaaaacatttcaggccaatatccttgatgaacatcatgcgaaaatcctgagttttttttttttaatgaaagaaatccatcttgacaaattcaaactcatctaatgagtgctccagtggtccagattctccagcaattatttattgggtggatgctggtccaatttaaggttgtttcctgctgttatgttggctacacacccactttttaatctgctaagagggatctacagattttttattc

SEQ ID NO: 45467 - DNA, 597 bp, Homo sapiens
tgagctactgcgcccagcctaactttttctttttatttttctttattattatactttaagttctgggatacatgtgcagaacgtgtaggtttgttacaaaggtatacatgttccatggtggtttgctgcatccatcaactcgtaatctacattaggtatttctcctaatgctatccctcccctaggcccccaccccccgacaggccccagtgtgtgatgttcccctccctgtgtccttgtgttctcattgttcagcttccacttatgagtgcgaacatgaggtgtttggttttctgttcctgtgtcagtttgctgagaatgatggtttccagcttcatccatgtccctgacacaacaaaacatttcaggccaatatccttgatgaacatcatgcgaaaatcctgagttttttttttttaatgaaagaaatccatcttgacaaattcaaactcatctaatgagtgctccagtggtccagattctccagcaatyatttattgggtggatgctggtccaatttaaggttgtttcctgctgttatgttggctacacacccactttttaatctgctaagagggatctacagattttttattc

SEQ ID NO: 45468 - DNA, 555 bp, Homo sapiens
aaagaaacccagaagactaataaacataaagagaaaatctcaaactttcccacactcacgtcagtggaaattaaaagaagaaagacttatcacttgtttactctatttactatctagattattaacatggaattctaagtaatccatcctaggatataaaaaatatgtctgaatgaatttcataagsctttggataacatgaggaaattgatctttaaatcgtcaaatatggttttaagcaaatacttctctagctgcatggacattaaagaggttaaaatatgagatatgcgctgtaagtgtttgaagacatagtgaagatgcatttagaagcagtctgttctagtattagttgataaattacaataaatattagttgataaatattattctagtattggttgataaaaaataaatctactattaattgataaatactacaaaggcttattttacttgagaattccatggtaagattttagaactccataccgcataagagaatggaagacaagctacgggtatacactgaagtgttatatttgcataaaaaaa

SEQ ID NO: 45469 - DNA, 620 bp, Homo sapiens
tcactataattgccctgatttagcctggcagttatgactcctgctcagagccaaatgtctcccagccaagacccagtgagcttgccaaattgtttcacctcttttattgtcagaactcatcgcccctcctcacaytgttgtgcttttctataatattttaggtatattaatcataaatcctggaattgtttatctacaaaaaattgaagtcaggaagtcatggaatagtcatttatcatgggctttggctcagtgacttgaaactaaaagtagaagaaaaacaaaagcactgattgtgtagaggtggccaaatgcctggaggttaagtgaaatgaaattaaagaaaaaagaagtcctctctgatccttagcagaaattattcactttctgaaagaagctttttctctattgagacttctatttggaaatgtatattatagatttttttttgcctgttaatctgctaaatgttcatttaacaatagaaaatgtttgataataaaaccattgctttttctgatagaggtacttcaattatgaggattttataaacgtgttctaagtattcaatgcttaatagtggggttgctatactattgggtgagatatcaacctggtgt

SEQ ID NO: 45470 - DNA, 620 bp, Homo sapiens
tcactataattgccctgatttagcctggcagttatgactcctgctcagagccaaatgtctcccagccaagacccagtgagcttgccaaattgtttcacctcttttattgtcagaactcatcgcccctcctcacattgttgtgcttttctataatattttaggtatattaatcataaatcctggaattgtttatctacaaaaaattgaagtcaggragtcatggaatagtcatttatcatgggctttggctcagtgacttgaaactaaaagtagaagaaaaacaaaagcactgattgtgtagaggtggccaaatgcctggaggttaagtgaaatgaaattaaagaaaaaagaagtcctctctgatccttagcagaaattattcactttctgaaagaagctttttctctattgagacttctatttggaaatgtatattatagatttttttttgcctgttaatctgctaaatgttcatttaacaatagaaaatgtttgataataaaaccattgctttttctgatagaggtacttcaattatgaggattttataaacgtgttctaagtattcaatgcttaatagtggggttgctatactattgggtgagatatcaacctggtgt

SEQ ID NO: 45471 - DNA, 539 bp, Homo sapiens
tcaatcagtttctagaaggttctttttaagtcataagtcacgttatgtcatttgtctacttaaaaccctccaagtcatcccatttcactcacagtgaaatccaaggtcctgacagtggcttttattgtcctaaataacccaataccacccagtcattccctctctgctctcctccccttttccttctcacttgctcaggcctctgcagacacagtggcctctcccactcctcaaatatgccagcacatgctcacctcggtgtccttgcactagccctttcttctctctggaactgtcttcatccagatatacatgtccattactcactcccatcaagtcatttcccaaataccctcttctcaataaggatctccataactattatgttcatttatttacattttcaaaaaayggtcagctgatcgaataaaagaaagtaacaatgccatgtattcatcaagacttttgttgtttaaaatatatgtatatgtatgcatcgtaaaaaaagaaaagaaagatcagtaggctacacattaaaa

SEQ ID NO: 45472 - DNA, 599 bp, Homo sapiens
ccctcagaaaccttaaaacagaaatgtatccccagcatccttctaacatcagtatacaatagattcccagtggatgttgtggaatagaaatgaaccccaaaatgcccccctccattgactttccaactcattcattcaacacgtattcatcaaactcctatgtgctactgcagtgggttgaatactgctccctcaaaaaacatatccacccaaaacctgtaaatacgaccttatttggagaaagggtctttatagatataacaacatgaaagatctcaagatgagatcattctggattagagtaggccctaaatacaatagcagttgtctttataagcrgtagaaagatgaaagacacgcagagatacaggggaaaaggccatgtgaagactcaagcagatactggtgggctgttgccagaatccaataatgccaggagccaccagaagctgcaggaggcaggaaggattctcctctagagtctttggacagaacaaggctctgctgacacctcgatttcagatttctggccttcagactgtgacaaaatgtctgcccttttcagtcatcaagtttgtggcaatttgttgtggcagccc

SEQ ID NO: 45473 - DNA, 620 bp, Homo sapiens
ggaagtgcttcagctggtttgaaaactcaactttccaagctaattgcttagtgtctctctctgcaaaagtcagttcttaccattaatatatctgagttcccatacagacttttctactaacttgctgtgtgatcttggaaaaattgttcatcctctctgtttttttaatctcaaagatggcttggctaaaatagatagcatctaagagcgagaagcaatcttagaaaacatctagtccaatttctgaccttacagaaaaggaaagaggggaaagcatctgacttctgattcctgaagcctctgggctctaaattctaaacaactcacccagctgctgcagacagtgccaacattagacaggtgaagatgcaacctcacgggttcaggttccccctcaggtgcacctgccaatattgaagctggagtctgaatgaagtgctgcttcagaatcctgttccctttccttgaacacatgtctgccaggccatgcaaggtgaagatgaaagataatggagttgactccagtctcccactcagctgatgaagaagaggctggtggcagagatcagcggccagcacagtacgggcrtggttggaaagttcccaccaagggtggtgag

SEQ ID NO: 45474 - DNA, 610 bp, Homo sapiens
aggatctgatggaaattattgatcccctcaccaagaaaggccataaatgcacatatgaaactgcagatcaccatcacagggagttctaaacccttggtctgtagacaccagtggttccccgcactctagtamcatctacgccctacttacttgcaaatttatattttagcccagaatttttctcaaacatgtttctgcaacccaaaacaccctcttccatcagtacaatggggaggattgtgacaccacctatgcaccccacagggtttttgtgagtaggaaatgaaatgcccagtgaaaaaggccatggtgtatagcaaggggctacacgaacatcttgggaagcctgatcatgctctttggtgaaggagaaggccacccacgtagaagggtagtcgtctttatcattttcatccaaaggggcagaataagaaatatcatattgtatgatgaatggacgagagaatcttttcacaatgagagctcacccaaagtagaagttcagaccaatgtggtgagattcaagtatctgcctcttggcttctcagatgtattttagaggagagatcttggttttcaacagcatatttccaaactctgtgtctagcag

SEQ ID NO: 45475 - DNA, 1644 bp, Homo sapiens
gcctgtaatcccagctactcaggaggctgaggcaggagaatcgcttgaaccccggtggcagaggttgttgtgagccgagattgcccccttgcactcccgtctgggccaccagggccaaactcctctccaaaaaaaaaaaaaaaaaaaaaatcttggatcttaaacaagggaggggaactaccattagaaaaagaaggcaacgttttaaaaaacaagtacctatgtcttaggtgctaaggaccttgaaaggcattttcatatacatgtcttcatttaactcaatttaatctaatctagttckgtttggtacattcttatccctattttataggtgggtaaactaaagctctacaaaatgaacttgtctaaattcatgtagcttgtaagggatgtagagctttggttcatactgagattgtgtgactccaagttcgctatttcttctgtaacaccatgtttgcctgctactctgcctcacaattttgggtagtgcgaaaataaaagcatgggtctatggcagaaactgatgcaaagctaagaggagaagctgacgatgcacacatacacatgtctttagcttaaggacaatctgtgaacacattggagcttaagtggccccatcttagccttcctcaatcatctcacagatgcagcactgctgcagagggcctgctaagccaggcaggtggagttccaggtgtctcaggatgagtgtaagcccttagtgtgacagagtgcagtggttcttatatagttgtgtctggctatgatacttatcacatggcgccatggaggacatggactttgaaaatcagcagccctgtggtccaattcacatcttccccacctggccctctccaacaacactccaataatgacccacctctcttccttggctaaatgtgctctctcagtgcctttgcacactggtgccctttgcctggagttccttcttgcttcctttctatctagagagtttctcctgtatcttgaagtcccagtcaagcaccaccttcttgggaaccttccctgatttaggcattctggtggagtactttgtttttgccttgctcggagggtattatcatttctttcagatctcaaaaggacttctggaaaccaggtacagttagtgacatggtggaactgggggagtatttaatgtgctggtttgcctcagaggacatggtctgtgagaaggctgttgattggatatctaaaggtgtgaagtgtgaaaagggatggaaaagactggcatatgcctctatatccttctggtagttccatgggcaaggtctaagctcttgagggatgatgatattgaagacagagttggcgttctcagacagctctgagaactgggaagtggtatcacaacaggcaatgtagattgaggaagaagaaggcaacgtgtgtgaggaatccttgaaagtacctagaaacaacagggcgagtccctaagaaagtcaggctagagggtttgaaatttggggcatttctatgactggaacctactgtttcctgtgggctggggagatcagggatgcctgacttttagctcctggagagcagtgaacttatcttttttgacaagattatcaatatcttgaaataattatagattcacagtatgttgcaaagaaa

SEQ ID NO: 45476 - DNA, 531 bp, Homo sapiens
aataaaatctttgtgcactgggcattgctgtttcctctccagcccttccactacagagaagcactaccttgtctgsggtgctgccccctgctatgccttaaggctgaaaagtcatacatgaaaacagaattcaattcccttccatcaccacagtccaggagcctcaatatgggacagggaaaggggaaaattttcctccccactgaactcagacttgtacccttgcaccccatgttgcctctatctctcccattttaccctaggcctggcatgaccaagaccttctgatcaaaggcccttttcctcagagctcaaacaattcaaacaaatatacagttatagaggccttcagggtcataggcactcataaacttaatcgtggttactcccctctgccttcttaaatatttctccctgagatctcacatcagaaagatggcagctgttcacttaggcttttgagggagtctagcattgggttttgctctgttagaccaaaccgtgtgatatggttttgttgtatccccaccc

SEQ ID NO: 45477 - DNA, 601 bp, Homo sapiens
ccgcacacagggctcagccccatcaggtgcaacccatagggaaagaggagccattgttttgtagtcaaggaagtgagtgcatgtaggcattctcaggtgaaatcacttcgggaggggctggattagggatagtccgtggagaaggcaagattaggagctgatcctcgggtaggtttccatttggggaaggagggttgtcaggatacagggcttgagtcctaagaaggaggcaggaaagctggttaagcggctggtcaaagcacagcactgtcagggccaatgagcactgggcctttgtgtgagaatcactagggaagctagaagagccagttgctcagagctcaagctcagaacctggccccaggggtcttctaggcctagacttagggtgagcaatcggcyggcaagtcagttccccatgagccaagtgtggtggggtcagatgggcagtattctggcgtttgcttcttttctcctttctcatcattcccaggggtttcaatcattctcattattttgccccttctctctttttttttcattcttttttttttgagacggagtctcactttctcaggctggagtacagtggcatgatctt

SEQ ID NO: 45478 - DNA, 500 bp, Homo sapiens
gtttcttattttacagtgctgcataatattcctaaagcaacacaacactaccctatttaaaggcatttaaattgtgggccattctctctctttctacaagtcaaactaatgtttatattgtggtaaartatacatcacataaaatttaacattggagccatttttaagtgtgcagtttggtggcagtaagcacattcacgttgtttcacgaccatcactgccatcgggccactctctttttaaaaattgcctgattgtccccaagctcctcttctgggctcagcctgaaccttacttctcagggtggttggccctgatcccatctttgctccccagcacttgtttgtcccatatggtggcacttatcacgcatggttcactgtttttcatgttgctggcagcaagtgtgtcataggatcaattccgtgggcctcaaatcatctcagaaaaatagaaaatattagattggctcctctgtagtagaggtaaatattgctttg

SEQ ID NO: 45479 - DNA, 559 bp, Homo sapiens
atgggaaacggaagagcagccttctccctcatctctaccccaggccttctggagggcaggctcaggcccaaaaccaaaatgccattctgtagcctggaacccaaaatgcaaagcaccctgggatgggaggcagagaaatgggacccaggaaatacaataattaaatcatacaatgaaagcttaaatttccaagttaattcttgggcatcgtttataaaagttaacagggcatatttaatttaggaattggctcacgtccttctccgtacagctgaaatctcataaatgaagtatactggatcatttcccagtgcggaaataaaagttatgaataatgtttctatctcaatcattgtcagtgctttaatattcctaattactttaaaaagctagatattcaatataggaaaactttcttcctttttatctccacttgtgagattagtgcaatttaataagagtcactctgtcgtctttattcagtataaaytgacatttcattcttttactcttcattgttatatgggatggaggtttatgaccaggcatgcagccactc

SEQ ID NO: 45480 - DNA, 559 bp, Homo sapiens
atgggaaacggaagagcagccttctccctcatctctaccccaggccttctggagggcaggctcaggcccaaaaccaaaatgccattctgtagcctggaacccaaaatgcaaagcaccctgggatgggaggcagagaaatgggacccaggaaatacaataattaaatcatacaatgaaagcttaaatttccaagttaattcttgggcatcgtttataaaagttaacagggcatatttaatttaggaattggctcacgtccttctccgtacagctgaaatctcataaatgaagtatactggatcatttcccagtgcggaaataaaagttatgaataatgtttctatctcaatcattgtcagtgctttaatattcctaattactttaaaaagctagatattcaatataggaaaactttcttcctttttatctccacttgtgagattagtgcaatttaataagagtcactctgtcgtctttattcagtataaattgacatttcattcttttactcttcattrttatatgggatggaggtttatgaccaggcatgcagccactc

SEQ ID NO: 45481 - DNA, 549 bp, Homo sapiens
ggtggggcctggtgggaggtgttcggatcatgcggacagatccctcatgaatggcttgggccrgccgcttggtgatgagtgagttctcactctgatttcatatgagatctggttgtttaaaagtgtgtggcacctcccccatatctctcttgctcccactctcgccatgtgacatgcctgctttctcgttgccttctgccatgagtaaaagcctcactagaagtcaagcagatgctggcactatgcttcctgtacagccagcagaccgtgaaacaactacacatcctttttttgtaaattacccagcctcagacattcctttacaacgacacgaaaacagcctaatccacccactcccaatcccatttaaggatgatgtacttgtcctcttatgaagaaagagacagcagcaggacggttttgtaaggcccaaggaagtgacctcttctgtgacagcgaagcgtggtgggaatcctggccatcacttttctgtgaagaaatgctcaggctagagcgtcattgctaaaactctgcctgtcatcccagtga

SEQ ID NO: 45482 - DNA, 595 bp, Homo sapiens
ccccctgtggttactaggggtcaccccatcctcttgatactacaaattctgccacccacaacttctggattttcactctgtttctcaatgcaccccctatgtggccctgcatagcacagtgtcttcctcttcctggctgagcatatgtgattaataaactgctctccatcccatctgtccagtgtcaggtatcttgtgtttgctcattcctcttcaccagtagggacttcttccttcrccactggggagcaaaggaggtgattaaaacagaaggaaataaaaaatgaaggaggtaagaaaggcagttgttagtattattaccataaaatgtaccatttaaaagaaaatgtgactgtttttgcccaatgaattgagaacatgtgttatctatatttgttcttaagtcatttatcttagagcaaatgttttctttaagtaccaggaaaatgagtattgttgtctatatgttttttagttaaatgattgtttgattgatatttgagctatattactatgtttttatctttatttatttatttatttttttactaaatgcttccattttggatggagtgggaaaactatgagtttctac

SEQ ID NO: 45483 - DNA, 604 bp, Homo sapiens
tcccttattccagtccctttcttcaattctggtgttatagcagaaataattaacatttatggtatgtgcctggtaccaccaactctcaaaataaccctaagggatattattattattcctattttacgataagcaaasttgggctcatgtactaactttcccaaggtcatagtactaataaatggcagcactgatatgagaacccagtgttacctgaattcaaagctcatcctcctaattatcctggtacccaacctcaagtcatgtagttggcatcccattccctgcaaagcctttctctcagttatctatcagctagttaattaaatgaagtcattatgggctgggcacacaaaagatattcaaagtgctgatgactgcagtatcaactgatagagttagctacattaaccatggtgtttaaatagggacttctctaagactaaaaatacctttagggctgaaagccatgaaactcttcctatgagaagatgagtggcgttgatagatggagttgtaaccatggcagccccttaagtcataccatggaaacaactgagtgctttcctgcttgttgctatactacttgctcttaggtgatgca

SEQ ID NO: 45484 - DNA, 1744 bp, Homo sapiens
tgagatgcaggagaaaggaagaggcataagaaaatacaagaatgactatttcattctatattgaacctgtcccaaagtggtaggttttctgggctggaatcagaagttgcttagctaactatgacagtcaccctctgtacgtgacaggccactgtggtgactttggtcggctgagttccagtgttgtcaaaacaagacaaatggggatagattgtgcctggggttgctaattctctgcttcatatcaccatatgccrtttctggtaccaagtgaggggacatgcttgtcagggaaaccttaaaattgaatctactgatatatcttgttgaaaaaatggaaaaggtgcaaagtattagaaggaacgttagggcgttgctttcaaactgatgaggggaatgtgaaaatggtatcataaaacaggaaatgtgcttcatatgcccaagaggggaagaggtggaatcggaactccaaaacaactggtacatgttttgttgatgggcaaaaaaaatcacagcacaaccagaaaggagaatgtaccagatgttttcaaattagagtatttcaaaaggaaaatgttattttttgttttgtattgttttaaatcccaaggatagtttttatagttccttctgtcataatatattttagttatcctaatttttaagcatgttggcacatttaaaaaatcctaattgatgatgagaaatttttaacaataggactttatgttggattctgtacttaaaaggtactgtcaatatctcactcttggggatatgagctctaaatatgagaagcaagttatatgtgttcacctgaggaagaagctgacggacaaagcaaaccctctttaaaaaaaaaaaaaagaaaattccacgtgtgtggaatacagccggtgaaaaataatcactgtagttagaatcacatacagaaaaaaaatgattgaatcctccaagaaggtatttcaaaaatgggaaatgctatacttataagaattgaaggaaaaaaaaaaaaacacctcacgtatgttattcttcatcctgttcttcccattgggactgttatggccatattctacagtatagtaaattttaaattggccacatttttttttgtttcagcaagttatgtaaaatgctataaattatgtgtatgttaaaggagtactttaagaagagatctttatccaaagttgtttttgtatatttaaatgcttacctttattttttgtaaagtgcagcatactcatttgtgtataatcttactgatcagatgtttaaaattattccaaatacttcattaaaataattattttattataagaataactttgctcattcactgactttgaaaaccattgtccttagtagttagcccctgatgtgctcaaattgctgggctgtgaatttttcctagctcggattgtgaattactttggagtatgggcattttggttccagaaagtcacttcagatccaagttgttgtatcactttctttgaaatagttgtaaatttgcatgctatttgattcacaaagaaagctaggcatactcattacaaaagcttttcttgcctatcagggttttttaactgaggtatttttcaaaatttatttttaatattcatttttaaactttgtcttgtgaaatatatcttacacaagaaagaaaaaataatgtatccaaggtattcttctgtgcagcttgcaaaatggtgggcttggagtagatttgatctacaaa

SEQ ID NO: 45485 - DNA, 1744 bp, Homo sapiens
tgagatgcaggagaaaggaagaggcataagaaaatacaagaatgactatttcattctatattgaacctgtcccaaagtggtaggttttctgggctggaatcagaagttgcttagctaactatgacagtcaccctctgtacgtgacaggccactgtggtgactttggtcggctgagttccagtgttgtcaaaacaagacaaatggggatagattgtgcctggggttgctaattctctgcttcatatcaccatatgccgtttctggtaccaagtgaggggacatgcttgtcagggaaaccttaaaattgaatctactgatatatcttgttgaaaaaatggaaaaggtgcaaagtaytagaaggaacgttagggcgttgctttcaaactgatgaggggaatgtgaaaatggtatcataaaacaggaaatgtgcttcatatgcccaagaggggaagaggtggaatcggaactccaaaacaactggtacatgttttgttgatgggcaaaaaaaatcacagcacaaccagaaaggagaatgtaccagatgttttcaaattagagtatttcaaaaggaaaatgttattttttgttttgtattgttttaaatcccaaggatagtttttatagttccttctgtcataatatattttagttatcctaatttttaagcatgttggcacatttaaaaaatcctaattgatgatgagaaatttttaacaataggactttatgttggattctgtacttaaaaggtactgtcaatatctcactcttggggatatgagctctaaatatgagaagcaagttatatgtgttcacctgaggaagaagctgacggacaaagcaaaccctctttaaaaaaaaaaaaaagaaaattccacgtgtgtggaatacagccggtgaaaaataatcactgtagttagaatcacatacagaaaaaaaatgattgaatcctccaagaaggtatttcaaaaatgggaaatgctatacttataagaattgaaggaaaaaaaaaaaaacacctcacgtatgttattcttcatcctgttcttcccattgggactgttatggccatattctacagtatagtaaattttaaattggccacatttttttttgtttcagcaagttatgtaaaatgctataaattatgtgtatgttaaaggagtactttaagaagagatctttatccaaagttgtttttgtatatttaaatgcttacctttattttttgtaaagtgcagcatactcatttgtgtataatcttactgatcagatgtttaaaattattccaaatacttcattaaaataattattttattataagaataactttgctcattcactgactttgaaaaccattgtccttagtagttagcccctgatgtgctcaaattgctgggctgtgaatttttcctagctcggattgtgaattactttggagtatgggcattttggttccagaaagtcacttcagatccaagttgttgtatcactttctttgaaatagttgtaaatttgcatgctatttgattcacaaagaaagctaggcatactcattacaaaagcttttcttgcctatcagggttttttaactgaggtatttttcaaaatttatttttaatattcatttttaaactttgtcttgtgaaatatatcttacacaagaaagaaaaaataatgtatccaaggtattcttctgtgcagcttgcaaaatggtgggcttggagtagatttgatctacaaa

SEQ ID NO: 45486 - DNA, 501 bp, Homo sapiens
gcaaaaatagagaatgaaaaattgtgtatttaaatgatgttcttgaatcatctattggtgagacatgtattatagtgtgaataagaagcagtagaatcacaagcctctraagtgttccaggaaccacaatacaggaaattctcacagtacttttgcaatattaacactttggcaaggactaaagaaggtgagaggaggtcagagggagttttgttgctgttttgttttttattgtttgaaaatcaaattcattttaaagggttatctggaaaatgaaggaaatgatgggcaaaccaaaggtaaatttacttagcataacaaaattacttacagaattttcctcttttaataataaacatttattatttaccttgtacttaacacaatttaaagcacttggcatatcttagctcatttatttctgtaaatggcttgatagtaaagatatataaatatcttcaatctatcaaagagaaaactgaggcatacagagctaagtaa

SEQ ID NO: 45487 - DNA, 2481 bp, Homo sapiens
tctttaactctttctgagctgccaactctgattgttctttktttgtttgtttttgtttgtttgttttttgagatggagtctctgtcacccaggctggagtgcagtggctcactcggctcactgcaagctccgcctcccgtgttcacgccattctcctgcctcggcctaccgagtagctggggctacaggctcccgccaccacgcccagctaattttttgtattttttttttttagtagagacggggtttcaccgtgttagccaggattgtctcgatctcctgacctcgtgatccgcccgcctcggcctcccaaagtgctgggattacaggcgtgagccaccgtgcccggcctctgttctttctatttatttttgtacgtagacaggtgaatgatttccatgtactgtatctctcccactcatctccacttgttcctgaagttatcattgcctcgcctatgtcccttggaatatttggggaactatggccaactagttatctgtatagctgtatctatgggttctttttttctccaataactgctgaaagccttgctgttctcagacatgctaatccggaagtgctgaacaatcatcaccagaatgggcgtcaacaaacgaatcttgtgacttgctatacagtccagcagtctcagccctaaagtcaggtaattctgaacattgtgttttgcccagttcccagaattactcaatagtgttatgttccagtcacctcctctagaagctagattaagaaaataacctttattgcgttccactttccctttcctattacatttcctttcctacatttattgcatacactattccaaataaagtttctactcaaagtattctctgagtgtgctgccgagagaaaccagactaaattccgctgaaatatccagcttcacttacataaatttgcttttgaaaagttaggtatcctgccaaaagaacgtctctctttgcaggactttccatcccctagtatccattgcaggaagatgccctcttcctcccctgcaatttactagtgcccttggtaagagcaagtgatgacttcaatagctaagtcaacttttaaaccttagtcaaaagccagggaaaagaaactaatgttcacttaacatataaacagtgaagtcttttccctacctaaaaatgtataactaaaatgttgcagaacaaaataacagtatacgttctagtatccccaagggaaaaatttattttgatctcactgcttttagaaaatgcattctttgagcggaaagaaaattgctcacatcaggctgcaaattattcttttaacagagagagagggctccctgagaaaaaacaaaagacgttactgacctggtaaaatctcattgtaaacatgctaataacaaacctactagctatagtggtttcttatatatagtgtgttttgcttgcaaaatccttatcaatggaatgattttagcaggatgtattagattgtctaaaattgttagtggtaaaatcaaataaaaaaataaaactaaggctgggcatagtggctcacgcctgtaatctcagctcttttggaggccaaggcaggtggatcacctgaggtcaggagttcaaggccagcctggccaacatggagaaaccctgtctctactaaaaatacaaaattagtcgggcatggtggcactcacctgtaacccctgctacttgggaggctgaggcattagagtctcttgaacttgatgagctgagatcgcaccattgcactccagcctgggtgacaagagcaaaacacactatataaaaaaaaagcataaaactagaatctgtgggtttatggaggctggcttcctggaaaaatgtcacataagctatgtgtaaccataaccatgtaaccatctgagtataaaatggagatgtgtcataaccaaaacatctccttttgtgtaaacggtgcagccacaaacaccattaagagacctcatatgtttatctgtttgtctgggccagagtgtgtcctaaggggaaagtaagaatgagtgggtgcttttgcaggcctgggttttccactgttttgtctgcatctcacaattattgtataactgaaattatgagtaaagcatgatactgggtgaaatctctgaggatgcttgtgatactgatttgacaatccaatcctttatgttaccttcttgaagaactggttaagttttgtccacatagataatgagaaatatacatacaattacatgtatagaagcaaacactccttgcctttcatcttatagcccaagttatcattgcccctctcttatatctaggaacctttgttttacttaaacagacttttgcatctgtaggccttgggacttcttttccccctagatctgctcaaaactttgccaccctcataccaatggatctcaggacttgatatataaatatcccaaattattttgcttatcttatatgcaggggctatttgggg

SEQ ID NO: 45488 - DNA, 560 bp, Homo sapiens
gctggacctgtggatacccaaaagcattgcctcctgttggtgagcactactactgcatcccaggcaagtctacaaggttgactcatctggtcctcctagttgcctatggatgagtgggggactgcggttatgcctgcttcacagaagagggtttccaggcatacttgctcagggccacaaggacagcaaatgacaaagctgggtttctaacccacggtgtctgatcctagagtcccaggtcttaaccacaatgccacactgccctgcctagagagtgacttttacctgggtaataaggatttatcttccacactgtgacattttgaaagtgaggaggccactaytgataataacacccaacccacagatgtaaaacagcacagtccttggtaagccaggacatctggccactctgttttttatccttgagtgctcagtgtgtcatgggtcctggccagagtgttagtcaggggaagaattgaagtggtgggcaactaaggaagcttcaagggcaggggaggtgcagcacagaggagaaggcctcacgaagcttacaaatt

SEQ ID NO: 45489 - DNA, 507 bp, Homo sapiens
tgcatgaacattcattaattactcaacaattcttataatgcctactatatgccaggtaatgttccagggatatatcaatgaataaaatcctagagatatataatgctgtacatatatacattcaaaatagtctgaagagtataaataactatgaaattgaaaggattagccaggtgtgatggcatgtgcctataaccccagctaccrgggagactgaggtgggaggattgcttcagcccagagttgcaggtggaagtgagctatgatcgcaccactgcactccagcctgagtgacagaacagagactttgtttcttaaaaaaaaaagtaaaaaaagagaaatgaaacaaagtttgcataattttcaatcatcaaaaaaaccaatttggctactcagtgattaacttgattttatgttacaaatttgtaatctttctcaattccatctaaaatccttaaggttgaaaacactccagtagccaacggaataacactatcagtcttgatc

SEQ ID NO: 45490 - DNA, 562 bp, Homo sapiens
cccacccccaccccccagctctgtgccagcgtctctgtgccatttgtagagggcagcggtgctgaccttttctcatgctagtgtaaaatttgaggggattcatgggccctgaagtgctgcagagccctaagggtgagccttacagttgcaaagctggctcctgggcctcacagctcagagaggatggggccattgagatgaaggctcagagaggtcaggggcttgyccaaggtcacacagtgagaatgggtgggtcggaggcccagcttgtgtgtcctggcacactgccctgctgtttagaactgccttcagctgagcagtggtcttgtggacagggctccctgacccccacctgcctgggctatggactggcttcagaggtcccagtggccagcgtggccaagggctgaggagctggctgagctgggaagccaggggcctggatggaggtgcgccagctgaggatgctgacacatccaaacgtgcctgttctcaccaggggtggtcaaagttgtcttcatcctctacaacaacctgggcctcttcctgtccacggagaatg

SEQ ID NO: 45491 - DNA, 523 bp, Homo sapiens
gagaaggaagcataaccagttctaaactctcctctcctctgctgaatcatgcccatgcttcctgagtggcacagaaaggggaacagatgcactttctaaaccaggggagctctccaaggaggcttcagactgatatgccctgattgcagaggtctggccccagaggtcctactctctcrctaacctcaccaacctgtctctgtctcgtcccttccctcttctccctcttaaagcataaataaaagatgctgtggttgagaaaagaacagggtctggagcccagcagactggctggagtcctagctgcaatgcttcaaagccctgggagcctcaatttcgtcacctgttggtgggacaggtgccctccctgaagggtggttaagcagctcagagaccttgcacctggggcattgaggcagagtctggcatatgggaggggctcaggcatggctataaccaggcacctcaggccagcaaggctcaacttctcctgagggaagggaggaaatgaggctgagggatg

SEQ ID NO: 45492 - DNA, 607 bp, Homo sapiens
gtgaacacacaattagatacacaaaatttcttgaactgatggcaataaatgcctaaaaccctgactcccagaggtatgcatctgggagcaagtctttgtcacggaggagcaaccttacattaagaaacaacagaattcacaacttttttagttgaatttatgttcattcttttcctttcttctaagtttaggaggtcatttttggcaacaatcagatgtttgtatcatcaagaaaaggattacaaactccttctcaatttttaggtcatccaagcaaaattagctttaaaaaagtattctgtctgccatgtttcccattgtctgcagattttttttgccagcagatgaatctacaagacattgtcactctgaaatcagtctgcagaagcayatcctgaatactggaagactcccatgacaccttggccaaatgaacttgtgatctctcagctgcatccatccactgaaagttttacctcatctaaatatccaaaatatctctcaagccaagccatgaataaactcctccttgtcaagccgttctgagaatattcttttctttctcataaacaaataaataaatgaataaataaggagacagatattt

SEQ ID NO: 45493 - DNA, 543 bp, Homo sapiens
tcaggctggtgatccagaacccaacttgtaagcttctgcctctactgcattctgagttgggggaagtagatgatcttggaagagatttttaaatcggacagggagggttgatttctataaatattggtggcaacccttcccttgatgctgagatttacacacyataatgccaggggcttgatgaattaatagggttgacttatgtgagtcagacctgttcttatcttctctgtgtgactcctgccccaaaggggaagttagagaagacagaaaagcagaagacaacaatactgaccatctgacccacccccaccgagcacagccagggtcagggttgcccaattccaggtctctcaccaactaaccttctaattttgttgatttccaaatcccaaaagccccacccatgcaggattgtggggagaagagaagcatgtcatccctgctttttaattccttttttcatcttcttatcacaagttccttggtaattttccaatttcaaaggaaatatttggaaggatatctgaggactgaatgagt

SEQ ID NO: 45494 - DNA, 1784 bp, Homo sapiens
cattaaaagttatttctggtccgacccgtggctcactgcctataatcctagcactytgggaggcaaagatgggagaactgcttgagcccaggagtttgagaccagccagggaaacatagtgagacctcatctcaatttattattatttttaaagcttatttctgaaaacatatacacatacttctaaactagtccctagaccatcatgtcttgacagaaatactgtggaagggggttaaggaaaagaactcagatgtacactcaagacacaggatggagagaaggaaaaatgtctttttgctggttaactagctcaaatgctccaaatcaaatatacatgctaaatttaaaaaagagaaagaaaagaaaaatcaggtactctgaaatgtctttcatccacattcattttccttagaactacatcaaatctttaaaaagttttatgagattcataaattgtaaaccaaggacagtgactggccctagaaagtggaggaggcaagaagggaatggggctggggatggacaaagcaggatagtgcctatctgcgacatttaaagatgaaaaatttttaagaagtaacatgtatatttaaacttaagaatatatttatgtactaactgaataggaaaaaaaaaccaatgaaggcctattaaataaattatggcacattccaatggaattttttttttttatggagtttcgctcgttgcccaggctggagttcagtggcgagatctcggctcactgcaacctctgcctccggggtgccagcgattctcctgcctccatttcccaaatggctgggattacaggtgtgtaccaccacgcttggctaattttgtatttttagtagagacagggtttcatcatgttggtcagactggtctcaaactcctgacctcaagtgatccacctgccgtggcctctcaaagtgctgggatcactcatgagccaccgcacccagctcccaatagaatgttaaaaaaatttagccaagcacagtggctcatgcctatataatcccagcacttgtggggggccaagacgggacgatcacataagtcaaggagtccgagaccaacatgggcaatatagtgagattcccaactctattaaaaacaaaaaaattcaggtaccaagcgatatgtatcacatactacctttattagaaaaggagagtcctgtgttgaaatagaaatatataatttcatattccctttacaaaattcaaaagatgtctacagaaacagcaggatacagaagaacctactagagattagggttacatagaagcaatgtagtttcttcactgtatatgcacacactcacactatgtgtatgcgctatcatttttttttcctcaaagagacaagattttacaatgttgcccaggttggtcttgaactggactcaagcaatccacccctctcagtctcccaaaatgctgggattacaggcatgtgccaccctgcctggcctatacaaactttttttttttttttgagatggagtcttcctctatctcccaggctggagtgcagtggtgtgatctcagctcactgcagcctccatctcctgggttcaaataatcctcctgcctcagcctcccaagtagctaggattacagccgtgtgccaccacgcccagctaattttttttatttttagtagagacagggtttcaccatgttggccaggctggtctcaaactcatgacctcaagtgatctgccagtcttggcctcccaaactgctgggattacaggcgtaagccaccacgcc

SEQ ID NO: 45495 - DNA, 1784 bp, Homo sapiens
cattaaaagttatttctggtccgacccgtggctcactgcctataatcctagcactctgggaggcaaagatgggagaactgcttgagcccaggagtttgagaccagccagggaaacatagtgagacctcatctcaatttattattatttttaaagcttatttctgaaaacatatacacatacttctaaactagtccctagaccatcatgtcttgacagaaatactgtggaagggggttaaggaaaagaactcagatgtacactcaagacacaggatgragagaaggaaaaatgtctttttgctggttaactagctcaaatgctccaaatcaaatatacatgctaaatttaaaaaagagaaagaaaagaaaaatcaggtactctgaaatgtctttcatccacattcattttccttagaactacatcaaatctttaaaaagttttatgagattcataaattgtaaaccaaggacagtgactggccctagaaagtggaggaggcaagaagggaatggggctggggatggacaaagcaggatagtgcctatctgcgacatttaaagatgaaaaatttttaagaagtaacatgtatatttaaacttaagaatatatttatgtactaactgaataggaaaaaaaaaccaatgaaggcctattaaataaattatggcacattccaatggaattttttttttttatggagtttcgctcgttgcccaggctggagttcagtggcgagatctcggctcactgcaacctctgcctccggggtgccagcgattctcctgcctccatttcccaaatggctgggattacaggtgtgtaccaccacgcttggctaattttgtatttttagtagagacagggtttcatcatgttggtcagactggtctcaaactcctgacctcaagtgatccacctgccgtggcctctcaaagtgctgggatcactcatgagccaccgcacccagctcccaatagaatgttaaaaaaatttagccaagcacagtggctcatgcctatataatcccagcacttgtggggggccaagacgggacgatcacataagtcaaggagtccgagaccaacatgggcaatatagtgagattcccaactctattaaaaacaaaaaaattcaggtaccaagcgatatgtatcacatactacctttattagaaaaggagagtcctgtgttgaaatagaaatatataatttcatattccctttacaaaattcaaaagatgtctacagaaacagcaggatacagaagaacctactagagattagggttacatagaagcaatgtagtttcttcactgtatatgcacacactcacactatgtgtatgcgctatcatttttttttcctcaaagagacaagattttacaatgttgcccaggttggtcttgaactggactcaagcaatccacccctctcagtctcccaaaatgctgggattacaggcatgtgccaccctgcctggcctatacaaactttttttttttttttgagatggagtcttcctctatctcccaggctggagtgcagtggtgtgatctcagctcactgcagcctccatctcctgggttcaaataatcctcctgcctcagcctcccaagtagctaggattacagccgtgtgccaccacgcccagctaattttttttatttttagtagagacagggtttcaccatgttggccaggctggtctcaaactcatgacctcaagtgatctgccagtcttggcctcccaaactgctgggattacaggcgtaagccaccacgcc

SEQ ID NO: 45496 - DNA, 529 bp, Homo sapiens
  misc_feature (1)...(529): n = A,T,C or G
gaagtcaacaacttctaaggtattatggcaaagtaaaaccatttgacttttgtttcttttcctcagtatctgcagggtattggtttcagggaccattttcctccatggatacccaaatccacagatgctcaagtcctttatataaaatggtatagtatgtgcatagtatgtgcaacccacacatrtcatcctgtatactttaaatcatctctagatcacttagaatactgaatgcaacataaatgctatgtaaatattaatacttgtcatactgtattggtttttatttgtattattatttattggtttatgttggtnttttccaaatattttgatctgcagttggttgaattgcataaatggatatgaagggtgaaccgtacatacaatttgcttcatgaaaaagagactacaactaatggaattgaaaaatatttatgttaagaagttattcccaaaatgatggaagacttaaattaagggacaagaaatttcagaaaatttaatattaaaaaaagaaagtgaggga

SEQ ID NO: 45497 - DNA, 572 bp, Homo sapiens
acaagagtatgtacatttcctttcctgtcctacttcacatcctctctccaattgtggaatcccatctttcataaaaagtaggtgagaagacataacttcaccaggtcaggatgagctgtatatcatagtggtggtttaacaagaaaccacatcagtgagaacctctggtytatttttgccccaaccagcagagtggaggaaaaagcagccaacctggtaccactggtacctgctcacccaacccagactgtggcattacacttgatcttagccaaaagaccgagaagcgatagactatggcatttattgaggacttactaatttcttcttctctctccattcctacctcgatgtcactgattttgtttttcttttcccttcttctacgtatgtttactgaccacctactccatgctaggcacaatgagagacactggaaatctaaaagtgaataggacactatctgtgcctcaaagagacttccaattttgagcattctacagaatcaaacactgtcaggcacaagcctcagtcctgaaaaaaattactagcaccatttacctttgttgaca

SEQ ID NO: 45498 - DNA, 617 bp, Homo sapiens
gcgtggaggagagaaaccattcttaatgggcagcttgttaacatccccaggacatgactggttcggatagacccacttccagcaaagtgcagctgcctgtgaggctctgctccagccccaccctcctgtcctgcctctgcgatgacatatggggcargtactatccctctctggaccttgcgaactgaccctgggagcagccacaagaatgccgccctgaacccttgttcctgagctcaggacatttcctatgcccaatatgacagggaggcagagagcccttgagagagaaggaaacaagacggtggtggtgcatattctggcaggccctggggaaggggcttcacacatattttttcattgagccttcacagcagggccattggtgggttttatatccttaagaaaatgaagctccaagaggtgaaatagctggtgcaaggtcacaaaggtaggaggagatggacccccagtctggaaccagggctttctggctctgaagccagagttaggattagggacctcacttgtaggccagccttctcctggctggccctgcccaccatttggtccagaatacaaagcagcttctgaatctggccacggttggggcaggg

SEQ ID NO: 45499 - DNA, 598 bp, Homo sapiens
acccctcttccatctgagctcagcttttccttccctccttcctttttttctcgctctctcttcctttcttcatgttttcttctccttacattcatttctttcttccttctcccrccccttcaatcctttcctttctttttctatatcttcttgcgtttttttttatgccttatattctttgcagtccatcaactgttttcaaccctcgagctaggaaccacagcttaatcacaacttaaagctatcactttgtacccctcattcaacaacttcccatgccctccctccctccccctgctgcacgacagaacaactctagtcagtactatactgtatatttcaagatgactaaaagagtacatttcaaacgtctcgccataaaaaatgatcggtaaacgagatgatggatatgttaattagctcaatttaatcatttcacattgttatatatcaaaatatcacattgtaccccataaacatataaaattatgatttgtcaataaaaataatactaatttaaaaaacgcaaaacacaaaagctctcacttgacacattcctagccccagtgcaaagacttttgctgaggcggaagttctg

SEQ ID NO: 45500 - DNA, 616 bp, Homo sapiens
tttaatcagaaaacttcagtttaaatttcgattaagacagtaatcctgccaccttgagtaaatgatggaacttctcttagaattagtttttcgtgtgtgatatataataaggcaattctgacatacttagttgtaataaggatagaaggtgctatgaggatgaaaaattataaacttcgttcagtaagtatgtgagcgttgtcaagcaatgtcactaaactggctataagatgtgtctctggtataattctagtactgattaattgaagagaaaaaagagcataacaagtccattggcatgcagcacgcatgtgtctaaacttacctatctctagaagtcacacctcgtgtttttaaaatatcgttctactctcaacagaatttttttatccttattaggtttcacgtatttattggtgtgggagaatagaaacaagaaaaccagggtgagaaaagactgagacttcaaaccgaattcagtcatcacttctctatattggccaagcaagacaatggaacaatagattraagtgttatgaatgtaaaagacaatataggaagctgcatgaattattgagactcctgaagtcatcttacatctgtctgcccaaagaaa

SEQ ID NO: 45501 - DNA, 568 bp, Homo sapiens
ctcctccaggatggtttttatacatgtctcatggaaggaccacatcatatttyacagcatgtatctccgtgcatatgtgcatgaccccagagcctctggcaggctggtgaggcccatagtttcttcacaggataactaattcatcctgtgaggacactcccatatcctgacaacaggcaaggttctaggattgctcttctgggccgccatcaaagcacttggattattcgtcctctgatgacttattctatctgtgttactttactgtcattgtcctgtttcattaagctgtgagctccttctgagtaagaacagcacccctcccccccgcttttttttgagaccaagtcttgctctgtcgcccagcctgaagtgcagtggtgcgatctcagctcactgtaacctctgcctcctgggttcaagcgattctcgtgtctcagcctcccaagtacctgggattacagccatgcgttaccatgactggctgacttttgtatttttagtagagacgaggtttcgctatgttagccaggctggtctagaactcctatcgtcaagtgatttgtcc

SEQ ID NO: 45502 - DNA, 603 bp, Homo sapiens
tactatataatgtcatttatgtaaaatccaaaaagaatataaaattgaggttttggctttcagtaatagtggagtagcttgttgaacactactcttacaaataatggtaaaatctggatacaatgtcatatattatatagaaacacacatctatatatcatacatatgatatatgtggggataagaagcgaatgataattttagctgtgcccactgaaagggagacaggcatttgaatttgaatccagccaaattaactccctcttcaaaaactaacaacactcttcaaaggaatacaacaggatccagagtctctataagtattatttacagtttttaaaatayaattttaaaatttaagagacatgagaagaaacacaaaaatgttatccatacacaagataaaacataggcattaaaagctatccccaaaatgtccaagatgttgttatcagcagtcaagtatttgagagcagctattaaaactatagtcatggggtgaagaaaaaaaattctcataatgaatgaatacatgtggaatctcagcagagaaatgcacattattaaaaagaaccaaatagaaagataatgaaattttaaata

SEQ ID NO: 45503 - DNA, 540 bp, Homo sapiens
cacaacttgttttatagggctccaaattcagggagaggttactgtgayacacgctgccaactccatatcctattccagttgatgattcaaagcattaattcaagaagcaaacaattcattctcttatccatttaaaatttattgcctctcctgcagttacctgacaatgtctacaaagaagtacaacagcaatgtttttaaaagcaaaaggttgagaacaacttagttgatcagaaggtggatttttgattaaattataataccaccttaacaacagacttctatacagccatgaggtaggggaaaactgaatagaaatgtgatgtgcacacgattttgaaatgtcattgtgtgtgtttgtatttgtgtgtgtgtatacacagaaaagaaattacacgttattaaaagtggttttctctagacaagaggatttagagggggcttttcacacatagtatataaattttactcttttctggtttggatttttgcaaaagacacatatcatttctgccagcaatcccactactggctattcac

SEQ ID NO: 45504 - DNA, 540 bp, Homo sapiens
cacaacttgttttatagggctccaaattcagggagaggttactgtgatacacgctgccaactccatatcctattccagttgatgattcaaagcattaattcaagaagcaaacaattcattctcttatccatttaaaatttattgcctctcctgcagttacctgacaatgtctacaaagaagtacaacagcaatgtttttaaaagcaaaaggttgagaacaacttagttgatcagaaggtggatttttgattaaattataataccaccttaacaacagacttctatacagccatgaggtaggggaaaactgaatagaaatgtgatgtgcacacgattttgaaatgtcattgtgtgtgtttgtatttgtgtgtgtgtatacacagaaaagaaattacacgttattaaaagtggttttctctagacaagaggatttagagggggcttttcacacmtagtatataaattttactcttttctggtttggatttttgcaaaagacacatatcatttctgccagcaatcccactactggctattcac

SEQ ID NO: 45505 - DNA, 571 bp, Homo sapiens
atattgtataagtcctcaaagtccaaaaaaagataaaaaactayagagcattactcttacccaaaatgactcagaggtacactcttgggtctccattcaaatcaactccacagaatatgcagactccaggtctcctcagaaagctcaatgtatttatgtatctgtgtatttatttagttgacaaattaaaaacgtatatatctgcagagatctcaaacttgaattgaccgtggttcaacatgtgcctgaagcaataggaaaaattaattttccattctgtccaggttgcaaggctttctctgactccagttcgatgggtctgactcacccctgaattcatgtaagaacaaccaaccaattcggcagcgccttacagagggtgccagcacttgcagatatgctttctgatttcattctttccagaaaacatcagttaaattaggtaagtagcattatagcccagtcatccccattattgctgtcattactaatattcctgttacccaaatcataaaacagaggcctagaacagatgagtaagcacacaactaacaaactgcagaaatgaagc

SEQ ID NO: 45506 - DNA, 576 bp, Homo sapiens
aagtggatggatcatttgaggtcaggagttcgataccagcctggccaacatggtaaaacttcatctctaccaaaaacaatacaaaaattagctgggtgtggtggcatgcgcctacagtcccagctacttgaaagactgaggtgggagattcgcttgaacccacgaggcagaggttgcagtgagatgagattgcaccactgcactccagcatgggtgacagagcaagactgtctaaaaaaattaaatttttaaattaaaaaaacagaaaaacacataaataaaacttgaaaaaaargtcctcagcttattctgctctgtagaaactgagatgatgaaagagcttattgagattctaggtggaagaagagggagagagactgatgttaaagggagtgctaacgggaacagaaggaccaaaggagagaatgggcagatcagagggtgaaggatgtcagtcacccacttgcaaagcaaaacgtcaccagaccagccgcttcatacacattgatgaaatttcctcaactgtgtgccattttccaaagcaaaatctcctcacatgcctctttgctctggatt

SEQ ID NO: 45507 - DNA, 598 bp, Homo sapiens
acagcagctgcgctagtccttttgttttccctttgttccttcttggtctggggtctgatcccaaacccagtatgaccagtctacagatacctgcaccagcccattctagacctggctctctttccaggccaggygggagctcccgagaggggtctaggcatccctgaagtccaggcctgtactattaagcagctcatcctggttgctggagctttgaatccctgacctggggttgctgtcagatatggctgctccagtttgaatccctgcagcgccatctgctggccatctcctctcagtacctaggattccccgggacgcccatggctcctgctcagctaggatgtcctgactggcagtgcggcaggctccagaggccaggccaggccttctccagcacccctgatgaagaggtgcccccctctatccaaaacccccccaggacatgcccaggtctccttagctctgaggctgagaagcatgcaaatgcacactgcacaatcttatgtcttgggatccggttttgtcagaggtgtttgaaccagagcaactccatcttccataggggctgggtacaacaaggctgagacctactagg

SEQ ID NO: 45508 - DNA, 558 bp, Homo sapiens
ccccagagcaccctctggccccacagtcaggtggctgaggagaggatggcaggaggagatgtacagtgtggcacctcttatccctccaccttcctgctctggccacactgcctcctttcagtgtcgaacatgccatgttcttccctgcctcgggttctttgcacatgttgttcccgctgcctggaatgcatgctctctatcatcttccctcagctccctcctacccaactttcaggtctcggcccaaacatcgggggtctcctctgaccacacagtagtactgggccctcctttgtactgctagtgttactttcttttgaaacttttaattacagaacttaccacacatatacatagagaggactgcacaatgatgccctcctcatccattaccagcttcacaartcatttaaattctgccttgtactttcccaaccagttgttttggcttgtgtattttaaagcaaagccaagacctcatatcattttacctgcagatactgggccataaagatctgtaaaacataacccaaatatcctatcactgccagcaataat

SEQ ID NO: 45509 - DNA, 594 bp, Homo sapiens
aagtagctgggactacaggcatgcaccaccacacctggctaatttttcgtattttttgtagagatggggtttcaccatgttgcccagacctgtgtcgaattcccgggctcaagcgatccaccaccttctgcctccaaaagtgctgggattacaggcgtgagccactgtgcctggcctactgtaaacattttttgtttgttttttcttttctacttctttatctttttawtttttctgcccttgaaaatcaaaacattttttaaaggactatagcagaatctagagtttctgtaaggtatcatttaccacatataaaatgtaatctaaaattaccatacttaggaagaaccatgaaaacatggccaatattcaagaaaaaaagataatcaattgagataaaacttgcaattacatgcatgttggacaaatgatgatttcttatgtgtgacaacttgtggattcagggacttaaaactttttgtagtcaaagggaattttaggatactgattctagtctaattcattgtttttctcatgtatctaaggtctaactggcacttaccagtttgttagcctcttgcactgatattactc

SEQ ID NO: 45510 - DNA, 546 bp, Homo sapiens
tgcatcttttaaaacaaaatctcaatgatttttttcttctaaatttatggttatatctttcattcctaaacttatccagtttttctggcttctctgtccttttatctgactctctctctctctttccctctctctttctcttgctgtctctctttctctctctctctgtctctctctctctctmtatatatatatacatatagtgtttttacttaaacaaattctaatttgtctctgtgtattttaaaataacaaaattttgtatttatcatttttatgttttgatttttagttctttaatattttaatattttcagcttttaaattaaggaacttatatttctagaaagttttttttatttttttattatttatttatttatttttgaaacagagtttcactcttgttgcctaggatggagtgcaatggcgtgatcacggcccactgcaacctccacctcctgggttcaagcgattctcctgtctcagcctctgaagtagatgggattacaggcatgcatcaccacgcccggctaattttgtatg

SEQ ID NO: 45511 - DNA, 570 bp, Homo sapiens
cagaacatgtggtctgagccacacactttggtctctcattctggattctacttttgttttattactcacaggtgattcagctcacttgtcagtgccaggccttgacctgagtgctggggacacagttgtgagtcagagctagactgtgccctgcaggagctcataacaagamaaaaagagagacatgcccagaaatagccccaggataaggtagatgaacaccatgaggtggcagagggaagaaatggagaacagggtggctgaggctgcttctgtctgagaaggttccttccagaaggaagtagggttgcagcgaggccttacatccaggggtattggggaggaaggcatggcaggcagggataactgtgggcaaaggcctggaagcatcaaggagacattgtgagtcactggatatggctagagtgtggagcagggacaagattggtggcagacacaggtttctcactaaagagactgagcatttattctcccaatgcagacatactttggggaccatcacaggatcctccacagcagtggtgggaaacctggccacccaccagatgg

SEQ ID NO: 45512 - DNA, 541 bp, Homo sapiens
gcatctacattatcagtaatctgagagtgtggtggtgggcttgatttgcagttatgtcttttcaacaactgagcacctattatttctccgattgcatacaaaatattgacatattctcttcagtggaaaaaattgataaaataggaaatctataacattttagatttttctaattatagtgattgattctgcattttctctactctttttttttttttttaacagacagagtcttattctgttgctcaggctggagtgcagtagtgtgatcaaagctcactgtgatctcaaactcttgggctcaagtgatcctgctgcctcagccttctgagtakctagggctacaggtgtacaccaccacagccggttaatttttaaattttttatagagacggagtctgactatgttacccaggctggtctcgaattcctggcctcaagcaatcctcccgactcagcctcccaaagtgctgggattacaggcataaaccaccacgcctgcctctactctttcttttaatttcttacctcttattactac

SEQ ID NO: 45513 - DNA, 622 bp, Homo sapiens
agtgtatgtgctctgctgctatagataggaatgaagattggagattgagacatatggggatagagaaagtgaatgtttgggaaatctaaaattggatataatatagaatcttactggcttctatgtgagaaaatcttctatgtttctgataattctatccttctaagcaccctcacctataaacaggtgggaaaccagaaatagaaataaaaatttaagagatmatttaaatgcagaactgataccttgagcaccagtgaagcaaatttgcaaagaaaccatgaaagaaaggaacagagggagaagaaaatattacaggaaaggcaagagaagggtgagaaaaatagaaagagtagagcaaatactggggataaaaatgtaatgtacatatttttcaaagaatcagagatttacttcaagttccaaaaatatttctgaacatatataaatccaagcttttcattttcaccagtaaaaaatgttttttttttacaaataaaaattattagtaacacagttaaatgaaatggtgaacagatttaggggacaaataaatgatcatgaaatggctaatctttaaacagccagagagctatgatcagagaactaccaaattttaatg

SEQ ID NO: 45514 - DNA, 622 bp, Homo sapiens
agtgtatgtgctctgctgctatagataggaatgaagattggagattgagacatatggggatagagaaagtgaatgtttgggaaatctaaaattggatataatatagaatcttactggcttctatgtgagaaaatcttctatgtttctgataattctatccttctaagcaccctcacctataaacaggtgggaaaccagaaatagaaataaaaatttaagagatcatttaaatgcagaactgataccttgagcaccagtgaagcaaatttgcaaagaaaccatgaaagaaaggaacagagggagaagaaaatattacaggaaaggcaagagaagggtsagaaaaatagaaagagtagagcaaatactggggataaaaatgtaatgtacatatttttcaaagaatcagagatttacttcaagttccaaaaatatttctgaacatatataaatccaagcttttcattttcaccagtaaaaaatgttttttttttacaaataaaaattattagtaacacagttaaatgaaatggtgaacagatttaggggacaaataaatgatcatgaaatggctaatctttaaacagccagagagctatgatcagagaactaccaaattttaatg

SEQ ID NO: 45515 - DNA, 572 bp, Homo sapiens
ggctcccacagctctcctgtcatgcttccgaagtcgtgggcagtgataagttttgactgtgcagccagcatatgtcatgataaattttcaactctctaaataaagaaaatacacactgttcttggatcaagattaggcttggttttccacccacctttgtcctcaaacacatttgtaacaaacataagtaaatacttgacaggtgaatatcaccggtgccattaactgaaataaaatgaaccatgagtagaaagtgttaattcactatttcaatcacatcccattsgcagaaaaaggatcacagattctcaaccctttaaatgtaaccatggagagcagaaaattccgttcctgtgggcaacaagataagtctatgtgatgccattagggactttttaatgagactttctctatattgctatgtgttgtcaaacgtctacgtttatctaaatgatctccttggccagacttaaattcctacattatttctctgctgcccacatgtcaaaatctcctccactcagagaagttgcttttcctgcacacagtttactggaattagggaggttgat

SEQ ID NO: 45516 - DNA, 572 bp, Homo sapiens
ggctcccacagctctcctgtcatgcttccgaagtcgtgggcagtgataagttttgactgtgcagccagcatatgtcatgataaattttcaactctctaaataaagaaaatacacactgttcttggatcaagattaggcttggttttccacccacctttgtcctcaaacacatttgtaacaaacataagtaaatacttgacaggtgaatatcaccggtgccattaactgaaataaaatgaaccatgagtagaaagtgttaattcactatttcaatcacatcccattcgcagaaaaaggatcacagattctcaaccctttaaatgtaaccatggagagcagaaaattccgttcctgtgggcaacaagataagtctatgtgatgccattagggactttttaatgagactttctctatattgctatgtgttgtcaaacgtctaygtttatctaaatgatctccttggccagacttaaattcctacattatttctctgctgcccacatgtcaaaatctcctccactcagagaagttgcttttcctgcacacagtttactggaattagggaggttgat

SEQ ID NO: 45517 - DNA, 793 bp, Homo sapiens
ttttttttttttttttagtcagagtcttactctgttgcccaggctggagtgcagtggcacgatctcggttcactgcaaactccacctcccgggttcaaatgattctcctgcctcagcctcctgagtcactgggattacaggctcccgccaccacgctcggctaatttttgtatttttagtagagacggggtttcaccatgttggtcaggctggtctcgaactcctgacctcatgatctgcccacatctgccttccaaagtgctggtattacaggcatgagccaccgtgcccagccaatccacagagattttaattaattaacaaatcaatgaataactccacaagtgacgattcctgctacctaatgtcagacctatgtgagtcttttgacagtcsagcattgccttcattggagaaatgactctttcccaaatcatgtcaatttgctatcaagctacttccccaacaacaggatgggctgctgacccaggttagctataaataacaatcagggttattagttgcaaacatatgaaccaattctttctaatttagcaaaaatgacaacaaaccttgaatttcttgtgaggtggcacaaattatctgtgagaatgtcacagtcattcatgcaagagaatgcatggccagaaacaaagtctgaagatactgatgaaggtacatggacatttgtggtgtcaaccagtacccttgctgtattcttcatagcacctacttcctccctttgctctattctgaatgaatcttacatggatgagtctgagaggtgaaatgt

SEQ ID NO: 45518 - DNA, 481 bp, Homo sapiens
tcggtcattggtcccgttggtgacagttaggtctggaattcagtttwcccatctcactgtcttgagtagaaggaaaaggcccagtgttctatgtcatttggatgttggtgtcttcccttctgctggtaaggattatctaaacctttggaggaagcactaggggaagggtagtgtcaaaggcaagtagattttatacagtaaaagtactatttgattttttttcttgttttaatatttgtttttttttccccttccgtttgttttatgttgaaaattccccatgatgatacctctacctactcagctactcaagccaaaaaccaaaagccatcaccccatccactagatcaccaactcttaaccactctgctgcctaaatagctctcaggtcctgcttccctttccattctcaccaacactaccttcatgcagcccttgttatctcccactgaaatactgcagtaatctttttattggtctt

SEQ ID NO: 45519 - DNA, 636 bp, Homo sapiens
attaagtattattaaacacccactatwtgctggctgtttctggagacccaagactgctggaatggttaattgaatctgtgggcggggcttgatatctgctagcacagtggttaagagctttggagtcaggcagactgggtctcagctttctcagctgtaaaacggggataagaatagcacctacccggtaagggcttgggagaagaggaaatgaaacgagatattctaggtgagaaacttagcccactcccagcagatggtgctctcacagcaatagcagagatttttgtgactgcagtggattgacatatgtatttgtttatttaatatttatttagtacctgctatgtgctgtgcctctaggagagacgaccaggcggtttgacttgggagggtttgcaagagtctctttcttttcctgcgagtctctcctcagctggggctttgaggtcgagacccttggagtctggaggtgaaagggatttgagaagttgccaagttcagtgcctcccctgagctctgtgcaaaagctcctctttaacttctgctatctcgtcatccagcctctgctttcatcctggagtgggcgtcttcctccctccccaggcagcctgggaggaagacctttcttccttg

SEQ ID NO: 45520 - DNA, 553 bp, Homo sapiens
  misc_feature (1)...(553): n = A,T,C or G
ggaaatggtatttataaaccaaacagctcataagagttattagacgctatagaatttagcagcttttccccattagtcctagaaaaaatgctctctgcttataaggtagcaatattttatgtaaatcaattttatttcatcatggaactttttgggaaacattatttccatcagtataggggtagcttcagttaatattctgtagcaagggagtaaatgtcccrtcaagtagaaattctctagctcagtcgttgttattgaaaagtactcacagttttgccaacacctccataaatgctccacacaaaaggctatgcagtggaggatttacatgagcagatgtaaatgtctttagttttatagtactagaaaggggaaaacatcccccagttagatatagtacccattttcataagacatttagataaaaggggctacaattaccttatatannnnnnnnnnnnnnnnnnnnnnnnnnnnnnnnnnnnnnnnnnnnnnnnnnnnnnnnnnnnnnnnnnnnnnnnnnnnnnnnnnnnnnnnnnnnnnnnnnnnt

SEQ ID NO: 45521 - DNA, 1464 bp, Homo sapiens
tggagataaaaataataactgtacactgcagataagaatatgggtggaaaataactacaaaattatattaacacaaaaattattattccaactgagttcaattgaattggatctctataatattgatataagaattcatatttattgaaaccttgaaacataaagaatcttagcaaaaagcaagggttttattttattttattttattttattttattttattttattttattttattttttgagacacagtcttgctctgttgtccaggctggagtactgtggtgtgatctcggctcactgcaacctccacctcccaggttcaagtgattctcctacctgagtttctcgagtacctgggactacaggcgtgcaccaccatgcccagttaagttatgtattttttagtagaggcggggtttcactatatgttacccaggctggtctcaaaactcctgacctcaggtgatctgcccacctcagcatcccaaagtgctgggattacaggcatgagccatcatacgtagccaagtgttggtttttatagaaagcttaagtgctggtatagcctagaattaatacggtaaacacaaataatactatacctgaaacaatcaatgcataaacagcattaagtggcatccttagacaactaaaaataagattctggatcatatcaacctatgccagcaaagaagcttaatctttcttagaggcagtatggtataccaggaaaaataactactgtgtagagatataaaacagtgacattttcaaacttgggctccacaactttgagcatgttactgaatttttctgaacatcaattaatgcatgcacacgtctaacagtgggaaaaacaatagctgtttaacctgctaatgttggattttttcagtcgcttatgttttaatcttctacatgttaatgtaaaagctgctagaaaaagttaatacacaagaatatctaaaaaaagcataagattctttccagttagaattagaaggctgaaacatcttggagacacctagctagacaagaagttatccagttattggggcaactcaatagcaaaagaatgtgctttatttggtctccttctggaaactagactctgtgggtttgttctcctgttttgcaagaatgaagtagaatactgaatacagaaaatactaaggaaaaawatttaaaactattctgtaactttatccataagggatatagacgtaactgattcacaaaatgtacgaaggttactctaaaccaatgagagctgtaatcaagaaaccatttccaggtatctgcagctgggaagacacaataatctttccaccatgtttatgtaaataaatataatcactatccgtgggaagtgaaaaactgtttgggggaggaagtagactaaattatattttgaagaaacacatgggcatatttttttactgatttattgccactatacaga

SEQ ID NO: 45522 - DNA, 1705 bp, Homo sapiens
agtactcctcccctcccacccctgcaggtcccatctcttatttaatcccaggaaattcactgtataagcaggggtgtggggagggtggctggggcatcccaggcacctggcctagccctccctcctccctcagggccccctcgctgcccagtggcttcaatccggaccaggcttctttaggtgacaggtctgagaggtgtgaggctgtgtttgtgtcatctcccgccctgatgccaggctctgtccctcctgggcacactatgaggaggcctcatagtggagctaccctgagagcaggctccctgcctttgragtcaccactcagagcttggggtgacctgtggaggcagcagcctggagaacaggcgtttcccctcttgccctgatcttccgagttaagctttggcctggctgtgatgtattattagtaataatgcaagcccccttatttattactttttagcagagcccagagctcaacgtattgaactcacatcaccaaatcttctcggccatcgcatgacgatgtttaattcccatttgactaatggagaaaccgagttttagagaggttaagtaacttctgcaaggtcacagagctggtaaataagcaggacacccaggattcccaccctcgactgactccaaaggccatccttttagtagcaggggccccactgtccccctggtcgcccccctgagcggtccacacgccccaccaccagcattacctggaagcttgttagagtcacagaatcccagctccaccctagaatatgaaattggcatccgcactttcatataaagaccctggggactcagggtgcattacagtgacaattctccaggacaagtgctacgttcccggagggtggggggtgttggggtgaatggagggggatgagcatgtagaggctctaaggaacccagggaactgggggcaggtgcagagttcgtctgggccagtttggtccagcttaccagatgtttcacttgctgacctccagggccggatgacacctgtgtctagccacatcccggccttcactctggatattcgagaatgttgactccccacttgagaagttcccctacttccaactccctggaccccctcccctcctgctcgtggaggcagctggctgggtctgatctctaggcatttgtgttagccacattaccagaaggggccctgatccagacacccaagagagggttcttggatcctgcacaagaaaataatctggggcgagtccataaagtgaaagcaagttgattcagaaagtaaaggaaaaaagaatgcccttacccaaatgcggccagcaagggaacaccctctctggctgcagcccctctgaatggctcatgtcattgagccttactttctcattacaagtcccactggcagcatgaatggggggtctggagtcccctatatgtgactgtcagaggtgtttgaacaagagcaactccatcttgaatgggggctggataaactgaggctgagacctactggcgccagttatggttaaggcattgtaagtcacaggatgagacaggaggtcagcacaagatacaggttataaagaccttgctgataaaacaggttgcagtaaagaagctggctaaaagccaccaaaaccaagatggcaatgagagtgacctttggtcatcctcattgttcattatatgctaattataatgc

SEQ ID NO: 45523 - DNA, 1705 bp, Homo sapiens
agtactcctcccctcccacccctgcaggtcccatctcttatttaatcccaggaaattcactgtataagcaggggtgtggggagggtggctggggcatcccaggcacctggcctagccctccctcctccctcagggccccctcgctgcccagtggcttcaatccggaccaggcttctttaggtgacaggtctgagaggtgtgaggctgtgtttgtgtcatctcccgccctgatgccaggctctgtccctcctgggcacactatgaggaggcctcatagtggagctaccctgagagcaggctccctgcctttggagtcaccactcagagcttggggtgacctgtggaggcagcagcctggagaacaggcgtttcccctcttgccctgatcttccgagttaagctttggcctggctgtgatgtattattagtaataatgcaagcccccttatttattactttttagcagagcccagagctcaacgtattgaactcacatcaccaaatcttctcggccatcgcatgacgatgtttaattcccatttgactaatggagaaaccgagttttagagaggttaagtaacttctgcaaggtcacagagctggtaaataagcaggacacccaggattcccaccctcgactgactccaaaggccatccttttagtagcaggggccccactgtccccctggtcgcccccctgagcggtccacacgccccaccaccagcattacctggaagcttgttagagtcacagaatcccagctccaccctagaatatgaaattggcatccgcactttcatataaagaccctggggactcagggtgcattacagtgacaattctccaggacaagtgctacgttcccggagggtggggggtgttggggtgaatggagggggatgagcatgtagaggctctaaggaacccagggaactgggggcaggtgcagagttcgtctgggccagtttggtccagcttaccagatgtttcacttgctgacctccagggccggatgacacctgtgtctagccacatcccggccttcactctggatattcgagaatgttgactccccacttgagaagttcccctacttccaactccctggaccccctcccctcctgctcgtggaggcagctggctgggtctgatctctaggcatttgtgttagccacattaccagaaggggccctgatccagacacccaagagagggttcttggatcctgcacaagaaaataatctggggcgagtccataaagtgaaagcaagttgattcagaaagtaaaggaaaaaagaatgcccttacccaaatgckgccagcaagggaacaccctctctggctgcagcccctctgaatggctcatgtcattgagccttactttctcattacaagtcccactggcagcatgaatggggggtctggagtcccctatatgtgactgtcagaggtgtttgaacaagagcaactccatcttgaatgggggctggataaactgaggctgagacctactggcgccagttatggttaaggcattgtaagtcacaggatgagacaggaggtcagcacaagatacaggttataaagaccttgctgataaaacaggttgcagtaaagaagctggctaaaagccaccaaaaccaagatggcaatgagagtgacctttggtcatcctcattgttcattatatgctaattataatgc

SEQ ID NO: 45524 - DNA, 601 bp, Homo sapiens
catcctgaaattttccagtggcagatataaatacagagctgtcatatttacgctgaattataaaacaactgaaaacaatgaaaactggtatattctgagtgggtggcatgttaaacccacacaattttgtcatgtttacttttatttgtactcgtttgacagcagggagaaagtactctgcttaaatctatttcgataagatagttttaaaactttataactttatgtaaaagcttacataaattccctttgctgttagttgattgaaaatggaattctttagtcacacataggtaattataaaatgaatgtccttccatcaacatatgcttccttgtttggatcaaatatatgtcttcgcatttgtagacattttcccttacttttttgttgaacttgtgaagtgaatgttaagtttatgtattcaattatgtggcgtgttacatacagaagttttctcccaactgcaagactttattttgctgggttaaaacacttggctaacatatgsttgccaaagataaggtgcctatttaaaaactgatgttcaaaaaagctggtcagtgatagtttttttctgtttcattaaagacaatacatg

SEQ ID NO: 45525 - DNA, 519 bp, Homo sapiens
atgccatggctgtatcagtggctgcctcacaggattagtcctggaggccacagcctgccaagggactgtcatgttcaggatgtcacagagaaaagaggcttttatttcattcaagggctgcatttatttttcagtaggcgagcatgtgctttttgccttctaaaaatgtaaattaatataagcttttgtgtttgaataaaaaatgartgaaaagttgaccataaatatttttgagtattttgcaaaactcaccttagtgaagacacagctcaggcatcaccacttccttccagaaatcttccagggtccttcatgctggggtagggagccttccattctgtggtatctccaccatgcagatttgtcacactgagttctgattgcctgtttttcccattgactgtgagctcttagagggaagagactggccagcagtttgcagagccttggacctacagctcaataaacatgggaacttaaaaagaagatgagaatagaaacaaatcatcatcagaggga

SEQ ID NO: 45526 - DNA, 1255 bp, Homo sapiens
tatttgtaattcgaaatcaatattataatctctgggccttccttgagtttccatgcttttatgagcctctttaaaacggtatatattatgggaccagtaaaaaatcagactaattccaaatgtcagctcatttaaaaactagaaaatggagtgacttagagtcaaaattatattttggaaaaaaaaaaccccaccgacaattgaataaatgaatttttatcataactgtgaatttgatctccacacatcaaacctgggggaaacaggtcacagaagtagtaataaagtgattttttattactcagcatctaggcacaatttcagcaactctagctacacatctttcctgctacccytgcccctcaaccaagttattcccaaagaatgcagggagatggcagccttggtgaagcctgagcataacctgtctccacagctttgtacatgcctcctgtgatctcccaccttccccactcagatagcactgggttgtgctgggtggctttggtgctctgctgctctggatggcaatgttgagctgacaggttgccccctataaaatggggataaaatactattttctatttgtgttgtgctctgtaacatgggccataggggatggcatctttctgcttttacagcctcacagaggtgttagtgaaacacctcttctttgtttttgtatctcaacctctctcccccactctaggtagagaactgcgggaagaaggtacaggggaaagctaagggtgggggcagcaagaagggggatccacaggcagtgtgagccctgcactcctcatcataccaaaatcaccccttcactcacatttgtgcacacacaggaatcctttcttcttttaggagttttctcccataaatttcttggacactcatgcaaatgaacatcccaatgggctccttttattggtccacagtgttccagaggtacctggacacgcctgaattttactggtaagacagccccagctatccttgagaccccagctataacggtacttggttgacaaagaaacattgccctaaggaacacaggaagggaaagcaacattttagggcaaagtattttacagcacagaaatagcaagctcctattgattactggtccatagggaccaatgtcaccaacagaatgaagaaaataaactctggtgatgtgtgtattatttagcattcttatattggcaaagtcttttcctcagggaagaagtttgttacatggatcaatgccaac

SEQ ID NO: 45527 - DNA, 394 bp, Homo sapiens
attctgcttgaaggacagatgaagcctcttatataaccaaaacattgagtagtttaataatatggttacattttttttatttttccgttcacaaataacttccaagaagtatataatgccaaagtaaggtcacagcatctgttgtacatggctttcgcccatgtctagttcaggaattttccatgcccaattaagaaattctatcctttttcagattctgcttrccacaggatggctttagtcactttctataaaactaacttagaatagaggtgtctaatttataatctcatgattctgtttcttcaatgcctaatttcatcatagttactaatatggataaatgaaagtaatgctacaataaacatacatggtgggtattacaggtataaat

SEQ ID NO: 45528 - DNA, 600 bp, Homo sapiens
gtgagatgccaccttgcaggggtggtgaagccagggtggcgaggacaggtgggcggggctgctgtgagagccacacaggtgtgcacctggggtctgcctcggcccctccttccactcagtctccggcctgtcttctcgaccgaggtgtccacctgtccaccgggagcttgtccagagcccggctgtccggcgctgtcagtgcccagtgcccagagcctgctgcccccagactcctggctgccagccccccaacccacacctgtgtggcatgcagcaggcggcggggcgcctcacctgtgtagccaatcttctcgaagctgagcaggctgaagatgctgttgtacagctgcatctccttgcggtggctctggtccatyccatccaggatctccatcagctcactgcctgtcttggtcgggtgggcgcacgcagcctcgtgcaccgtcagctcatggaaggggccgtgccatgggcagccgatgcgtttgtacttgcactgggttaccctgggggaggcaggtacattactcacagactgagccccgaacaggaggctgcaacaagctgtcctcccatatggcttccatccagctaagaacc

SEQ ID NO: 45529 - DNA, 599 bp, Homo sapiens
cgcctgtaatcccagcactttgggaggctaaggtgggcggatcacctgaggtcaggagttcgagaccagcctggccaacatggtgaaaccctgtctctactaaaaatacaaaaattagccggacatggtggcacgcacctgtaatcccagctacttgggaggctgaggcagaatcacttgaacccrggaggcagaggttgcagtgagccaagatcacgccactgcacttcagcctgggtgacagagtgagactccgtctcaaaaacaaaaaacaaaaaacaaaaaaaaacaaaacaaaaaccacttttcccttgccttgaggcaatggcatataaatctgctagctagttaaactagctacctagtagcaaagaacacacagcctcttatcattctgggagggcagtgaaaagggaggagatagagaggcagcctgggggagcccgaggcgtcaggatagcgcagggcttcctcttctctaacaggcacgcagatcagtagctacagataccccttggctctggcttcctgccctgtgacatttggacccaggggccggggctgggctgctgtaggtgtgcaaccaggcaggtttgggg

SEQ ID NO: 45530 - DNA, 1944 bp, Homo sapiens
gcattagaaattgatgaagaaataagactacaatttgattaattataggccagaggttttaattatgcctttcagttaatcaaagtaatttcctctgttataacagaagtaatccttttacagactttttttttttttttttttttttgagatggagtctctcactctgttgcccaggctggagtgcaatggcacgatctcagctttacaaaaacaaaaaggctttataatcctaggcttacttttactcaccattgtttactaattgaagtttagaaatatttaatgcaagtagtggctatggtttattttattattattattatttttttgagacagggtctcactctgtcacccaggctggagtgcagtggtgcaaccttggcttactgcaacctctgcctcccatgttcaagtgattctcctgcctcagcctccctagtggctgcgactacaggtgcctgccatggtgcccagctaatttttgtattttttgtagagatggggtttcaccattttggccacgctggtcttgaactcctgacctcaggtgatccgcctgccttggcctcccaaagtgctggaattacaggtgtgagccaccgtgctcggtccttttacagacataatttttatgcacagtcaataatcctacattttatagagttatatctaattataaatagcagagcattacattgaactaaccccagtattctcataatgactaaaggtcagtaaccaagccaagcccaggaatgtggctgggctccaagaataatctagaatgatccaggttttgtccatgctccattctgcccttcaatttcattgttttctttctctgaggactagctttctctgctcccagtcaacatacaaaacatggagaacagtagctccctgattctatgtgttagaattcagtcattcaggaagaaactaaacgtactctttctgttccaattttaaaattcctaggcaaaaaaaatggctattttcatcagttgtccattcttcgatgagtcaactctggtcaaggagtgggtacacgttggagaatagggtttgacccaacctgtcaactggagacaggagccatggacatgtagggctcaatggctgccctggatctacggccattatgatgaggatgtgatgtgcacctatacaccaacacaccagagactgtcctaaagagtgataacttaattcagtcgctttaattttttaaaaaaatcaattttaaaaagtcaatttgcttagaagaaaactacaatcataactattacttgggtctgtttaaacaattttatttttaaaaactttgtgattttggtgatgcataaacacactgtggttatttttatttgcctattgggaattctgatgaaaaattaggtgagcaaagggacatattttttaaactataagacagctgttcttattcagtcactgagtgataaggagggaagtttaaggcttagaattcttggttgttgtagaagatacttgagttgctgactttaccctttcatgtttgctttcctgccctgcagaaacaagaaagtgaaatccttcttatatccctgaatccccagaagccctaggtagtcctgttacttggttctggtgaatgggatataagtgaaaaactattggtgcttccccttctgttcttcctgcctgaaatcctggagggatacctgaggtgcatcagccacccctaaggatagaaaaagaaggaaaagaagagaaagtgagaaagcatggactgcctctgcttggagtcctcttgtatgaggcagacaaattccttaatataagccactctgtggggtttttgtgaaactcatagccgagcacaatacactggatatagctatcccagcatcaggaaagtggcaagaattactgaaagttsgtacttaaaggtagccaatt

SEQ ID NO: 45531 - DNA, 596 bp, Homo sapiens
aggcttgcatttgaatttgtctttttaggcagtggttttatagattaatcattgaaaatgactcttgcttatctatgacatgtgctctcaaaatattttgtatttgaacactttcatggatgctatttagtttgtatttttctttttttctgagaaaagaaacatatgcccttcctatgacatttctatgaattttcagctgctaaatcatactgttgaatggaataacttttttctaaatatttttctaagcgtgctttaacttcccttctctttggatcaattcctggcttgttacatagcattgatgccaagtacttattttattttattctaagttagtttctcyatgttttggattctatgttttctttcattctctctgggaatgttttattttctttgagtatactatattttcaagtaattttaaaagcttttgtgttttctgcatgcctaaaaattttatttcactcattcctgactgatagtttgaatagatatagaattctggtttaaactaacgttctttcataactgttaagacatgacttcattattttatagcagttaattttccgataaatctgatgcca

SEQ ID NO: 45532 - DNA, 609 bp, Homo sapiens
ttcccttataataccttggttaaaatwttaagtatctttccaagctgcagctgctctttggactattttaacttataaccacatcatgtctttaatcttgtaaattttatttactgtcttaaaatattcttaacattgaaacactaaaataatcattacaaaattgaaaacctgtcttaataatgattagaattacaaaaaggtctacaaccttttatgttttcttttagtgtaggataattagatggttatacactgataacctctcataacctctggtttttaaatgttaagcaatgggttcttaatctagggaaggatctatgaatttgctatcaggtgtctgtgaacataaaattttgtgttcactgtatttttctgcagacagtagtaatagtttttactattctcagagacagaggttggtgaactaaaaaatcaagaattactatcttaaagagcggtaattggtacctagttaagagagattttggaagataaaaatttaagagtttcatttgcaatgcattttaaatttatgtatttatttccttttagaaagtaatatatactgcaactcagcaattgggtttacaaaactggtcatct

SEQ ID NO: 45533 - DNA, 1845 bp, Homo sapiens
atcagtttctcctgagttgtacggatgaaaacattttattacacaaagtggaaggttggagatgtttctattgctgtactgttttatccccagtgaggtactaatttgtctaaaaataacaatcaccaaaacaacagcacggttattatactgacagattcacgccactcagcctcgatctatggcctctgtagtcctaggtaaacttgcttttagtgccctcacactgatcatttgcctgtctcagttgtcgagatggggttcaagtttattgtacattatctgctaaacaacaactcagttacttgttaggtggggaaactcaggctctcacgaattgcagaaaggacagtgcaattgggaatgtgtagcaaaaattacaacatacaattaaattgcttattttccattctaagaagtttggttttattatccaatatcataatcttgcatttctgtcttcctcagatatctgtcattagggtgaaaggaaaagttaaattcttacagattcactcatgactcttccatttgtagaamctcatgacagagggacaaattttaacatagaatatgaggttttaatttaagagaattaagaagaaaaatctgccatatatactttctcttactatgaacatttattctcatgtcctcctttttcataatctgtcattatgttgaatgtatgccactaaatgacacaccaagaactgttaaaaaatgacagcacgggaataaataaattatattccataatatgaagctattaaagtatgttagaaaatggtgttcaactaaatataagtgcataatatattctgggcaatttataacactgcaataggtatactaagcataagtgtccataaatttcttcagttagaaatgtaaaatattaaaaatacttattgtaaaatgataaattataatttttgtattcacgtagccattacgaacatttgggttttttcttagttggataggttaaacataggaatggaaaaagtagaagtataaatggaaagattcaatcatttaaacaatttatgaaatgactactaaagggttagtttacttaaattgttataagatttatataatgttgagggaatctgaataaaacctgcaatgaacaatgcaaacagcaaaacatttattttttgctgaaagagagattttaatgcaaagatttatgacagaggtcagcaatggaggaattgagtttgtccaggaaccctatgcttcatgactctacaaataagggaagtgtgtgtggcaaagtgtttataagtaaagatgtaacatttattttaagtgcagtgacaattgctactcaagcctttgggtaaaaaacatagtcatttactcatttataaaatcatacataaaagtaaaatgcagtttaaaatcattttggaaaaaaatacattatactaaggttatgattcataatttaaaaattcaacaaacaaatttattgcagatacacatatacacacatattacctcattttaaatctcaaaatagtctgatttaccttggaaagcattaatgtcatgcaaaattactttcaaagggataatttattgagtaagctttaatttttgcatttagatatttaggagaccttatgctccccagatgacaattgcagggagaggtttctggtaatggaggtgaccacttatatcacttctagttgaaatctatggctccacctcattactccatggttaattcggccatttctctttagttctaattactgattcctaagtaatattgttgcacttctggcagtcagttactttccacttgtttcccagtgctaaatatgttta

SEQ ID NO: 45534 - DNA, 1845 bp, Homo sapiens
atcagtttctcctgagttgtacggatgaaaacattttattacacaaagtggaaggttggagatgtttctattgctgtactgttttatccccagtgaggtactaatttgtctaaaaataacaatcaccaaaacaacagcacggttattatactgacagattcacgccactcagcctcgatctatggcctctgtagtcctaggtaaacttgcttttagtgccctcacactgatcatttgcctgtctcagttgtcgagatggggttcaagtttattgtacattatctgctaaacaacaactcagttacttgttaggtggggaaactcaggctctcacgaattgcagaaaggacagtgcaattgggaatgtgtagcaaaaattacaacatacaattaaattgcttattttccattctaagaagtttggttttattatccaatatcataatcttgcatttctgtcttcctcagatatctgtcattagggtgaaaggaaaagttaaattcttacagattcactcatgactcttccatttgtagaacctcatgacagagggacaaattttaacatagaatatgaggttttaatttaagagaattaagaagaaaaatctgccatatatactttctcttactatgaacatttattctcatgtcctcctttttcataatctgtcattatgttgaatgtatgccactaaatgacacaccaagaactgttaaaaaatgacagcacgggaataaataaattatattccataatatgaagctattaaagtatgttagaaaatggtgttcaactaaatataagtgcataatatattctgggcaatttataacactgcaataggtatactaagcataagtgtccataaatttcttcagttagaaatgtaaaatattaaaaatacttattgtaaaatgataaattataatttttgtattcacgtagccattacgaacatttgggttttttcttagttggataggttaaacataggaatggaaaaagtagaagtataaatggaaagattcaatcatttaaacaatttatgaaatgactactaaagggttagtttacttaaattgttataagatttatataatgttgagggaatctgaataaaacctgcaatgaacaatgcaaacagcaaaacatttattttttgctgaaagagagattttaatgcaaagatttatgacagaggtcagcaatggaggaattgagtttgtccaggaaccctatgcttcatgactctacaaataagggaagtgtgtgtggcaaagtgtttataagtaaagatgtaacatttattttaagtgcagtgacaattgctactcaagcctttgggtaaaaaacatagtcatttactcatttataaaatcatacataaaagtaaaaygcagtttaaaatcattttggaaaaaaatacattatactaaggttatgattcataatttaaaaattcaacaaacaaatttattgcagatacacatatacacacatattacctcattttaaatctcaaaatagtctgatttaccttggaaagcattaatgtcatgcaaaattactttcaaagggataatttattgagtaagctttaatttttgcatttagatatttaggagaccttatgctccccagatgacaattgcagggagaggtttctggtaatggaggtgaccacttatatcacttctagttgaaatctatggctccacctcattactccatggttaattcggccatttctctttagttctaattactgattcctaagtaatattgttgcacttctggcagtcagttactttccacttgtttcccagtgctaaatatgttta

SEQ ID NO: 45535 - DNA, 554 bp, Homo sapiens
ccccaaccccggcccctgcccaggctccctctctcctattttcctttggtttgtggcrtaggtctggaggaagtgacacctggttctactgcagcaggggcaggacagggatcaacttacatggtagagactggcccgcatcatctggaactgatcaattagcttcttatgcagaggccgcatttctgggtgcacaaacttctcatgaactgctagcccaactccaaggacatgaacctatcagagtcacaaacaaggccactctgtgaaccatgagtagcccctgagaactgctcatcttgtagtgcatggcttttctcacctggctgctggttcccaagccctccaagacatacctgctcctgcataagctccttgagctgggtgatcttctcagcatctcctgggtgcttgttgatgtaatctttatcaaagaaggcctgtgaaaggaaaggccaagtcaggaagactcttcccaggactactacttaagtggggcccaggagacttgagtccactaatgccacctaaaaagcagccaggctgtctcctca

SEQ ID NO: 45536 - DNA, 588 bp, Homo sapiens
agaaacctacaaacatgtcaaaagatgtgaatatwttttttaacagattcaaaatgagcaagagcagcccaaaatgctccttagcatgtattatttagtgcctaatacagagcctgtggtgcctagaacagtgctttgtaattgaggcacctcgataaatttgaatgaactaaataacaaatattttgtgaaccgattagtaaattagcagttcttttcttgcggaacatagtatttcatatattagaaatgcagggcagcctacagaaacaaggcatttaggtccgacagaaatgagtgatatttgcatgtggaggatgagtagtaaaacaaatttaatcaaattattctgtgaatctggcactacttatccacatctgtagacaattggaaaaataaagtgccttcgaccaaacagataacacaataccatctcttaatcatattatcataatgatccctagatattccataatttagcatataaattataaaggaaatatgtctggagtcaggaaatctgcttgataatattgactcattgtgtgacctcaaaactatcactgattcttttgaattctatagtca

SEQ ID NO: 45537 - DNA, 2662 bp, Homo sapiens
tgagtactgcagaacccaggaattatttggacatagggtctttacatgggagttaaaatgaggttgttgggaagggaccctaatccaatttgactaatatccttgtaaaaagggaaatttggagacagacacacgtagagggaagatgatgtgaagagatcaaagaagaagacaggtgtctacaaaaccaggaaagaggcctggaatagatgcttcgttcatagccttcagaaggagccaaccctgctggcaccttagtgttagacttctatcctccagaactgtcagacaaaaaatgcccattgtttaagtcacccagtgtgtggcactttgttatgatgtctctagcaaactaatataccttgtgaccttggcagttctgtcttcctgcctctgtaaaatgcaaatattactgatatattacctcctagggcttctgtgaagaggcgatgagttaatacatgcaaagtgctacaacagtgcagacgtaatattaatactcagtaaatgttaagatgattattaacatcaacatcatcatcaccactgtataaaaaaaagaaaattggggctgatatctgatctctacaactttaccatgcagcatccctgtccattgctttttctaaattctattattaaccttgagtgtcttgtaattgatcatgtttcaacctttctttgacagcaagtactctcagaaataaaagtattactcggaccaagcaattgaacaacatattcatgcatttatgttcatgtagaaataccaattatacacgttttattttattttattcatgactctattttgtatcttatacttatttccccattgaaatgaggtgaattaaaaataaaaactttataaattaattagctgcaaaaatacttatttttgtttgtttttccaaatggttgcaacttacatagtgtaaaatacaattcatgaaagtggaaagatgcagaaatcagaatggaaatgagaaccagcaacctgagagtaccacagaaatattcagtcacatctgtgtaaccaggggctgtacagtcttaggtggaggtattccagatttttgtttcttagtttctgtcagatgtaaaatgtgtatgtggaactattgtgcactttctttgtttggtagagacagtctctctgtgttgcccaggctagtctcaaattcctggcctcaagtgatcctcccacctcagcctctcaaagtgctgrtactacaggtgtgagccaccatccccagcctactgtgcattttctattatttgaagcaaaattggggccacaaggaaggtcatctgtagtatgccaataacataaacctctgacatttcagtaaaatattgcctttgcctctgcatagtatgccagcatgttctgcagggtgggcagccgcaagcagtggttagaacaggggctctagaaccagggcctgaacctgaggctgtgctctgctctccttaatagtgaaatcagaggcaagttgcttgacctttctgctttgtatttctgcttttgccagatgcacaatatctggtttgtggagttttttgaggaccaagggagatagtgattcctatcaaatgtttaccagagcctctgataatctgggttttcttcctccacttccttcccctccttccttcttcaagatgattctatttaatggcatgttggaaatcatgtcagcagtcatgacatgccaaggtaaaatgaaacttttttccttaaaagtaggagaatgaggtaagagatgattttagaagttaaagcctacccaaacataaaaggatatgatttgtgtcactgtcatctaaagtgtctactgctacattttccatggggctgaagttttgattaaaaagaataatatcgtatcccaggtgtatccctaaattggtaactacttccgaaagtcttttttaagtttgtacttaaatgacttttttttaaggataatagttttgtattataaaagataaatgcacaaagcagctacatgtaaaatgtcactttaggacacgctgttctaacacaaatactgtcaacatatcatttgtgagtgaactgacaagatgtccaaggaatgagttacagtggagaaaattcaacgtgcatcacagaatagttaccagctcctggccctccacagatgtggacctaaaaccacctggagggcagagtcggctccctcctgctgtgagtgcttcctagtgagccagcagctgaaggcctccctagcttcacttctccagagcgggcatggagataactagtgaaagtggtcacaaagtcggggccaagaagtctctaacccctaaatcaagattgagagatactggaccgggcacagtgtctcacacctgtaatcccagcactttgggaggcctaggcaggcggatcacctgaggtcaggaattcaagaccagcctggccaacatggtgaaacccagtctctactagaaaatacaaacaaatttagctgggtgtggtggcaggctcctgtaatcccagctactctagaggctgaagcaggaagaattgcttgagccccggaggcggaggttgcagtgaacccggatcgtgccactgcaccccagactgggcaacagagcgagactcagtctcaaaaaaaaaaaaaaaagaaaa

SEQ ID NO: 45538 - DNA, 2662 bp, Homo sapiens
tgagtactgcagaacccaggaattatttggacatagggtctttacatgggagttaaaatgaggttgttgggaagggaccctaatccaatttgactaatatccttgtaaaaagggaaatttggagacagacacacgtagagggaagatgatgtgaagagatcaaagaagaagacaggtgtctacaaaaccaggaaagaggcctggaatagatgcttcgttcatagccttcagaaggagccaaccctgctggcaccttagtgttagacttctatcctccagaactgtcagacaaaaaatgcccattgtttaagtcacccagtgtgtggcactttgttatgatgtctctagcaaactaatataccttgtgaccttggcagttctgtcttcctgcctctgtaaaatgcaaatattactgatatattacctcctagggcttctgtgaagaggcgatgagttaatacatgcaaagtgctacaacagtgcagacgtaatattaatactcagtaaatgttaagatgattattaacatcaacatcatcatcaccactgtataaaaaaaagaaaattggggctgatatctgatctctacaactttaccatgcagcatccctgtccattgctttttctaaattctattattaaccttgagtgtcttgtaattgatcatgtttcaacctttctttgacagcaagtactctcagaaataaaagtattactcggaccaagcaattgaacaacatattcatgcatttatgttcatgtagaaataccaattatacacgttttattttattttattcatgactctattttgtatcttatacttatttccccattgaaatgaggtgaattaaaaataaaaactttataaattaattagctgcaaaaatacttatttttgtttgtttttccaaatggttgcaacttacatagtgtaaaatacaattcatgaaagtggaaagatgcagaaatcagaatggaaatgagaaccagcaacctgagagtaccacagaaatattcagtcacatctgtgtaaccaggggctgtacagtcttaggtggaggtattccagatttttgtttcttagtttctgtcagatgtaaaatgtgtatgtggaactattgtgcactttctttgtttggtagagacagtctctctgtgttgcccaggctagtctcaaattcctggcctcaagtgatcctcccacctcagcctctcaaagtgctggtactacaggtgtgagccaccatccccagcctactgtgcattttctattatttgaagcaaaattggggccacaaggaaggtcatctgtagtatgccaataacataaacctctgacatttcagtaaaatattgcctttgcctctgcatagtatgccagcatgttctgcagggtgggcagccgcaagcagtggttagaacaggggctctagaaccagggcctgaacctgaggctgtgctctgctctccttaatagtgaaatcagaggcaagttgcttgacctttctgctttgtatttctgcttttgccagatgcacaatatctggtttgtggagttttttgaggaccaagggagatagtgattcctatcaaatgtttaccagagcctctgataatctgggttttcttcctccacttccttcccctccttccttcttcaagatgattctatttaatggcatgttggaaatcatgtcagcagtcatgacatgccaaggtaaaatgaaacttttttccttaaaagtaggagaatgaggtaagagatgattttagaagttaaagcctacccaaacataaaaggatatgatttgtgtcactgtcatctaaagtgtctactgctacattttccatggggctgaagttttgattaaaaagaataatatcgtatcccaggtgtatccctaaattggtaactacttccgaaagtcttttttaagtttgtacttaaatgacttttttttaaggataatagttttgtattataaaagataaatgcacaaagcagctacatgtaaaatgtcactttaggacacgctgttctaacacaaatactgtcaacatatcatttgtgagtgaactgacaagatgtccaaggaatgagttacagtggagaaaattcaacgtgcatcacagaatagttaccagctcctggccctccacagatgtggacctaaaaccacctggagggcagagtcggctccctcctgctgtgagtgcttcctagtgagccagcagctgaaggcctccctagcttcacttctccagagcgggcatggagataactagtgaaagtggtcacaaagtcggggccaagaagtctctaacccctaaatcaagattgagagatactggaccgggcacagtgtctcacacctgtaatcccagcactttgggaggcctaggcaggcggatcacctgaggtcaggaattcaagamcagcctggccaacatggtgaaacccagtctctactagaaaatacaaacaaatttagctgggtgtggtggcaggctcctgtaatcccagctactctagaggctgaagcaggaagaattgcttgagccccggaggcggaggttgcagtgaacccggatcgtgccactgcaccccagactgggcaacagagcgagactcagtctcaaaaaaaaaaaaaaaagaaaa

SEQ ID NO: 45539 - DNA, 600 bp, Homo sapiens
tgcatggtgctaagcacaatcaacaatatttgaataccaactcttttttttaatgggacaattatgttaatgataaaaattacattcccaaattgccatagtagactcaaggcctctctgaattatcaagtgaaatgaaggtttcaaggcccaaagacacgggccttrgtcagaccccctgtggaacagctcggatttacacaaccagcagttcttggtctgaagaggaaaggttgggtccgtggcatggctacaggcactaagttcaccacccactcttagtccaggtaacagggtaaaagtagtgaggctcaggcttcactccagcctgctctggtggtgaagttggagggagaaacctgcagctgtgcccaagaggaccggcccgtcttccatataggaagtcctggaggaatctgggctgattcacatctgcagtgagatgagggcatctggagagggtatgaatggggggcgtcctaatactttcagagcttgaatccatttactccctcattttattgtccagaatgtaagggacacacaagaagttgtcttgcctatggagaacaagttctcacaggctgcgtggcgcacaag

SEQ ID NO: 45540 - DNA, 618 bp, Homo sapiens
cttttcttttttctgtgctatatccaggtgctctcacctggtgtcttcagctcctgtgaaggtattttcacatgtggatagttgttttaaytactgattctgcagggggtatgagggctggataatgctattattccatctttctcctcttcaccctaaatgtttttattgaatcagtaggttttcatctttattattgtggctaccatgctgttttctttttaaaaaatatatcacctcaagcacttatcatttctttgtgttgcaaacattccaattatactttatcagttatttttaaattcataatagattattgttgactgtagtcaccctgttgtgctatcaaatactagattttattcattttatctaactatgttatatatttattaaccatccccacttccctcccaacacacttcccttcccaggctctggtaaccatcattctactccttatctccatacattcaattgtttcaatatttagctcccataaataaatgaaaacgtgaagtttgtctttctgtggcaggcttatttcacttaacataatgtcccccagttccatccatgttgggcattcgattttgttattattataagtaacattac

SEQ ID NO: 45541 - DNA, 634 bp, Homo sapiens
gaggtatgcctatactttggttcagtgcactgaggagccattgaaggcttttaaccagggaagtgatatggtcaaagcagtactttaggaagaattattcagcaatatatatgggtgagtcatgacagggaaagaagagaaggtgaaggtcagtttagtaagctttgtctcctcattgcttttttggcattaaaaaccataaaagccacattgattgtaagtatagagtttgcacagtgggctctcttacacatccaataacaagattcagttctctcatcaatcatctgggttccatcactacttggaaacgattttgtgtcattaactacctggccccacatgtttctcagactctccatagggtagggccaagcctctcctactgatgcctatttttatttcagccagaccacagtaaatatgacttgtgcctaacgtgcttcacacatcatcttaacattgctttataatttttaaccctcacatattccgcattgccttaacccctgcctcaggttagacacatgggactytctcctcctacctagccaaatttctacagaatttatcttttgaaccaagtttgagttctctagatattttattcttcagttctatctcagaatcctcc

SEQ ID NO: 45542 - DNA, 253 bp, Homo sapiens
gtgttattggaatatgkttttcatgccatttgagctgtcggagtatctcttgggtagattcttaagcagaaatagttgggactttacaaaccctgcctgggattctaatgtctggtgccatgaagattttggcttgtgtttcttttgatgtctagaatatcaagaacattcctagcttctatattacggcaggtcacgtcccggcttcttctagtaaaatcccctctaggattcaagcctctatttgcaccgg

SEQ ID NO: 45543 - DNA, 569 bp, Homo sapiens
tgtcacttatacctcatcaaaactgtgtataatatttatttgatgccctgctttgtgccactaactatgctaaacactgagaaatatggcagtaaataacactctgtccttgaggagctcacagtagagaggaaacctagtttcaccccaagtctcacatctcatagcttataacacggagaagagagaaactgactctctttcctcagttttaacccaaaaattttccagggcttctggatggcctggcttgagtctggtgaccaccccygaacgaaacagggaaacagggacttgtaagaatggagtggtccaattagagctacgtagatgggagcacttctcaagagaaaatgtcaatactcagaaggcatctctgtttcaactataaccaaccattaacctggtaaaaaccagaaatgagtttcccaactgtgagaaggagagcaccaaaataaagagcatcttgggcattctgacactagccacgatgaggcagctcttttttaaagtcagaatctatgaaccctctttaaaacatcatgtaggccaatgctactgactttggc

SEQ ID NO: 45544 - DNA, 569 bp, Homo sapiens
tgtcacttatacctcatcaaaactgtgtataatatttatttgatgccctgctttgtgccactaactatgctaaacactgagaaatatggcagtaaataacactctgtccttgaggagctcacagtagagaggaaacctagtttcaccccaagtctcacatctcatagcttataacacggagaagagagaaactgactctctttcctcagttttaacccaaaaattttccagggcttctggatggcctggcttgagtctggtgaccacccctgaacgaaacagggaaacagggacttgtaagaatggagtggtccaattagagctacgtagatgsgagcacttctcaagagaaaatgtcaatactcagaaggcatctctgtttcaactataaccaaccattaacctggtaaaaaccagaaatgagtttcccaactgtgagaaggagagcaccaaaataaagagcatcttgggcattctgacactagccacgatgaggcagctcttttttaaagtcagaatctatgaaccctctttaaaacatcatgtaggccaatgctactgactttggc

SEQ ID NO: 45545 - DNA, 491 bp, Homo sapiens
cgcgcgcgcacrcgcgcgcacacacacacacacacacacacacacacctttcaacccaagaaattggtttattaaatgttactgaagaagatgaaaaggtaagaatggtatcatagcaacagaaacagtttcaaattaaatattagcaaacctgtttcatgaagagcttttggtcgctgagggcttttaatagcaactttgacttctttggcctaaaattttctggattctctgttgcttttcttctctctccttttcagctattctttatccttccatgaggaaactcaacaacttatttaatcttgttgtttgtccttggcttcctgacaactcatccaaatattaaccttttttatcttcacttcatgagggaaatttgttgccaatgttaaatgctcatgtttatccccctaccagctaagttttaagcgctatgctgggatgtgaggcatatcattattttcaaggtagaaataatttttgtatat

SEQ ID NO: 45546 - DNA, 491 bp, Homo sapiens
cgcgcgcgcacgcrcgcgcacacacacacacacacacacacacacacctttcaacccaagaaattggtttattaaatgttactgaagaagatgaaaaggtaagaatggtatcatagcaacagaaacagtttcaaattaaatattagcaaacctgtttcatgaagagcttttggtcgctgagggcttttaatagcaactttgacttctttggcctaaaattttctggattctctgttgcttttcttctctctccttttcagctattctttatccttccatgaggaaactcaacaacttatttaatcttgttgtttgtccttggcttcctgacaactcatccaaatattaaccttttttatcttcacttcatgagggaaatttgttgccaatgttaaatgctcatgtttatccccctaccagctaagttttaagcgctatgctgggatgtgaggcatatcattattttcaaggtagaaataatttttgtatat

SEQ ID NO: 45547 - DNA, 491 bp, Homo sapiens
cgcgcgcgcacgcgcrcgcacacacacacacacacacacacacacacctttcaacccaagaaattggtttattaaatgttactgaagaagatgaaaaggtaagaatggtatcatagcaacagaaacagtttcaaattaaatattagcaaacctgtttcatgaagagcttttggtcgctgagggcttttaatagcaactttgacttctttggcctaaaattttctggattctctgttgcttttcttctctctccttttcagctattctttatccttccatgaggaaactcaacaacttatttaatcttgttgtttgtccttggcttcctgacaactcatccaaatattaaccttttttatcttcacttcatgagggaaatttgttgccaatgttaaatgctcatgtttatccccctaccagctaagttttaagcgctatgctgggatgtgaggcatatcattattttcaaggtagaaataatttttgtatat

SEQ ID NO: 45548 - DNA, 491 bp, Homo sapiens
cgcgcgcgcacgcgcgcrcacacacacacacacacacacacacacacctttcaacccaagaaattggtttattaaatgttactgaagaagatgaaaaggtaagaatggtatcatagcaacagaaacagtttcaaattaaatattagcaaacctgtttcatgaagagcttttggtcgctgagggcttttaatagcaactttgacttctttggcctaaaattttctggattctctgttgcttttcttctctctccttttcagctattctttatccttccatgaggaaactcaacaacttatttaatcttgttgtttgtccttggcttcctgacaactcatccaaatattaaccttttttatcttcacttcatgagggaaatttgttgccaatgttaaatgctcatgtttatccccctaccagctaagttttaagcgctatgctgggatgtgaggcatatcattattttcaaggtagaaataatttttgtatat

SEQ ID NO: 45549 - DNA, 637 bp, Homo sapiens
atagaaggtaaagttgaaggcacactatctctaagacacgcaagtgcaaagccaggggcttccaaatgaactgcattcctggaaatgtttctgaacttctctgacttggctgacgctttatgccctttccaagataacattccttttatgggaaatgcagtgactggcccaggggtttcattccacattgagggaaattgggcaagtgctggatgtggttaggaggagaaaactcaattcttctctgtgaaaccttcacctgagggaagccacccctcatcctcccttctgagtaaccttctctggccattccttctcctgccatggctctcrattgatcactttctaggaggacagaaaaagtgaagacagttttggtttgggcactaagcatagcatacttcctttgcaaaaagtagtgaatgactccaggaaaaagaatcccccaaggagctgggggtagggaaaacgctggtaaatgtgcagacagggcatcctctgcacaagcatcctgatccagctgcactctcctctagggagggcgtccgcctcttcgctcaacataaaaccaggtcgctggcttagaggatacaaccccttcagacaatcctggttcatgctggccaccatggaggcg

SEQ ID NO: 45550 - DNA, 670 bp, Homo sapiens
gccatgaaaaagcatgccttcccgggcacaagcaggtggatcatcactctaaggacaccaccctcatccaccaaatatttggaggctactggagatctcaaatcaagtgtctccactgccacggcatttcagacacttttgacccttacctggacatcgccctggatatccaggcagctcagagtgtccagcaagctttggaacagttggtgaagcccgaagaactcaatggagagaatgcctatcattgtggtgtttgtctccagagggcgccggcctccaagacgttaactttacacacctctgccaaggtcctcatccttgtattgaagagattctccgatgtcacaggcaacaagattgccaagaatgtgcaatatcctgagtgccttgacatgcagccatacatgtctcagcagaacacaggacctctcgtctatgtcctctatgctgtgctggtccacgctgggtggagttgtcacaacggacattacttctcttatgtcaaagctcaagaaggccagtggtataaaatggatgatgccgaggtcaccgcctctagcatcacttctgtcctgagtcaacaggcctacgtcctcttttacatccagaagagtgaatgggaaagacacagtgagagtgtgtcaagaggcagrgaaccaagagccct

SEQ ID NO: 45551 - DNA, 554 bp, Homo sapiens
ttggacgagcacttggtggaaagagccactcaggaaagcaccttagaccactggaaattccttcaagagcaaaacaaaacgaagcctgagttcaacgtcagaaaagtcgaaggtaccctgcctcccgacgtacttgtgattcatcaatcaaaatacaagtgtgggatgaagaaccatcatcctgaacagcaaagctccctgctaaacctctcttcgacgaccccgacacatcaggagtccatgaacactggcacactcgcttccctgcgagggagggccaggagatccaaagggaagaacaaacacagcaagagggctctgcttgtgtgccagtgatctcagtggaagtaccgacccacacgtaggggtgcacacacacacgcacacacacagacacacacataactacacccagaagcgcgcacgyaaacacacacacacccacacaaacacgaacaccgtcaatcctacataaactaatgaggagcccaagtttctgtctctacaacagggacaactggatagtgatggctacatctcaggatgagcccgca

SEQ ID NO: 45552 - DNA, 905 bp, Homo sapiens
ttgagcagggttgcgcccaagattctgtggttctacggagccctgagttgtgccctgggcagctttcctctggggttggtcaactttgatcactgtacctgacgagaaagggaccatgaagtctaatcagcaaatagagaaaaggaaggggccatttcccacaatcatttccacggaaacaccacgtcggatcaataagtctcactgcgggacagggactgtgcttcagagatgcagctttcgcagctggacaaatgacccagaaattccccaaatgccatttttaaacacacccagtgagattgatttcagggctttctgaatttatttcagttgaatacacacactcctgtgtttgctttcctttattatcaatacagcttacttccagatgacttacatgcccgtgggaaaattttccgtttcgactcatgggaagcgggcaccgtgaaacaggcaagtcggtctgtccgcttccggcgttatgtgggttccagcaagagcacaagtcccagggcgcctgaggtccattcaggaaccagtgtaaaaacggcgagcccggggaagaaagaagagcaccgttcttctcttccaaatgcattccagtttccactattcaaggtggcgagaatgatccacggatgtcccacatgagccacctttcaccttctcatgccgaccaacaactgacgaatgaaacacaccccaagagaaaatacgaaaccgagtcccctgcaattacctcacacgcaaacctacacgtcggtaggtcatattcagaaatacacactgaatgtcrcctatcatgaacacaaacactcagacagtccctccagaggttcggaagactcacgaccccaaaacttgatgtttcccatatgcgggctcatcctgagatgtagcca

SEQ ID NO: 45553 - DNA, 409 bp, Homo sapiens
atgaggagcccaagtttctgtctctacaacagggacaactggatagtgatggctacatctcaggatgagcccgcatatgggaaacatcaagttttggggtcgtgagtcttccgaacctctggagggactgtctgagtgtttgtgttcatgataggygacattcagtgtgtatttctgaatatgacctaccgacgtgtaggtttgcgtgtgaggtaattgcaggggactcggtttcgtattttctcttggggtgtgtttcattcgtcagttgttggtcggcatgagaaggtgaaatgtggctcatgtgggacatccgtggatcattctcgccaccttgaatagtggaaactggaatgcatttggaagagaagaacggtgctcttctttcttccccgggctcgccgttttt

SEQ ID NO: 45554 - DNA, 526 bp, Homo sapiens
gtttcacggtgcccgcttcccatgagtcgaaacggaaaattttcccacgggcatgtaagtcatctggaagtaagctgtattgataataaaggaaagcaaacacaggagtgtgtgtattcaactgaaataaattcagaaagccctgcaatcaatctcactgggtgtgtttaaaaatggcatttggggaatttctgggtcatttgtccagctgcgaaasctgcatctctgaagcacagtccctgtcccgcagtgagacttattgatccgacgtggtgtttccgtggaaatgattgtgggaaatggccccttccttttctctatttgctgattagacttcatggtccctttctcgtcaggtacagtgatcaaagttgaccaaccccagaggaaagctgcccagggcacaactcagggctccgtagaaccacagaatcttgggcgcaaccctgctcaagcacccaaatgtgcatacgaacagggtctccgtgtgacgtgtgtgaaaactacagtgtgatgagcatgactg

SEQ ID NO: 45555 - DNA, 535 bp, Homo sapiens
tgcctcagcctcccaaagtgctgggattacagctagtgccactgcacaaggcctatcagagatgatttaacactgctggtcactctctccttgacactctctttcttrtcctatcacatttagaaaggaaggtatgcgaagtgggaggaagcagaggttttagaattgcctgtgctggaaactggaagctggtgtctgcatgtgtgtgagatcagatcagatcagaagctgtaaattgcagaaccaatccagaaatgggaaccggtgtggtcaagtaaagtggctgggaaaacccaaagaggaaaccagaaagcagtgtgagacaaagaagaaaagaacattctgagtctgaaggggaaaagacttcaaacccagacaaaattctgtggaagccctgtgacctcttcagctgagttttattttcaaatttcagtgtgtggaatctcttactcacattataacttaaggacactttcttatgtttctcaataccaatgtctcagacttacttttttcttctccgactggtctttct

SEQ ID NO: 45556 - DNA, 605 bp, Homo sapiens
cacacacttttaaataaccagatcttatttaaataagcgaattcagagcaagagctcacttatcaccaaggggatggcccaagccaatgtgagggatctgcccccatgagccaaacacttaccaccaggccccacctccatcactggggattacatttcaacatgagatttgggtggagacagatacacactgtatctatagagttgtttgcctgactgtccagagtcatctgacttgtctatagagatctgaatgtgcctgagaacctatggtcaaaaatccatatcaaatatttatatcattttggggaaaagtttcttgattgagttagttttcttcagtcatttaaatgctttggttgctatttccagccttattcaccatgaaacaaaagccacattattatttcttaatctgatttcactaaacttgtgaaaaatccaaggatagggacagtgtctggtgtgttgccattaagcctcagcatcattaaaagaacrtgcattattacagaaccatggaatcactgttcttccataaagatttggaaagtgtcttagagactggcaatttccaaagtatattcctggagacaaactattgc

SEQ ID NO: 45557 - DNA, 592 bp, Homo sapiens
tgcatctgtactgaacatgaatagactttttttcctgtcattattttctaaacaatccaatataacaactatttacatagcatttacattgtgttaggtactgtaagtaatctagagatgacttgaagtatatgggaggatgtgcataagttaaatgcaaatattacatcattttatataaggaacttgagcacctgtggatattggtatccagtggaggccctggaaccaattctacacagatattgagagatgactataatagaatataatgactatagaaataaaatgagactatgcatgtaaaatgcttgacaccaaagtgccttacatatagtaaatactcaataaatggtagtacagtagttattattattaacaataacattctcctagattctttctagaatagtggttttcaaagtgtgatccctggttcagcagcatcagcatcacctggaacttgttagaaatgcatattattgatctccctcccagacctactgactcagaaactctgagagtgggacccaaaaatctgtgtttttatctatctatctatctatctatctatctrtctatctatctatct

SEQ ID NO: 45558 - DNA, 555 bp, Homo sapiens
aactctctcccaacaaattatatcctataaccaaatacacacatatataaatcctagataccaaggaggaaacaaaagcccaaaacagtgggcataatttgactcaatcaggaatgaaaaatttattcgtataatttatataacaaaaacataaaagtatttgttttcccctatacaatgtaggttctaaattaatttagcatgtactgagatggaacaattggcaaaattttatgacactaattaataccgaattcaaattacagttatactcaagaatcccattaaatttaaccaagatatacgtaaaatctgaagagaattattgaacataaaagagaactgcctcaccataaccactgcaaaaaatacattacctaaattcttcataatcatataacccattactctaaaacatgttctgtggacacggacactgacccatcgcataataagctgtaattagatggagtccttgtcatgtaaaataggcttggtaagttgsagctctatagacctccctccctactgtccagctaaaatacttaatacaaa

SEQ ID NO: 45559 - DNA, 590 bp, Homo sapiens
cagatagtggaaaactttgatgacacatgaagcctattgccacttaggatttctaggaggtggttttttaatagtaaaagttataacaatcaagtacataccttctttttctctgggatacaactgtatcaggtcccagctttcaagcggctagtgacctggcagcccttacctggcctattgcaagaatcagtytgggagaacaagaggcagtaaggaaaggaaatggcatatatgaaagaacagaaggatataacctgaggctgcattgtccatgattttaaattctagtttgaggagtctgtgtcttacaatacatgaaagatttcaagaaattgtcagatgaaagtagtttttggtaaattgacttagcttacttcttagctagaacaaatcttaaatgcaaaataacatttatacttacaaataaatagctgcattagaggatttttactgactgatatatcactaagattttaataagatgactgataattaaaatataaaattggaacataaaattaaattgagcaaactcacaaatttggagaagcattggctaatctgttattttcactatctttgctaaa

SEQ ID NO: 45560 - DNA, 562 bp, Homo sapiens
gaaatagcaacaatatttcccttgccttccactaaataagtctgttgccttgcagagtgcctggtataaatagtgttgttttttgtttgtgtgtttgttttgtttttctttgagacggagtctggctctgtcacccaggctggagtgcagtggcttgatctccgtttactgcaacctccacctcccgagttcaagagattctcctgctgggattacaggcgcatgccaccacgcacggctaattgttttttgtatttttagtagagacagggtttcccatgttggccaggctagtctcgaactcctgatctcaggtgattcacccgcctcggcctcccaaagttctgggattacaggcgtgagtcactgcgcccgtccttaaaatagtatttttaaagagtttttgaattatatcttgtaactattatggaaacttccacaaataatccactacatttccagttagactttcaccacctttaggagcccaggaaattcactatcatttttcagaaacttgtaatatatcasctgtttactaaagtgtgagacaactgggtta

SEQ ID NO: 45561 - DNA, 648 bp, Homo sapiens
agtattgtttcaatcaaaataaattactgaaatatattataacctttaaataattcttaaaaccactaaacctccatgaaaaaaaatagtttttaataatataactcattcaaatcagaaacacgtaaccacttttcctaaatatctactttaatttctctcagaacaaaagattcttgtaaagtctcaatggcacaagttttaagattttggaaaaagtgtccatctatgggttccaagcgactgactcttactctgcacttttcattaagtacttacgattagccagtaccccttctacctgtgtgtcttgctaccttgttttataaaatagaaataatcacgtccaccttggagaaccatggtggacttctagwcaaacggaagaaaagtgggacaagggttttttctagggctgggaagtgggagggagctcgccacactgaggaccttcctcagactcaatgcctccccagcccaaagcaactaaaacaaacagcttgaaattccacattttaaaacataaagaacaaaacaatgactttttttttgcactattggtggaaatctgaattgatacgaccgttttagaaaactgttttaccatcaagctgaacataaggaacatttcaggcatgtgtccaacag

SEQ ID NO: 45562 - DNA, 543 bp, Homo sapiens
ttatgaaataaaattcctaatgaaaggrggaactttttcggatagctgtaatttagtcacagctttatttctcagactggcctgttccaggcagaaagctgacaggccagtgtcctgacccactgtactcagtcctcttgggctggccatgtgatgacaatttcttagccccaccctattgaccttcatcaaagaagataaaacaggcatgattattttgtttctctcggtatattaaaaagtcataaatgtaaaagttcattctgaacagcttctgggtatctggtaaggataggagaaatacacttaaatattagttgtaattattttgagtagatattggggataatttcttactaatgttgaaacaagagaataaatttaagaaagatatgaaatattattcatcagagatgttaaattaatgaataaaaatcccacgcagactaatggaatacatgaacatttgagttcatgccagaattttaattcagtgcacttttatgtattgatttattttaaagttgtgtctctgaaatatta

SEQ ID NO: 45563 - DNA, 543 bp, Homo sapiens
ttatgaaataaaattcctaatgaaaggaggaactttttcggatagctgtaatttagtcacagctttatttctcagactggcctrttccaggcagaaagctgacaggccagtgtcctgacccactgtactcagtcctcttgggctggccatgtgatgacaatttcttagccccaccctattgaccttcatcaaagaagataaaacaggcatgattattttgtttctctcggtatattaaaaagtcataaatgtaaaagttcattctgaacagcttctgggtatctggtaaggataggagaaatacacttaaatattagttgtaattattttgagtagatattggggataatttcttactaatgttgaaacaagagaataaatttaagaaagatatgaaatattattcatcagagatgttaaattaatgaataaaaatcccacgcagactaatggaatacatgaacatttgagttcatgccagaattttaattcagtgcacttttatgtattgatttattttaaagttgtgtctctgaaatatta

SEQ ID NO: 45564 - DNA, 543 bp, Homo sapiens
ttatgaaataaaattcctaatgaaaggaggaactttttcggatagctgtaatttagtcacagctttatttctcagactggcctgttccaggcagaaagctgacaggccagtgtcctgacccactgtactcagtcctcttgggctggccatgtgatgacaatttcttagccccaccctattgaccttcatcaaagaagataaaacaggcatgattattttgtttctctcggtatattaaaaagtcataaatgtaaaagttcattctgaacagcttytgggtatctggtaaggataggagaaatacacttaaatattagttgtaattattttgagtagatattggggataatttcttactaatgttgaaacaagagaataaatttaagaaagatatgaaatattattcatcagagatgttaaattaatgaataaaaatcccacgcagactaatggaatacatgaacatttgagttcatgccagaattttaattcagtgcacttttatgtattgatttattttaaagttgtgtctctgaaatatta

SEQ ID NO: 45565 - DNA, 587 bp, Homo sapiens
ttagaggataatttgcaataaatatgggtatgtttattgggtatgggcacttctttacacacatttttctcttttacttgaacatgtgctgaaagtgaaggtcgaggtcctttatagcctcaaaggcactgagatgctcaggagcctgtgggccaggggtcttagtctgtttgggctgctataacaaaacttcttagactgagtcatttagaaataaaataaatttaattatcacagtctggaggctggaacgtccaagattaaggcgccagcacattcagtgtctggcaagggctcactctgcttcataaagagtgcctcttgctacgycctcacatggcagaagcagaagggcaagaggccctagggtgctctcttcaacctcttttataagagcatgaacccattcatgcatatggagaacccctcatgacttaatcagttccccaaagaccttatctcttgattatatcacactgggtactaggatccaacatatgaattttgaagggacatcaatgttcagacaatttagcaccaggcttcttgtccctgtagctacactgactcttagtgggagatgttct

SEQ ID NO: 45566 - DNA, 1538 bp, Homo sapiens
tctccaccataccacctttttcttgaagaataaatcaaaatgtggtgccgacaagggaatcaatcctctaggtccaaaataacaaaggatgtaatagagattgttttagctctgatacaaattccaggagcctaaatatgtttatgggaagcaaytggatttcttaaagtagctggaagggcttaggactttcacctgtggttttcccactgcctggacatcatggttaacttctatttatccttcaggtcttctacaaaggcttccctggtgccaccaccaccccgctctgaaagttccccttgcatgataccatcctggacatgacccttatcacatgtagaccttgtttttattacttctcagtgttctacaccacaatagactccctggaacccatcagatgaactagaatatagtgaatgctcaaataattgttaaataaatggcaaactgatgaataagtgaatgaatgcttcaatccatctttgtgtttcagtcagtctttggggtctacattaaaattgacaccaaagccctcaaagatcctgagtactgtacaaaaatcataaaacatttgccgttgttactagacacaaatgcaaggacatcatgaccaattctctcttttaaacctaacccaaatttagtggcttaaagctaaactgaacttcaaaaatgattgaaccaagtggattgccatttgtctcactggatgctactcttaatcatgatttgagttaaaaataaacatttcttcttgaaaatgaaaagtataaccatgaaaagaacaatgggaattaaatgaagcacaacagccacgaatataaagtcaaaaatagtcaccagaagggcatacctgggggaacttacgtacagttattttcatgaagaaacactacaaaatcctgttgcttgattaaattgttcaaaacatcacagaatagacaatagcaaaaaatgatgtgtatattgggatggatcaggaacatcaatctccatattatattttaagcttcaacgtttccgtattcatttgctaagaaatcaaaatgacttactgaaatgaaccataaaaaaggaaatttctcctaagaatttagcttttgttgtctacttaatgcctcatacattgtagagagaatcttttccctcttaagatggctttaattcaactagagagaaaattatatatattaattttaatatatgtataatactttaatatatacttagaactgcccttcaccaccacagtgatatctgaaggacaaataaaaaagacaaccactggaattccccatgctgataacctgagtagaaacaaaaatcaaatcaaaacatatactttaccattgattgggattaagaaagaactgctgcttgtgaagcccaaggcagacattattaattaatcacctgtgttcacccccagatgccatctcaatccagtactctaggcagtcacaaccaaccaatcatatatggaaaggtaagaaagactctttgctaattcaattctgtagacaaactaagaa

SEQ ID NO: 45567 - DNA, 539 bp, Homo sapiens
cctagctgctctagccagaaatgtgtgtatcctctgtcccactctctcacttaccagcccccacatccaactggtcacaaattccttccaaattctttcctccttctgcacccctccagctatttcctggtgcctctsaggatcacacttcagctcctgcaaggctgctcttacacactgtgctgtctccctcatccctgcaaccactgctattacatctctttagcttcagctgcactaagttttcatctttcccagaacatttctggccctttcacaactttatgaccttctcttcctggatataattttcttctgtttaggctagaaaaagtcttcttaccaacgaatattcatctcaaatgctaccacgtctctgaggccttccctgattgtctcttctgtgctctgactgcacatctcttacagcaggaccatattttggtagaattgttttttaaccaacaccaagaccactataccaagctgctggtgagcaggggtggcctcttactcatctgggtcactgtcaggacggc

SEQ ID NO: 45568 - DNA, 583 bp, Homo sapiens
ccccattcagtatgatgttagctactccattcctaattttaaaatcaggttagcaggattaatcataagttgagtttgcttttccagttgaaaggaaaaataaggccctgggtatttgattacacattagttacagtacatagtttctctaatttttagtacaccattcttggtcagtctttagccactctctttctgtgctttatcatgctgctaaacatacatactgatggccaggcgtggtagctcacgcctgtaatcccagcactttgggaggccaaggcgagcggatcacaaggtctggtgttcgagaccagcctggccaacatggtgaaacccygtctctaccaaatatacaaaaattagccaggcatggtggtgcatgcttgtagtcccagctactcgggaggctgaggcagaagaatcgcttgaacctgggaggcagaggttgcagtgagccaagattgcgccattgcactccagcctgggagacagagcaaaactctgtctaaaaaaaaaaaaaaagaaaaaatacagactgatttctttaatacttcaacttttgtatggattttcaactcaa

SEQ ID NO: 45569 - DNA, 583 bp, Homo sapiens
ccccattcagtatgatgttagctactccattcctaattttaaaatcaggttagcaggattaatcataagttgagtttgcttttccagttgaaaggaaaaataaggccctgggtatttgattacacattagttacagtacatagtttctctaatttttagtacaccattcttggtcagtctttagccactctctttctgtgctttatcatgctgctaaacatacatactgatggccaggcgtggtagctcacgcctgtaatcccagcactttgggaggccaaggcgagcggatcacaaggtctggtgttcgagaccagcctggccaacatggtgaaaccctgtctctaccaaatatacaaaaattagccaggcatggtggtgcatgcttgtagtcccagctactcgggaggctgaggcagaagaatcgcttgaaccygggaggcagaggttgcagtgagccaagattgcgccattgcactccagcctgggagacagagcaaaactctgtctaaaaaaaaaaaaaaagaaaaaatacagactgatttctttaatacttcaacttttgtatggattttcaactcaa

SEQ ID NO: 45570 - DNA, 575 bp, Homo sapiens
cgttggagaatccaactcatgttttgaatccactacatcccccagggatatctatggtcagtacacagcgtggtaggaaaagtccaaaactttggaaagaaagaaaaatcctccatcatttactaattgggtgagttacttgcggttagcagttgagctgaacacaattyccccatctctggcaactactcccaatacacacgatacccggtgggccccgatgccaaggccaaagggggattcttaacccagactgagccagccagatcttcttgtgcgcccaagtatgcatatgcccgtgttcgtgtgtgtgcgcgcccgtgtttgttcgcgtatgtgcctgttcgcgtgtgtgcacgagcgtctgtgtatgcgcgcatgttcgtgtgtgtgtgcgcgcgcgcattggtacatctaatacctgaaagtccccagtacctaagtaactcctgggagtaaatgagtagatgcattcaggaacaactgaattaccaacgtttctggattacttcgcaacgaaagggccggtgactctactccgggctggccctcctcctgccacatcagattttcca

SEQ ID NO: 45571 - DNA, 575 bp, Homo sapiens
cgttggagaatccaactcatgttttgaatccactacatcccccagggatatctatggtcagtacacagcgtggtaggaaaagtccaaaactttggaaagaaagaaaaatcctccatcatttactaattgggtgagttacttgcggttagcagttgagctgaacacaattcccccatctctggcaactactcccaatacacacgatacccggtgggccccgatgccaaggccaaagggggattcttaacccagrctgagccagccagatcttcttgtgcgcccaagtatgcatatgcccgtgttcgtgtgtgtgcgcgcccgtgtttgttcgcgtatgtgcctgttcgcgtgtgtgcacgagcgtctgtgtatgcgcgcatgttcgtgtgtgtgtgcgcgcgcgcattggtacatctaatacctgaaagtccccagtacctaagtaactcctgggagtaaatgagtagatgcattcaggaacaactgaattaccaacgtttctggattacttcgcaacgaaagggccggtgactctactccgggctggccctcctcctgccacatcagattttcca

SEQ ID NO: 45572 - DNA, 554 bp, Homo sapiens
tctggtggtagaacaacaaaacattttgtagggaggcctttcgtcccctatgatgtcaccacaaatatattacttccttmcttacatctctcttgttccagaaataatttttggtaactgcatcaaaaacctaggaatgacaatataagtatccaacaatggtgaaacagttcattaaaatgcagtgtaattttttttttttttttttttttttttttttttgagacgaagtctcgctctgtcgcccaggctggagtgcagtggcatgatctcagctctctgcaacctccacctcccgggttcaagcgattcttctgcctcagcctcctgagtagctgggactacaggtgcccgcccacacgctcggctaaatttttttgtgtttttagtagagatggggtttcaccatgttagccaggatggtcttgatttcctgaccttgtgatccgcccttctcggcctcccaaagtgctgggatcacaggcatgagccaccgcgcccagcctaaaatgtggtgtaatttaaaaggtgttgcagaagaccatatagtgaaa

SEQ ID NO: 45573 - DNA, 554 bp, Homo sapiens
tctggtggtagaacaacaaaacattttgtagggaggcctttcgtcccctatgatgtcaccacaaatatattacttccttacttacatctctcttgttccagaaataatttttggtaactgcatcaaaaacctaggaatgacaatataagtatccaacaatggtgaaacagttcattaaaatgcagtgtaattttttttttttttttttttttttttttttttgagacgaagtctcgctctgtcgcccaggctggagtgcagtggcatgatctcagctctctgcaacctccacctcccgggttcaagcgattcttctgcctcagcctcctgagtagctgggactacaggtgcccgcccacacgctcggctaaatttttttgtgtttttagtagagayggggtttcaccatgttagccaggatggtcttgatttcctgaccttgtgatccgcccttctcggcctcccaaagtgctgggatcacaggcatgagccaccgcgcccagcctaaaatgtggtgtaatttaaaaggtgttgcagaagaccatatagtgaaa

SEQ ID NO: 45574 - DNA, 551 bp, Homo sapiens
gaattcaggtctctaactccacatccaatattatagttacatctgcacatttttcctaaacacgtagaaaattgtcctccttggcattcctcaaagtagatgctgggctacttggaatcaaatacaactgtgtccataattatcccgcatgctatggatcatagtaagacctaaagcatctaccatataggatttaaaataaagcctacataagaataacctatttctgtaattatttttgctttmctaaattattttgttctattgtggcaacacagtgtcattctgagattacgtgagatggaactttgagggacaaagaaagctctcaatgagagatcaaagcgtttgcaacctagatgcagaaactgagccctagagagaataaggtgcctaaagtccaattcgcccacctgtggatggctggcagcagaaaggtgatctgacgtgaaaatatgcacacacacacgcacacccagacacatgtgcacacagatgcacacacacatgtacacacagacatatgcacacatgtgcatgtacacacacac

SEQ ID NO: 45575 - DNA, 551 bp, Homo sapiens
gaattcaggtctctaactccacatccaatattatagttacatctgcacatttttcctaaacacgtagaaaattgtcctccttggcattcctcaaagtagatgctgggctacttggaatcaaatacaactgtgtccataattatcccgcatgctatggatcatagtaagacctaaagcatctaccatataggatttaaaataaagcctacataagaataacctatttctgtaattatttttgctttactaaattattttgttctattgtggcaacacagtgtcattctgagattacgtgagatggaacyttgagggacaaagaaagctctcaatgagagatcaaagcgtttgcaacctagatgcagaaactgagccctagagagaataaggtgcctaaagtccaattcgcccacctgtggatggctggcagcagaaaggtgatctgacgtgaaaatatgcacacacacacgcacacccagacacatgtgcacacagatgcacacacacatgtacacacagacatatgcacacatgtgcatgtacacacacac

SEQ ID NO: 45576 - DNA, 551 bp, Homo sapiens
gaattcaggtctctaactccacatccaatattatagttacatctgcacatttttcctaaacacgtagaaaattgtcctccttggcattcctcaaagtagatgctgggctacttggaatcaaatacaactgtgtccataattatcccgcatgctatggatcatagtaagacctaaagcatctaccatataggatttaaaataaagcctacataagaataacctatttctgtaattatttttgctttactaaattattttgttctattgtggcaacacagtgtcattctgagattacgtgagatggaactttgagggacaaagaaagctctcaatgagagatcaaagcgtttgcaacctagatgcagaaactgagccctagagagaataaggtgcctaaagtccaattcgcccacctgtggatggctggsagcagaaaggtgatctgacgtgaaaatatgcacacacacacgcacacccagacacatgtgcacacagatgcacacacacatgtacacacagacatatgcacacatgtgcatgtacacacacac

SEQ ID NO: 45577 - DNA, 2006 bp, Homo sapiens
gcatttaaccccaacccaggataccctcaatttttcacagataaaaatgtatcaagtaaatattaaaattgaatttatataagtaataagcaataagttgtaagtaaataaatacaatttgttcataacatgcaatgcaatgaaggtctgtggtacccaagataggtcacggaggaggtgcagcgcttattctttagaagctaacattatctttctgcaaaatctttccactattttacaacctttgcagaattcatgcttatcttgtgctccaactgcacttccagtaaagttgtggcatggaaaacaccctgagggtaaaatggagtttgaacatagtagtgctttcagtggcaggaagcagcctttgagccagccagaagggtcatgagaatgtccctcaccaccccttcacttgccttttggccacaactcaaaagtttggggtttgctcctgctgcacaactcacacctgttccctgtgcttagaaagtgttgtcagatgagcctgtcttgacctacacccatcatgttaaatattccttctgtatctgtttgctaggttgctgtaacagagtaccactgactgggctgcataaacaagaggcattttattttctgacacttctggaggctggaagtccaagatgaaggtgtcggtggggttggtttcttctgaggcctgtctccttggtttgcagatggtcaccttcttgctgtgtctccatgtggtctttcttctgggcatgcagcctccctggtgtctctgtgtgtcaaaggttcctcttgttataaggccattagtcagttcagattagggcccatcctaacagcctcgtttaatttaatcacctctttaaaggtgatccatcatgtcttatctccaaatacagtcacattctgaagtattgggggttaaggcttcaacatatgaagttttgcggggtggatgggggacacaatttagcccatgaaaacttgttatagcatatgtagtttgtgggtttgggggtgaaaatgacaatgttccaaaaaaaaaaaagttgtttgaaagggatataacttttcaaaaaacattatggtgaacagtcattcataggaaggtgcttgtaagaagcaggtctgcgtatgcatctttgctggtacatgcatagaatatgtctggaagattcacacacrtggaacggctgcttccaaaggccatatgtgatgacagagtcagaggcaggagggttcactgttatctgctactggatctttttaattttgttccacatgcttgcattcacacatattctagtaagcgaataaagtactgattttaaggaaagaattggctttggtcctctgcagtagcaaggaccggtctgcctgttctcggctgtatccccaggggctgtcacagactctggcacgtagaaggtgctcaggaagtgtttgttggaagaatgaatatatggacaaggcaatgacttcctgttctggcggctgggcacagggactctgaccagcccgcccagtgatcgccttctctgtctttcctcttccgtttgcaggcggcagcagagacctccggggggcaacaagccccaacagcatggtgaccaccagccaggcagtgccaaacacaacagggaccaccagaaatcctaccaggggggctcagcaccccacccctcagggaggcccactcaccatggctacagccagaaccggcgctggcaccatggcaacatgaagcacccaccaggcgacaagggggaggcaggcgcacaccgcaatgccaaagagaccatgaccatcgagaacccaaaactggaggacactgcaggggacaccgggcacagcagccttgaggccccccgcagccctgacaccctggccccggtggcttctgagcggctgcccccacagcagtcaggggggcccagaggttgagacaaaacgtaaagacagtattcttcccgagcgcatcggggagcggcccaaattaccctgctccagtc

SEQ ID NO: 45578 - DNA, 608 bp, Homo sapiens
ttgtagttatctagtagttaattgctctttcatttattgtgtgccttatccaatgagaatggaccagaatcttgtcagtcttatttactgccacatccccacctctgatgcatgtcactcaataaatacttttgaaagaaatactgctgtacagcatttagaaataaagaggaggcacttctcagagactttcaaaatcctaaaaaaacagaccttggrgttattataatctggttttcttttcttacaaacctaaaaagaaactgaggcgcggcaactctcccgagattcatttaagatggcaagtttgagacacagccagtgatattcttccatctccctgtctcccactccagcgagctctccaaaccaagctgttgtttctgctagtcttactttattattcctacaggatgtatcaacagtgctgagcacacgtgaaaaccaaatgtttgcttcttttcccatactgcctttttgttgttgttttgccaactatagtggaaaaaaacacacaagacattggatgtcatgcaaatgagtctgacctcaatgccatgggcagaagagatgagattccattgcactccaaccttattccatggtat

SEQ ID NO: 45579 - DNA, 500 bp, Homo sapiens
aaagtaagtgactgcccaacatttacataccatggaagcgacaggactaaagcttgccctatgacttcttgacttcaaattggtgccctttccacagtatgtctcttgtctcactaatgagataatgcagatgaaggggctgggcaagtgcatattattgttattgcctcaggaggcaactcctgatttgatctgaatctagagcagcttcctgaattaaatctgcccagaggctcccaggtttgcagactaaacttgtctttatgcaaaatatcattataacacactaatatcaacatgcagttgaatcctataatcataattaattcctgattagtaaacatagccacacaacatttaaggaaacagatcattattaaacaaggacattcaagcccttactaacaaaagatggaccctggrgcatgtgcattgatcttatctcattaaccctgtggtattttctttgctggatggtgagtgcaaagtccagtacgaaa

SEQ ID NO: 45580 - DNA, 520 bp, Homo sapiens
gggaagcaaacacaggactgaaatctttaaatctatcctaagccaaagccttcttcctaagggaargtcagcttgtttttcagcctggtatttgttcactgagccttatccacagtgaaattcaaggtggcaagcctcccaaaggctttactgggccctaaaagcttatgttgaagcctctggttgtgaggatgtgctaagaaggctaaaagggactgttggcttcaggatttgaggcttgaacattcttgtactctaggaatacggtatcttgtgataagtttttgttgcttcatgttttcttcttccttcttattctctcccatcttctacagcacattataatccattttttaaagttttgattttcttttgttttcaattttataccttattttgttacatttattcatggaaagtgttatctctgattacttgacattgcttacattttattttcctggtatattgtgctttttaaaatagaaatttattaatacactgattgtagacacggcga

SEQ ID NO: 45581 - DNA, 432 bp, Homo sapiens
gctcttaaaacagcctttggctagtgttaacagctctgcaatgttagcaactctgtagctttgatcgctgtagcactgatcaccgtctcaccctctytcactgatctctgtcttcccaattctccaatagctgtcctgctcattgctgaccgctatgtccatcttctcacaaaatcccatctcttgctgtctcttgttgtcttgctttctctgctgtttctgctgtctcactgccacatcaaacgctgcctctcaccatctctagagttgagtggctggcttaatcctgatgcaaggcaagttcttggctttgctcaggaaagaacgttagagtaagccggtgattgaataaaacagctttattgatggggcagcagtgttacagctctgtgactaagcctgtggagcaggcataattcataggcagagggc

SEQ ID NO: 45582 - DNA, 602 bp, Homo sapiens
tgcatcttcctggtaatttaattttttttccagcatattgttagaggtgaggtgatcactgttgcttttttttgagatggagtctcgctctgtcatctaggctggagtgcagtggtgtgatctcggctcactgcaacctctgccycccaggatcaagcgattctcctgcctcagcctcccgagtagctgggactacaggtgtgggccactatgcccagctaatttttgtacttttagtagagacagggtttcaccatgttggccaggctggtcttgaactcctgacctcaggtgatttgcccacctcggcctcccaaagtgttgggattttggtcgtgagccactgcacctggcccatgttgcttttagctcaggctgagacataggtgagtcggctctgcagatttcctgttgcttgtctgttcttgctctattagtactaatattaagttcaatctgtaatttatttccaggagtctttttaagccacttgtccattttttgagggttaattaagctaacacatgagccacgtgtactgcgaaacaggacaatacatgggaagtaaggggtgggaaagcctgtttgtgagatggtcagtg

SEQ ID NO: 45583 - DNA, 607 bp, Homo sapiens
tcgtatcttcccagctagactggtaattccttgatgatgaactatgttttctatttcttttttaaaaaattaacttaaaaaatcaaggtaatatgtatatgtaatttaaaacgttatcagtacaaaagagcttataatggaaaacaccattccctactcattccttcccatctttctttttgctttccttaggggtatggccttccaatacttagttggttttcctggcaagttcctctatattttactgctctttttctaatttttgatttgtcacatgtagacattgtttactgaatttctgttatgcgatataagcatagggtgttctgatagctctycctctcatctccccttccctgctttttcagccttgcattttcccaatatgttgtaatttgttgttaaattactagtcaggatttacattgttatgactatataaatacggtttaccactgagccaagtaaggtatatgaactgattcctttttacaaacttttgtttttcctgaagttgccaccttttcttatgtgttatgttgtctctgaaagtgtaattacttcttatttccaagtgtcttatcagtattagtttccaaattct

SEQ ID NO: 45584 - DNA, 607 bp, Homo sapiens
tcgtatcttcccagctagactggtaattccttgatgatgaactatgttttctatttcttttttaaaaaattaacttaaaaaatcaaggtaatatgtatatgtaatttaaaacgttatcagtacaaaagagcttataatggaaaacaccattccctactcattccttcccatctttctttttgctttccttaggggtatggccttccaatacttagttggttttcctggcaagttcctctatattttactgctctttttctaatttttgatttgtcacatgtagacattgtttactgaatttctgttatgcgatataagcatagggtgttctgatagctcttcctctcatctccccttccctgctttttcagccttgcattttcccaatatgttgtaatttgtygttaaattactagtcaggatttacattgttatgactatataaatacggtttaccactgagccaagtaaggtatatgaactgattcctttttacaaacttttgtttttcctgaagttgccaccttttcttatgtgttatgttgtctctgaaagtgtaattacttcttatttccaagtgtcttatcagtattagtttccaaattct

SEQ ID NO: 45585 - DNA, 607 bp, Homo sapiens
tcgtatcttcccagctagactggtaattccttgatgatgaactatgttttctatttcttttttaaaaaattaacttaaaaaatcaaggtaatatgtatatgtaatttaaaacgttatcagtacaaaagagcttataatggaaaacaccattccctactcattccttcccatctttctttttgctttccttaggggtatggccttccaatacttagttggttttcctggcaagttcctctatattttactgctctttttctaatttttgatttgtcacatgtagacattgtttactgaatttctgttatgcgatataagcatagggtgttctgatagctcttcctctcatctccccttccctgctttttcagccttgcattttcccaatatgttgtaatttgttgttaaattactagtcaggatttacattgttatgactatataaatayggtttaccactgagccaagtaaggtatatgaactgattcctttttacaaacttttgtttttcctgaagttgccaccttttcttatgtgttatgttgtctctgaaagtgtaattacttcttatttccaagtgtcttatcagtattagtttccaaattct

SEQ ID NO: 45586 - DNA, 547 bp, Homo sapiens
acttggtccttcccaccacactgggaattatgggaactacaattcaaggcgagatttggttgggaacacagagccaaactgtatcaataatacaaataaaaactgaaataacaaaccagatgatccaatagaggaacgtggtcaggaaaaacaagcctggcagacagatataagctgaagcctgaaggtaagaagaaaccacacaggcaggaaggaaaacaartaacagaccatgtcaggaagaaaacaaactaaacaaagttgatgagggttggaaagatcttgggctttctaacaattggtaggtggcagatttgctgtcttgtagcatgatcaggaaataatgatgtagaatgtagttgacatgaatgaatggaaaacattcttcattggaacctatgatggttaattttatgagttaacgtgacaagtacatagtacccagatatttggttaagcattattctcaatatttctgtgaaggtatttttgaaataaaattaatatttaaagcagtagactttttaagtaaagtacattctccttc

SEQ ID NO: 45587 - DNA, 547 bp, Homo sapiens
tttccttctcttcagagagctggttgttaagcatttaccagtatgtttaccacttacattctcctgggggctggggagacaaataataaaycataaatatgtgatatgtcaggtaggtgatggctatcctctgaagaaggataaaaaacagcaggggattgagagaataatggattgagacacctgaaacattgtgctttttgtctgttctttgttttgtttcgttttattagataacatttcagacaaggtagtttgactaaaaaagccttggactatgggagacaggaggcctgggtgccaacctctgtagttctgcgattttctataagtaacgtttcttaagcctcagttgtcttgtttgtaacctagctggattgaaccaaatgctcccaaagattgctgtctgctctgtgattctctcctgatttttaaactaactgattaagtgaaatttctcgaactaggccaaaaagactcatcccacggcagaaacaaatgcttccaaaaaaaaaaatcattactagattcacttcaggcctccata

SEQ ID NO: 45588 - DNA, 558 bp, Homo sapiens
attaatggaatgaatgaatatatgaattctgataatgacaaacagcatgtcttcttaaagattaggagacaaaacttttatcaaagtaggaggagagaatttgaaattattctagaatattttgttgtggtcctatctgctgcaacttcaaaaaaaaaaaaagatggttttctttttctttttttatcagccacagagggatggattagatgaccttctcatacaagttgagtcactcccaacttgagcatcatgtaaacctggccacttacctcatatcgggctcagcagtggcagcatgcagtggcaggcggccatttttatctgggatattgtgcttggcaccgtttctgagtagactcacacagccttcaagccagccctgaaatacaagagcaaccacatcattatataacagaagctcacgtaacatggtccaamaaactttctctagatttttttccctttctctggtttggttaaaaacatattttatttgacttgaagtggttaagaaccacaactccatcttagatgcctcaacagatggccgaaggt

SEQ ID NO: 45589 - DNA, 558 bp, Homo sapiens
attaatggaatgaatgaatatatgaattctgataatgacaaacagcatgtcttcttaaagattaggagacaaaacttttatcaaagtaggaggagagaatttgaaattattctagaatattttgttgtggtcctatctgctgcaacttcaaaaaaaaaaaaagatggttttctttttctttttttatcagccacagagggatggattagatgaccttctcatacaagttgagtcactcccaacttgagcatcatgtaaacctggccacttacctcatatcgggctcagcagtggcagcatgcagtggcaggcggccatttttatctgggatattgtgcttggcaccgtttctgagtagactcacacagccttcaagccagccctgaaatacaagagcaaccacatcattatataacagaagctcacgtaacatggtccaacaaaytttctctagatttttttccctttctctggtttggttaaaaacatattttatttgacttgaagtggttaagaaccacaactccatcttagatgcctcaacagatggccgaaggt

SEQ ID NO: 45590 - DNA, 586 bp, Homo sapiens
tattttcactggacctcccccctcgccaggggattagcactttaagccttcagagaagagcgaattaacttttgctaagcacctgtgaggtttaatttctcacrtactctccatggcaaccccaccaggcggtcattcctctcgaatgttaaagatacgtgtttagagcagatgatcatgattacacaactggtgtgcagcacagccaggtgcccagatccgaatcccacaccctcctcccaccaccatgggcctcagggacatgcttctagcacagtcatggaccctgagtgacataaaggctgtgacaggggacgcaggatcttcagatggccccacagtgcctcctctgagtatctatctcccaagcttctcgcctggcctggttgctgtgagggcctggggagaggcagagacaggttgggtgtacggaaaatgcacactctgccaggcacccctgacacgcactgctgaccaggcatagcgttcagtggggctaggacttggacgagggtgcaggcttgagcaggggtgcaaaaagccagtctgggcagatgctctccctctgtggggcgccgatctcaga

SEQ ID NO: 45591 - DNA, 1388 bp, Homo sapiens
tgtggccttcactgtagtgaaatagaagatcagatcttcaggactatcaatccaatacctttcattggctatacatttacttaagaaatattgttttcaaacaaatgtacttgctcccaggaggctgtgtggttgagtcartttgctttgcctaatacttacgatttgctctcagtgattttaaatgcacaggcaccattcagtgtaattgatcttttgagtagaaggattatggcaagccatgttcttctttgtcacttatagaagttaaaagcaaatgcacatacaagctgatgaactggatattttccatattctttgcaaacatttcacttttagaagcatacatctgttttatacttgctaaaggatatacaacccaaagctttctatttctactaataattaagagcccttttttcttttacaacagcatgggtatattttattctactggagagtcacttaaatagttgaggacaaatgtgaatcccacttacacatcttctgtggaacagcatgatatgtgtataactctgaatcattcgagtatcatctccatgtgaatatgcatgtggttagaatagaggagtggacacagtctggaaatggtttgggtctggtttgttatttagttatcctgttaatatccttctacctatctgtgcttgctgtttgaacgggactggggttcaactttggatctccaacatggaacaataaagtctacatcgttcagtgaactttgggcataattactgtgtctaggacaccactacaatttcttttcactgttgtcttcctgcccatccttgaactcaccataatttgaaaaggcagtagatcatagaaaactaccaaaagaccaaccaagagctaaatagtttcttcatagcttctctcattttgcttttgctcaatttcaaattcttgggagtttccatagctaagcactgaaatgtgggcctattcccagtcaggaaccagataatcctttttgttggtatatatgttatgatgtagaaaatgaggagtcacttaaaaaaaattcaatggagaattccatttatttgtaggatttctttttctttgaggattcagagttggaaatgaagtgcctttggccttagagaataagatacaggcaaccacaacagcctggaattatcctcctttcctaaaataattctgctgtcccgagtgacttacagccctgtggacccaacccagggtagggcggagacaggaggcagggtagtgagatgtgctttgaatctatctatgtccaggagtaccccttgccctaggagatttggggaacaaagtaagaggatgtcaactctccatctcctggcaaagagccacttgcttgtgcagtttaatttttt

SEQ ID NO: 45592 - DNA, 579 bp, Homo sapiens
catcagtcaaatcatcttccacttgcttgctaaataaatctggtaacacaggcaatatatcctcctgattcaaatggccttgcttgttgaaatgcaacagcaataggccttgagaatgaaggatattctggatttcagaggcatactgcctggttatgaacattaaagacattgtgcaggtgtttacaccctaactagtcttttatggtaagctatcaactgtgcatcacagattactaatgagagaagaaatgcctgttccactgatgtagcttaagtaagtagtgtgcagttcagttctggaaaagatgccatcactgccatttataagcagtatgttacccttcgttttcacattttctagcaaaagtttaataatttattttgattttagaaaaacaaacacaggaagcaaaactttatcaccactagatcagcgatacctatgccaaataagayataacaatcaatgtgttaacttagaaaacaatttttaaactaacatgactataatcacatgtatttttagaaattttgtgtaaacaagccttccaaaagacagtttggtaggaaatctcc

SEQ ID NO: 45593 - DNA, 504 bp, Homo sapiens
gttttggagactaataagactttaaaatgtatgtatgaaataacatgaactaaaaaccataaaatagtctgtatatcttaattataaatatgcaaatattctataggttaaaagttagcgataatagttatagatttagtatttgaagatgacaggttttataggtatattttagtaacaaaatttaacttcaaaaattttagttataaaattttatataggttttgttttacctatgttaaaacatatgggtagagaaaagttgttaaggaaataatatatttaggacatttacttctggatgtgaaactatgggtgatttttatctctttatgttttttagtattttctacagcttgcataactacctgtatagtcagaaaagaaatatagtttctatactttttcttggagacctgaagctgaaatcataaatgtttacattsagcagaatatgtaggaaaacaaatatatggaattgtaccttggtacacgatgggaatc

SEQ ID NO: 45594 - DNA, 549 bp, Homo sapiens
gtaaagcatttagtatagtaccaagcacacggcaagcacacaataaaaatgaaccattattataggaagtacagggtataaaaataaatcyctgcatgctagaaagtaagaatggggaaaagcagagtggtagtaaaagtttgcatttcaaaactagtatatgaaatttaaaaaggtaacaacagtttctctgggaagaaatttgtttatgtccttacctctcaattgtggtctgagggcccttttatggaatatcaaggtctttctgctgggttgacacttttctccatttctaatttctgtaaaaatatgagtattagaggatttaaatggtaataggcacactatatctttgcactagttctgtgctatctttggctcgagtctcccaattaacagtgaacatcaaagacaccaattttgaacatgagactgagttgttctgtttgtatgtttgtgtctgcagggaagtaggaaggagatgaaaattgtaaaaaagaactgctctttaaatattttctaattacttcaagacttgcaagaaattga

SEQ ID NO: 45595 - DNA, 549 bp, Homo sapiens
gtaaagcatttagtatagtaccaagcacacggcaagcacacaataaaaatgaaccattattataggaagtacagggtataaaaataaatccctgcatgctagaaagtaagaatggggaaaagcagagtggtagtaaaagtttgcatttcaaaactagtatatgaaatttaaaaaggtaacaacagtttctctgggaagaaatttgtttaygtccttacctctcaattgtggtctgagggcccttttatggaatatcaaggtctttctgctgggttgacacttttctccatttctaatttctgtaaaaatatgagtattagaggatttaaatggtaataggcacactatatctttgcactagttctgtgctatctttggctcgagtctcccaattaacagtgaacatcaaagacaccaattttgaacatgagactgagttgttctgtttgtatgtttgtgtctgcagggaagtaggaaggagatgaaaattgtaaaaaagaactgctctttaaatattttctaattacttcaagacttgcaagaaattga

SEQ ID NO: 45596 - DNA, 613 bp, Homo sapiens
ggacggggacagcctgtgtgtgatggaaggacatctccgtggacagggacagcctgtgtgtgatggaaggacatcctagtggacatggccagcctgtgtgtcatgccaccaggcagtgggattgtgcttagcagtgaggggttactgctgactcacatgacatgatggatcatacattgtgcattttgctgtgcagcagaagccagacttgaaagctggtattgattctttttaccggacacctgggaggtgcagaactgtagggaagagacccgtccgtggtcgctaaaggtttgagtgtagagggtgaccggagaggcatcccgagggggtgtgggtgtggaagctgctctgtctggcgcggtggtggcggacacctgaccgtgcctctctcagagcccgctggacggcaccagcatggagctaagggaggaggaatgcagacagcggcccatgaaccgcagaascacactgtgggctgggaagaaaggagctcttttcagtggccttgggaaaggcgtttgactgtggttcactgtaaggctgaagacaaaaagaactgcaaaccgtgggctgcgtttggcatttgcttcttacaggaatcaataagccc

SEQ ID NO: 45597 - DNA, 573 bp, Homo sapiens
ggcctcactctcttgcccaagctggagtttactggcctgatcatggctcactgcagccttggcctccttgggctcagggaatcctcccatctcagcctcccaagtagtcgggattacaagcgtgagccaatatgcctggcccattttcattctttagcgaggatattctttcagtgttcccacaatccagattttagaaataaatttacagatttcaaaacattaaataatgacatgctccaccacagtttaagttagtatcctgtgggagaagcatagtacagcatgcaaacatgttctaagaactttagagcccggctgcctggttgaaacctagactgctagttagcaaaaactaaaccaaaaccaaaactraaactccttcaatgtcatacatccaagactcaattttttttatatataacataacttgcctcacagaaatgttaaaagctttaagtgtactgaataaaagtgttagctatgattactacaaagtttttaatatttctttgacccccttaccccatcaaaaaactttgaatataacccagtattcccaactcaatttat

SEQ ID NO: 45598 - DNA, 587 bp, Homo sapiens
ttcttttcttggtaggtcattagccccattcatgagggatccaccctgtgatattatcaccccccaaaggccctatctcctaacaccatcactttgggggttaaggtttcaacatataaattttgaaggagacaaaaacactcggttcatagcaaagaggataaatactgtggccaaggtttctcagtgaataagcaatggaacagagtctcattcaatgagccatttatggaacacctgctctggcccgggtatggtacaagcttcagggacagaggctggaatgtgaccagacataggacttcagtggagcaatagaagtgaaccaaggactrtgtgaggcaagatgggcattgcggtgggcagcccaccaacgtggctcagggagtgggtggggtgggttgtccttgacagactctagtttaaggaaggctctttgaggagtgacaattggcgtagctctggaggatgagcaggagtgaggaaggctaaagaggaaagagggccccactttgcaaagaaaaaaaaaaagttagagagccacacagcacatttgggaaaacaccatgcctgactcagggtaaatg

SEQ ID NO: 45599 - DNA, 467 bp, Homo sapiens
gtcaaatcccatggtttgtccctagatatcactattttgccagagccatggcatttgacatccttaatctttccttcttaaatcttttcctctttaaagtgccagggggcacttcctgcctgccacaattgtaggcaagccaattgccagagaaaaccctgaagctgagtcacaggtactgacagttggaagttggacaaatgcaagtaaaatgatagatgatgagaggatgtggtaagctatcaacaatggctgccacaactgctgtatattcaggttggttcttttcagtgaactcaaccatctgtccaacatcttacacatctaacaggcacattatactagcaccctaaaaacaaaacagctgatkcctatttctccaaacttgttctcccttaaaattcccccatttctgtcatttgaaatttcattcttcaagttgctcagttataaactttgaattcatc

SEQ ID NO: 45600 - DNA, 525 bp, Homo sapiens
gtagcattgaacataatctattttcaaacagaaacaaaaaacaattggaaaaggaaagaaaaaccttaaattattgagttactccttggttactgcttggcatataactataycctataaagagaaacagagggatgctctatgtcaaaggatacagtagagctgctcttttttgtaccacagggcatgaagtgctctcctttgtttcgtcctggggctttttatttaactcttgatcacagttattgcatttatcttcttcaggattgaagccattttgaagaatttcagtttgctcttccattttctcatcatgtacagaatttatactatagtcaaaaactgactccatattaacatctgtttcttgaagactgtcatcaccaatgctatgatggtagttgaaagcaagaggttaatccttatcaccaagcttttgggaaaaatttcatttcctaagcatcaaaattttggaaatcaaataatgtaacagattataaatgtagtgaagaaaaaggaccattg

SEQ ID NO: 45601 - DNA, 554 bp, Homo sapiens
aggttgcccaggctggtctcaaactcctgggctcaagtgatcctcccaccttggcctccgaatgttaggattacaggcgtgagccagcacagctggccttctgttgactctgtaagttctttggtggttttgcccctagttttatcccatctggtatctggtttacagcagctatttcaaacacctcagttaattgtggtgagaattttgtaagattcggcagggtagggaggatggggacagkttcttggggtgcatgaatgagtcctgctttctcagcctgctggcggttttccttaatctctctcttgctttgatctctcacttcttccacattcctgggcacccacccacatcccttaccccagacacttgcttcctacctagatgctaccttggtagggaggtgcagccttgtcgctgaaatggaggtaatgtgggcctgggatttgtgtctttttcagaacagtgcaaccctgaaactcgtcctgttgagaaaaaaataagatcagctcttcctaccaaaaccgtaaagcctgtggaaaacaaaggtg

SEQ ID NO: 45602 - DNA, 612 bp, Homo sapiens
ttcagaagtgataaaaataaagtatgtttttttcatttccagttatattttggttaagactctgcaattaagagacactgacctctaaagttatttccctaatgaccacttccatataatgtattttaatacttatattttcataagtatctattagatttcagacattgtattgagttttctacatatatcatctcattttaatcttcaaatacatattattaaataagacttagctttcatacatgccagcattttgagaaatcatatccaaagtatataattcagaccaggcatggtggctcacacttgtaatctcagcactttgggagaccaaggtggttggatcacttgaggtcaggagttcaagaccagaagaccagcctggccaacatggtgaaaaccaatctctastaaaaaaataaataaataaataaaaaattagccaggcgtggtagcgcatgcctgtaatcaggaggctaacacaggagaatagcttgaagccagaaggagtttgcaatgagctgagatcatgcccctgcactccagcctgggtgacagaacaagactctgtctcttaaaaaaaaaaaaaaaaaaaaaggaaataattta

SEQ ID NO: 45603 - DNA, 560 bp, Homo sapiens
atatattatacatatatttgcaatattctttgttgtttttaatccaaagtaacaaacttggtcattaattcaaattagtctagttacctttaatgtaactacatatatattttgwttatacatcttatttttttctattgaaaatcctagctttttataattaaaccttttattttgaaaaaattgaatattcacgtgcacttgtgggaaatagtattttcatttactcttattatcccagattgtatcacattgcaaaactgtaatacaatatcccaaccagggaatggacttgacaaaattcaccactaagattttacctgtgtgtgtgtgtgtgtgtgtgtgtgtgtgtgtgcatgtttatttctgtgaaattttatcacatatgcatgttcctgcatccactaacgcagtcaagttttgtatgaacagttccatcattgcaggcattctcctgtagtccttccataactacaccagcatccctcttgccctcctccctcaccacatttctaatctctgacaactaataatctgttcttcacctctgttatttgatc

SEQ ID NO: 45604 - DNA, 560 bp, Homo sapiens
atatattatacatatatttgcaatattctttgttgtttttaatccaaagtaacaaacttggtcattaattcaaattagtctagttacctttaatgtaactacatatatattttgattatacatcttatttttttctattgaaaatcctagctttttataattaaaccttttattttgaaaaaattgaatattcacgtgcacttgtgggaaatagtattttcatttactcttattatcccagattgtatcacattgcaaaactrtaatacaatatcccaaccagggaatggacttgacaaaattcaccactaagattttacctgtgtgtgtgtgtgtgtgtgtgtgtgtgtgtgtgcatgtttatttctgtgaaattttatcacatatgcatgttcctgcatccactaacgcagtcaagttttgtatgaacagttccatcattgcaggcattctcctgtagtccttccataactacaccagcatccctcttgccctcctccctcaccacatttctaatctctgacaactaataatctgttcttcacctctgttatttgatc

SEQ ID NO: 45605 - DNA, 560 bp, Homo sapiens
atatattatacatatatttgcaatattctttgttgtttttaatccaaagtaacaaacttggtcattaattcaaattagtctagttacctttaatgtaactacatatatattttgattatacatcttatttttttctattgaaaatcctagctttttataattaaaccttttattttgaaaaaattgaatattcacgtgcacttgtgggaaatagtattttcatttactcttattatcccagattgtatcacattgcaaaactgtaatacaatatcccaaccagggaatggacttgacaaaattcaccactmagattttacctgtgtgtgtgtgtgtgtgtgtgtgtgtgtgtgtgcatgtttatttctgtgaaattttatcacatatgcatgttcctgcatccactaacgcagtcaagttttgtatgaacagttccatcattgcaggcattctcctgtagtccttccataactacaccagcatccctcttgccctcctccctcaccacatttctaatctctgacaactaataatctgttcttcacctctgttatttgatc

SEQ ID NO: 45606 - DNA, 560 bp, Homo sapiens
atatattatacatatatttgcaatattctttgttgtttttaatccaaagtaacaaacttggtcattaattcaaattagtctagttacctttaatgtaactacatatatattttgattatacatcttatttttttctattgaaaatcctagctttttataattaaaccttttattttgaaaaaattgaatattcacgtgcacttgtgggaaatagtattttcatttactcttattatcccagattgtatcacattgcaaaactgtaatacaatatcccaaccagggaatggacttgacaaaattcaccactaagattttacctgtgtgtgtgtgtgtgtgtgtgtgtgtgtgtgtgcatgtttatttctgtgaaattttatcacatatgcatgttcctgcatccactaacgcagtcaagttttgtatgaacagttccatcattgcaggcattctcctgtagtccttcyataactacaccagcatccctcttgccctcctccctcaccacatttctaatctctgacaactaataatctgttcttcacctctgttatttgatc

SEQ ID NO: 45607 - DNA, 382 bp, Homo sapiens
tattgataaagttactttaaacattgtttagtccaaaaaacatggattgaaagcctgtctgttttcagtaacacttcagtgaggcagccttcccctagctgtgatagtctcctcagtgtaatgctgtttcataacrtttctccataggttatatcttgacagaaaaacggacatgaaataaaaagaaacataaaagatgagaaaaatccatactgctttttaaaatgttgcaaaccccactgtacataaggcagacctgtcactgttcttcaacatttgctgaacctacagctatgataagaaagaaataaaaacacagtatattttgtggggggggggtatcaaatgtgattgaggttagagttggaaaagatgaaaactg

SEQ ID NO: 45608 - DNA, 570 bp, Homo sapiens
ctctgttctttctcacaccaccatatgttacacttgccaccattttctctcaactccaccctgagttaaagctgcttttcccaggatttggagacattttgcttatctttccttaactcgatccaytatgtgccatcactagaatttaaaattgatttcatatccatttaaattaatttgatcctcacaataatcccaagaggtagacagagtggattgtattgttagtgaacttctttctcatatgaggaaagtaaggcccagaggggtcgtatgggttgcctctggtgatgaggttttcgcttttcaaatgttgcatgtgtggctacaaccatgcttcattgttcttcccacagaagacagtgtccacaaatcaggctttctctctctctctctctctctctctctctctcacacacacacacacacacacacacacacacacagacacacacattagcaaaacttgaatacttgtgacatgctaacatcaccaccattttctctcagccccgccctgacatatcagggtgagactatcagagtggagctgagagaaaatggtggcga

SEQ ID NO: 45609 - DNA, 570 bp, Homo sapiens
ctctgttctttctcacaccaccatatgttacacttgccaccattttctctcaactccaccctgagttaaagctgcttttcccaggatttggagacattttgcttatctttccttaactcgatccactatgtgccatcactagaatttaaaattgatttcatatccatttaaattaatttgatcctcacaataatcccaagaggtagacagagtggattgtattgttagtgaacttctttctcatatgaggaaagtaaggcccagaggggtcgtatgggttgcctctggtgatgaggttttcgcttttcaaatgttgcatgtgtggctacaaccatgcttcattgttcttcccacagaagacagtgtccacaaatcaggctttctctctctctctctctctctctctctctctcwcacacacacacacacacacacacacacacacagacacacacattagcaaaacttgaatacttgtgacatgctaacatcaccaccattttctctcagccccgccctgacatatcagggtgagactatcagagtggagctgagagaaaatggtggcga

SEQ ID NO: 45610 - DNA, 570 bp, Homo sapiens
ctctgttctttctcacaccaccatatgttacacttgccaccattttctctcaactccaccctgagttaaagctgcttttcccaggatttggagacattttgcttatctttccttaactcgatccactatgtgccatcactagaatttaaaattgatttcatatccatttaaattaatttgatcctcacaataatcccaagaggtagacagagtggattgtattgttagtgaacttctttctcatatgaggaaagtaaggcccagaggggtcgtatgggttgcctctggtgatgaggttttcgcttttcaaatgttgcatgtgtggctacaaccatgcttcattgttcttcccacagaagacagtgtccacaaatcaggctttctctctctctctctctctctctctctctctcacwcacacacacacacacacacacacacacacagacacacacattagcaaaacttgaatacttgtgacatgctaacatcaccaccattttctctcagccccgccctgacatatcagggtgagactatcagagtggagctgagagaaaatggtggcga

SEQ ID NO: 45611 - DNA, 570 bp, Homo sapiens
ctctgttctttctcacaccaccatatgttacacttgccaccattttctctcaactccaccctgagttaaagctgcttttcccaggatttggagacattttgcttatctttccttaactcgatccactatgtgccatcactagaatttaaaattgatttcatatccatttaaattaatttgatcctcacaataatcccaagaggtagacagagtggattgtattgttagtgaacttctttctcatatgaggaaagtaaggcccagaggggtcgtatgggttgcctctggtgatgaggttttcgcttttcaaatgttgcatgtgtggctacaaccatgcttcattgttcttcccacagaagacagtgtccacaaatcaggctttctctctctctctctctctctctctctctctcacacwcacacacacacacacacacacacacacagacacacacattagcaaaacttgaatacttgtgacatgctaacatcaccaccattttctctcagccccgccctgacatatcagggtgagactatcagagtggagctgagagaaaatggtggcga

SEQ ID NO: 45612 - DNA, 381 bp, Homo sapiens
cttcatgaaaaagttgcagatttcaggcataactgaatattccaatcttcattgattacagaactttcatgaaattttactatcataaatacctatagtttttacaatttctgactgatttgactccataaaaagaaaatgtaatagctttatattttctaaaatgtatgttttcattttctaactttagttcgayaattatttttatcttggaatagaatgaaaagagtcaagtattctggggtaaaacttgaggaatattgtaaaggatttcccactggacagttctgacactacaaatagattttctctaacatgtcaactctgttaaattggtagtggctggcttgtataccctatgggggttgttttaaaactgca

SEQ ID NO: 45613 - DNA, 565 bp, Homo sapiens
aagaaagaaataagtaatattaacagaattcaagcagacgtatcaagaccagatattgggcctgtagaatgatattaaacatttttatgaaaaaagcaggcatttcaccatttattttaatttttgcaaacatataaacatcctaaaacagagaaagaagaatatctaaatattaggctgatgcaaaagtaattgcagtttttgccatttaaagtaatggaagtaatagaaaatcttattttccccttatcccctgagctgcttgggagggttagagggagttatacaagaaatgtcaaggtatccatatttttttaacaaaagcataatatatttatcatgtaaaatctaatgaataagttattctccttattaaaatatcactatatgcttccacgggttacagaaaacatggcacaaagaaaagggcacagtattaagattagagaaaagaaagcagaattgttgaaagactcagagagggatatagaaaacccttytcctcattaagaagcaaagcaggcagctagcattgtgcagagtttattgggcaaaacagtcatca

SEQ ID NO: 45614 - DNA, 559 bp, Homo sapiens
gtgaatgggttgttttcatgcagtgactccttttcctctgggtagaaacccagtagtaggattgctggattgaatggtagatctacttttagttctttaaggaatctccacactgttttccaaagaggttgtactaatttacattcccaccagcaaygtataggcattctggaggggacaaatattcaaaccacagcaccatccaggaagctttcctgacacttccccaacctccaagccaggtgaagtgcccatcctaaacagtaccatcaggctcttatgtcactttttacacaggattgcagtggctggggtgctaatctgtcacccctactccctttgagctaccttaagacagtaagtactgattcttgcctttattttcccagcaccactgtgtattgaatgaatgaatcaataaatgaagtctatttggggagtagacattaacaaataattacttggcagtccatggcaactgacaaaactgagatttatgtagaagggctgaggaaactcagaggagcagtcacctaacccgcttggggtggagaaccag

SEQ ID NO: 45615 - DNA, 559 bp, Homo sapiens
gtgaatgggttgttttcatgcagtgactccttttcctctgggtagaaacccagtagtaggattgctggattgaatggtagatctacttttagttctttaaggaatctccacactgttttccaaagaggttgtactaatttacattcccaccagcaatgtataggcattctggaggggacaaatattcaaaccacagcaccatccaggaagctttcctgacacttccccaacctccaagccaggtgaagtgcccatcctaaacagtaccatcaggctcttatgtcactttttacacaggattgcagtggctggggtgctaatctgtcacccctactccctttgagctaccttaagacagtaagtactgattcttgcctttattttcccagcaccactgtgtattgaatgaatgaatcaataaatgaagtctatttggggagtagacatkaacaaataattacttggcagtccatggcaactgacaaaactgagatttatgtagaagggctgaggaaactcagaggagcagtcacctaacccgcttggggtggagaaccag

SEQ ID NO: 45616 - DNA, 559 bp, Homo sapiens
gtgaatgggttgttttcatgcagtgactccttttcctctgggtagaaacccagtagtaggattgctggattgaatggtagatctacttttagttctttaaggaatctccacactgttttccaaagaggttgtactaatttacattcccaccagcaatgtataggcattctggaggggacaaatattcaaaccacagcaccatccaggaagctttcctgacacttccccaacctccaagccaggtgaagtgcccatcctaaacagtaccatcaggctcttatgtcactttttacacaggattgcagtggctggggtgctaatctgtcacccctactccctttgagctaccttaagacagtaagtactgattcttgcctttattttcccagcaccactgtgtattgaatgaatgaatcaataaatgaagtctatttggggagtagacattaacaaataattacttggcagtccatggcaaytgacaaaactgagatttatgtagaagggctgaggaaactcagaggagcagtcacctaacccgcttggggtggagaaccag

SEQ ID NO: 45617 - DNA, 1709 bp, Homo sapiens
tgcatacaacagaggagaaggggtgctataatttgaactttccttcaaaactcatattgaaatttaattgccattataacagtgttgagaggtgattatgccagaagggctccgcccttgtgaatggtttaatgcctttattgtaggagtgggctctgataaaaagttgaatttggctcattgtctttctctccaactcatgtgcttgcttgcctttctgccatgggataacgcaccaggcagggctttgccagatgctggcaccatgctcttgaactttccaggctctagaactgtgaaaaataattttaaaaaatttatccagtctctggcattctattataaaaacagaaaataagctaaagttgrggcaagagagttggatattgcaagagattgattatagtgatgcactgtggataattagtaagaagagaagggggaaattagtgtaagaagagtgaatgagatatttctatgaggtcgtagaattgaatgagtcatttttatcatttttagaggtgttacagttctcacaataacaaggtctaatgacaaaaataaacatgggacttggcagctaaggaggagtagaagaaaaaatcactggaggtaaagaggtcaaagaactgagaggaaagcataacagccattaaaatatatcccacaaatctccagccaaggggatcataattaacagatgaccccagctactgtgtaccaaaatccatcaccacgtcacaacaaagtcatacttcccataggtttctcacagccaatgactgagtgcagcagggataaaaatgcaggcccattcctgggagacacaagacccctcttacaagcaattttgcctcaagccttccccattgtccttgaaaagctttccttacaactgaactgcaatttaagttacttttatccaacctctcttctctccctctttcctcccttggggtaaaacctgcagtatagtctgatgactctcaaaatttctcttgagttcctccacaaattttactctcaaaagcattcattcccctaataaattttacatatgtttaatcctatttaagcttctttttggaggacccagactaacacagcaatgtattagctgaatcttccacctggattttgaaataacaaagaatggtaaatagttaagaagatatagagggagacagttatccacatagtaaagtctgcaaaaaataaagaaatataataaagattaataagatgtcaaggtaacacagaaagggctaatagtagcaaagtctgatggcataaactttcaaggaggtagggactcaaaagtgttagaacagtgcgtgagacgtctcttatgaagtcaaataattgactgagataagaagaaagaaggtgttgaataaacagacaaattgtaaaggtaaaacatttgccccaattataagccctgagataagaacgttaggaagaaaacacatcatccattcaaaaggacctaaggaataaatggcaccaagggaaagcctggtttctgctacaaaaataagattaagggaacaggaaaagacaaatgtaggatgaggataaagagtattttcctaatgacagaaagcacatgggaagagtttgggaagcctatgaggaaaagaagactgggtcagaaaatggagaaagatggcaagggggttggagcagtgcagtggtgagagtactag

SEQ ID NO: 45618 - DNA, 627 bp, Homo sapiens
tagtaagataccaaaggatgttagaaatctgaggagaagttgcctaggatttagagatcactcctagtctaatatcagtaggtttttaggattacaggttattcaagggctgcttcctgtgtgtagaggttgtattatgagtcctgaaaggagagagaggaaaagagtctgccrtattcagaataaaaaggcaacgaagacggagtgttttgcggattgccagataagtcttttctgaccgttcccaatcctgaaagttctaacatggggactgcttggtctttgaaggaggtgaattgcagtaaacaaatcatgaattatcatctgcagtagatttgaaagtctttgagtgaatataactgggggatgtaaccttaactttcagataagtttctaaacagttcagcatatcattttaaaatgagcaatggatgtttaatgaagaaaatatgaaattcaggttatcatgtaaattacaggtaaacaaacaaaagggaaatacaaaagtgacctatactctaatcacccaaacagaatcactgttaacaagttggcaaaattctttctgggatttcctaggcatctgtagtccaacttagctctatgtttatttaactacatttatgc

SEQ ID NO: 45619 - DNA, 627 bp, Homo sapiens
tagtaagataccaaaggatgttagaaatctgaggagaagttgcctaggatttagagatcactcctagtctaatatcagtaggtttttaggattacaggttattcaagggctgcttcctgtgtgtagaggttgtattatgagtcctgaaaggagagagaggaaaagagtctgccatattcagaataaaaaggcaacraagacggagtgttttgcggattgccagataagtcttttctgaccgttcccaatcctgaaagttctaacatggggactgcttggtctttgaaggaggtgaattgcagtaaacaaatcatgaattatcatctgcagtagatttgaaagtctttgagtgaatataactgggggatgtaaccttaactttcagataagtttctaaacagttcagcatatcattttaaaatgagcaatggatgtttaatgaagaaaatatgaaattcaggttatcatgtaaattacaggtaaacaaacaaaagggaaatacaaaagtgacctatactctaatcacccaaacagaatcactgttaacaagttggcaaaattctttctgggatttcctaggcatctgtagtccaacttagctctatgtttatttaactacatttatgc

SEQ ID NO: 45620 - DNA, 627 bp, Homo sapiens
tagtaagataccaaaggatgttagaaatctgaggagaagttgcctaggatttagagatcactcctagtctaatatcagtaggtttttaggattacaggttattcaagggctgcttcctgtgtgtagaggttgtattatgagtcctgaaaggagagagaggaaaagagtctgccatattcagaataaaaaggcaacgaagacrgagtgttttgcggattgccagataagtcttttctgaccgttcccaatcctgaaagttctaacatggggactgcttggtctttgaaggaggtgaattgcagtaaacaaatcatgaattatcatctgcagtagatttgaaagtctttgagtgaatataactgggggatgtaaccttaactttcagataagtttctaaacagttcagcatatcattttaaaatgagcaatggatgtttaatgaagaaaatatgaaattcaggttatcatgtaaattacaggtaaacaaacaaaagggaaatacaaaagtgacctatactctaatcacccaaacagaatcactgttaacaagttggcaaaattctttctgggatttcctaggcatctgtagtccaacttagctctatgtttatttaactacatttatgc

SEQ ID NO: 45621 - DNA, 627 bp, Homo sapiens
tagtaagataccaaaggatgttagaaatctgaggagaagttgcctaggatttagagatcactcctagtctaatatcagtaggtttttaggattacaggttattcaagggctgcttcctgtgtgtagaggttgtattatgagtcctgaaaggagagagaggaaaagagtctgccatattcagaataaaaaggcaacgaagacggagtgttttgcggattgccagataagtcttttctgaccgttcccaatcctgaaagttctaacatggrgactgcttggtctttgaaggaggtgaattgcagtaaacaaatcatgaattatcatctgcagtagatttgaaagtctttgagtgaatataactgggggatgtaaccttaactttcagataagtttctaaacagttcagcatatcattttaaaatgagcaatggatgtttaatgaagaaaatatgaaattcaggttatcatgtaaattacaggtaaacaaacaaaagggaaatacaaaagtgacctatactctaatcacccaaacagaatcactgttaacaagttggcaaaattctttctgggatttcctaggcatctgtagtccaacttagctctatgtttatttaactacatttatgc

SEQ ID NO: 45622 - DNA, 1405 bp, Homo sapiens
accccactaagtaatctccaaagtcttttctatgtagaagtctataaattttctgttaatcccagggtgagttggggaccattttgtcttttgtccttgtcgactgtctttgtgagaagctgagtctgcttacctgctgggttcagtgagcaggtatgaaggcatcatgtatggacattgaagagctgcccagagataagctctcacgtttggaggagcatgggtgtgtgggctactgttggcttcagcttgtgtacaaggatattcaattttagaaagccataattaatagtttctcttcttaccatattgaagaagtcagcttgttgccttctggcaaattaaaatttcattaaacttttcagttaagaaaatacagcttgttgcaaaaacaccgtatgcaccttacgactcttttccccgcccttcctcactgcgactcccatcactgcacaggtggaggcagtgaaggggatgccttgctttctgagctgctgaaaacatcagggtttcagttctgtcttgtttactgctatatctgatcaccttgcattgtgcttggcatgtagtagctgctcagtacataccatttgaatgaacaaatcaatcaattaatcaattaatcagttaatcagccagtcgatgcaggtgatgcctgttcctaaattcctttggtcccattaggtactttgcaacatttccatttcttctgcttctgttagaagggacctttttaaacttgaagggcagaggcccccacgcagctcatgcagatggtggtactaactggagaagcagttacagttttacctagcatgcatttctgttggagctcatttcaagtaaatgacttatactttatgtccacagcaaagaggcccacatttgtggcaatcttggtcagtacagtcaggaaggaagtgtagctgaagatcactgaggaaccagagaaattagtgtatacctggatttaatgatcaatttgcttatgttaaaaatacatttgaatatgatttactgcccttcagttaatgctagttccttgcttgcagcaggaccaatcaaaaggagctaaaccttaaaacccggatggagatgttgaaggattctagctaaagtttatgcaattaattaggcatcccctattcagaatacactttctattwgtggcttagaattgaaagatatcgtactcccaggaaaagtacaaagaggaccacgagatacattgataatgaccttatccttaattcattccacacatactcagttaagtggcttaaataagtgatagagattttaatttaaatgcgagaatataagtgggcaaatatttgaatttaagtgaaattaacacaacgtgccaaatattgaataagaaactggaatatagttggcattggat

SEQ ID NO: 45623 - DNA, 1405 bp, Homo sapiens
accccactaagtaatctccaaagtcttttctatgtagaagtctataaattttctgttaatcccagggtgagttggggaccattttgtcttttgtccttgtcgactgtctttgtgagaagctgagtctgcttacctgctgggttcagtgagcaggtatgaaggcatcatgtatggacattgaagagctgcccagagataagctctcacgtttggaggagcatgggtgtgtgggctactgttggcttcagcttgtgtacaaggatattcaattttagaaagccataattaatagtttctcttcttaccatattgaagaagtcagcttgttgccttctggcaaattaaaatttcattaaacttttcagttaagaaaatacagcttgttgcaaaaacaccgtatgcaccttacgactcttttccccgcccttcctcactgcgactcccatcactgcacaggtggaggcagtgaaggggatgccttgctttctgagctgctgaaaacatcagggtttcagttctgtcttgtttactgctatatctgatcaccttgcattgtgcttggcatgtagtagctgctcagtacataccatttgaatgaacaaatcaatcaattaatcaattaatcagttaatcagccagtcgatgcaggtgatgcctgttcctaaattcctttggtcccattaggtactttgcaacatttccatttcttctgcttctgttagaagggacctttttaaacttgaagggcagaggcccccacgcagctcatgcagatggtggtactaactggagaagcagttacagttttacctagcatgcatttctgttggagctcatttcaagtaaatgacttatactttatgtccacagcaaagaggcccacatttgtggcaatcttggtcagtacagtcaggaaggaagtgtagctgaagatcactgaggaaccagagaaattagtgtatacctggatttaatgatcaatttgcttatgttaaaaatacatttgaatatgatttactgcccttcagttaatgctagttccttgcttgcagcaggaccaatcaaaaggagctaaaccttaaaacccggatggagatgttgaaggattctagctaaagtttatgcaattaattaggcatcccctattcagaatacactttctattagtggcttagaattgaaagatatcgtactcccaggaaaagtacaaagaggaccacgagatacattgataatgaccttatccttaattcattccacacatactcagttaagtggcttaaataagtgatagagattttaatttaaatgcgagaatataagtgggcaaatatttgaatttaagtgaaattaacacaacgtgccaaatattgaataagaaactggaatwtagttggcattggat

SEQ ID NO: 45624 - DNA, 609 bp, Homo sapiens
ataaaactgtacagcgtttacggatacactttttatatgattattggctctgtagtgtttcaagttacgttctcagaaagagaaacaaaatgcccaagattaaaggaaagaagatacaaaccacgcggatttgactccatttcaatacggctgggagtcctggctctgtgtccctccgcctggctccgcaccaggtctgaagcccagtctgaggccgwcgcagctcggcggcaacagaaccacggctgggatggggctcctgcccctccgacctgcaggtcactgtttgtgagaggtggacaccttaattttctttagttgatcagaatggaacaaaaaattttaaaaatgtactccgttctccaactcctgaaatgcctctgcagttgctggagaaaagggcccgaaggtcgccgttttcaaacagaagctgccgtgtgtgcgcgcccggcatggtctcctcatcccgccggggccagtgaggctctgggggctttgcccccgccgcggcagctggtagagaagagacgtgtttcacctccccgacgtctggaccagtctggaagggatggaggcgctgtggccaagtgcagtctctctcggggtctc

SEQ ID NO: 45625 - DNA, 609 bp, Homo sapiens
ataaaactgtacagcgtttacggatacactttttatatgattattggctctgtagtgtttcaagttacgttctcagaaagagaaacaaaatgcccaagattaaaggaaagaagatacaaaccacgcggatttgactccatttcaatacggctgggagtcctggctctgtgtccctccgcctggctccgcaccaggtctgaagcccagtctgaggccgtcgcagctcggcggcaacagaaccacggctgggatggggctcctgcccctccgacctgcargtcactgtttgtgagaggtggacaccttaattttctttagttgatcagaatggaacaaaaaattttaaaaatgtactccgttctccaactcctgaaatgcctctgcagttgctggagaaaagggcccgaaggtcgccgttttcaaacagaagctgccgtgtgtgcgcgcccggcatggtctcctcatcccgccggggccagtgaggctctgggggctttgcccccgccgcggcagctggtagagaagagacgtgtttcacctccccgacgtctggaccagtctggaagggatggaggcgctgtggccaagtgcagtctctctcggggtctc

SEQ ID NO: 45626 - DNA, 609 bp, Homo sapiens
ataaaactgtacagcgtttacggatacactttttatatgattattggctctgtagtgtttcaagttacgttctcagaaagagaaacaaaatgcccaagattaaaggaaagaagatacaaaccacgcggatttgactccatttcaatacggctgggagtcctggctctgtgtccctccgcctggctccgcaccaggtctgaagcccagtctgaggccgtcgcagctcggcggcaacagaaccacggctgggatggggctcctgcccctccgacctgcaggtcactgtttgtgagaggtggacaccttaattttctttagttgatcagaatggaacaaaaaattttaaaaatgtactccgttctccaactcctgaaatgcctctgcagttgctggagaaaagggcccgaaggtcgccgttttcaaacagaagctgccgtgtgtgcgcgcccggcatggtctcctcatcccgccggggccagtgargctctgggggctttgcccccgccgcggcagctggtagagaagagacgtgtttcacctccccgacgtctggaccagtctggaagggatggaggcgctgtggccaagtgcagtctctctcggggtctc

SEQ ID NO: 45627 - DNA, 526 bp, Homo sapiens
gtccatcaacagatgaatggataaagaatatgtgctacatacacaacggagtactattcagccacaaaaaagaatgagatcctgtcatttgcaaacacgtggatggaactggggtcatgatgttaagtgaaataagcatacaaagacaaacatcacatgttctctctcacttgtgggatctaaaaatcagaacaattgagctcatggacacagagtagaacgacggttaccagaggctgggaagggttgtggggggctggcagggaggtagaagtggttaatgggtaccaaaaaaaaaaaaaaaaaaaaagaatggataagacctactatctatctsacagcacaatagggtaactgtagtcaatagtaactgcattgtgtattttaaaataacatataagagcgttaactggattgtttgtaactcaagggctaaatgcttgaggggatggacacccattggagaaataaagagggaagtaatgcttccttggaaggtgttagaggcacgagctggtcctcctca

SEQ ID NO: 45628 - DNA, 526 bp, Homo sapiens
gtccatcaacagatgaatggataaagaatatgtgctacatacacaacggagtactattcagccacaaaaaagaatgagatcctgtcatttgcaaacacgtggatggaactggggtcatgatgttaagtgaaataagcatacaaagacaaacatcacatgttctctctcacttgtgggatctaaaaatcagaacaattgagctcatggacacagagtagaacgacggttaccagaggctgggaagggttgtggggggctggcagggaggtagaagtggttaatgggtaccaaaaaaaaaaaaaaaaaaaaagaatggataagacctactatctatctgacagcacaatagggtaactgtagtcaatagtaactgcattgtgtattttaaaataacatataagagcgttarctggattgtttgtaactcaagggctaaatgcttgaggggatggacacccattggagaaataaagagggaagtaatgcttccttggaaggtgttagaggcacgagctggtcctcctca

SEQ ID NO: 45629 - DNA, 562 bp, Homo sapiens
taaagagagcaggcagacatggagatggtttgattcgggtatccacccattcaacagatatttattgcatgccctaggagccagggatccaacactggaaaagatttagtttctatcacaaagaagctcacatcttagtggggaacaagatagcattctaaatgtgacaagcatttagttaattacaagaagrtatgagaactactataatgtcatggaaacatagaggagaaatatccaaaatagacttagacataaagaaaggctttccacaggagttgatatctgagctgggagaacttggtgagtaggaggaagggctacaatgattcaattactctggcttctaaaggcaaagaaccaaaaatgatgcaatcaaatcctttctttaacatagacactgttctcagcaagctcctattctaaaactgttctctccaaagtgacagctggtcatgactaggggtctaggattagtcaaactgcaaacagcagttggcatactctattcaagagcaagacgttgttgtgcaccactgcaggccttcaagtccttagggca

SEQ ID NO: 45630 - DNA, 595 bp, Homo sapiens
atactgattcatattgccttccattactccagagccatggttaagcattgactttggtgggacactatagccctgagagggacatgggattgttacttagggtcacaacctctgtagagcctttcaaattaatatgattagtaatttacagagttggataaaagttgagctaaatttctcaagagtttgctgccttagggctgttgcctcccaaatggacttttgtttttgggtttagagacaaagcattgcatttataaagttttgtttctttcatgtactgccccatctaccctgaaaagatgtaatttcttgttttccaagttcctcaatcacttcattcattcattcattcaacaaatatttgttaaaagccctaagctctgtggcaggtaatagggatggataggtaaggaaaaaatataattccaattaacataacaggattaaatatatttatttatttatatgttctgtggttccacaaagaattaaagcataccactataaccaattttctagtacagatatttttwaaaacttttggaattttgcaaaattatatctctccttccccaacttctaccacttgaat

SEQ ID NO: 45631 - DNA, 584 bp, Homo sapiens
  misc_feature (1)...(584): n = A,T,C or G
gtatccaaagcatgtgtatcactatgtgtattcatgagactttctcttctttntgagacagagtttcactcttgttgcccaggctgcagtgcaatggcaccatcttggctcaccaaaacctctgcctccagggttcaagcgattctcctgcctcagcctctggaatagctgggattacaggcatgcgscaccaggcctggcctggctaattttcttttctttctttttttttttttttgagacgctgtctcgctctgtcccccaggctgaagtgcagtggtgcgatctccactcactgcaagctcttcctcccaggttcacgccattctcctgcctcagcctcccgagtagctgcgactacatgcgcccaccaccacgcccagctaattttgtgtatttttagtagagatgaggtttcaccgtgttagccaggatgatctcgatctcctgacctcgtgatccacccgcctcggcctcccaaagtgctaggattacaggcatgagccaccccgccaggtgctttctcattttctacaaatatttgtagatggcacacatttattaattcatactcccaatttgct

SEQ ID NO: 45632 - DNA, 573 bp, Homo sapiens
agcaggactgayaagaaggccgcccggggccaggtctggaatgtgtggtcaaaggtgagcccgactggctttggctgaaaaccagcacgctccaccctgatgcccagtctagttggacctcaaaaacaggcaccaaagcctgtattcattcaattcaaccccctctaaagacaacctcatctttgttccaggcttctgcacctcttcccataagtcttgcagactgaagccacctcctgcccagatgctaagcatgggccaagcctccagatcgctgtgcccaagctgccccaacccaagtcctctgccttcctctaactccctgtccccagcatgcaaccctcctacccagagattattaaatataacccccatttgcaggaaatatgcaaaactgtttatctttggaaactaaaatatatgaaactgagtcatcaggcaaattatatgcatcagtaagtgataaatgttcagggccagcaatcctgaaatagcacatgaaagcctttttgctactcctctttctgcctacagagcacttttgagcaaagttcattgccggcagtacaaagt

SEQ ID NO: 45633 - DNA, 573 bp, Homo sapiens
agcaggactgacaagaaggcygcccggggccaggtctggaatgtgtggtcaaaggtgagcccgactggctttggctgaaaaccagcacgctccaccctgatgcccagtctagttggacctcaaaaacaggcaccaaagcctgtattcattcaattcaaccccctctaaagacaacctcatctttgttccaggcttctgcacctcttcccataagtcttgcagactgaagccacctcctgcccagatgctaagcatgggccaagcctccagatcgctgtgcccaagctgccccaacccaagtcctctgccttcctctaactccctgtccccagcatgcaaccctcctacccagagattattaaatataacccccatttgcaggaaatatgcaaaactgtttatctttggaaactaaaatatatgaaactgagtcatcaggcaaattatatgcatcagtaagtgataaatgttcagggccagcaatcctgaaatagcacatgaaagcctttttgctactcctctttctgcctacagagcacttttgagcaaagttcattgccggcagtacaaagt

SEQ ID NO: 45634 - DNA, 498 bp, Homo sapiens
cccttggaggcacactgaagagccctctgaagagccacgtacgcagcaccctggctctgcttcctgtcctccaggacagcggcacgtgcagyggaaggagtgctgggctgggctcctgatgccacaaattcactggggggaaccttaagggaatcacaggggatagtggcgaccgcttcacaagcatactgtggaaatgaaattagactagtcattctcagactcctctgcatgctgggatcatctagggagcttcagaaatgcagatgccggattccaccccagtgcgcctaatttaattggtccgggtgtggcctgggctttggcattttaaaaatattcctcaggtaattctaaggtgcggagaagtttgggaattccagggtcagatactcctgtgaccagccactgtaaactctaagttgcaaacttgcttttactcttttgcctgaggtcccttcttttctaccttgtttccgtataattgaaattcgatcc

SEQ ID NO: 45635 - DNA, 498 bp, Homo sapiens
cccttggaggcacactgaagagccctctgaagagccacgtacgcagcaccctggctctgcttcctgtcctccaggacagcggcacgtgcagtggaaggagtgctgggctgggctcctgatgccacaaattcactggggggaaccttaagggaatcacaggggatagtggcgaccgcttcacaagcataytgtggaaatgaaattagactagtcattctcagactcctctgcatgctgggatcatctagggagcttcagaaatgcagatgccggattccaccccagtgcgcctaatttaattggtccgggtgtggcctgggctttggcattttaaaaatattcctcaggtaattctaaggtgcggagaagtttgggaattccagggtcagatactcctgtgaccagccactgtaaactctaagttgcaaacttgcttttactcttttgcctgaggtcccttcttttctaccttgtttccgtataattgaaattcgatcc

SEQ ID NO: 45636 - DNA, 610 bp, Homo sapiens
caggaggtagaagcctttcttggctgtaagaagatggccaggagggtggttactcaatctctgttagccatggtgcactcagcagtccaggagttcaattgagctgatttagaatttatgtaattgttcaagctcatgtggccagtaggtggtagagccaggatttgaacctaaacagtctgtctccagagtttatgggctcaatcattgtgctatgtcacctctcttcagtgaagaagagatcacaacacatttgttgttggtttttttttttttaaattctttttgctgctattcaccctttcctctttcagatgtaggaactgactaattctccaagggaaaggtaaattactcaagtgaaaataaaagcgccaaagttcagaaaacttaacgttctagccccaagtggaatggctggaggaattgggaatgattacaccyggagtgggattttttgggcagaggatgagtctttgtgtactgaggacagctatggtgaaaagaacctagcctgttctccatggctgtagagacccaactgcactgaatgagaggttatccagaaagaaattctggttcagtgttaagacagaacattccagaagat

SEQ ID NO: 45637 - DNA, 590 bp, Homo sapiens
gaaagaatgaaagaargaaagaaagaaagaaagaaagaaagaaagaaagaaagaaagaaagaagaaaaaaaagaaaagaaaaagagagaaaaaggaaggaagaaaggaaggaaggaagggaaatataaatgttctcaaggacttttataaagtccatcttaatctgaacactaaagtagggtttgattcattttttcgccttgaatctttttaacaaattgaagaaaaattagaaaacaaagaatcagagaaatgtgtaaggataatacgtggtagtctctctatttaaatcataagtaaactcataggattctaaaatactctcagctaacctttactgtaatgagtgtaatttttctaatggctgccctctaattttaaaattccagatcttgcttcatttgacctcagttggactgctattttaaaagactgttcagaaaaaataaaaataaacctttaaaatatttttacagttttgcagctatttaaatgattcggctgcaatagacacaaatctttaaaatagattctgaccaaaatatcaaagcgtcaatgacctcttttcctaaataagaacatgaaaatgg

SEQ ID NO: 45638 - DNA, 546 bp, Homo sapiens
tcatgtcatataccttaaaatatatatatataaagaggattagtaatatatatatatatatatatatakagagagagagagagagagagagagaggaacaaattaacatacccatcttcccatatagttacccattttcccttgagtggcaagaacagctataatctactgatttagcaaaaatcccactgtgtttgcaattgatttctaatttctaacactgaacatatgctaccacagcttatctctcacatatggcttttattatatttgggttattataaaaaataagaggtcactccctgacttttcaccataatttctcttagtgatacatttcagatcacacagggcttaaattatatattgtgaacattgtggcaataaatgttaaaagagggtgaataagagaaagctatctttttatctcacatgtaacagataatttatttggtaaggtccctgacttttctggagcataaccagacatgtggttggcttcttgagcaactcatttcgaaaatgaaaaggaacaaattacttttc

SEQ ID NO: 45639 - DNA, 546 bp, Homo sapiens
tcatgtcatataccttaaaatatatatatataaagaggattagtaatatatatatatatatatatatagakagagagagagagagagagagagaggaacaaattaacatacccatcttcccatatagttacccattttcccttgagtggcaagaacagctataatctactgatttagcaaaaatcccactgtgtttgcaattgatttctaatttctaacactgaacatatgctaccacagcttatctctcacatatggcttttattatatttgggttattataaaaaataagaggtcactccctgacttttcaccataatttctcttagtgatacatttcagatcacacagggcttaaattatatattgtgaacattgtggcaataaatgttaaaagagggtgaataagagaaagctatctttttatctcacatgtaacagataatttatttggtaaggtccctgacttttctggagcataaccagacatgtggttggcttcttgagcaactcatttcgaaaatgaaaaggaacaaattacttttc

SEQ ID NO: 45640 - DNA, 373 bp, Homo sapiens
ttttctttctacgctaatctaaaaatgcttaatataaacatataaacgcattctgtatcatctatatcttcataataaagctctgctgcaagattttagtgcctacatttgcttttgagtttactatccaattactactatttgaattatatcagatttgtgtgaggaaatgggkgtgggggattcttaataggtaaatgctgctttccatcacttctggctggataaaagctaaccgattcaaggagttcaaggagttctgaagaagagaaaaatgttcagaatacctggaaactggaggaagaattaagaaaagtctggataagcctgggcgcggtggctcatgcctgtaatcccagcactttgggaggcc

SEQ ID NO: 45641 - DNA, 487 bp, Homo sapiens
aattgcaatctcacattccattccatttgtttttaagatcacataggcacattaatgtccaatgattttctccttgccatcatcattgtatattttttactttggcagaactaatattgcagttttatgacttaaacatttcataaagttttctttgttacagtatgaggaacattaaactgtctcaaatctgtttttaattcaccaatgattctatgggatttttctaatactgaacattccacttcatagattttctgtatttctccattgttggagaaatacatatcattgcattgatgttaatgcaagcagcttgactcgttatatgctgacatgtaawgaaacaataaacttctccaagaagtcctacaaaggcaagtaaatctgaatctctcacctctgctctacttttagtgagggtgtgccttcctttgttggtactaagacaggaagtgtctgtttttatgtgatttgctgaaatcaa

SEQ ID NO: 45642 - DNA, 530 bp, Homo sapiens
ggccaggcatcccagcaggaagtcatcaggatgagggatgagggtgcagcttcagaagggtagaatagagagcattgaatggcattgggtaccaagcctggtgtttctgggaatttcagccagaaggaaggcaacaggcatgaaagaagtccaggccttctgtgataaggctggcaagagtctaagaaaactagccccatgatgtggtggggtatatacaggacttctgtcctaggtcctgggaccttctggggaggaggcaaagtgaggagagcaaccccagaaatgtaggggagtagagcyattgagtcactgggtagcctggctgtaccagagaagtgttctggacaaggggtgtgggaaaggcggctaccactcagtaacaatcctcacacatttagggcttcattccagggggaggagcatcagtgactattttcaactttttactggtttttaaaatgtaaaaacccttgttgggctgcccccgtactggttccaggaaaggaacatggcaacaggcaggctag

SEQ ID NO: 45643 - DNA, 580 bp, Homo sapiens
gaataaatgaatgaatcaataaagtaacatttagaggctaaaagcataaagaatttgatgggcatgggggcaaactactgaaagtaaagcaaaaaaatgtagaaagaagccttgaaatcccaattaacatttcctgattgcttcagaatagaatgctgtaaaatgagaggctttcagcctgtctgcatttcagttctgtgcagcttacaaaggaacctgggaaaaagctgacattgccrctgtagctttgaggctttcaagataagcatcagtttgggttcagaagaaatgaacagtgatgaatattgtcttcagcttcacaatggtccttttaattcctgtcattctcaaaaagaaaaaaatgccagtgtttcttctggaatattttcaaatttctccaattttaattttggaaaattgcatttgaaactttcttgaagtagtcttattctctgccctttccatcctcatctataattactaataagtagtctctttcttttattaaggtaaaattcatttgtgatataattcaccactttagccattttaaaatgtacaacttagtgttgcctttttg

SEQ ID NO: 45644 - DNA, 334 bp, Homo sapiens
caacctaatatttttaaattatatgtggttggtttatattatttacagattttatttcagaagaatagcagagatattacaaaatatctattattaaaaagggggtattgtgtctgaaagtttgagaactactgatggaggtgataggaatctttgtgaggtttgctgttgtttgttttgtttgcttttagagatggagtctcactgttgcccaggctatagtgcagtgtgatcatagctcactgtagcctctaactcctgggatcmagagatcctcctgtttcagcttcctaagtagctgggagggactacaggcatgtaccatatgcctggc

SEQ ID NO: 45645 - DNA, 583 bp, Homo sapiens
aaagataattgtgccataaattgtgaggggtagattgatgggcaccggtgtggtgtagaaggaaaaaacctatatccccctgtgttgagcgcaccccaggtaagaaatgagaaagacttgaaaaataaataagccatgtttgcatgaaacagagaaaagggaatatatttaagaaatgttctaggatgtattcctttttttaatcctaaactcaccaattaggtaaatcgctgcctaaggaagaagcagagacaggacaaaagtgttactttaatggarcactctctacaaagaaacaccaggaatagggaataaatggatcctgagcaacattaatctcaggcaacttgcagttctttcctttccttggggtcactgctaaactctgtgggctgtcttagtccattcaggagctgctataacaaaatatctcagactgggtaatttataaacaatataaatgtattgttcacagctctggaggctgggaagtgtacgatcaagatgccagcagatttagcttctggtgagggcttgctctctgcttcaaagatggcaacttcttgctgcatcctcacaaggc

SEQ ID NO: 45646 - DNA, 585 bp, Homo sapiens
ctgtgtcctcatgggtttttctctgtgaatgagcatacatggtgtcctttcttataagcacgccagtcatattggattaagggcacacccttattacctctttaaccctaattaactccttaaaggctctgcctacaaatacacttagattctaaggtatggagattaaacatatgaacttgcaggaggggaggcagggggcacttgacacacaattcagtcaataaaacctccatttagttataaatagtcatatgtcactgtgtttttttctgactttatttggaaatactgtaatttcaaacttgaaagccttaaaaacttacagacttttaaacttgcaaaaataaaaatagaacaaaggaacacccatatacactttacccagattcacctattgttaacrttttgccctggttgctgtatcattggtatcgttttcttcttcctcacgccccattttttccctaaccttatgaaataagttacatatattatggccctttaccctgaaacatttcagtgtgtattttttactttttatttatttttattttttgagacagagtcttgctctgtcaccca

SEQ ID NO: 45647 - DNA, 1106 bp, Homo sapiens
ttcatatattttactacaataattttttaaatgatagaaaaaatgataattaaatctgttagtaatgggcaaaacatatgaacataaattcagagaatatgaaaccaaatggccaataaatatatgagtagatggtcagtcccattagtaaaaaggggtgtgaagattaaagtcatagaagataccatttcttactcatcagattaaaaaacattaaagtcttaaagtcacaaacgttggaaagcattggaacaacaggaacattgatttgctgttattgggaatgtaaattagtattcactactttgaaagtatttcagcagtatctagtaaagctgaattgcgaatccaaggagtacacaattcctctcctagccatgtattgcagagaaattcttgcacatgtacacaaaaaggcatgttcaacaactctcatagtaacagtattggcaaagtcaaaagcaagaaacgatctgaacatccatcaagagaagaatgggtaaattacttacagtatattcacacaatgaaagactacaaagcagtaaaaatgaaccaactagagccatacatattctcatggaagaatttcacaaacataatgccaagcaaaaaaaaaaatgctaagtttcaatggaatagattattccatatgcataaaatagtaaaacatgaaaaattgtattcaacattatattctatttattctctgtgttactgtctttactaaaagagtaaaatgaaaaggaaatgayaattactaaattccctctggtgggtgtgggaagggaatgagatgagaaggacacaaggagtttcaagttattggtactatttatttcataagctcagtggtggatacacagctattcattatattagtatttagagcttttctatgttttaacatctcatgataacttctaaaaaagaagtctaaaaagaattatacatggttattgaataaaccttgccaaagatactgtgcctgacattgccaagctgttgagcacatgatctagctgtgggtaagacatttgcaaaaatacatgatatctaaagttcacagatatcaggctgcataatataagaattgagaaaaggag

SEQ ID NO: 45648 - DNA, 1106 bp, Homo sapiens
ttcatatattttactacaataattttttaaatgatagaaaaaatgataattaaatctgttagtaatgggcaaaacatatgaacataaattcagagaatatgaaaccaaatggccaataaatatatgagtagatggtcagtcccattagtaaaaaggggtgtgaagattaaagtcatagaagataccatttcttactcatcagattaaaaaacattaaagtcttaaagtcacaaacgttggaaagcattggaacaacaggaacattgatttgctgttattgggaatgtaaattagtattcactactttgaaagtatttcagcagtatctagtaaagctgaattgcgaatccaaggagtacacaattcctctcctagccatgtattgcagagaaattcttgcacatgtacacaaaaaggcatgttcaacaactctcatagtaacagtattggcaaagtcaaaagcaagaaacgatctgaacatccatcaagagaagaatgggtaaattacttacagtatattcacacaatgaaagactacaaagcagtaaaaatgaaccaactagagccatacatattctcatggaagaatttcacaaacataatgccaagcaaaaaaaaaaatgctaagtttcaatggaatagattattccatatgcataaaatagtaaaacatgaaaaattgtattcaacattatattctatttattctctgtgttactgtctttactaaaagagtaaaatgaaaaggaaatgacaattactaaattccctctggtgggtgtgggaagggaatgagatgagaaggacacaaggagtttcaagttattggtactatttatttcataagctcagtggtggatacacagctattcattatattagtatttagagcttttctatgttttaacatctcatgataacttctaaaaaagaagtctaaaaagaattatacatggttattgaataaaccttgccaaagatactgtgcctgacattgccaagctrttgagcacatgatctagctgtgggtaagacatttgcaaaaatacatgatatctaaagttcacagatatcaggctgcataatataagaattgagaaaaggag

SEQ ID NO: 45649 - DNA, 579 bp, Homo sapiens
ctgaaaccaacccaatagtctcatagacagttgtttttggataaacatagaaattgactcttctggtcttaaaacttgaaatttcatttgttttatttgagttccttcctcaggaaatgactttcaggcctcttaaaaaaggtatcaaagaactgaaactcaccagatcaccacatctagacaatgagatgtgggaccactcattcatcatgattgcttccttgccccatccctggttcctgttttcttacacaytgttacatttcttccctactatataaacccctagttttagtcaatcagggagacaggtttgagactgagctcctatctacccaattgcagagcacgattaaagccttcttccttggcaggacacgtcgtctcagtcattggctttctgtgcagcaaacagcaggacctagactgaacccctggtgttttggttacaaagctacagacaacagtctcctgttgtagaaaaaaatgtattcaaaatatttctctgcttaaaaatttatactgttgcctgctcactgaccattctaggcccttcatctcggactctccattccagca

SEQ ID NO: 45650 - DNA, 600 bp, Homo sapiens
tctgcaacaggagcaccccctccacccccaaaaggcaggttgtgttttcttggagacagtgatggggtgggtggtggggcagcaggcagagaaagagaagggaggaagtggaggaaggagccaagctggggcactgaacctggacgagccccactccgcccagctccagcttctgactcagagcaatggcggctctcgccccagctccctggggccggggccaggcaccctctacagcagaacagcttggtggccgacagttcggacctcagagctggaccctgacactcctggcagggtggtcctgggcattctcctctctgtggggtggggatccctatccacccctgggtgccggggtgaagggagaggagggtggcgctgtggctggctgaccgatgtggatgatatggcccttcttgtccagcataatgttgccgttgtgtctgtccttgatctgcagcaggaacagcaggaggctgtaggcggccatgcttcggatgaagttgtagcrggcctgtgcagagagcgccctgggctcaaaaaggccctggggcctgtgggcattctccctggtcccacacccaggatccctgggcc

SEQ ID NO: 45651 - DNA, 330 bp, Homo sapiens
tccagcctgggcaasagagtgagactccggcaaaaaaaaaaaaaaagaatgtggaaagtaaaatgtgaaagttcccctccttgtctatgccccttattgactttgatatagattctttatagtttggtatatattcttccagacccttttctgtgtatatacttacacaaatatattttttctgacataaatggaatcatgcagaacatattgttcaacaacttgattttaaagggatgatttacttcactattttttcaggcttaattttatggctatatcagaactgatttggttattttatagctggctgaagctgtaatttgtgaa

SEQ ID NO: 45652 - DNA, 533 bp, Homo sapiens
gaaagaaagaaagaaagaaagaaagaaagaaagaaagaragagaaagaaagaaagaaagaaagaaagaaagaaagaaagaaagaaagaaaagaaaaaaaaaccaaaacataaaataacataatataacataaaataaaagagcaagagtcagaaatatgtggttctctcctagccatggcactcacctgctttgggaacttgaacaaactacataaccctctgagcatcagattcctcatctgtaaaatggggataataatagtatctacctcaaagagatgttgggaggattaagtgagataacatacataaggtgttaagcacagcgcctggcatataagctgtcaacacgtggtagctggtattactgcacatgtccctgtgggattttgttcagtttttgcaacaggaattctttttctttctttctttctttctttttttttttagacagaatctcattctgttggcaggctggagtgcagtggcacaatcttggctcgctgcaacctctgcctcccaggttcaagtg

SEQ ID NO: 45653 - DNA, 533 bp, Homo sapiens
gaaagaaagaaagaaagaaagaaagaaagaaagaaagaaaragaaagaaagaaagaaagaaagaaagaaagaaagaaagaaagaaagaaaagaaaaaaaaaccaaaacataaaataacataatataacataaaataaaagagcaagagtcagaaatatgtggttctctcctagccatggcactcacctgctttgggaacttgaacaaactacataaccctctgagcatcagattcctcatctgtaaaatggggataataatagtatctacctcaaagagatgttgggaggattaagtgagataacatacataaggtgttaagcacagcgcctggcatataagctgtcaacacgtggtagctggtattactgcacatgtccctgtgggattttgttcagtttttgcaacaggaattctttttctttctttctttctttctttttttttttagacagaatctcattctgttggcaggctggagtgcagtggcacaatcttggctcgctgcaacctctgcctcccaggttcaagtg

SEQ ID NO: 45654 - DNA, 593 bp, Homo sapiens
cttttaatatctaatataacccaagtgctatgtaaatagttgttatattgtattgcttagagaataatgacaagggaaaaaagtctgtacatagtagaggcacaacttttccccccamatattttcaatctgcaattggttgaatctatggatgcagaacccatggatatggagcgctgactatatatacctaggagtgaaattgctgggtcgtgtgatacttcgtgtttaaacttttggggaactgcaagacttttttccaaagtggctgcatcattttattttcccaccagcagtgtacaaaggttcacacttttctgtaatgtcaccaatgcttttcattatctttttaattattgcctttctagtttgtgtgaagtggtgtcagaagggatagatttttttttgtttggttggtttttttagagatggggtcttgctgtgctgttgaggctgtagtgcagtgcagtggctattcacaggcatgatcatagtgtactgcagcttcaaactggcctcaagcaatttccctcctcagcatctcaagtatgaaggaatagttttaatggtgatatttgtaattataattttag

SEQ ID NO: 45655 - DNA, 528 bp, Homo sapiens
tttaaaaaaaattaacttggcgtctaaaatcctaggttcaaatcctaggttcaaaaaattaacttggaatctaaaatcctaggtgaagtctcagcttcagcacttactaaatgagacaggctgtcaagttacctctaccatgatcctgatttctatgcactttctatcacttaaggctaggtattcaagaccagccggggcaacatggcgaaaccccatctctaaaaaaatacaaaaataagccgttgtggtggcctgtgcctgtgcgcctgtagtcccagctacttgggaggctgaagtgggagatgcctggatgatggaggctgtggtaagccragattatcccactgcactccagcctgggcaacagagccagactctgtctcaaaataaattttaaaattaaagtaaaataaaacgccaatcaaggttttccctcattgatggacctattagttttggaatatttttttcttgaggcaggggtggggttctgtatttttctaaattttcatgctttgagctcaa

SEQ ID NO: 45656 - DNA, 552 bp, Homo sapiens
aactctacactttgccataatattggaaaaccttcttggcaaaatttctcaattgtcaaaaaaatagcctcgttcatcattatcaccttctactgagttctttttgtgtagaaaattatagagaagattataagagtacacctttacctaacgaaagcttttttgagttttcttcaaagcatgcattgaatttatttatttttatttgaatttatttttatatttacgcaagattcaatgaacacytgctatatgctagacattgagaggtgctaagggcatgaaggtacatatgactcagtcattgccctcagtgagcttaccgtctagcgagggagtcagacaaaaacaacttcaaagcaacagagaagacactaggggaggagagaccagctctccgtgaagtagtggaagaactcaaaaagagcttcaagaagtagctttaagatgccttcaactgagtccttaaggacaagtagaaattaactaaatttaatttaggcagtctgggcaaagaagaatcaaggagggaagagcatgtttcatatgggg

SEQ ID NO: 45657 - DNA, 611 bp, Homo sapiens
tattgcctacttccctgaggctttttaacatattgtatgcatattcattagttgctgcttcaagtggtttttaagtatttgttcaagatgacagcaacttytatgtaggtactacacttcttagggtacaatatgctacattcagtccttctctaactttgagtggttgaagaaagaagaaagactgtgcaggaaagaaggaacacacctgtaatcacctagaatgtagtgtttctgtttataatatccaaggaaagtatatattgccagatttctggttggcacagacatagcatcccacatcctggaggcagatggtagagtagatcaaagacttgcttgttttattttaggtcttaaagtccatacagtattagatgataaagagcatataacccaccagcatacacattcataataaaaatgattagggaatcaggaattttagggaaaggttttactactaaaaagtgattttctatagaaaattaacatctagaagtgatataaataggtgaacattagaagcattcctggaaaaatcaagaatgagacaacaatacacagtatggtagcttatatttaaactgaattgaagtcctcagtgcaat

SEQ ID NO: 45658 - DNA, 543 bp, Homo sapiens
ccctggaactaaagcagtcaccatgttttctgagggtgaaccaggtacaagattctgtgctagcagggtggtatagagaaaaggacatagaactaggagtcaggaaccctcaggttttaaacatttatttaaaaaaatttttttttgagagacagggtctagctctgttgtccagactggagtgcagtggcatgatcataacttactgtagcctcaaactcctgggttcaagagattctcctgtctcagcctcccaagtagctggaactacaggtatgcatcagcatgcccgactaaatttttttctttctctttctttctttcttttttttttttttttttttttgkgaagagacaggggttatgtcttgctatgttgcccaggctggtctccaactcttggcctcaagcaatccttccaccttggcctcccaaaaccctgagattacaggcatgagccatcccgcctggccttgttttaaatgagatgtttcaactaggtggcctctgaagtttcttctagtttaacaattttgttccata

SEQ ID NO: 45659 - DNA, 579 bp, Homo sapiens
atatgctgggttgctctacaaagccaggagcaaacataaggttgtttttctggcttttaaggagagacaatgcttgcttaaagtttttttgagatagactgtctctctgtcacccaggctggagtgcagtggcgtgatctcagctcactgcaacttctgcctcccagtttcaagtgattctcctgcctcagcctcctgagtagctgggattacaggcgcccaccaccatgcctggctaatttttgtattttttgtagagataggatttcaycaagttcgtcaggctggtcttgaactcctgacctcaggtgatccacctgcctcagcctcccaaagtgctgggattacaggcatgagccacaaggcctggcctaagatatctttttataagcaaatgaattgtggtgtaaaaatgtaacggccatttttcttcccatagtgggactgattctcatttgttgtttgggggaggttttgatttgggttttctttttcctaaatccatagctcagcagccagctgtgtcagcactgtagccattttgccgcaaacatctttgccccaggtcctgatgtgtct

SEQ ID NO: 45660 - DNA, 579 bp, Homo sapiens
atatgctgggttgctctacaaagccaggagcaaacataaggttgtttttctggcttttaaggagagacaatgcttgcttaaagtttttttgagatagactgtctctctgtcacccaggctggagtgcagtggcgtgatctcagctcactgcaacttctgcctcccagtttcaagtgattctcctgcctcagcctcctgagtagctgggattacaggcgcccaccaccatgcctggctaatttttgtattttttgtagagataggatttcaccaagttcgtcaggctggtcttgaactcctgacctcaggtgatccacctgcctcagcctcccaaagtgctgggattacaggcatgagccacaaggcctggcctaagatatctttttataagcaaatgaattgtggtgtaaaaatgtaacggccatttttcttcccmtagtgggactgattctcatttgttgtttgggggaggttttgatttgggttttctttttcctaaatccatagctcagcagccagctgtgtcagcactgtagccattttgccgcaaacatctttgccccaggtcctgatgtgtct

SEQ ID NO: 45661 - DNA, 3682 bp, Homo sapiens
  misc_feature (1)...(3682): n = A,T,C or G
agtaatagtaatgacatgagtggttaaaagttggtgcttaggattcagagggtgcttaggatccagaggactcccagttgagcatgcaaaattgcgtgcaacttgtgactttctgcaagcttttcaacttccccgagcctcagttttcttttctgtaaaatgatactgataatagttctatgggttgggcttattgtaaggaataaatgagttaatatgttaagtgcttagcacgtattaagcaataaaaatggcattatttcaattactattatttttctagttcaggcctttagaaatgttatctcagtgtattcacaattctatgacatttctatgctttgccacattttacaaggataaagtacattattttctaccatgtagctttaagaaatataacaattatagctaggaaagaatgccttcttagataaaaatgtgtggacaactacaggggaagaatgatgtttaatgattcccaataactacaatcgcctccttataagcaacattcttctgcttccccccttactgtagaaaatgtaaatggtagacattttccagtggacacagagtaattttaatggcattatgtttttgtgtttcaggtgccataacctgtgctgctgacatgttcagctgccagggctctcgtgcctgcgtgccccgacattggctttgtgatggtgaaagggactgtccagatggaagcgatgagctttccacagcaggctgcggtatgaacactggccagggctgcatgtcaaagaaaactgttgcagcatccttggttatttgtttttgtagtatttgccatagcacatttcccattgctttcctagttcctgggcccataggtagtattggacttaatcaggtgggatgacggtatcacagtagttctgcaacctctttaactactgttcaatgtttcaaacatgcacagtcggattacccattttaaaaccactttgataaacacagatttatcatttcacttctcagctaatgtaactgcactttatgtgtacgagtgcagtaggtttggtactttctcttttgcgtcgtccaccaccatccttctgaaggcttttagattgtctgttacagagactctgtgaatgacttctctgatcctaaataactactgatcaggaggtcagtaaacacctattagtcctatggatagggtattaacccttgggtcatgtaaaaatagtatggatatagccgaatgaagctgagggatcagaggagcaccttcggaggtcagacaatttactaagtttctgactctaagtcacctcaggaaattttcagggcattactcaacagtaaaaatttagatgaattcnnnnnnnnnnnnnnnnnnnnnnnnnnnnnnnnnnnnnnnnnnnnnnnnnnnnnnnnnnnnnnnnnnnnnnnnnnnnnnnnnnnnnnnnnnnnnnnnnnnnatgccctatatctttacattatagccacattttgaacacgactactcacagaacttccaaaatattgtatgtggattcataatttctgaacactggccattatctgagcatatctcctttaatattatattttccaaactccagttttctaatgtgctctgtttcacaggtcatctaattaagcattttaaatgaaaatgcaaagttttgcaattgtttatgaaatcaaaagcagaattgctatttttacaagagtttatattttgaacaccttaatttagaaggattttacttttgaaggttttctagtgacaaatatactgggtagaaggggaggctgggartggaggagagcaataacaaaattggctttggaaataaatggagtgtgttattattataaaaatataatctaataataaaaaagccagccactatgccaattaatttaggtgttattagtcaggtataacaaacccaagtgtttccaaggaagcaacacaaaaacatcagcacagttgctacgtacaaaactgtcaggttgtcttcaagctataacctccttagtcacccacctttaaaaacaaacatatctgctgattagtccaccatattgttaccttacttaggacgtaagtgttttctcttggctcaaagatagatttaaagttaaaaagtatgactagactataccagaaatatatattttatatctatgcattacacattcaaaaaataataataacagacaaatatacctggagtagagtgaccgcattaggactacctcaaaggcaagccttataagaatcatgttgaacaaatcgtggttgtatcacctggaaacacagagggaatatgcaagctgatgccaaaattttatagaattgtcatagaaaagaagaagttggcttcttttattataggattgttgattttagcaaagtctaagaaagaatcttctcactgtcggatctgttgtaagacggtctcaaactatttttttttttccttttgtttgtttcctagattcttcttgctcttggaaccaatttgcttgttccgcacaaaaatgtatttctaagcattggatttgtgatggagaagatgactgtggggatgggttagatgaaagtgacagcatttgtggtaagttgtgtatcttctgtcctcaatcagtttttaagcattatatatgctctatcattttatagcatacacaaaatttgctaatttattaaaattaacataaaatttatgtgtacctttctaggtagctgtttttattattttcatgacaatccattattctaatatttttatatataaagctgttattcaatatttggtatttttccttaatattgccacaacaaatgtatttgtacattttatttctagctttcggtgaattctttgaagcaaatatcaatgattgagattacagggtcaaataatcaaacttatttttcattatgctgcctatgtaccaccaagttaccctccaaaattagtatactaatttatactgccacaagccacacgtgctgtttatgtgcatatgtgtgtgttgttttcatccttattgctgaattgttttaaataagaagtaaaggaaagtggctattttatatgatattaaaatgcactttaaaatgtagctttataagattagaggtattagtgtcacgtatctatacttaactactatatgtcaactacaagcccagtatgattgctttgtaatattcacaaatatttaacaaatagttaaatagaattattcactgaatttcctaaggggtaaaagaaggaaacaagctagtctttaaaatttgttcttaccggccaagaatttcactatttttatagatgtctattggttgtctatctaatctatttctgtacatgcatttgtacctgtagctatatattctttactcattacatcagcctttggtggcagctgttatcatcctcttttaggaagagaaggacccaagtcatagaataaggtgtatgtatagattttagtatacttaacacctcttttaaatttcaggggttgtggactgctatttctgtcacaaacatatagagaaaggcggtattttttagtattcaagctcaactgaagttctctttagtaatatgaaattggagatattcttgaaagtaggcaatttactttcttgtatttaagtcactcaaaatctactttttat

SEQ ID NO: 45662 - DNA, 600 bp, Homo sapiens
aggcattataagtaatcaagaggttatttaaaatgtacaggatgatgtgcataggttatatgcaactactaggctgctttatataagggacttgagcatccatggattttggtgtccacagggtgttagacccaatcccccatgcagataccaataataggtgggggaaatataacaagtagcatgtgtcaaatccttattttttatagcagaaagcaaatacatcaggtaccacctaaagttaataaattaagaaaaggtataactttattatatctatattataaactgatggaagtaattattcaacaaaaacagaggttaaaagaaaagtctaggaccaaagagtgttagtcttcattataagctcttytgttttaattttaatctttaccatttttgtattatttaataaaaatgaaaattaatgttaaaatcagctgacaatgttttgtataaaatccctacataagagaatactaacatataagtaatagtaaggttaacaaaaactaagctaaatacaatgtctcaccacagtggaattcatcacgtccatcctcacaatctttctgaccatcgcatatccaggtattcaaa

SEQ ID NO: 45663 - DNA, 605 bp, Homo sapiens
tccttttaagcctgtttgttcctccttcctggtcctctttcctaacctgcctggtttgagcacccaaaggacaaggactatgccaatgtggcttgtcatccttagtgtcaacaatgactggcagtcactaggagcttgaatactgtgagaataatggagctggatgtctggttctggtcctgctattgaacaggttcttttagcagtgarttaaataatctctgctcaatttttattatgggcaaatgaaagaaatggtgcttgacagcagatatgggttagagaattgagtacaaaaagtcttttaggaggaaggttaattcataaccagtcttcacaagctggaggcagtggctgagagagaacacacacagtggatgtggtggggcaaccgggagcacgggggtcctgtagagccgattctagggtaggagatgtccgagtttttattttttattttgattgaagaatctttaattgatacataatatttgaatactttcatacttgcacattgtgttttgtacaatatattgtatttgtacaatgtgtattgtatttgtatatttgtatattgaggtgcgtgtgatatttgggtacatgca

SEQ ID NO: 45664 - DNA, 1750 bp, Homo sapiens
cacctcacatttcattttttgtagtgagaagacttaaaatcaactctcagcaatttttgagaacacatcattattaactatagtcactatgttgtacaacagttctcttgaacttattcttcctgctctatttttactgtatatgtrtattactttaacaacagtagaaaaaatactttttgttacatacaaacttgtattctatatctatattttaagcaatcaatatatttgaattatggaaagtgaagaggctagccaagatgctcaccttaagaacaccttcagcctctgcacaatgacaaaagtcacaagcccctgcagagaggtccaagatttcccttagaaagcagttcttaaatgagattgaaatgcaatgtgattaagcgctataataaaataattccaagtgttatgaaagcaaccagctggatcaactaatgacctagagaatttttagggaccacttcatggaagagataacatttgcactgaatcttgaggattaaggaggagtttgccagtcagagcaaggacaggcagaagacgttgcagaaaacttgggccagtctgacaaaagcacacaaatgtaaaaggccatcgggcactgcagaaaagacattgagtatccgaaaggaaatttgcaggaggtggcatcagctataaactcaggtaggaaataggttgaggccagcttataaataataataacaaatccgcctgtaagccaccagcactctcttctcttgctctctcctcagttggtgtccacgctctgatatttgtttcagatgtacagttacccccagtacctgcccagtatgtcatcaagtgcatcttccttctgtcttagaactcctccagaaacacaaataaagcaaggacaatgaacctggctttctcttttgggttcagacaaaagtcccgacactagagggatctcatttaggcttgttattccagacatcaaacattgaaagccaataatttgtttctaatttatatctcagaagaagaggagacttccttaaactgagtagagttcagctccataaatataaaaagtagccacgcaggtaaatttatcgctgaacagccggttgcaattagaaacgtggtgaaatggcagagagaggcattgtttttgtggcagaaagagtttgctgtatactcaattaccatgtatgtttctgcaaattattaagaggggcagttagggctacggtctatagggactgtttcacagcctccctagctttgcttccagatgtggtactagttgtaaccaatgggatgtgagcaaaagaaatgagtatcacttccaagttagatggtttagatgtgtctacacatctctctctttccctccatcagctggagaagataatttaaaggccctaggccatggcagaaattaagacagggaagtaaaccacgtgccaaccatcatcagtgatgttagatcattgtgggtgtaagaaatacaactttgaacacggaaagccactgaaatgcggaggttcatttgttacagcagcaagaattacttactcaacacagtttttaattggtacaactatgaccctttaacctgataaaaagttgaaataaatcacatggctctttcttaatcaacattgcagtttcatgggctaagtggagatgaaaaggcataacgtgaaaccagagtgaagggatttgaagtcgatgtgttagatgcccacaaggatccagatgtgaaactagcatg

SEQ ID NO: 45665 - DNA, 558 bp, Homo sapiens
ttgtcctttgaaatattttctctcccttcaccaatctgagracattttttcctcaatatcagcatccatttgcctggcctgcaatgtgtctctaaggaatggaaactaagctttggggtaagaaaatcttaatgacctaatgggtttgcttttagcgcaagggtatacctagagattccttccaggcacagctcaaacaaccactccacagagaggctgcattcccataccttgggctgttccctgagaggagatgacacaagggatgctatttactagacacttcaagagtcatggccactgttggcatcttggggaatcctcaaacagttttgaaattcaaaaccaagaaaataacaggatggctgaggaagtattgccctgtgaagtttccaaaatgaaacctgaacccaaaggctttctgatggggtgtctgtgccaagagaagtttaaacaaaggggcacaaaggttttccgctttttatttattttttttacagtggggtgtcaggggattattctctgctttcatctcctgtaaaatgtttacaaatgaga

SEQ ID NO: 45666 - DNA, 558 bp, Homo sapiens
ttgtcctttgaaatattttctctcccttcaccaatctgagaacattttttcctcaatatcagcatccatttgcctggcctgcaatgtgtctctaaggaatggaaactaagctttggggtaagaaaatcttaatgaccwaatgggtttgcttttagcgcaagggtatacctagagattccttccaggcacagctcaaacaaccactccacagagaggctgcattcccataccttgggctgttccctgagaggagatgacacaagggatgctatttactagacacttcaagagtcatggccactgttggcatcttggggaatcctcaaacagttttgaaattcaaaaccaagaaaataacaggatggctgaggaagtattgccctgtgaagtttccaaaatgaaacctgaacccaaaggctttctgatggggtgtctgtgccaagagaagtttaaacaaaggggcacaaaggttttccgctttttatttattttttttacagtggggtgtcaggggattattctctgctttcatctcctgtaaaatgtttacaaatgaga

SEQ ID NO: 45667 - DNA, 558 bp, Homo sapiens
ttgtcctttgaaatattttctctcccttcaccaatctgagaacattttttcctcaatatcagcatccatttgcctggcctgcaatgtgtctctaaggaatggaaactaagctttggggtaagaaaatcttaatgacctaatgggtttgcttttagcgcaagggtatacctagagattccttccaggcacagctcaaacaaccactccacagagaggctgcattcccataccttgggctgttccctgagaggagatgacacaagggatgctatttactagacwcttcaagagtcatggccactgttggcatcttggggaatcctcaaacagttttgaaattcaaaaccaagaaaataacaggatggctgaggaagtattgccctgtgaagtttccaaaatgaaacctgaacccaaaggctttctgatggggtgtctgtgccaagagaagtttaaacaaaggggcacaaaggttttccgctttttatttattttttttacagtggggtgtcaggggattattctctgctttcatctcctgtaaaatgtttacaaatgaga

SEQ ID NO: 45668 - DNA, 558 bp, Homo sapiens
ttgtcctttgaaatattttctctcccttcaccaatctgagaacattttttcctcaatatcagcatccatttgcctggcctgcaatgtgtctctaaggaatggaaactaagctttggggtaagaaaatcttaatgacctaatgggtttgcttttagcgcaagggtatacctagagattccttccaggcacagctcaaacaaccactccacagagaggctgcattcccataccttgggctgttccctgagaggagatgacacaagggatgctatttactagacacttcaagagtcatggccactgttggcatcttggggaatcctcaaacagttttgaaattcaaaaccaagaaaataacaggatggctgaggawgtattgccctgtgaagtttccaaaatgaaacctgaacccaaaggctttctgatggggtgtctgtgccaagagaagtttaaacaaaggggcacaaaggttttccgctttttatttattttttttacagtggggtgtcaggggattattctctgctttcatctcctgtaaaatgtttacaaatgaga

SEQ ID NO: 45669 - DNA, 558 bp, Homo sapiens
ttgtcctttgaaatattttctctcccttcaccaatctgagaacattttttcctcaatatcagcatccatttgcctggcctgcaatgtgtctctaaggaatggaaactaagctttggggtaagaaaatcttaatgacctaatgggtttgcttttagcgcaagggtatacctagagattccttccaggcacagctcaaacaaccactccacagagaggctgcattcccataccttgggctgttccctgagaggagatgacacaagggatgctatttactagacacttcaagagtcatggccactgttggcatcttggggaatcctcaaacagttttgaaattcaaaaccaagaaaataacaggatggctgaggaagtattgcccwgtgaagtttccaaaatgaaacctgaacccaaaggctttctgatggggtgtctgtgccaagagaagtttaaacaaaggggcacaaaggttttccgctttttatttattttttttacagtggggtgtcaggggattattctctgctttcatctcctgtaaaatgtttacaaatgaga

SEQ ID NO: 45670 - DNA, 570 bp, Homo sapiens
gaaaatgaatctacaaactgggaaaatatgtttgaaataatctacaaataattggtattaataatatataaataactcatgcaaatatacaaagaaatgataacacaatgggaaaattggtaaataatatatattgtcttccacttttatagaacagatacacatgacatattaatgtattaacagatactcttacttattaaaaaatcaagaaaatacaaattaataccatggttaagaaaccatctttaacaccattgattggccacaattaaggagtatgacagcattaagttttctcaaaaatgtggataaacaatatctcctataaattcctatttgcaaatataaattgataacattactttggagaaatacttacttataaggctcaacaatcaaattcrctcttaactgacattgattcccaggcatatattcaataaaattctttcatttgtatgctaggaaacacaaacaaaaatactcaaaacaatagtattgacaccaggaagagtccatctatgtggtaccttttaaaatactttgaatataaaggtaggcattaaa

SEQ ID NO: 45671 - DNA, 609 bp, Homo sapiens
ggaaaagcttagcagtgacagctagaacatcagttcttctatacaccgctttctcctaacgctttttctggtatctaggactcacttgaatgaaaatcctgtttccattggttattcagtcttctgcttctgagagcagctgcatgatgtcctgttggttatcacaaagccctgtattttagtagaggaatttatggaatatcattctccttgacctgagcccaattttaataaccagctttaaagtatacaagcatataattaaatgaaaatagctaatgtaggctttctagagataattgtaataattgaaattatggaaaataaagtgaaaaaactgcagaggttttacacttgcttttttttcactggaatcctgttttattttccttaacgaaaatgtgggctagcatatgatatttargcacatggtttactaaactttttttgcattttttaaaaaatgattgtctttttgactgaagaacttaagaaactgtcatcgtgaatcaatgaaacttactaagaatgggatccatttgcagcatcctatagcttctctaaaattctgcccctagggacccatgatattattgagatttattatta

SEQ ID NO: 45672 - DNA, 625 bp, Homo sapiens
aaggccaaagttatgagttattacaatcagtgacttttcttgctctgagaatagtaaaaacacaagtcagttattatctgggcactactggttactcttgcagagctttggtcccttgtggttaactaacttttatctccgtggatatcctgaattgtctggggtttttttcagtagactcttttctagagcagttttaggtttaaagcaaaattgagcasaaagtacggagatttcccacatatccccagctcctacatacacacagccttctccactataaacaaccccacccaggtggtacatgtgctacaatcaatggacctacattgacacatcattgtcacacagagcccatagtttacattagattcactgttggcgtggtacatgccatgggtttagacaaatgtgtgacatgtatctaccattacagcatcatgcacagtagtttcactgcccgtaaaatcctctgtgctctaagtactcatcactcctccctcaacccctgtcaaccatggatatttttattatctccatagttttaccttctactgaatgtcatattttaggatcatatggtaggtatccttttcagattggcttctttcacttagaactatgc

SEQ ID NO: 45673 - DNA, 625 bp, Homo sapiens
aaggccaaagttatgagttattacaatcagtgacttttcttgctctgagaatagtaaaaacacaagtcagttattatctgggcactactggttactcttgcagagctttggtcccttgtggttaactaacttttatctccgtggatatcctgaattgtctggggtttttttcagtagactcttttctagagcagttttaggtttaaagcaaaattgagcacaaagtacggagatttcccacatatccccagctcctacatacacacagccttctccactataaacaaccccacccaggtggtacatgtgctacaatcaatggacytacattgacacatcattgtcacacagagcccatagtttacattagattcactgttggcgtggtacatgccatgggtttagacaaatgtgtgacatgtatctaccattacagcatcatgcacagtagtttcactgcccgtaaaatcctctgtgctctaagtactcatcactcctccctcaacccctgtcaaccatggatatttttattatctccatagttttaccttctactgaatgtcatattttaggatcatatggtaggtatccttttcagattggcttctttcacttagaactatgc

SEQ ID NO: 45674 - DNA, 625 bp, Homo sapiens
aaggccaaagttatgagttattacaatcagtgacttttcttgctctgagaatagtaaaaacacaagtcagttattatctgggcactactggttactcttgcagagctttggtcccttgtggttaactaacttttatctccgtggatatcctgaattgtctggggtttttttcagtagactcttttctagagcagttttaggtttaaagcaaaattgagcacaaagtacggagatttcccacatatccccagctcctacatacacacagccttctccactataaacaaccccacccaggtggtacatgtgctacaatcaatggacctacattgacacatcattgtcacacagagcccatagtttacattagattcactgttggcgtggtacatgccatgggtttagacaaatgtgtgacatgtatctaccattayagcatcatgcacagtagtttcactgcccgtaaaatcctctgtgctctaagtactcatcactcctccctcaacccctgtcaaccatggatatttttattatctccatagttttaccttctactgaatgtcatattttaggatcatatggtaggtatccttttcagattggcttctttcacttagaactatgc

SEQ ID NO: 45675 - DNA, 625 bp, Homo sapiens
aaggccaaagttatgagttattacaatcagtgacttttcttgctctgagaatagtaaaaacacaagtcagttattatctgggcactactggttactcttgcagagctttggtcccttgtggttaactaacttttatctccgtggatatcctgaattgtctggggtttttttcagtagactcttttctagagcagttttaggtttaaagcaaaattgagcacaaagtacggagatttcccacatatccccagctcctacatacacacagccttctccactataaacaaccccacccaggtggtacatgtgctacaatcaatggacctacattgacacatcattgtcacacagagcccatagtttacattagattcactgttggcgtggtacatgccatgggtttagacaaatgtgtgacatgtatctaccattacagcatcatgcacagtagtttcactgcccrtaaaatcctctgtgctctaagtactcatcactcctccctcaacccctgtcaaccatggatatttttattatctccatagttttaccttctactgaatgtcatattttaggatcatatggtaggtatccttttcagattggcttctttcacttagaactatgc

SEQ ID NO: 45676 - DNA, 519 bp, Homo sapiens
caagttttttttttcagcacaaaatgaatgaaattcaagtagtctgatggaagaagagggaaatctgacttatggtttggagttgctttcctttctgccaattgataaagtttttgagaataacaacaaatcattgtcagttctactgcaatgtcttccaaaattctatgctggacattactgtagtaatcaaccttgcytgggcaccatccccaaggctgtactgaagagagatcatttgggtgggaagaagtgtcgaggaagataaagaagcaggggtggggtggtgagggggtcaggacggtagcatttctcattgcaagattccccatattattaaaaatcggcagaggcatagagctaggatcggggagaatagcaagtaactgaaatgaaacagaactgctccaatagccaatgatgtatttgatttatcatattttccccatgaatttgtactaatacatagtcacacacactgacactggggaagtcaccaggggagctggatgtgaattc

SEQ ID NO: 45677 - DNA, 607 bp, Homo sapiens
tgggtgtcaattcataaactgcctgttatcgtaacaagataagtataaaattgagagtaggcattaagaagcttttagagcaattggacaaatatccaaatgtgatcagcagacttctattttatgtttttatatttgtttgtttctaataactattttcaattgtattttataaaaagatgtagtctacaatggattgggaatttagaaaaagaaaaactggcactttctcatccaggatttgagaagcagtgatcttgtgtgtggctagggagggctgggaagagggcacagagcaacagattctaaagcttgcctctgaggctggaaagacaggcatgttctgggaactgcagttcctcccaaagcatcatctcctaaaatacattctctccttcctacagctcacaagcaatcctttctctgatcatggtaattcttaacattgtacatgcyctctatgtgtctggcactccattaagcactttatctgtgtgatctaattgttataaccagatgacaaggtaaatgctcttatttttcttattttgtaaatgagagaagtaagatttggcaaggtaaaacaacttacctaggttacatccag

SEQ ID NO: 45678 - DNA, 2085 bp, Homo sapiens
agacaaaataaatttgcagttcaaaaaattttactttaactatatagcacagtagttcaaaaaattttactttatgtagcatatacttttatagcctactcatttacatactgggataattctgggccaatgctaaatatagattagtactttctatttttttacttttttcactcaaatttgcctgagttcattaggtaaagttcaatataatcatctctctagatttgctattatattgctacctttgttttttctctgtcagccatcactaccacatgtcattgaaagataataatttcatcttaatttctctcactttttcacagagattaaacctggaacacagagagtccataactttttgaaccaaggttcatattttgataagaaagcacaaagaaaaaaaatctgccaggagtaacacatactcattctctctctctctctctcctgcacamacgtatacaacacaaaacccccagcgtgaagtagcaaaagttggcaagttgcactctagagtccactgctacacaagggtagggtcttttcaatggcgaatagtcccttctttgcctctggcatatcctctctctctgtatttcgggacaccacttcccatagttgtgccagagttgccaacaggcatcataattgttctagctccctcgccattcttgcttgtggagccggctaccagtttccatgctttctttggccaccagtctacatactgttcattatcttcctgacagactgaggtactccaaaaagggcaacaaggatcaactgcaaagggtaagtcacaaagaggagattaaagtaaatttgctattgaaattctttcaaacatggggggaaaatgcattttggaaaacatcctttgatcatgtcaggattttagatttaatagtcttacaaaccccaaaaatatatgtctacccagtacaaagttatgtaaattgttgctgttgtcattttcaatcaatcaatatgtagagacaatttagataattcaagtcccaaaagcatttatcccagctcccaccaaatttgcctagaagatttgcctcaaataaatcaactaattcacaaattttgattttattttgtgctgtatagataagggattgttagtcaaaaaatgtacattatgaaattttaaaagaccatcctaccactttagtgacattttgaatttaaagctgacagtgtactgtaatccttgacatcgattttatttgacaactcagatctttcagatttgaaagaattttcagccagcgggggattgggtacacattttaatattaacttaaaagtaataactccttattaccattcggtatttatgaagttctctttggactcttacatcattacttttctcacctctcaaaattaaaatttttcttttcttttttttttttcttttttttttttgagacagggtcttgctctgttgcccatactggaatgcagtggcatgatcttggttcactgcagcctccaactctccaacacaagggatcctcctgcctcagcctcccaagtagctgggaccacaagtgcataccaccacacccagctaatttctgtcttttcgtagagatggggtttcaccatgtgggccaggctggtgtcaaactcctaggctcaagagatcgcctgccttggcttcccaaagtgcttggattacaggtgtgagctgccacgcccagcctaaaattactttcttaaatgatttatggggaaacaaacttcttagattttgtgataggcttcaataatgtcttatatggtttttgaagagtgttactttatgaaaatggttttaacaatataaatgttctcaaagcattaaaatatggaaatagtatagttcacctcataaaagactttttattagaagtctgcatatgttatatactttttcaaccaaatgaggctcccggaaactatgaagtaaaatttcagaattaatgagttccccagagacattaaatctaataatttaaaaagttgagtgagctgctgcttagatggtataatatctgtatgtggaaactcttctttaaaatatgc

SEQ ID NO: 45679 - DNA, 520 bp, Homo sapiens
aggggctgattggagaaaatattacaaatatactaataaaatttatgttttttttaaattctaatacaatatttctaatctgggttattcccaaaataatttaaggtggctgtcacatcagagacccaagaaaagatattttggactattttctaaatggttaaaatggaaagaacaatctatatgttgcttcaggagcttagcattgtcattttctagttccatgtggtagatcatattatttttcccaattcttcaatttcttcctgctatagaagtatctgtatatacccttgcaccacaactttgcagtatctcctrttataatgaatgaagcacatttccctccccattgttactgtgcttgacatgtgatttgtttggccaatggagaggtaccagacaagatgcacacagtacataaaacaatggtttttaatatgcatgtataattttgggctggctgcatgtgcttctgacacccactaggagaagaaaatgatccagctgttgcttattc

SEQ ID NO: 45680 - DNA, 599 bp, Homo sapiens
taagcaagaaacataaatgttaaactgctttatttgtagccatgttgacctaatatcttgacagagttttggatgatgaccacagagtcaaaaatttatatacattaaccttgtatgcatttaaaatacctgacttaatcctaggtcaaatgtgtaatcattttatttttaaagctatgatttttaggagatttgcatttgaattaatcaaagagagatgtaggagtggtgtttattacaaacacagtttttttggggggccwtactttagacccactgaataaatattctagattagaacattaaaatacacatgctcctagatattagtcagttcataaatatagcctgccctgtattaggtaatgagggaaaaggcagtggatctaatgtgtgccctaaataaaaatattaaaattaaaatggaatgatttaaattaaaaataaaataaccaattattatcaaacaaggcactcctgaaggtagtggttaccttgtagtctctgagtttgggagacttgtttatatactttaatgtcccaaactcattttattctttcattttacagtgtgagggcattgctttatattgaactga

SEQ ID NO: 45681 - DNA, 599 bp, Homo sapiens
taagcaagaaacataaatgttaaactgctttatttgtagccatgttgacctaatatcttgacagagttttggatgatgaccacagagtcaaaaatttatatacattaaccttgtatgcatttaaaatacctgacttaatcctaggtcaaatgtgtaatcattttatttttaaagctatgatttttaggagatttgcatttgaattaatcaaagagagatgtaggagtggtgtttattacaaacacagtttttttggggggccatactttagacccactgaataaatattctagattagaacattaaaatacacatgctcctagatattagtcagttcataaatatagcctgccctgtattaggtaatgagggaaaaggcagtggatctaatgtgtgccctaaataaaaatattaaaattaaaatggaatgatytaaattaaaaataaaataaccaattattatcaaacaaggcactcctgaaggtagtggttaccttgtagtctctgagtttgggagacttgtttatatactttaatgtcccaaactcattttattctttcattttacagtgtgagggcattgctttatattgaactga

SEQ ID NO: 45682 - DNA, 578 bp, Homo sapiens
tggacactcagttcgtgtcygcagaatattatagaattgcttggtgtggaaaactcacatatttagttcagaagtgttgcgaatgtagagaaatgagttttccttttaaccagccagaggatggtggggaggaggaaggcatttggcagatgggacagcaggagcagaagtgagctggtgcagggagcttggtgtgcatggctgggccatgtgaaccgcttggctgagctggggtggagggagttgtgggtgtgggttggtcacgctccaaagggcctcgggggacctgcgagggctctcagctgcatcttgctgccagcagggtgctaggttgttgtggcctgactaggaacagcatgaggctttgcgctttgcttgaaactggagttctgaggagacagggacgagtgaatgagagagccggagtagggaaggcctgggatgagaatgaaatcaacaatatactgttacagtaggtagtcaggcagacataagcaggggaggagggggaccccatcaggaatgccaggccaccaggatggtcaggcagttgtcaaagtgtctctgaaatagtaatt

SEQ ID NO: 45683 - DNA, 578 bp, Homo sapiens
tggacactcagttcgtgtctgcagaatattatagaattgcttggtgtggaaaactcacatatttagttcagaagtgttgcgaatgtagagaaatgagttttccttttaaccagccagakgatggtggggaggaggaaggcatttggcagatgggacagcaggagcagaagtgagctggtgcagggagcttggtgtgcatggctgggccatgtgaaccgcttggctgagctggggtggagggagttgtgggtgtgggttggtcacgctccaaagggcctcgggggacctgcgagggctctcagctgcatcttgctgccagcagggtgctaggttgttgtggcctgactaggaacagcatgaggctttgcgctttgcttgaaactggagttctgaggagacagggacgagtgaatgagagagccggagtagggaaggcctgggatgagaatgaaatcaacaatatactgttacagtaggtagtcaggcagacataagcaggggaggagggggaccccatcaggaatgccaggccaccaggatggtcaggcagttgtcaaagtgtctctgaaatagtaatt

SEQ ID NO: 45684 - DNA, 578 bp, Homo sapiens
tggacactcagttcgtgtctgcagaatattatagaattgcttggtgtggaaaactcacatatttagttcagaagtgttgcgaatgtagagaaatgagttttccttttaaccagccagaggatggtggggaggaggaaggcatttggcagatgggacagcaggagcagaagtgagctggtgcagggagcttggtgtgcatggctgggccatgtgaaccgcttggctgagctggggtggagggagttgtgggtgtgggttggtcacgctccaaagggcctcgggggacctgcgagggctctcagctgcatcttgctgccagcagggtgctaggttgttgtggcctgactaggaacagcatgaggctttgcgctttgcttgaaactggagttctgaggagacagggacgagtgaatgagagagcyggagtagggaaggcctgggatgagaatgaaatcaacaatatactgttacagtaggtagtcaggcagacataagcaggggaggagggggaccccatcaggaatgccaggccaccaggatggtcaggcagttgtcaaagtgtctctgaaatagtaatt

SEQ ID NO: 45685 - DNA, 575 bp, Homo sapiens
aaggtaatgaaataatagttgctctccactcagtttattaaacacaggttatgaatgtaatatttctttttaaaaagtttttatgaatcaggaaataagagaaacagagagaatgtgcaaaaatcaaatgtagagatttcatgttggctgtgaatttgtcatagatggcttttattatattgaggtatgtccccttatactgattttgctgagttttaatcaaaaaggaatgctggatttcactgaatgctttttctgcatctattgagatgatcatgtgatttatgtatttaatcctgtttatgtggtgtatcacatttattgactttcctatgttaaaccattcctgcgtycctggtatgaaacccacttgatcatggtggattatctttttgatatgttgctggatttggttagctagtattttgttaaagattttagcatctgtgttcatcaggcatattggtctgtagttttttttggttatgtcctttcctggttttggtattagggtaatactggcctcatacaatgatttacagggagggttgcctctttgtctatcttgtggaata

SEQ ID NO: 45686 - DNA, 564 bp, Homo sapiens
cattgtgaaaagtgcaaagcactattaaaaacaagttattatttccctctaggctgtcgagagaacaagaaactgggattggtcccagcagaagagagctgtgacccaaacagctccattcctggtgtcattacatgcctctttgagaaatgcacccttcagagtgctccaagacaaaaacatgctcaaccataaagattttattaataatttctagcaatttaatgtatctagcgttcactcagctctttgtatgcacaagacatcatgcttgggttgtggatgtrtcaagataactaaggcagagctctggccctggaagattttaagcctgtggtaagagacagagtccagtgcaaggtagagagtggacccatgtgtaatgggggtggcatctccactgtctagtgccactgaagtatcctgctggcttgcttcttccacttcccaccactgctgcttttgtgccccagcccccatttctgggagtcttaggtgcatcctgggtaatgagaggcagtgttgtacagtggtggaaaccagggacctgaagccagactgccc

SEQ ID NO: 45687 - DNA, 575 bp, Homo sapiens
atttgtacagaaacagcaatctcacccactccatggcactgctttgatagtactaccagaaacaatacaggagattttaagagaagaaacaaagtgtatcacataatgtagaattatcaagaaaaaataattagaggaagttgtttgtttagactggtaggcaaaggaacattttaattattgggatgaagtgtaacaatgaatgatggggaaaggcagcttcacaataaagaccttccagtgaagtcttagttaggaaatcatggttgtcaacaatagagggtttttgttttttcatttcttcatttataattgtttaaaatgtaacataagttaatagaagtaggaattaaagaaagtattaataaatataatatcaagttcccataggaagaagtataaaatttaagtctagggaacatcattttttgagacaggataaaatataaaatacatgcaattttgtaaagaacacatgttraaattctaatttggggagataacggttctcttctaaatacctaaattcagtggtcatattcataatttttttatttccacttacaaacgacggc

SEQ ID NO: 45688 - DNA, 566 bp, Homo sapiens
cccttgctctgaaacttcctctccagcctatgagttaagtcaaataggcatgatgatacaggcttgcacgcatctcaggcaagtacctaacaaacatttacagcagtttctcaatctttcttaacccactctcttctaataaatattacattgttactcccgtctcctcccttccctcattagtttcacaaacactagattctgatatgtcattccacagagtgccctttccatttcctcctatatataatcccatctgccatgcccttccctttgtaaatgcgtgctgtaaatttaaccttgagattttgacatatatcctatttcttttttcacccttgataattactgatttaggaratttaatatttactgaatgtctaagtatgtagtggctctgttgtttaattctttacataatattgctctaaataccatagtgttattttgaagtagacatcttattttttatattatagatgaattaagactctgagacatatgataacttaaacttattgacaagcatttgaaatctagtgtgtcagagataaggctacatgttt

SEQ ID NO: 45689 - DNA, 547 bp, Homo sapiens
cacctctggcagcgcatgaaaggtgggttacttacaggaatgagagtacagcccrtgtaattaaacaaaagaaaggttcataggcaatatgtgaagagaaagaaacagcaatattcactccccagtttattaatgaatgcctagacaggctctgagttactttatgtatgcagagctctgttcctagcactctgtgtgaatatagaatcatagatccttggaaactgaatgtaccttgaatccttagcttgacattaaagattctccatgacccagactcaatccgtctatacatctcctcaccaactgaatttccctgtgaccttcctattctagtacaaggcatcttagcttgagacctttagaaaaaaaaaacctaaggcaaaattatatgctattgctttattgaaaggcacaaagaagcataagaggaaaacgaaaagtggagcatggacaaaggaaaagcaaatacaacatcatgtgtttctgtgttggctgcagtctcatgtataaacagtcgattgccgagtcctgcaggataaatttg

SEQ ID NO: 45690 - DNA, 1782 bp, Homo sapiens
atgcattaactgttagccacagtgtgactttttacacttaaattaatacaaggtaggtaaaatttaaaattcagcttctgagtcacactggccacatttcaaatgctcagtcaccacatgtgattaatggctatcatactgaatagcacagatgtggaacataccactattgtagaaggacagtgcttcatgagactacaggcataaggtgagaaaattgatcaggggctaatagagagcaagggtgtcctgtttcaggaaaactcaacctgtgaacatgcagatttacacaaaggaaaatttaggaggtrtccattctcctcatatggcaattcaaaaaacatttttatccaactacctccactgattaattaaatatccctaatcatatttagaaagcagtcagaaaaataaaatgaatatgaaagaaagtaaactaaaatgtaaggctattatcaaacactaaatcacaggaaaccatatactgggaaattttgtcagagggatatagtggatatttgaaacatatgtttacatctgtctttgaaaccagccaacctggatttgggtccatctttgcctcttggctaatggccccatgaacagaagcaggcagaactctgcaggtttgtcatgaggatttgttgtggaagcatatgtgcatagcagcacatagtaggtagtttgtaactactaggacttcccttcttcctgttttcttcctcaccttctcctttgggtgttctcttccttcttcctttcttgcatcctaggagcccagagcctgtcagttccacactcaccactctgcattttaggggtccagctatgtggagagagaaatccctctctttttctgtgacagccccctgaacagtcatctctgataacgccatggtttcattcagtcaaaatggacatatccccttgataagggatactacccataaggccactgatggagatattttggacgagttttattattccctgagtcacatcaaaagggggaaaatagcatcaaactagaaattaggagttctggatatgtttcagcgctgacaatgatttctacaagtcctatacttcatgggcttctattcttcatctataaaatggaaaggttggagtagaaagtctcttactgcctctttcagctcaaatctaagtaagaactactcactgcctcccagctagactagcagctctgtgagggcagggacttgggctgtctgtccctgttgcagtcccaatgtgctagcccagtgtccgtcatttattcaatgctcagtgcgcatttgaggaacagatgatgagaggagcccaatctgcctccctcgcacatgctctggtgggggccctgtgcctctattgcagactaccttcactccactcagcctctccccgcccctccactctctccagcattatggctgctgttctctttatttgtaaaaagttgcagcagctccactgtgttactctaccatttctgatttctctgtaaagctggggctgagaaacaaactgtactgtgtaattatccttgcaacactctcttcgaagaattccaatttaatagaattaccaagatttaaaaacattaaaacaaaaatgagcttgttagagtaaattagacttcataaatgtgttctccgtttattacaaaacattgatttctgtggtcaccttctctaaattattgaaagttgagtagactgccttaattggcaaggagaaatgtcaccagccaactctcatagaagttgggggttgggggca

SEQ ID NO: 45691 - DNA, 1782 bp, Homo sapiens
atgcattaactgttagccacagtgtgactttttacacttaaattaatacaaggtaggtaaaatttaaaattcagcttctgagtcacactggccacatttcaaatgctcagtcaccacatgtgattaatggctatcatactgaatagcacagatgtggaacataccactattgtagaaggacagtgcttcatgagactacaggcataaggtgagaaaattgatcaggggctaatagagagcaagggtgtcctgtttcaggaaaactcaacctgtgaacatgcagatttacacaaaggaaaatttaggaggtgtccattctcctcatatggcaattcaaaaaacatttttatccaactacctccactgattaattaaatatccctaatcatatttagaaagcagtcagaaaaataaaatgaatatgaaagaaagtaaactaaaatgtaaggctattatcaaacactaaatcacaggaaaccatatactgggaaattttgtcagagggatatagtggatatttgaaacatatgtttacatctgtctttgaaaccagccaacctggatttgggtccatctttgcctcttggctaatggccccatgaacagaagcaggcagaactctgcaggtttgtcatgaggatttgttgtggaagcatatgtgcatagcagcacatagtaggtagtttgtaactactaggacttcccttcttcctgttttcttcctcaccttctcctttgggtgttctcttccttcttcctttcttgcatcctaggagcccagagcctgtcagttccacactcaccactctgcattttaggggtccagctatgtggagagagaaatccctctctttttctgtgacagccccctgaacagtcatctctgataacgccatggtttcattcagtcaaaatggacatatccccttgataagggatactacccataaggccactgatggagatattttggacgagttttattattccctgagtcacatcaaaagggggaaaatagcatcaaactagaaattaggagttctggatatgtttcagcgctgacaatgatttctacaagtcctatacttcatgggcttctattcttcatctataaaatggaaaggttggagtagaaagtctcttactgcctctttcagctcaaatctaagtaagaactactcactgcctcccagctagactagcagctctgtgagggcagggacttgggctgtctgtccctgttgcagtcccaatgtgctagcccagtgtccgtcatttattcaatgctcagtgcgcatttgaggaacagatgatgagaggagcccaatctgcctccctcgcacatgctctggtgggggccctgtgcctctattgcagactaccttcactccactcagcctctccccrcccctccactctctccagcattatggctgctgttctctttatttgtaaaaagttgcagcagctccactgtgttactctaccatttctgatttctctgtaaagctggggctgagaaacaaactgtactgtgtaattatccttgcaacactctcttcgaagaattccaatttaatagaattaccaagatttaaaaacattaaaacaaaaatgagcttgttagagtaaattagacttcataaatgtgttctccgtttattacaaaacattgatttctgtggtcaccttctctaaattattgaaagttgagtagactgccttaattggcaaggagaaatgtcaccagccaactctcatagaagttgggggttgggggca

SEQ ID NO: 45692 - DNA, 615 bp, Homo sapiens
tttcttctataattattcgtcatgctttaaatgtgtgtttcatgcgcatttgtctgtgtgctatcttttacgattaataaaggtttaaaataaacaaatcagcttcagctttatgtgactatagaagtcctgaaattgctggacttatgataagtgtattaatacagcttgatttttgcatgaatgtattagtagaaagtttgatttttgcatgaatgtattagtagaaagtcatctattcctgatttgacaaattctcatatgttattttaaggttcttctgccagttgatttaaatacagattagctgttgaacaaatatgtttactattccaaaatggtgacatttgggttccaaagtttcacaagaccattctgagaatgacttgaggagcactgtatcataacgaakgtttgatttaggttgtccccattttgctaagccttattataccaagtaagctcatttccaggccatgaaaagcaattcaaaagaatttcatatcctcaggatactagaaaccagtactctgaagatcatactctaaaagttggctcaggcaaatttcaatatgcaaatttgtgcttttaaattacacttcattaaaatacact

SEQ ID NO: 45693 - DNA, 613 bp, Homo sapiens
caaattaaacatattcaaaactgcaaaatcaatgaaatcaagctacaaacattaaattggtatgggaaatgatgctatttgctgaaaccaaatcacacttgcaaaaacattgatagctatggcacaggtcattcatgtttgacgtgcatatagtgtcaaactaggtgatgccccaattttccatcacttttgtaggttcaaacacctgcaacaayattattcacccagtcttcacttagcacaaatgaggctcattaacctatggcaaagtaattctactctataccagcacaaaaagaagtacacacacaaactatggaaaaggaaaaataaggcagtagttgttcattaactggtcgttttaggttacctagaatatatttatattcacttttggggatttttgccaaaaataaaacatttcattttcagccaggtgtgctggcacatgcctgcagtcccagctacttgggaggctgaggtaggaggatcacctgaaccccgaaattcaagtccaacctgggaactatacccagacactatctttaaaaaacaaaaaaaaatttaacatttcattttttattctgttagcaaaatttcatttccccaaaaa

SEQ ID NO: 45694 - DNA, 613 bp, Homo sapiens
caaattaaacatattcaaaactgcaaaatcaatgaaatcaagctacaaacattaaattggtatgggaaatgatgctatttgctgaaaccaaatcacacttgcaaaaacattgatagctatggcacaggtcattcatgtttgacgtgcatatagtgtcaaactaggtgatgccccaattttccatcacttttgtaggttcaaacacctgcaacaatattattcacccagtcttcacttagcacaaatgaggctcattaacctatggcaaagtaattctactctataccagcacaaaaagaagtacacacacaaactatggaaaaggaaaaataaggcagtagttgttcattaactggtcgttttaggttacctagaatatatttatattcacttttggggatttttgccaaaaataaaacatttcattttcagccaggtgtgctggcacatgcctgcagtcccagctacttgggaggctgaggtrggaggatcacctgaaccccgaaattcaagtccaacctgggaactatacccagacactatctttaaaaaacaaaaaaaaatttaacatttcattttttattctgttagcaaaatttcatttccccaaaaa

SEQ ID NO: 45695 - DNA, 536 bp, Homo sapiens
caccccttacataaaattgaaggctgtcttttgcccagagcaccactsaagaccatttttgagagagagtttgtgagcatcatgggaagaaggcttcatgacagccaggttgggtggagtttaatgtgtgtaggaggtgagaggagactccctggcattcaggcagagagatgcatgtgatatcctggagggaagatgtctttgcaatagtaagttaaggaacttctcaaaagctctttaaaagacatactgataacaaacttttgggaagggttgcagtttttcagcataaaaccttcagaaaacatttattcccataaaaggattatttcctcaataccactgcctgtcaatatagccattactaaggctgcctgtatctttctctttcttttttacttttcataaccaaacttctgctttttccttaataaaaccgtatagcattgagaatgtgttaattttttccttgtttctctatcttcaagtcaaccaggaataagcttttaattgcacagttttgtcctgctaaatcc

SEQ ID NO: 45696 - DNA, 536 bp, Homo sapiens
caccccttacataaaattgaaggctgtcttttgcccagagcaccactgaagaccatttttgagagagagtttgkgagcatcatgggaagaaggcttcatgacagccaggttgggtggagtttaatgtgtgtaggaggtgagaggagactccctggcattcaggcagagagatgcatgtgatatcctggagggaagatgtctttgcaatagtaagttaaggaacttctcaaaagctctttaaaagacatactgataacaaacttttgggaagggttgcagtttttcagcataaaaccttcagaaaacatttattcccataaaaggattatttcctcaataccactgcctgtcaatatagccattactaaggctgcctgtatctttctctttcttttttacttttcataaccaaacttctgctttttccttaataaaaccgtatagcattgagaatgtgttaattttttccttgtttctctatcttcaagtcaaccaggaataagcttttaattgcacagttttgtcctgctaaatcc

SEQ ID NO: 45697 - DNA, 536 bp, Homo sapiens
caccccttacataaaattgaaggctgtcttttgcccagagcaccactgaagaccatttttgagagagagtttgtgagcatcatgggaagaaggcttcatgacagccaggttgggtggagtttaatgtgtgtaggaggtgagaggagactccctggcattcaggcagagagatgcatgtgatatcctggagggaagatgtcttygcaatagtaagttaaggaacttctcaaaagctctttaaaagacatactgataacaaacttttgggaagggttgcagtttttcagcataaaaccttcagaaaacatttattcccataaaaggattatttcctcaataccactgcctgtcaatatagccattactaaggctgcctgtatctttctctttcttttttacttttcataaccaaacttctgctttttccttaataaaaccgtatagcattgagaatgtgttaattttttccttgtttctctatcttcaagtcaaccaggaataagcttttaattgcacagttttgtcctgctaaatcc

SEQ ID NO: 45698 - DNA, 536 bp, Homo sapiens
caccccttacataaaattgaaggctgtcttttgcccagagcaccactgaagaccatttttgagagagagtttgtgagcatcatgggaagaaggcttcatgacagccaggttgggtggagtttaatgtgtgtaggaggtgagaggagactccctggcattcaggcagagagatgcatgtgatatcctggagggaagatgtctttgcaatrgtaagttaaggaacttctcaaaagctctttaaaagacatactgataacaaacttttgggaagggttgcagtttttcagcataaaaccttcagaaaacatttattcccataaaaggattatttcctcaataccactgcctgtcaatatagccattactaaggctgcctgtatctttctctttcttttttacttttcataaccaaacttctgctttttccttaataaaaccgtatagcattgagaatgtgttaattttttccttgtttctctatcttcaagtcaaccaggaataagcttttaattgcacagttttgtcctgctaaatcc

SEQ ID NO: 45699 - DNA, 583 bp, Homo sapiens
aattttaatcgaaatatattcacctaagcattcatgagaacattccctaggcaacattgcaaaaataaacctctatacgtgatcaaaactaagcattttcattggtctctagcccagtttcacaggccaatataacagtgacatgttttcatggacttttttcttaacctgagtttctcagaaaaaaatgttacctctggtgatggtagagtatcaggaaaatcatcaagcatatcagaaagcaaggactctccaaaagtagcctgcaaattgtctgccattacttcttgttgggcagtggagcagtgattttctaaagagagcaccactgggtagtcagatgtctaaaaaagtaaccattactatggttattcatcaaaacttctaaataattgtaaggcaattaatataagtgcttaatgtattttaaaacttacttctaacgtttagtacctttgcaaaataastattctttaaactgaaagtacttttgagtttggcaaaacagagaccattaaatctgcataaaaagaaatgtattactatttgcaccaaaagaataggaacaactgaagcatccatc

SEQ ID NO: 45700 - DNA, 559 bp, Homo sapiens
atcaaattaagaatgctcaggcccaaccctggttgagtcaaaatctctggaggtggggtttggggcatctcttttgtagtatttcctttcattgttttctcaactctccaggtgattccaatatgcagccaagatttacaaccactggattaaggatagtggtttccaaacttcagtgtgtatacaagaatccacctggtaagtttgttaagactacagatcaccccgagatgttccatcctaagagattctagggaagaaggtctgggtcaggataattactaagaagtcttaagaaattagcccctccctaatcagcagaacttcaggtcaactagaaacatctcaaatctcaaataacaaagcaagccttcctgtcttatcctctgagaaaaatactgtaatccttttatatatcataaatgttgtgctggtaaaataccatgccttctttcagatgtagtaatatgttatcattctcctctgtcccacagcctttggaagtttaataacttatgactgcaaggtctrttttcctcatctgaacgtcataatgttt

SEQ ID NO: 45701 - DNA, 617 bp, Homo sapiens
atatggcagagaaatgaacaagatctaaaggactatgtggctctaaacctaagccaaactatggtggctgattcttttagtctataattttataattcccaaakatgtcacagatactgccaaacaaaaatgtgatagtttcataatttcaggattagttgatcaccaaggaatatatcaaggaaaagctgctctagattcaatcccttttaatataaatttgtattcattccactgcatcaatatgcacttaaaaacatactttttctataggtaatttcttccaatctaatcatagacttggatgcaaggcagattcataacccctcccatatctctactaacacttatgtgttcttaatccacagactgagatttagaagtgaattcttgtcacaaagaagttctaaaatgaagggagttccagaagaaattacttgaaagttagctaaagcaaatagtcactctctgtacaactaactaaaatcaacaacaatcaggcaagtgtgttcagctaggtacgtattaatgcttattctgtccgcaaaagacaagttgccacttagttggccgaaagatttatttgtcattatgaaatgcagtatctcagcagacac

SEQ ID NO: 45702 - DNA, 617 bp, Homo sapiens
atatggcagagaaatgaacaagatctaaaggactatgtggctctaaacctaagccaaactatggtggctgattcttttagtctataattttataattcccaaagatgtcacagatactgccaaacaaaaatgtgatagtttcataatttcaggattagttgatcaccaaggaatatatcaaggaaaagctgctctagattcaatcccttttaatataaatttgtattcattccactgcatcaatatgcacttaaaaacatactttttctataggtaatttcttccaatctaatcatagacttggatgcaaggcagattcataacccctcccatatctctactaacacttatgtgttcttaatccacagactgagatttagaagtgaattcttgtcacaaagaagttctaaaatgaagggagttccagaagaarttacttgaaagttagctaaagcaaatagtcactctctgtacaactaactaaaatcaacaacaatcaggcaagtgtgttcagctaggtacgtattaatgcttattctgtccgcaaaagacaagttgccacttagttggccgaaagatttatttgtcattatgaaatgcagtatctcagcagacac

SEQ ID NO: 45703 - DNA, 519 bp, Homo sapiens
tactctctacttctatgatattaacttttttagattccacatatgagttagatcatgtggtatttgtctttctgtgtctggcttatttcacttaacaatttcctacaagtttgtccatgtcacaaatgacaggatttcattttttatggctgaacagtactctactgtatatatgtgccatattttctttattcatctgctgatagacacttgggttgattccctatcttagctattatgaatagtgctgcagtaagcttgggagtacaaatatctcttcaacataatgatttcatttcctttggatatatacccagtagtgggatcaatggatcatatggtagttctcttttyaattttttgaggaatctccatactgttttctataatggctatacacacctcttattttgattccagcaggagctccttaattggtctgcttaacttcagtctctacaggttaatgtctactttacatccttgccatattcagtcctttattcaagaaatatttat

SEQ ID NO: 45704 - DNA, 519 bp, Homo sapiens
tactctctacttctatgatattaacttttttagattccacatatgagttagatcatgtggtatttgtctttctgtgtctggcttatttcacttaacaatttcctacaagtttgtccatgtcacaaatgacaggatttcattttttatggctgaacagtactctactgtatatatgtgccatattttctttattcatctgctgatagacacttgggttgattccctatcttagctattatgaatagtgctgcagtaagcttgggagtacaaatatctcttcaacataatgatttcatttcctttggatatatacccagtagtgggatcaatggatcatatggtagttctctttttaattttttgaggaatctccatactgttttctataatggctatacwcacctcttattttgattccagcaggagctccttaattggtctgcttaacttcagtctctacaggttaatgtctactttacatccttgccatattcagtcctttattcaagaaatatttat

SEQ ID NO: 45705 - DNA, 583 bp, Homo sapiens
catgacatcatgtttaagggttatcccccagtttggaaaagcatatcattgccaataagatgacccagcattggtagctgttacacattcaaggtgattttaagtaataggaatatagttattaattaccctttgtttaaaaatgtcaaatataaattgtctcttaaatgcaaagatttattacaaataaatgcaagcacgtgactgcttccttaagtctttggacgtaattgtgtttgaatattttccttttgaaatacatataatgttattatatttaattggtttactatctgctcagactactcagaaaatcctcaacctctctctyctccttattcctcagggtcattcatttaagttctgttggttctatttcctaattttgccttctcttgtttataccaatgctaccttagttcaggctcacactctttcttgcttgactattccaaagtctaccttcattgtacaattccttactgtacagtcttttatcatcccagtccattctccacataaatgttaaagtgatcttcctaaaacacaagtcagggagtgttatttcctcactgaaaacatc

SEQ ID NO: 45706 - DNA, 658 bp, Homo sapiens
ttcttggagtgacagcgaaacttggagagtgagtctctggcatataaagcaataaaaggagagtgtacctgaagcggtgaaaaacaaacaccttctacagacactcattccttcactagcagtctgagtgcttagtttggttttcttaaagcctggagtagaggaatgtaacagtctatgtgagaatttataggccttcccagatctttcccttccctctcatgataattttctctaaaaaaaaaaaggtaaccattattgttttaaaattggtacaagwaatacaagataagtagatatgccaatgtagttgtccatgtagctgtcataccttttagaagcatcttcttgtttcaaagtacttgtctgtttagtacctacaataaaaatacagtcatgtgctacataatgacatttccgtaaacgacggacagcatacagacagcggtctcataagattaaaatactgtatttttactgtaccttttctatgtttagatatacagttgcctacagtacttagtacagtaacatgctgtgcaggtttgtagcctgggagcaataggctgtaccatatagcctagtgtgtaagtaggctgtaccatctaggtttgtgtaagtgcactcgatgatggtcacacaaggatgaaatcgacta

SEQ ID NO: 45707 - DNA, 582 bp, Homo sapiens
ttttagagtgaaaccattcacatttttatctttctcctcaattctgattaaaatgcaaagattcacatggagaaatattctgtccctccattttggaaaaagtgtcatggaaaattgcaatggcattgttttgatttaatgtcattggaaaatgtcttgacaatcaactttttcagctgataaaaactaagcatgtgatggtcgaaacattattagtattcttctgagaacaggcatctgtatcagaaatcttatgtttgaataggaccaaatttgtctttgataacatcgcaggattatttcagtgtcttcactcatattatagaaatgtaacaaattttgaataattttacaataacatcttctacatcaattgaaaaaatctgatgaattattaatacaattgtgcaaatctgtaccatgcaactgatcccyaccaagattctgatattgccattattggaaaagactctcaaagctagcattagaaatactggatgaaaaaagaaaaagaaatattggatgacacactgacaagataatccgcaagcctgctgaggcttagacgagtggaaagatggt

SEQ ID NO: 45708 - DNA, 652 bp, Homo sapiens
aacctatcaatgacattaagtgaggacttaccgtacaggtattagagttttctttttttcttagtttctgtagaaaagtatttctgaatattgtttgtctttttaaaaaaacttagttttttatttttaaaaattgatacataattgtacatatttttggggtacatgtgatattttgatacatgtaaataatgtgtaataatcaaataagagtattgggatatttatcatgtatcaaacatttatcatttatgttgggaacattccaaatcttctagctatttcaaaatgtataataaattacagctaattgttgtcaccttactgaacactagaacttwctccttctacctaattgtatttttgtacctattaaccaatctctcttcatctctccctcctgcctacttgccccaatctctggtgactggcattctactctctacctttgtgagataaactttttttagttcccacatataagtgagaatatgcaataagcatctttctgtgcctggcttatttcacttaacattatgacccagttacatccatattgctctaaatgacagggattcgttcctttttatggctgaatagtatcccattgtgtatatatacaccacattttatctctttattcatctattga

SEQ ID NO: 45709 - DNA, 579 bp, Homo sapiens
atcaagtcattacctttttttttttttttttagacagtcttgctctgttgcccaggctggagtgcagtggcacaatgacctcggctcactgcaacctccgcctcctggattcaagcgattctcctgcctcagcctcccgaatacctgggattataggtgcccaccacacccggctaatatttgtatttttaatacagacagggtttcaccatgttggccaggctggtctcaaactcctgacctcaggtgatctgcctgccttggcctcccaaagtgctgggattacaggcgtgagccatcgtgcccggccaaagtcattaacttctctgggcatcattttgtcatctaaaaattaggagaagatgtcatttctctcacagggctgcttgctcagaggaaaaaaggagaaacttttcaaaatgtccatacaggacctgacacacaacaggagttctagaagggaagagggcagaactcattgtcttctgagatttccaaacgggggagtccagagaatatggatgacttcctgaggctgtgcagctgtaggtggragaactgggctaggactcccatccc

SEQ ID NO: 45710 - DNA, 544 bp, Homo sapiens
atcactatgttgccagtccactcccagctttcttcaggctaaaatcttagatgagtacaattccaggccactgtatttagataacaggttttcagaaagtaacctgagaacataataagaaatatgtcacataagcagataattgtgttttgattacaaatagctgatttaaaattgaaacaytggagcaggggccattcaataattctggatgccttgatcacatataagatacataggttataaaatctgaaaactgtaaattaaaattaaccctggcctctttttgtcataatttttagggactgtagttcattgttacaataatttgacctactactgacattatgtaaaattaatgaattcagattaaaatgaagggtaagagtgcagtaattataaataatcttacatctacaattcaattaacaggcaccaaactgtgaaccaagattgtcagtgaactgataactttaaacctgaatccaatcctgtgttaaggcttggtatttttgtatgaacatttgaacttccctgaaaaaac

SEQ ID NO: 45711 - DNA, 544 bp, Homo sapiens
atcactatgttgccagtccactcccagctttcttcaggctaaaatcttagatgagtacaattccaggccactgtatttagataacaggttttcagaaagtaacctgagaacataataagaaatatgtcacataagcagataattgtgttttgattacaaatagctgatttaaaattgaaacattggagcaggggccattcaataattctggatgccttgatcacatataagatacataggttataaaatctgaaaactgtaaattaaaattaaccctggcctctttttgtcataatttttagggactgtagttcattgttacaataatttgacctactactgacattatgtaaaattaatgaattcagattaaaatgaagggtaagagtgcagtaattataaataatcttacatctacaattcaattawcaggcaccaaactgtgaaccaagattgtcagtgaactgataactttaaacctgaatccaatcctgtgttaaggcttggtatttttgtatgaacatttgaacttccctgaaaaaac

SEQ ID NO: 45712 - DNA, 249 bp, Homo sapiens
agttcccccacgccccacttcaaaagacctttgaaagtcctcctcgacaggaaggaacagccccctgcrggagtcccctggggcctgaaggagagagtgaagtacaacgggaggggcggaacaaccaagaagcatacagtgtgagtttttagagcctggctgcttgtccttcagtaatacggaagtttaggcgtttctattttaattcacctctaaaacctgaaaaagcctaagagagaaatatactac

SEQ ID NO: 45713 - DNA, 544 bp, Homo sapiens
accttctttggttctatgttcctacatacaaaagttatttgagggcagttggagttaaagcatgtatgcagtttgatgataatgatgatgacgatgacaatgacaacatatatcacagagatgaaagcatggacatactttttccaagaaagagaactaagacrattgttgcaagtgagtgtaaaaattaactctgaaaacttatatgtaaaacagaggaataaatctgggccacaaaatcttcctttctaatgcaataaacaacaacaacaacagcaacaaaaaagtgtcagccaagaatatcaaatttatcaaataagcaagaaactagatataacgtggggcttcaaagagcggatttcaagatctcagcagaggcacatgcctttgtgcactcttctgccctctctcctatctctatatgcaacacatatacaaaggacatctctctctatatatctatatctcatacacataaactatcatatatgtgccattatatgtatatatattcacatacatattccatataaaatatggattc

SEQ ID NO: 45714 - DNA, 1963 bp, Homo sapiens
catccagtacaataaatgcttttattaaccataaatttgagactgctttagggatttgaagtgttgggtttcatgctgaaaaaatgtaatgttatccacagaccatcagtgagtaacaaaaacagaggcacaggttatgctactttgatcaaattatggcaaaaaattgtcttttgcatttaaaatagtagttgcattcagggcatatcttcaaggagcaccacaataatttaatcatatgttttggagagtttcatggaaattcatcctgagtgcaaatttatagaaccagcagcttctgttaaacagataggaagctcaaaagtgttatgaggctaagagggctgagaaatcaaaatactaagatgggacccctaaatcagggtttctcagtctcagcgctatttacattttaggccaggtaattttttgtcatggaggactgacttgtgcatttcaagatgtttagcaacatccctgagcccttcccgttgactgccaggagcagcctaccccagctgtgacaaccaaaaatgtctccagaaattccccaaatcaaggttaaggctgcaagtaagctgtgatcacaccactgcactcaagcctggttgatagagaccctgtctcaaaacaaacaaacaaacaaaaaagaaatcccccaaattcccccaatcaaaaaccactgctctmaatcaaagtctaggcttgtttagcaaatgctgcctatgtttgcttcatccgaaggaaatgtcagagcctggggagctgcgcagcctcagtactggaaacccagtgcctccttttcccaagaatgggtagccctgagtggtttctgaaatcaaaagccaccttgcactcccttttccacagaattaaaggtagcatagccatagaaccgagaactctctcggctgtgaccagagcaaacgagaccaagccaagggcaagctgccccccgccccccaccaaagcataccctcacccgacctttgtgtccagcatgcattccagcccaggagctccggcccgctgggcagaggctgcacaccattcctgccagcatctaaatcgctgctttctggcctttcactgtcaggccacagaggggactgtggacttggtgccagaaaagaaaatgaaaagcaaagttgaatctctgcggaccattctctggatgctgaatgtcccactattacgacacggcatgacatttcatggcagcaggggaggaggcccagtcctgaaagctgaacaaacgcccggcacacaggcctgcctgcgccctcgtagtctctctggacttatgaataaaagatggaggttttgtctctgttgtttccctggtaccctgtaagaataacaacttgttgctttttgacattttaacttactttgaaaaatgaccaatattaactttacatgtcttggcccttaaatctggagtggggtaaaatgaaagagacaaaagccatgtaattaggtagaagataataattcaagttaaactaatgaaactgtctgtaacggactctaataaaataatgtaggtaacatgcaatcacagaactaaaaggctagaaactgacttggaggatacgtttttagtaaagtagcctttactggaaataaagttcaatgttttcttagcacaaaggaaagaaatggctgaattttggtgtgaggaagcagtcaaccgtaaacctgccccggccaaacacaggtctttaataggaactcattccccgtctctgagggcgacatctataactgcaacaagcccatgtgaatagcaaaagccttgagcattattgagaaacagcactcctcattttgagacagtgtggttgatttcaaataatctttaaggaaaaagtttattacaggatagcacaaatgacatcctgcatttccttagactctcaataaagtaaaagggaaggcttaatgtgaaacactgcatttt

SEQ ID NO: 45715 - DNA, 565 bp, Homo sapiens
gaggatccacctcgaggttcactcccatggctcttggcaagaggcctcagttcctcaccacgtgggtctgctcctggcattttactcagagtgagtgcctaacttctctgagcctctgtttcttcatatatcatataaggaaaagagtagtacttcaaaggattatagtgaagattgaatttcaatgaaagtgcttagcatgtcatctgattcatgattaaattctcccttactcttcttaccatttttatcatcattgtgatcgtcacctaycccataattcctataatgtttaaatgggcctatgtatctccaatttctgtttttttttttcctctttgccaccaacaatcttcccattcctctgaatttcaaattctttcttgactgcctacaattagaacccatcaaaatgtcaatacccaaagacagatggagccctcctggggtctcagttggctgccaggacatggaaggatgtggctaatggtagaatttgcagagaacttgcaccaaatattggccctgtcattaaaacaaagagaaaaaaaaatatttctgcgaa

SEQ ID NO: 45716 - DNA, 628 bp, Homo sapiens
caaattaatgctttgaacttgagaacttagatgtgagaggaagaagggtaccagaggctaatattcagaaaaaaaattccagaattaatttctcttgcaatgattgtccactttacttaacccttggcttagaaggccattcaagtgaaaactttaaataagcaaaagacaaagtgtttcctcaaaagtctcagtaatctagagtttgaatggtcctcagtgttccagaatcccacgttctctttttccttatgtcccctggaagagttttgattcactcctacaaagcaatatccccttttcttcaaagaatgtctgtatttcaagccttctctttgaatgtcatrtctcagatgcatctacactagaactagtttagccaagttggccagtgcagcggttaccaggtagaagaatctcaatagcttgcctcccagcttgtacacaacagggaggtggccatgggggccttggtgtttcttggtgagaactggggctgtttaagcatcatctggggtggaactagaattcccaggaagactgattagaactaaatgttcttttgtttgatcttgatcttactttaaaatctctctgtaacaagggagattgtgctggctaagacaca

SEQ ID NO: 45717 - DNA, 628 bp, Homo sapiens
caaattaatgctttgaacttgagaacttagatgtgagaggaagaagggtaccagaggctaatattcagaaaaaaaattccagaattaatttctcttgcaatgattgtccactttacttaacccttggcttagaaggccattcaagtgaaaactttaaataagcaaaagacaaagtgtttcctcaaaagtctcagtaatctagagtttgaatggtcctcagtgttccagaatcccacgttctctttttccttatgtcccctggaagagttttgattcactcctacaaagcaatatccccttttcttcaaagaatgtctgtatttcaagccttctctttgaatgtcatatctcagatgcatctacactagaactagtttagccaagttggccagtgcagcggttaccaggyagaagaatctcaatagcttgcctcccagcttgtacacaacagggaggtggccatgggggccttggtgtttcttggtgagaactggggctgtttaagcatcatctggggtggaactagaattcccaggaagactgattagaactaaatgttcttttgtttgatcttgatcttactttaaaatctctctgtaacaagggagattgtgctggctaagacaca

SEQ ID NO: 45718 - DNA, 586 bp, Homo sapiens
aggaacagagaatattttcatttaaaaagagaataatctggtagcagatccagaactgtttaaggcaaggaactcttgcaatctccaaactctcctttctctaatattccagcctttactatattatttactgttttctacttcatattaaatacatcactttaccttctctactgctagaccatgaggttccaacaggcagggtcactgttttacccattttacattctcacattgcccatggtaagaatttaataaacatttatttattgaaatgaattataatccattctcatttcattataacacagctatcatttgcttggcatttattacacatcaggtatttgttaagtgatgaattcatctagcaggatggtaaarctgaaattctgacaaggttcttggttaaatgaatgtagagttaaaaagttagttaccatataactttttttggaattaaggggttaagttaccatataaagcttggctgacacatgttctgtgagtcaatgtgtccttgcccactttgaaagtaaaacagtcaagaggtacctatcatgtcaccttcccaaggaaaggagaa

SEQ ID NO: 45719 - DNA, 584 bp, Homo sapiens
ctctggagagaagaattgttgagttaaggtaatgctaggcaggcagcagcaagttatccaaaagttttcaactagttggcctgatagggccatatgggatgatatgatattgaaagaattttgtatcgattggtaaatcattgcttcagtaaccctgggacttctcctcagtgcccctgctacctaaccttctggaatattccagttatccttatgatctagcaactaaaggtaataatggctagcacactggaaaccctctgtgacaaccttctagtaccagggtggttggtacccagaccttaccacttattaaatgttatgaatataagtcctgctgtgcctgcaacagtgcccaaaaagtcagaaacactcaatgggcatttgttgcatgaactgaatagaatcacrtcctaattcactagagacccaaaatgaacagaatcttcacacaacttcagcagcctcaggaagccaaggtcaaaaggcagacagcctgggattgctatgaaatacaggaaattatttaatgggaaatgagggatgataaggccaaagctgaagtctcacagaagctgagttgc

SEQ ID NO: 45720 - DNA, 571 bp, Homo sapiens
ggatgggtgggtaggggcataaagagaggtagattaatgtggacaaacatgcaatgaaacagaataaatagtttcacgagtttagaataaatatacttagcaaaaatattttgtacatttcaaagtaactagaagagagaacttgatatcaaaacataggaataaatactcagtgtcgtacatctgaaatactctgacttgaycattacgtattctatgcatgtgacacttacatgtgtcccataactattatgtatcaatagaagaaaaaaggaagaattattaactacagacattagaagggatataccactatggatcctaatgatattacaaagataatcagaaatgactgaaaaaaactttttttattaaaagacaaaatcttagaaaaaaatagtttgctaaaattgacacatgaaacagactatctgaatagacctatgtatagaaaagagattacatcagaaaattaaaaacaaatatacaacaaaaacccctatcaaaattaaactccagtgttcaaataactgcttcattggatagtatatctccttgatctaattatgat

SEQ ID NO: 45721 - DNA, 571 bp, Homo sapiens
ggatgggtgggtaggggcataaagagaggtagattaatgtggacaaacatgcaatgaaacagaataaatagtttcacgagtttagaataaatatacttagcaaaaatattttgtacatttcaaagtaactagaagagagaacttgatatcaaaacataggaataaatactcagtgtcgtacatctgaaatactctgacttgaccattacgtattctatgcatgtgacacttacatgtgtcccataactattatgtatcaatagaagaaaaaaggaagaattattaacyacagacattagaagggatataccactatggatcctaatgatattacaaagataatcagaaatgactgaaaaaaactttttttattaaaagacaaaatcttagaaaaaaatagtttgctaaaattgacacatgaaacagactatctgaatagacctatgtatagaaaagagattacatcagaaaattaaaaacaaatatacaacaaaaacccctatcaaaattaaactccagtgttcaaataactgcttcattggatagtatatctccttgatctaattatgat

SEQ ID NO: 45722 - DNA, 571 bp, Homo sapiens
ggatgggtgggtaggggcataaagagaggtagattaatgtggacaaacatgcaatgaaacagaataaatagtttcacgagtttagaataaatatacttagcaaaaatattttgtacatttcaaagtaactagaagagagaacttgatatcaaaacataggaataaatactcagtgtcgtacatctgaaatactctgacttgaccattacgtattctatgcatgtgacacttacatgtgtcccataactattatgtatcaatagaagaaaaaaggaagaattattaactrcagacattagaagggatataccactatggatcctaatgatattacaaagataatcagaaatgactgaaaaaaactttttttattaaaagacaaaatcttagaaaaaaatagtttgctaaaattgacacatgaaacagactatctgaatagacctatgtatagaaaagagattacatcagaaaattaaaaacaaatatacaacaaaaacccctatcaaaattaaactccagtgttcaaataactgcttcattggatagtatatctccttgatctaattatgat

SEQ ID NO: 45723 - DNA, 541 bp, Homo sapiens
gtattagagtagtaggaaatgtattttaaaagtcattgtatatgtctgatttgttcaacctaaagttctattcaaataaaatggtaatgtgggacagatcattaattataaccccaatttatttcatggatatggactgtacattcaaatttcatttatatctttagtcaatgcgtgcacgtgatcaggaatgtaaatgacttaataccattcatctatgtgactggggaaaattttaaactgaaagacctattatagataaattaacatttttatttctactatgaaaaattcctgttagttttaataagaggaatatayacccttcatagcccaagtatgaagttataagtacataacaacatatcaacagagtgactgcaaaggaagtgtcataagtagagatttacatcattacccaccccataaataaagaaataaaaaacatgcaaaaatagttgagataagagtccaatatgcatggcaaataaaaaattgcagagaaatgcatgatttatataaaatgggaagggaactttga

SEQ ID NO: 45724 - DNA, 644 bp, Homo sapiens
taatgccagtgtgtctagagcagagtgagaaaggggttagggcagtggttgaatataaggttagaaaataatagggcccaccctattgggtcatgtrggccagggtaagcattttggatgtaataccgacggagcaacgtttctttggaaagttttgagcagaagactatgttatctaattgcattcaaaaagggttatttctttgtgaagactgaactcagtttggcgtagggtgtgtattgatagcctggaaggttagtaagttactgaggaaaaatatttaatcaatttaatatgttaaagatacctaaactccataatgaataaaacttatttcaaagctgataacccaataaatatggaattataatgtactacagttttattaaataatactgacaaaactttgtatataattactaaataaggcaactgtaaaatttgttttttgctcttgaacctgattttaggaaaattaactgaacttgaaagaacaataattagaagcatctaaatttggagatgcttgagttgttatgtagtaggattgtatatcttcatcgagatttatttcttcaaataagtcttggatgccagtctgatacagaaaagcttttaatgatcatggttgcgtgattcttta

SEQ ID NO: 45725 - DNA, 556 bp, Homo sapiens
caatagtctggggatgttgttgttacccaaggtcaacaatcaggaaagacagtgggacttggtgagggaagaggcagagaagacattttatctattctttacattctatctaagaccttcagaatgtaagtgtttgctttaataataactcagagtcatacaagaaaagacttttaggaaatgaaagtcctaaatgaacccagttgacagtacaaaatgtaagcacaggtctctattacagaggtacacactttgagctggggtggggctatagacttgagaagagccatacctagtttccgggttaaagtttgtttttgctatgtcttcagtaaatattttagtaaaatatgaatctcaactytcatattcttgtagtattctttcagggtcacccaatcaatgagaatattcatacccaccccagacactgtgtatccaattaatttacctgtattttttcatagaactataaaagtagatttaattattgatttgtttgctttttatttctttagtttgcctctccaaatggaatgtaagttcctcagggcaa

SEQ ID NO: 45726 - DNA, 835 bp, Homo sapiens
  misc_feature (1)...(835): n = A,T,C or G
aagataaaccactatctatgtctctagatacatttcattgtgaatttgtcttcaatgtactttattacaaggttccctaagccaatattatgaccaggtgctacggtctgcacgtttgtgtccccctaaaattaatatgtgaaagttcttacctccaaggtgatggtatgaggaggtgaggccttttgtggttgattaagtcaggaaggcagagccttcataaatgggattagtggccttatataccaaagagagctgttccactcctcctaccatgcgaggggacagcaagaagacactgtctatgaacaacattgtgggccctcactagacactgaatcttcaggtaccctaatcttggacttcccagcctccagaactgtgagaggtaaatttctgttgtttgtaagtcacccattgattataccattttatgctattttattatagcagcccaatgactaagatacaggtatggtcatnnnnnnnnnnnnnnnnnnnnnnnnnnnnnnnnnnnnnnnnnnnnnnnnnnnnnnnnnnnnnnnnnnnnnnnnnnnnnnnnnnnnnnnnnnnnnnnnnnnntacacatttgcagggctggttttctctgggccatttaagctgtaaatcctgttccgtagattggaatggccatgtttcattgactcaatttcattgctcggttaaccaagaacacattttctgtcattgatttcataatattaataaaaccagatatgcaagtagatattaccttatgactcacttttaaactttgttttstagctatcatatttcttagatatagatactacagaaacctatactgcattgt

SEQ ID NO: 45727 - DNA, 1133 bp, Homo sapiens
ttgtgtgagcatcatagagtgcacttacacaaacctacatggtagagcctactacacacctaggctatatggtacagcctactgctcctaggctacaaacctgcacagcatgttactgcactgaatactgtaggcagtagtaacatgatggtcagtatttgtgcatctaaacatagaaaaggtacagtaaaaatatggtattacaatctgataagaccactgtcgtatatgtggtccctcactgactgaaccatattatatgctcaagactgtacttcagtgtggagactatcccatctatataaactattaaattccacatggtaaaacaaccaatgtttatatttcatctaaaatgtatgatcaattagtaattctataactgtattcatttgccaattctactaactgaatatacttrtatcttctattctaaatattaattaattaatttaggttactctccccttaagtatcactgttttatccagtaatacaagtaggtcttaagattagctttcagggatgggtgcaatacttcacacctataatactagcatttggggaggctgaggcggaaggactgcttgagcccaagagtttgagacgagcttgggtaacacaggaagatcccatctctacaaaaattttaaaattagccaggcatggtggcatttgcctgcagtcccagctactcaggaggctgaggtgggaggatcacctgagcccgtgagttagaggttgcagtaagctatagtcatgccactgcactctagcctgggtgacagagggagaccctgccttaaaaaaaaaaaaaaaaaaaaaaaaaaaagactagctttcactggataatcaattacaaaattaaaatgacagaaatatttttgggaaaggatataaatggactctactcaaccaggttattcaacaaggacatggaaggtaaatttatacatcagttgctgactcctgtggcagtgctcttctcagagggtgagagagctaaatgctgcagaggggaccccaaagggaaggtaccatattttcaacaactgcaccaacagggctggaaagcccttccagcatgcagattacaccattttcgtgctgtataaaaatcactttaatttcca

SEQ ID NO: 45728 - DNA, 1133 bp, Homo sapiens
ttgtgtgagcatcatagagtgcacttacacaaacctacatggtagagcctactacacacctaggctatatggtacagcctactgctcctaggctacaaacctgcacagcatgttactgcactgaatactgtaggcagtagtaacatgatggtcagtatttgtgcatctaaacatagaaaaggtacagtaaaaatatggtattacaatctgataagaccactgtcgtatatgtggtccctcactgactgaaccatattatatgctcaagactgtacttcagtgtggagactatcccatctatataaactattaaattccacatggtaaaacaaccaatgtttatatttcatctaaaatgtatgatcaattagtaattctataactgtattcatttgccaattctactaactgaatatacttgtatcttctattctaaatattaattaattaatttaggttactctccccttaagtatcactgttttatccagtaatacaagtaggtcttaagattagctttcagggatgggtgcaatasttcacacctataatactagcatttggggaggctgaggcggaaggactgcttgagcccaagagtttgagacgagcttgggtaacacaggaagatcccatctctacaaaaattttaaaattagccaggcatggtggcatttgcctgcagtcccagctactcaggaggctgaggtgggaggatcacctgagcccgtgagttagaggttgcagtaagctatagtcatgccactgcactctagcctgggtgacagagggagaccctgccttaaaaaaaaaaaaaaaaaaaaaaaaaaaagactagctttcactggataatcaattacaaaattaaaatgacagaaatatttttgggaaaggatataaatggactctactcaaccaggttattcaacaaggacatggaaggtaaatttatacatcagttgctgactcctgtggcagtgctcttctcagagggtgagagagctaaatgctgcagaggggaccccaaagggaaggtaccatattttcaacaactgcaccaacagggctggaaagcccttccagcatgcagattacaccattttcgtgctgtataaaaatcactttaatttcca

SEQ ID NO: 45729 - DNA, 1133 bp, Homo sapiens
ttgtgtgagcatcatagagtgcacttacacaaacctacatggtagagcctactacacacctaggctatatggtacagcctactgctcctaggctacaaacctgcacagcatgttactgcactgaatactgtaggcagtagtaacatgatggtcagtatttgtgcatctaaacatagaaaaggtacagtaaaaatatggtattacaatctgataagaccactgtcgtatatgtggtccctcactgactgaaccatattatatgctcaagactgtacttcagtgtggagactatcccatctatataaactattaaattccacatggtaaaacaaccaatgtttatatttcatctaaaatgtatgatcaattagtaattctataactgtattcatttgccaattctactaactgaatatacttgtatcttctattctaaatattaattaattaatttaggttactctccccttaagtatcactgttttatccagtaatacaagtaggtcttaagattagctttcagggatgggtgcaatacttcacacctataatactagcatttggggaggctgaggcggaaggactgcttgagcccaagagtttgagacgagcttgggtaacacaggaagatcccatctctacaaaaattttaaaattagccaggcatggtggcatttgcctgcagtcccagctactcaggaggctgaggtgggaggatcacctgagcccgtgagttagaggttgcagtaagctatrgtcatgccactgcactctagcctgggtgacagagggagaccctgccttaaaaaaaaaaaaaaaaaaaaaaaaaaaagactagctttcactggataatcaattacaaaattaaaatgacagaaatatttttgggaaaggatataaatggactctactcaaccaggttattcaacaaggacatggaaggtaaatttatacatcagttgctgactcctgtggcagtgctcttctcagagggtgagagagctaaatgctgcagaggggaccccaaagggaaggtaccatattttcaacaactgcaccaacagggctggaaagcccttccagcatgcagattacaccattttcgtgctgtataaaaatcactttaatttcca

SEQ ID NO: 45730 - DNA, 497 bp, Homo sapiens
tcccacaaggatgaagtaggggacatgctagccctgaagttaggaagatatcctaatcactctttttttattgtttcctactaggctgtaagcaattcaagggcagggatgcatgtctttgtcatttgtatatcctttgtcatctgtatatcctttggtaccaaacacataggacatattctgaatgcttttgagtaaatgtaagaaacaaacacacccatccaaacccaaagaatagactcagagacctggagaacagcagaagcaagactttttaatgatgatcttgcaagatcgagtgtctggtgggcagacayacccagcacagttacaacaagcaatttatgccctagtatgcaggtccctcccgcagttcctcataggctgagtactatgtgggtcacaatcttcccagatgttgcctattgattgttgagtaagtggctttaggtgttttctttagggttttcttgctgcattttgttgcagcccacaat

SEQ ID NO: 45731 - DNA, 557 bp, Homo sapiens
caaaaggaacaacggtttttttcttcccctccctacaaaaccaagaatataatcacacctgaacagaccccttcacatgataatgtgctagttaatctgttccctgatccattccttctccctcagcagaattcctcttcccctcactcccacaacccgctttgcctgaatgacacctaagcttctgaactcgtctgggaagtgggtagtcactctgtggttccccgtggacacattaatacaatttctatgccttttcttcaattaatctgttttttgtgggttgatttttcagcagaatttcagagggcgaagggaaagtttcccttggtccctgcaaatactattattaccctcctttacagataggatgaggcacaaagaagttaagtggcagaatagcaattaaaccctaagctgtttgacgagtgcttctgaggratcctcagagctatcaagtcctgtcagttctttcctttgataattttttacaagtgttttttccccccagttctggggacatcatctcagatagagtactcacagtaataattagc

SEQ ID NO: 45732 - DNA, 387 bp, Homo sapiens
acagaaatacaccaggctgtgtgtcagaggcaagctggggagagagaagaccgacatgaatggcaccatggagcacatttgcagaacatagtccctgggagtcttgctgagcctcaggagctttgctggcacagaggatctgcctacccaattagcctcctgggtatctgcaccatctagaccagcaaatgtcactggcaargaggttgcagtgcttggttattttctggtcataaactggtgaaggctttgggttccaaatttgctgacagctgtttaactgggaattgggcctagactataggtagctatgtctcagacaaggccctgttcctccactgcctttacaacccagctgaggttggaggctggcttgtttcagcctca

SEQ ID NO: 45733 - DNA, 580 bp, Homo sapiens
ttggccttgtgatggttttgactatagctgagtataaaattaaaaaagaaaacacaccctgatttgattaatgggattaccgagtttgttgttcaacaaaatggaaaaaaaaaaattagcctctgaaacacaaggatagaaggttaagcttccacttacccaagataagtaatctgggctaaagaggtactgctatctgggtaagagactaaattttgcctaaggataaaagtttgtcactcattaagtttttccctatgtaatttacatcttctaaaacaaaaaaggtagcttgttatggcaacattttaatatagggcacgtggttaatcttttggtttacactttgcttttccttctgattgtactggaattccccgaagtcataccgggtatccctcagaagcacattcccagagttctccatgwcagcttgtgtgtcacactcacagctccaaaagggctaatgccagtcttaatgggacagggtcagttcttccaggaaatccttaaagtgtgatttgaggagcagctgaaggaactatgatctaaactaccttccccagtgatctcctaagac

SEQ ID NO: 45734 - DNA, 567 bp, Homo sapiens
agagacacaaagtgagcacatgctgttgggaaaatggtgccaacagacttgcttaatgcagggttgccacaaaccttcaatttgtaaaaaactatctgtgacgtgcaataaagcaaaggacaaaaaacaaggtatgtttgtatcaatttcacttcctaatactatttatgtcattgattagataactctttaattcaagatctcccatatgattacagtatctcatccccttatctttgtttrtttttaccatcagtacaatttttcaagacaacataaacagcactgtagttcacattaaccatagtcctgctaagactattgaaaaaatccagtctaatgctcagtcttgccatcatcaatgacaaagtccttctgtacaatttcctacaaattcatcttgtacaaataaccacactcttaatatgcaggtcctaatctatgtgtggagtaactggtcacttttcaactatgttttctctctaccttttagggtgtttttttttttttttggtgacagaatgggtatttttttgtttgtttttacaaattatttaaagtaccttc

SEQ ID NO: 45735 - DNA, 616 bp, Homo sapiens
ggattgcacggatcttacaagtatctacttctcatgcctccaagtgtacacattgcaacacatttttaaaggctggcccttgtttcaagatatatagttgccaagtggaattcattttccaaaattaattttgttcaaggccggaggcaagagctatctagaaacaaatggatgaaatttacttttcaaatgaaatgcactgaaaaaagatttgctttttctccagcctttgggacttacgctcagggaagaattaacaaaagtaacacaggcattattattcaaagcccatctctttcctgcggaattcacctttgatgggagatcyggcaagttcctaactgcaggggggctaacagtggcagtgtgtggattcagaagagcattcaaagacttgggatggggcctttgtctccccattccccccaacacgcccctgtgccttgcttttgctgtctgttcctcagcctaatgccattcaaattactaaaacattgtcctttcccacctctgtgaatgtgagctattctcctacacggctcaggtctaagcttgcttcttaaacaatggatctaagtaccatgtgggcagggactgtatgctctttagtcaacca

SEQ ID NO: 45736 - DNA, 1428 bp, Homo sapiens
atttaataattcataaaattattgtttgaagagttattttgtgcattagaaatctttaagccttatatacatcttctaagaattttaatgagataattgctaagagtaaaattgtatccacttgtttaaaccttccacatgatatctgtttttgagtttttagtagattgcattataaattaattctttcaaaattctgtggcaaaaaaaaaacaaaaaaaaacctgtcacattattttcagttctgctgttaattatttgtgcactgaagtggaaacacacttcaacctgtagggctgtgtagcctcttagcagggcttttgccttttttccctgaaagatcatgggaagcctgggcgagttctgagcagtagtgatctgactcacatggcaccaggctcccctcagctcctgcattgaaaatagaaaattgaaaagatgaacccagagacttttgtaataattctggagagagactgaatcccattaaatggtaaaactatatagaatgagtgcatttatttattcaatgaaaaatcatctaaaatatttttacatttcatgtctttcatcttaaaactggggtttatgggtacattgtcctagatacccattttttttaattatgaggaaaaaaatgctatctttcataatttagatttcaacagttacaacaatagaatatcaaaaaaaaaaaaaaaaacaaacaaaacccaaacccaaaaccaaaaatacctctttttaaagttaaaccagtttaagaatgccagtggtggtaggtttgttttcagcaatcctcataattatcgttgtttagtgctgtcaaaacaaaacaaaacaaaacaaaaaaaaacagaaaaaaaccgtttagaggaaaagaacatttagacaaaagtaaaaccaggcacagacagatctagataccttttttaagggcatttaaagaggattttttaaaaaagtcaatcagagacaacatatagacacacatataaactggcaaagccagacaaagataaatatgagggagtccatgaaagcggggagagttaaagtctcggaaatgccctggaccctgtttggctctggarcctgggagtgaggctcagagctgacactcctaatggccttttctcacctctgctcctcagggctggttccatttaaatgaaggatgcagtcctttttgtttttgtttgattatggaacagagaaaaaaactattaaaaaaaaactcttaccttttactacttccgtaactataaatagcagtcatgatttataggaagtgaaaaatatatattttttaaatttagaccaagattcacccaatgataacataaaccactctcacctgcccacccgtgcccttgcaggaacatggactatgtatcaggaaaaccacagcaaatatctttgtaattttga

SEQ ID NO: 45737 - DNA, 1428 bp, Homo sapiens
atttaataattcataaaattattgtttgaagagttattttgtgcattagaaatctttaagccttatatacatcttctaagaattttaatgagataattgctaagagtaaaattgtatccacttgtttaaaccttccacatgatatctgtttttgagtttttagtagattgcattataaattaattctttcaaaattctgtggcaaaaaaaaaacaaaaaaaaacctgtcacattattttcagttctgctgttaattatttgtgcactgaagtggaaacacacttcaacctgtagggctgtgtagcctcttagcagggcttttgccttttttccctgaaagatcatgggaagcctgggcgagttctgagcagtagtgatctgactcacatggcaccaggctcccctcagctcctgcattgaaaatagaaaattgaaaagatgaacccagagacttttgtaataattctggagagagactgaatcccattaaatggtaaaactatatagaatgagtgcatttatttattcaatgaaaaatcatctaaaatatttttacatttcatgtctttcatcttaaaactggggtttatgggtacattgtcctagatacccattttttttaattatgaggaaaaaaatgctatctttcataatttagatttcaacagttacaacaatagaatatcaaaaaaaaaaaaaaaaacaaacaaaacccaaacccaaaaccaaaaatacctctttttaaagttaaaccagtttaagaatgccagtggtggtaggtttgttttcagcaatcctcataattatcgttgtttagtgctgtcaaaacaaaacaaaacaaaacaaaaaaaaacagaaaaaaaccgtttagaggaaaagaacatttagacaaaagtaaaaccaggcacagacagatctagataccttttttaagggcatttaaagaggattttttaaaaaagtcaatcagagacaacatatagacacacatataaactggcaaagccagacaaagataaatatgagggagtccatgaaagcggggagagttaaagtctcggaaatgccctggaccctgtttggctctggaacctgggagtgaggctcagagctgacactcctaatggccttttctcacctctgctcctcagggctggttccatttaaatgaaggatgcagtcctttttgtttttgtttgattatggaacagagaaaaaaactattaaaaaaaaactcttaccttttactacttccstaactataaatagcagtcatgatttataggaagtgaaaaatatatattttttaaatttagaccaagattcacccaatgataacataaaccactctcacctgcccacccgtgcccttgcaggaacatggactatgtatcaggaaaaccacagcaaatatctttgtaattttga

SEQ ID NO: 45738 - DNA, 1428 bp, Homo sapiens
atttaataattcataaaattattgtttgaagagttattttgtgcattagaaatctttaagccttatatacatcttctaagaattttaatgagataattgctaagagtaaaattgtatccacttgtttaaaccttccacatgatatctgtttttgagtttttagtagattgcattataaattaattctttcaaaattctgtggcaaaaaaaaaacaaaaaaaaacctgtcacattattttcagttctgctgttaattatttgtgcactgaagtggaaacacacttcaacctgtagggctgtgtagcctcttagcagggcttttgccttttttccctgaaagatcatgggaagcctgggcgagttctgagcagtagtgatctgactcacatggcaccaggctcccctcagctcctgcattgaaaatagaaaattgaaaagatgaacccagagacttttgtaataattctggagagagactgaatcccattaaatggtaaaactatatagaatgagtgcatttatttattcaatgaaaaatcatctaaaatatttttacatttcatgtctttcatcttaaaactggggtttatgggtacattgtcctagatacccattttttttaattatgaggaaaaaaatgctatctttcataatttagatttcaacagttacaacaatagaatatcaaaaaaaaaaaaaaaaacaaacaaaacccaaacccaaaaccaaaaatacctctttttaaagttaaaccagtttaagaatgccagtggtggtaggtttgttttcagcaatcctcataattatcgttgtttagtgctgtcaaaacaaaacaaaacaaaacaaaaaaaaacagaaaaaaaccgtttagaggaaaagaacatttagacaaaagtaaaaccaggcacagacagatctagataccttttttaagggcatttaaagaggattttttaaaaaagtcaatcagagacaacatatagacacacatataaactggcaaagccagacaaagataaatatgagggagtccatgaaagcggggagagttaaagtctcggaaatgccctggaccctgtttggctctggaacctgggagtgaggctcagagctgacactcctaatggccttttctcacctctgctcctcagggctggttccatttaaatgaaggatgcagtcctttttgtttttgtttgattatggaacagagaaaaaaactattaaaaaaaaactcttaccttttactacttccgtaactataaatagcagtcatgrtttataggaagtgaaaaatatatattttttaaatttagaccaagattcacccaatgataacataaaccactctcacctgcccacccgtgcccttgcaggaacatggactatgtatcaggaaaaccacagcaaatatctttgtaattttga

SEQ ID NO: 45739 - DNA, 610 bp, Homo sapiens
aatgagtatgggcccactgtaaaagtaaaatagctattagcttggttattgtatagttaggaattatgactgtcacattaatttatttgaagactttgaaattcaggggttaattattacaaaaaacatttattgtctcatgaaacttatggaaaataaaagtgtaaccaagcattaagacattatagaaattaggatgcaaatataatcaagacatatttccagccaattttctctgctctacttttcatgttaacattttaccttttktcatgctataaagcgtttataacatgtcattccataaggggcaaacaggcctttcaaaagtcttgggtatatattatttttgctgttgttaattttaataatatattctatttaacccattatatttttcaataaatagtcaatgtaaatatcacttataatatattttaagtttgttttattaagtaactttttatttttaaagtagttttagatctacaaagaaattgcaaggactatacacatattccttttaccaagctaatcctaatattaatatcttacattacattttatttgttataatttatgaattaatattgatacattattattaagt

SEQ ID NO: 45740 - DNA, 608 bp, Homo sapiens
tctttggtcaatagattaaaaaaatgaaatataaactaaaatcttgttgagattcttgaataccagtgtcttataaagcaaataagcttctgtcctattatacaaagaagataacataatcatatggtttatggtmaaaaatgtttcattactaggggactcaatataactcttgaatttggagaattatatgctcgctctttatgtcttattaagaagtacactttatgataaagtacacttcactcttcaacgctgaaaaataactttgtctttggagtcagacagtcttaagcataaaaactgtgtctaccagattctctttctacgctagcatgatttaacccatctgagctttagtttcctcttaagtaaaatgaagacaatatcaatcattgcatttttgcaacaactaagtaatataaaatgtaccatttaacagaatgcttgaaatatgtgttttccctgaaataattctttcatactatcgggtataaatcttgctaatctacttgttgatataactccaaaataactaaacgagtagataaccatcaacaacagaaacaaaatgccaacagatattttgaaaatatatcgtagacata

SEQ ID NO: 45741 - DNA, 584 bp, Homo sapiens
ctcatcaatttatttaaatgacataaaattatatacagtaatatgcacaacaatgtattattgagtatgtatgacaataattgccaaaaaaggaggtargagacaatagagctctacaggagtaacatttctacatcttttaatatttagtataaatctgaggtagattccagtaagctaagaagtatatgataagcacaatgggaagcattcaaaaaacctcaaatgtaacacaaaaaattttaatacattagaaatattaatacaaataaagcagtaaaagaggaaaagagataaacagataggaagcatatagaaaattaaatgtgaaacggcagacctaaatcaatttatatcaattacaatgttactggcaggtctttgttcttagagctcttaagatggtggcaggccgttcccaggacggtgagattacttcctctacgtgtttttctcttgcctgatcttgaactcagcccccatcagtcataccagtatgggtgaagtaagtccaacagacagtggctccaagccctgcagcacaattaggattaattattttttcctgtccaataagaagtatt

SEQ ID NO: 45742 - DNA, 584 bp, Homo sapiens
ctcatcaatttatttaaatgacataaaattatatacagtaatatgcacaacaatgtattattgagtatgtatgacaataattgccaaaaaaggaggtaagagacaatagagctctacaggagtaacatttctacatcttttaatatttagtataaatctgaggtagattccagtaagctaagaagtatatgataagcacaatgggaagcattcaaaaaacctcaaatgtaacacaaaaaattttaatacattagaaatattaatacaaataaagcagtaaaagaggaaaagagataaacagataggaagcatatagaaaattaaatgtgaaacggcagacctaaatcaatttatatcaattacaatgttactggcaggtctttgttcttagagctcttaagatrgtggcaggccgttcccaggacggtgagattacttcctctacgtgtttttctcttgcctgatcttgaactcagcccccatcagtcataccagtatgggtgaagtaagtccaacagacagtggctccaagccctgcagcacaattaggattaattattttttcctgtccaataagaagtatt

SEQ ID NO: 45743 - DNA, 584 bp, Homo sapiens
ctcatcaatttatttaaatgacataaaattatatacagtaatatgcacaacaatgtattattgagtatgtatgacaataattgccaaaaaaggaggtaagagacaatagagctctacaggagtaacatttctacatcttttaatatttagtataaatctgaggtagattccagtaagctaagaagtatatgataagcacaatgggaagcattcaaaaaacctcaaatgtaacacaaaaaattttaatacattagaaatattaatacaaataaagcagtaaaagaggaaaagagataaacagataggaagcatatagaaaattaaatgtgaaacggcagacctaaatcaatttatatcaattacaatgttactggcaggtctttgttcttagagctcttaagatggtggcaggccgttcccaggacggtgagattacttcctctacgtgtttttctcttgcctgatcttgaactcagccccmatcagtcataccagtatgggtgaagtaagtccaacagacagtggctccaagccctgcagcacaattaggattaattattttttcctgtccaataagaagtatt

SEQ ID NO: 45744 - DNA, 464 bp, Homo sapiens
agagtagtattttattgaataagatttgctcacagaaaaataagcttaaatctacaatgaatgccagaccctacagcagaaagcaattttctcacttttccacacacaatggttcctactaagtgaaaaaaaagccataaaatttcattcacaaatgtactactctgtctcaaaacatctcacgtaatcatgcactgtactaaagccatcagatcagttcttcagtcaggttaaagaagtatccctctaataactgacttttataatgctatcaatatccactcccaatcagtctgccattgttaatggtgtacagcattactgaatacaacggaattgatgacgcccatatccacagacaaaccgtgacttatgatggttkgatttatgatttttcaacgttatgatgggtttattggaatattagattcgtttctgagttacactgggtttatgagtatgcg

SEQ ID NO: 45745 - DNA, 567 bp, Homo sapiens
agaatgtaaggttggttcaaaatagaaaatcttttcatgtgatttgccatgtgtattagttttccattactgatgtaataaatcctgaaaatttatcatattatagttctgaagctcagaagtcagatggaggcctcactgcactaaaatgagggtgccgacgaggctgaattattttctggaggctgcagtggacaatttgtttccttggtcattcggattgttggcaaaatccagtaccctgtggctgtagcaccraggtctctgttctcttactggccataaactgtgtgctgattccagctttgggaggccatggcattccttggctcatggtttcctttctccttcttcccagccaacaatggtgggttagtccaatactgcatctctctgacccactctttcccgccctcttccatttttaaggatcatgtaattagacggggctcacctctatcacccaggatgatatccccacctcaacatctttaaacttgatcccttctgcagagttccttttgccatgtgggctaacaaactcacagctgccagggatgagatcat

SEQ ID NO: 45746 - DNA, 613 bp, Homo sapiens
atattttgtgatgttatatgaaagctaccatcccacctgaaacccagccccccaaaaaagagacctacgttagggtaaatatgaagatactgcttcatgggagagaagaaattttcccttcctcctgactctgtggagatgaacwtagaacagcatgtctaacttggcaccaagtattcaacctggaaaagtctgagactacagaacagatctgaactgagaatcaccaagggtgatgcaaataaaaaggttaatagggataaatatttataatttcaatacaaaagaaacatctgcaattatttgaaaggtgcaaacactatgaagaaaagcaattatttagcttcagaaaaggcttgtacctagaaataatgatgttaagtatgattttatttcaaaaatatcaggaaatttttttccagccacaaaagctattagatctaagcagcagatgcaaagaacatttttccagaaacttcctttctgtgggtaagaggagaagtagtgaaaagaattctaaagtaatttaagagaaagcattagcccaccagggagcaaaaagccaggggaagcagagacctggagcttagtagcaccaacagagtcctctggg

SEQ ID NO: 45747 - DNA, 552 bp, Homo sapiens
tggggtcagttacccccatgctgctattctcatgattgtgggtgggttctcacgaggtctgatggttttacaaggggcttttcccccttagcttggcgtttctctctcctgccaccatgtgaaaaaggatgcttctgcttccccttacaccattattgtaagtttcctgaggcctccccagccatgcggaactgtgagttaattaaacctctttcctttataagttacccagccttgggtagttctttatagcagtgtgagaatggactaatccctaagtaaattaaattaaattaaaaattcctattataggaattatttattccataccatakatgattcaggactgatcccatcctttcttaccctctgaagtgaaaattattttccttgtgggttggagacagctctaagaatcactgataatagaggcacattctcatgaagtctctttagcacttgtttatgttgctgtttttcttcttgaaaaggatgccttcttcaaacacagaaattgccaaaaggtgttcttctgggcaaatcattttgaaa

SEQ ID NO: 45748 - DNA, 612 bp, Homo sapiens
tatattatacacctcactgaagaagatatcacatatataaatgaacagaaaactagtatgtgactgttgttagtgagctgcatatcttgataggcaacatattccatactatatttttgcagttctactaattaggcaaccaatgtttcaaaatgtaatgtgcataaatatatcttggtacttagaatagcaaataaaaaggagagaatctctcttgaccaaatttcaatttctaagttaatcttttataaatgggaagtaggacamacactaatccatattgaggacttctaattttctaggtactttacgtatattttgtcatttaatcttaacacccacaccatgagatagataaaccaatagttccacaagaaaactgaaactcagagaaatgaaacaccagttattcaactacttattggtaaattcagtcaatcccaagattttctggctctctaaattcagaccccttcaatttgccattttttagtggtttaattgcttatatctcttacatcattttttaatattcttatttcaaatagtatgatttctactttggtcattctcttcatcatgtctgccgattctcatgttggtttacttccc

SEQ ID NO: 45749 - DNA, 616 bp, Homo sapiens
cattttgatctcttaaccagtagaactgtaaggctgagcaccagstgaatctcagctttgcatatgtaaggctgaaaccaaagtttcacaaaacaatacctacttttgaaaccacctttgcaaaattataactgaggaaatgacaacagtgaaagaaatcagacctaaccgactccatctcgcttctaacctttaagctgtccttgttcattcctgggcatgggctgaacaaactttgggatggaattcagttcatggtttgactctgacacagaattgataatagcagtttccggaaaagaccccctgcttgcctggggaccagtctgcctttgcaggactaacaaattagctacaagatgagaagttacagtttaggggtcatgcagcctctggctccaagagtctaaacccccccagattgctcctaggaataagatcactgttgtaaaacctaagatcagcgcttgagatattttgcagagcctgcattctgatgcaccagctaacaccacccagaccagtcatctggctcagccagttctgctatcccacccaggaacagaagacagcaagaaaaactcacttcaaacccctgattccatctccagtctgg

SEQ ID NO: 45750 - DNA, 539 bp, Homo sapiens
cagagtggctgcttctgcagggaagaaaaggtagttctcaaacagtaccattaagcataagagaaattcaggtaggaagcattcaaattctacctttggagacagttgaatgagaagtggggtgatagtgcrgaaaatattttttaacctgaatttggatgctgggctgttcccatcagacagtagcagatagtaaatgtgagcagcaatgactggccctgataaaaggcatatgtattggaaagaaaaaaaatataactatccctatgcacagattacatgatgatctaagtggaaatgtccatgtaatctagaaaaaagttcctaaaactaataaatgaccttaagtaggttacaaggtacaagatcaacacacaaatatcaatcaaatttctatgtactagcaatgaacaattagaaactgaaattttttaaaaaatatttataatagctataaaaattgaaatatacaggtataaacctaataaatctacaggttctctacacataatactataaaatgctgaggaaagaaataa

SEQ ID NO: 45751 - DNA, 620 bp, Homo sapiens
tgacagagactctgtctcaaaaaaaaaaaaaaaaaaagatgaagaggtgatcaggcattgagataaatatccaaattggtattagaacaaaaattgggccttaggggctgggmccagtgttttgatacccacccaggagcaggaactaagatctcaggcctgcttaaggcagaaccctggaactactctcactccataaagggcatagcctgacttgttgttctgtccatgagacaggtgttagaaaaacagccctgacttttatctccagatgaaatagatgaccaaagaaatctttctgacacagaattcattaaaattctgaataaaatataaaaactaaggaaatctccagaggtttgaaaggagggaaaatatagttcagaatgaaaattattatttttttctaagactatctaccaatttctggggacctacaacttaagatttaacaaaccatgcacccgaaagaatggtagacaaaacttaggactttctcagaggggacgttgaattaagaacccataagttaaaacaagatcgtcatagtgatttaggagaaataaaatagaaccataaatctgcttttcagaaagcaatgtgggaatgtttgctttttt

SEQ ID NO: 45752 - DNA, 620 bp, Homo sapiens
tgacagagactctgtctcaaaaaaaaaaaaaaaaaaagatgaagaggtgatcaggcattgagataaatatccaaattggtattagaacaaaaattgggccttaggggctgggaccagtgttttgatacccacccaggagcaggaactaagatctcaggcctgcttaaggcagaaccctggaactactctcactccataaagggcatagcctgacttgttgttctgtccatgagacaggtgttagaaaaacagccctgacttttatctccagatgaaatagatgaccaaagaaatctttctgacacagaattcattaaaattctgaataaaatataaaaactaaggaaatctccagaggtttgaaaggagggaaaatatagttcagaatgaaaattattatttttttctaagactatctaccaattwctggggacctacaacttaagatttaacaaaccatgcacccgaaagaatggtagacaaaacttaggactttctcagaggggacgttgaattaagaacccataagttaaaacaagatcgtcatagtgatttaggagaaataaaatagaaccataaatctgcttttcagaaagcaatgtgggaatgtttgctttttt

SEQ ID NO: 45753 - DNA, 620 bp, Homo sapiens
tgacagagactctgtctcaaaaaaaaaaaaaaaaaaagatgaagaggtgatcaggcattgagataaatatccaaattggtattagaacaaaaattgggccttaggggctgggaccagtgttttgatacccacccaggagcaggaactaagatctcaggcctgcttaaggcagaaccctggaactactctcactccataaagggcatagcctgacttgttgttctgtccatgagacaggtgttagaaaaacagccctgacttttatctccagatgaaatagatgaccaaagaaatctttctgacacagaattcattaaaattctgaataaaatataaaaactaaggaaatctccagaggtttgaaaggagggaaaatatagttcagaatgaaaattattatttttttctaagactatctaccaatttctggggacctacaacttaagatttaacaaaccatgcacccgaaagaatrgtagacaaaacttaggactttctcagaggggacgttgaattaagaacccataagttaaaacaagatcgtcatagtgatttaggagaaataaaatagaaccataaatctgcttttcagaaagcaatgtgggaatgtttgctttttt

SEQ ID NO: 45754 - DNA, 595 bp, Homo sapiens
ggcccttttttttttttttttttaaatacagggtctctgttgcccaggctcaagtgtagtggcacaattatagctcgctgcagtctggaatgcctgagctcaagccactctcccacctcagtctcccaagtagttggaactacaggcagatgccactatgcctggctaatttttaaaattctttttagaaacggggtctcactatgttgccaaggttggtgtcaaactcctggttttaagtgatcctyccatgtagctgggatttcaggcatgagccaccgtgctctgctctctcttgggttactcttattcatcactaatatcatccattctttagagtaataaatcttatttttctagtttctaagtttttagaggaacaccttactttcctcaatctatcaacattagtaataagccatgttaatgcttgttcaatcttcaaggctctaaaagccatattttcctatttctaggtctataaattagtgtgaaatcaaagtttgccttacggattcacgttttaccttatagatttgccgtgtaacagcaggattaccattcaggtggctagagtcactgttgtaagcaaact

SEQ ID NO: 45755 - DNA, 624 bp, Homo sapiens
tgcatacacatacttctatctgatctttactgaaagtcccccaggcacattctggaaaccccagtcaaatcagttaaacacatgcacttgctgtctctcctgatcaaatgaaggtctacaaagtctcaagaagaaactacagcaaagttaattaaggaagaagatttctgtaagcaaygtcgtcttaactgtcattttctttttttttttttttaatctttgtctaacatccccatgtacaccagagattaactttcattttctaatgactaagattgtgaaagagaaaattctgggctgggtgggtggttgccaaccatttgttactttatgggtacctggatgagggttgtggtgaatgtaaccagaggcaaatccgaggagaccctgtgaatgcccagagttgcgtgagtgactggagagtgataagggatcagagcagagatttctgaagggggaaagctgacgttaaagaagacttaccgctcccttggaatacctgtcccactggtttctaattcagattccacacagtagctaaggattttttttaaaaaaagtaaatcaaagcacttcccctgcttgaaaatctttcagttaatgtatacacctggagctgatgag

SEQ ID NO: 45756 - DNA, 599 bp, Homo sapiens
gcctggccaacatggcaaaatcctgtctctactaaaaatacaaaaactagctgggcatggtggcacgtgcctgtaatcccagctactgggggtgctgaggcaggagaaatgcttgaacctgggagatggaggttgcagtgagctgagattgtgccactgcactccagcctgggtaacagagcgaggttccgtctcaaaaaaaaaaaaaaaagggaaaaaaagaatatttaaaaaagagaaaatataaaagacaaacaaaaaacacacagaaaattctaggcttccattaaggaatactggaaggatagattgtagttgcgccaccagaaatgacttcttcaatcaagatccacaggggacctgctctactgagacagctgctgcgcttgagagtgtctgtgacgcaggatgaggaatccgaggctgatgccactgctgcctctgacagaacttcccgtgaaagcaaaagaagcaaagaaaaagacattcaatgattgaagcagaaaatcttcaaatttccatattctttttagaaaaaacatcraaaaaagacaagaaaatggttttggcttgactttcactttccacatctcactcaa

SEQ ID NO: 45757 - DNA, 588 bp, Homo sapiens
cactgagcctgcagcaacaccaactcccaacaactagtgagccttcagcaacatccactcccaaccactagtgagccaccctgcacaccaccccactgtgctttcacacaatccaacttggctgcaactgtgtgtgatgagctggccaccaagactctctaagccaaaaaacaagtaataatgagttgttttacttcagaatagataactggaacagaatatggcagctggaaatgagctgctctggtaatcagaagctacaatatgtgacacgactgtgaggctgacctgtaactgggcctcaaggagaccattcatgcaaccaggaagggcatcaagactcttggtcagggcctgaaggacggtgagaaaatgtcattggaaactggagaaaaggcctgagagttacgtgctgagggactgtgggaaaactacggccacaacatggaaactgaaaggrcactgcaccatctcagggatctgcctaaggagacatctgggaagaacatggaaagtgctaccagcctcccctaactgtcactgaataaatatgacaggagagggacatgatctaaagaagaaggttca

SEQ ID NO: 45758 - DNA, 540 bp, Homo sapiens
tgtatataataacttttgaatttgaattatttttaaaaactttataataaaatttctctttccctacatcctttatgaaaaggtagctcattaatttttatgaagattattagaaaatcaatatgttttcaagttgattaatacctattatggataataaggctcatattggtgataaatgaattgcttcctaacatcaggtattttgaagacatatttatacaatatatgtatgatagcatattgaattaaatttttcaaattattatttatatatttattttgctttagctatgtagatttgatttgaatacaaccccagctataaacaattacatgattgtttctcttcttcctgtgagattatctgactgaaatgcagataattgaatgaaaatctgttaataaaacaaaratatctgaagggtaattatgatgaaatatagattataatatttaccagacaaaatataacagtggtgatttaaaaagtcatcaaggtctatttcttacaaaaaggattttatcgaagtttaatct

SEQ ID NO: 45759 - DNA, 584 bp, Homo sapiens
atggctactccatagagcagccccaagggctgctagttgcccatttttatggttatttcttgatgatatgctaaacagggggtgggttattcatgcctcccctttttagaccatattggataactttctgacgttgccatgacattcgtaaactgtcatggygctgatgggagtgtagtagtgaggacaatcagaggtcactccgtggccatcttggttttggtagaccagcttctttactgcaacctgttttatcagcaaggtctttacgaggtgtatcttgtgccaacctcctatctcatcctgtgacttagaatgccttaactgtctggaaatgcagcccagtagctttcagcctcattttacccagcacctattcaagatggagttgttctggttcacatgcctctgacaccatagctcttacaagaaaatttattgctcatcttaacgagtctaatttattaatattctgttgcaaagaggggacaaacaactctgaaaacaaacaaaagtcacttttaacctaagtattttcttctgaaatataattttatttgtttgtaactatgaaatcctcatta

SEQ ID NO: 45760 - DNA, 557 bp, Homo sapiens
tttgttttgagataaggtcttgctctgtcactcaggctggagtgcagtggcacgaccttggctcactgcaatctctgtctcctgggataaggtgattctcccacttcagcctcccaagtagctagaactacaggcatgcaccaccacggccagctaatttttgttttttttgtctttttagyagagacagggtttcaccatgttgcccaggctggtctcgagctactgagctcaagtgatctacccgccttggcctcccaaagtgctggaattacagaagccaccatgcccagccaaggctgtgttctttctgaggggagatccatactcttctcaaagcatttactacatagttctgcattgtcatggtccatatgctcatcagcccatctcagtggattattacctccttgagagcggagctgtgtcttgttccctttgccttcccagtacccagcaaggtgtgtagcagtgtagcagacatagtcatagtcaataaatatttgttggatgattgtttttctgaagtggccccttcctctttccttttcacttat

SEQ ID NO: 45761 - DNA, 587 bp, Homo sapiens
gtcccttatcaaaatttatgattgagcacaggctataaacttaatcatttgaaatttgtagtagggtgaattaaattttagcctaatttaaaacatgatctagtattaaactttttctctgcaagttttgtttaatacagattcttcatatcgcaagggtttcagatattttacaaaaggtatttaaataattattaattgctttagatttatttataatatttaaaatattataaccatatkagaaatctggatgatttgtttctttaccagctctaattagagcagttacctgtgaagttctggagaggtgaacaatcttccgtttgcaaaaaattgtatgacattatattagcaagatagtataacacctctaaaagcaaaaataatttcatttactctaacttaggtgttttggatatatttttcaagaacaaatctatcttttaaaaatttaagcaaatatggttaaaattttgaagtaccttagttagaagtgtgaaatgtatgtgagaaacaaactaagtggcttttaaccagcttaacatgaagaaatcaaacttgcatttcagacttaaatatgtttt

SEQ ID NO: 45762 - DNA, 556 bp, Homo sapiens
tgggaaagacctgcccccatgattccaattacctcccaccaggtctctcccacgacacatgggaattatgggagctacaattcaagatgagatttgggtggggacacagccaaaccatatcactaagtaatttataaacaacagaaattttatttctcacagtttcagaggctgggaagttcaagatcaagatgccagcagactcagcatctggtgagggctctccgctgtgtatattgcaactccttgttagatcctcacatgacagaaggggtgaacaaactcccctcaggcctctgttataagggcactcatcccatctataaggcttctgccttcatgacctaatcatctcctaaaaggcccacctcttaagactagtgcattagtgattaagttttaactatgaatttgggargggacacaaacattcagaccacagcacttaccaattgtgtggtttatttctgtgcccagtcctctgagtttatgaaaaggagggaaaatttttttttctttcaacgagtatcacattcaaactaggcaaatttggtac

SEQ ID NO: 45763 - DNA, 542 bp, Homo sapiens
attccacaggccaaaggagatatccgaaaatctttgagtggaaacgaggtcaatattagaaccggattttaacaggaatattctgtcattgatttgtaaaatggattatgatgggaaatcagacaactgaatgatgggaaaagctatggcaacaatctggcaaatcatagcaaggacttgaattaacagcagtggggctagggaaaataaatgaattttataggcmtttggcaactgattgtaggatctgagggattaaggagaggagggatggaggatgactcagagctttgaggtcttggatgctgaatggatggtggtattattcagattagaatggacatcaaggggagttcttagttgtttgtagaaggaaaggcaagactttattactaacttcttataactgtccttgatgagaaccttgatatttagaacaaaatgagcagcaaaacaggaaagatcagtgctagagacttccctgtctcaaagacgcttcagggaaggaaacacacaaattagttatgtttttctggctttcc

SEQ ID NO: 45764 - DNA, 617 bp, Homo sapiens
ttttaatgacaggaaaaaaatacattgataggattagagtctaatgttaaggccctggaatttcagcctcagttggcatataacagaaaatatctggggagatccaagcatttcatccttcatgattaatcacatagaagagcatctcactctcttatattaagccaatcctgctccttatttttcatgaaaccccaaaagcctttagtcctggtgtttccgttggtgaaattgaaatgtgagatagcataaaaagaagtaggtggagaatcaaaagcctgaggcttaagtccaaggtcacttcttgtcagtagctctagcctcagttttgcyatcttggacattgcattggtgggctcattcattttttcaattcatactaataaagctccaactgtaaaatgagaatgacagtaactccatctcacagggctgtgatgagtgttcagggagttgacacatgtaaacatttggcacactatctgtgacattctatatttataaccaattgtattaatccattcttgcactgctataaagaaatacctgagactgggtaatttctaaagacaagaggtttgattggcttatggttctgcaggctgtacaggaagcat

SEQ ID NO: 45765 - DNA, 609 bp, Homo sapiens
gttacacaattccttgagcagttttctgctcaagtctattaaaagaggaaaaacctctaagaaaaaaaagattgtgaagattaaagatgcaaatctcctagcacaactgctrgcatttaagaggcactcaacaaattacagaaaccttttcacctgagtgccagagccagcgctcttttaaaattcgattcgagttcttgaagacagggaccttttcttgttcatccttgtaaccctttgtgccatgcctgacaggcacatgccttttttcccttcttttccactcctaaatgttaaaacatataccttattcacttcgtatctcagtaagctttaatacctgtagaaacatattggtatttttacacttgatagacaagtagtaaggaacgacggctgtcaagatttccctttatacttatttctatttctctcgagtgtgcgaatatttgagtttttgcaaaatatcaactaacatctttacttgacctacctccttattcataaagccttccttaagatagttttcaacctcaggtctcaaagatatcttagggaaaatagacatttttcctgttgtttagttctccaccaagagaaatgctggaa

SEQ ID NO: 45766 - DNA, 548 bp, Homo sapiens
aggatatacaagggaaatgaggctgcactgtggaatcagattgctttggcccaaatcctagctctttstcttactctctctctctaattttggataagttaacccctctaagtccagttttctcatgataaaacagtgatgtaaaatattcagtagaatattactcagccttaaagaggaaggaaattcagcctctcagctcctcccatcaacagatggcccagtctttagtgaggcaccagctatgtccctgaaacaccatgatgaaagtgaaggccagagtaaatggatttggccatactgggcacctggtcaccacggctgcttttaactctggcaaagtggatatcatcaccatcaatgacctcaactacatggtctaccatggaatcacatggttccagtatgattccacccacagcaagttccactgcaccatcaaggctgaaaatggaaatcccatcaccatcttccaggagggagatcccaccaaaatcacacagggtgacgctggtgctgattatgttatggagtccactggcatcttc

SEQ ID NO: 45767 - DNA, 611 bp, Homo sapiens
tttggttggtcagggagatggatttgagactgagttctcatctcccccmctgcagcaccctattaaagtgccttccttggcgataagcgtctcggtgattggctttctgtgcggcaaccagcaggaatcccagatctctgaattttggcaaaggagtctcgtgataaaggtgggatggattctactgaccaacatcaaaacgttcagacatttgaaagccttaatctcagggtcggggtttgggccgcccttgagccttttccttgggcctatccattaaaatcagcctggccaggcctgtcttcaaggtccaggggtagggtcaggtcctcccgacgcttcttgacgcttctcccgccgggtcggcagccaccctccccttccctgtgacctgcagagaagcttcagggggcgtttattcaatctgcgaggagcccacgaggcacaggcacacggtgactctggttcccactgcacccaccgccctccttggtcctctcgctctctctggcaggcagtaacgttctgggtgagcatgggtgctgaagacacccaggcaggaagggtagggaagggcaccagccccttaggtcctgcgcagtggggatcca

SEQ ID NO: 45768 - DNA, 611 bp, Homo sapiens
tttggttggtcagggagatggatttgagactgagttctcatctccccccctgcagcaccctattaaagtgccttccttggcgataagcgtctcggtgattggctttctgtgcggcaaccagcaggaatcccagatctctgaattttggcaaaggagtctcgtgataaaggtgggatggattctactgaccaacatcaaaacgttcagacatttgaaagccttaatctcagggtcggggtttgggccgcccttgagccttttccttgggcctatccattaaaatcagcctggccaggcctgtcttcaaggtccaggggtagggtcaggtcctcccgacgcttcttgacgcttctcccgccgggtcggcagccaccctccccttccctgtgacctgcagagaagcttcagggggcgtttattcaatctgcgaggagcccacgaggcacaggcacacggtgactctggttcccactgcacccaccgccctccttggtcctctcgctctctctggcaggcagtaacgttctgggtgagcatgggtgctgaagacacccaggcaggragggtagggaagggcaccagccccttaggtcctgcgcagtggggatcca

SEQ ID NO: 45769 - DNA, 553 bp, Homo sapiens
ttgccttattgaggaatttcttctctttttgtttctattatgactcatgcagataacaaaaagcatgcttaatttctgtaatgacagagaacattgccatttgtgtattctctaaaagtgtttgaaatctaaattactgattgcttccttaaacttatgarttataataacagtttaatagaaagaaatccagtttttcattcttctgtctccaaaatgtgaatttcactgctccctttactgtgggttctgccttggcctctgacacaaatacaaagaaaaatacagtttccatgaaggagctctccatggtacccttacaatacttttctttttttttaacctctaatgcctcaaatgaataccttaggttcacttttgcttaggtcatgtactcttaattttagctgacaagtcttagaatttcctcattttaaactgagaaataagttattttccaaactctacatatctggaacatatgctttttctctaagtattaaatcctgtatttgacacttcccacgacagatttttcctaatgtaggttaag

SEQ ID NO: 45770 - DNA, 553 bp, Homo sapiens
ttgccttattgaggaatttcttctctttttgtttctattatgactcatgcagataacaaaaagcatgcttaatttctgtaatgacagagaacattgccatttgtgtattctctaaaagtgtttgaaatctaaattactgattgcttccttaaacttatgagttataataacagtttaatagaaasaaatccagtttttcattcttctgtctccaaaatgtgaatttcactgctccctttactgtgggttctgccttggcctctgacacaaatacaaagaaaaatacagtttccatgaaggagctctccatggtacccttacaatacttttctttttttttaacctctaatgcctcaaatgaataccttaggttcacttttgcttaggtcatgtactcttaattttagctgacaagtcttagaatttcctcattttaaactgagaaataagttattttccaaactctacatatctggaacatatgctttttctctaagtattaaatcctgtatttgacacttcccacgacagatttttcctaatgtaggttaag

SEQ ID NO: 45771 - DNA, 553 bp, Homo sapiens
ttgccttattgaggaatttcttctctttttgtttctattatgactcatgcagataacaaaaagcatgcttaatttctgtaatgacagagaacattgccatttgtgtattctctaaaagtgtttgaaatctaaattactgattgcttccttaaacttatgagttataataacagtttaatagaaagaaatccagtttttcattcttctgtctccaaaatgtgaatttcactgctccctttactgtgggttctgccttggcctctgacacaaatacaaagaaaaatacagtttccatgaaggagctctccatggtacccttacaatacttttctttttttttaacctctaatgcytcaaatgaataccttaggttcacttttgcttaggtcatgtactcttaattttagctgacaagtcttagaatttcctcattttaaactgagaaataagttattttccaaactctacatatctggaacatatgctttttctctaagtattaaatcctgtatttgacacttcccacgacagatttttcctaatgtaggttaag

SEQ ID NO: 45772 - DNA, 579 bp, Homo sapiens
atttacataattaatataattacacatctaatagacatagactgattatagaaaacatgttgggacttatatatggaagaaagtaactcatgggtttgagattctaaaaatagatattttgtattcaaaacacactccttgtatttacccttattattattattwttttttttttgagatggagtctcgctctgtcaccaggctggagtgcagaggcacgatctcagctcactgcaacctccgcctcctgggttcaagcgattctcctgcctcagcctcccaagtagctgggattacaggcacacgccaccatacccaggtaatttttgtatttttagtacagacagggtttcgtcatgttggccaggatggtcttgatctcctgacctcgtgatccacccgcctcagcctcccaaaatgctgggattacaggcatgagcccccacgcccaaccctgtattctaagaacgtaatgatacagcttaccttcttgctccaagatctaatttttaaaacaaggtcttaatacatgtttaggtataatatgtgtttctgatcattacaaccctttccaactat

SEQ ID NO: 45773 - DNA, 413 bp, Homo sapiens
ggattttagatgggactcaaaaagtaacttttttgcttccaattccaacataatcattctcacgaacttttgtctcagttcaccaagaggaaaaacattcaatattgacaaacaccctaaaaattatttaaattgaaagaatagtgcaaaataatcaaggaaaagagagaatttctgttttttttttwaaaaaaaacagcacgttttaagtttctaatctttgcgttgtcaaatactctctctctctcttttgctacctcatagaaatttaatccatcaggatacgaaataaatcaaaactaatctaaaatgttaaaactgaaagacactttagaagtcatctgagttaacctactcatttgtgggatgaggaaactgggtctcaaagtaacttgcccatatctctcagacaa

SEQ ID NO: 45774 - DNA, 567 bp, Homo sapiens
tttttaatatatattaaataaaatccacataaatacctttgtgtttcccaccaccttcctaacacaccacatgttaccaagacttccctctgttagacttccctgcatcttcttgcctaattaccccccttcctcatctcagaggtaaccatgattctgaatatagtgctcattcttccttgcatttttcagacttcaattatttatgtttgtatccctaagcaatatatatgactgttatgcatgttttaaactatatgtatacaaccatatgtatattcttttataaatgaattttttgcycaaaattattcacatgagaataatacatgctggcatctaaagttcttttttattaattttcttttgtaaaatatcacattgagaatattcagagtatgtatattctccagttacttcatatgtaggttgttttttcagtgtttgctactactaacacgaatatttttgtaaacgtagctttatatacaaaggtgtattctttgtacatactttgtatagtttgtatatactttgtacattctttgtatatttccctagaaatgg

SEQ ID NO: 45775 - DNA, 584 bp, Homo sapiens
tggttcttgccaactacagacaaaactagcactgaccccttgaagatgcttccctcagaggagtttggtttgctttgagcacccacagaatgtgtaatcgatctgcccaaggccccccgatccctgggggtggctagaagactctgggttccattcttagtgtttcttaagtagcagtagcacttccattaacatattccctacttagaaggtaaacttcattcatacatatattctctggggtttttctttctttctaaagtacttcttgtaatggcctctcaaaaaatttttacattttctgtccttgttttctttttcttctatttattaattattattattattattattattattattatttttgagatggygtctcgctgtgttgcccggactgcagggcagtggcgtgatttcggctcactgcaacctccgcctcccgggttcaagcaattccctgccccagcctcccgagtagctgggattacaggcgcacatcactgcgccctgctaatttttgtatttatagtagagatggcatttcaccatattggccaggctggtcttgaacttctgacctg

SEQ ID NO: 45776 - DNA, 548 bp, Homo sapiens
aatgaaacaaaagtctttggcccactcaacttcaacccttyaacacaggtcagtcaatctacccacattctcacatcttcattttgtttttgtaatctccaactgattttcccctttctgaatataacttcctgtctttcctctttactagtccttcagtatcacagaatctgatcatcctcatccacattttgatctcctatgcctctctgtatttctattatccttaactctatttaatccaactccttatttccccaacccctctgtcatggacctatacttcaatcaaattctcgccatacttctcttgtggattatctaaagaaaatatctaacatacacaaaggaaacatacacagcctcattggtagggcaaagatggcaaaaacaaaagtacttatgattataaaacaaggagagactgacacagataatagcaagttagaaaaaaaaaacacaaaaacacaacaggaaaacttaatcaatgaatagcattaaaagaatttcattaggagggaaatctgggaagatccctttgaccagtg

SEQ ID NO: 45777 - DNA, 555 bp, Homo sapiens
gacaccaaacaagtagatacacaggtctgatcctcagaagagagatctagttagactcgatattggggagtcatcagctttcaggtgatggtaggagatgagacgcaaatgtagactgccaaaatatatgcatgcttgaaactcatataatgggttgaaatggtatcgtaaatgctctgtgctgaagcagattctgtatttggaggatgagatgagctaaagcgagtgcaaataagatctaagagtgaatctgagtcacagaagaggaaagataacaggaattagggctgaagagttgatatcaagcatcagactgaatgggctatatcaaggtcttaaacagaagatggtaataaagtagattgttcaagaaaaagtgtgaaatgatggaagaatttcttwaaaaaaaccaaggaaataggtggaacatggagataagtaggcatttttaaaatgtttttttgttttgtttttaatatgtgacactgagagtaaagggtaaatgggcaactggttgagaatacagtgaagaaataatattgagctgaaattcct

SEQ ID NO: 45778 - DNA, 600 bp, Homo sapiens
cggtggctcacgcctgtaccccagagctttggggaggccaaggtgggaggatcacttgagcctaggagtttgagaccagcctgagcaacatagtgagacccccatctctacaaaaaatttaaaaattagccagacgtggtggtgcatgcctgtagtcccagctactcaggaggctgaggctggaggatcacttgagcctgggaggttgaggctgcagagagctacgattacaccactgtactccggcctgggtgacagagtaagaccctgtctcaaaaaataataataataaataaaaaaaagaaattccagcaaagtgcttgaggcagggcctcgtacacatgagcacttgaaagtgctaactatgactgctatcattcctctcctagactttgccagcaggataatgaaagagcaaaaggaaggaagcactcagaccacgtacactggggggcagtgggccctgggcaatgctctctgtttcccaatgaatagaattatcttaatcatacttaatyctgttctcatgagggtgtttaaaattggaagggtaatctattagatttcctctgaaaaaagttgccctagtgaacctgtggg

SEQ ID NO: 45779 - DNA, 561 bp, Homo sapiens
aggcaaacaataaaactatgaagagaaatagtgtatctttggaggctctgctcacccagggagtatagattgcagcctgcgaaatccaatggttttttttttttttttttttttttgagacggagtctcgctttgtcgctcaggctggagtgtagtggcgcgatctcggctcactgcaagcaccgcctcgcggattcatgccattctcctgcctcagcctcccgagtagctgggactacaggcacctgccatcacgcctggctaattttttgtatttttagtagagacagagtttcaccgtgttagccaggatggtcttgatctcctgacctcgtgatccgcccgcctcggcctcccaaagtgctgggattacaggcrtgagccaccgtgcccggccagtcatattctttaaacataacagcagactcaaagcatgacaatgaagagcaaagctccatctattagataatggtataccaaacaataataactatctctttaaacatcatcaaagcccaaattatctcatttcatactggggacgtgggcggggaaggtatg

SEQ ID NO: 45780 - DNA, 561 bp, Homo sapiens
ccagcctagacaacatagtgagactcccatctctacatatacactcccatctctacatatatatatatatatgtacacacgcgcacgtrtataaatagccgggcattgtggtacgcacctgtagtcccagctgctcaggaggttgaggcgggaggatcacttgagctaggaatttcaggctgcattgagctgtcatcatgccactgcactccagcctggctgacagagcagaccctgattcaaaagaaaaatgaaatgaaatgtatccctgaagcattctttgttccctgaattgatgctcacttaaaaaaaaaaagttttcagcagagatctagtccaacacccttagtttccagataggctgtcttatgtcctaagtcactgaccagtagtcttggcgtggggaacccagtcttcacctccgaatatcctatagcaccctgatatgttggttacacactagaagcttaataaatgtatactgatgagttggtgattttgagcttcacaaggggaaagaaatatcatttattaaatacctgtttttagcaacacagtgct

SEQ ID NO: 45781 - DNA, 585 bp, Homo sapiens
cacgatgtactgcacaggcttcgtgacactgattctggctgctggaggcctcttctgctccctccctgtttttagccatrttctgaacaggcagtccagattgggagctgcttccccttagggccgaaaccacctcacacagccctggcctcactctatccagccctccacgttggacattactgacactctgtcagccccaggattccgaaaacatttacatccctgggagcaggaggaagaatggggagaaaaacccaggaaaaatggaaaaccttagaaaacccacacatggctaaggccatgacctaacaaaagaacttccttagtagaacaaaagtcagaattaaaaaaaaaattttttttcaacttactttggtttttccaatttggaaaatcctgtacaacatcctggtatttggggaaccacaggactttttttttttttttttttttttaatgtccaagagaggagtgaaggggtgaaaaaaaggagtgaaaatagaaaaacaaggaaagtttaaaaggcacctaggaaatcaggacaatgaatttgaagggagctgggctcggagcaggagcttt

SEQ ID NO: 45782 - DNA, 585 bp, Homo sapiens
cacgatgtactgcacaggcttcgtgacactgattctggctgctggaggcctcttctgctccctccctgtttttagccatattctgaacaggcagtccagattgggagctgcttccccttagggccgaaaccacctcacacagccctggcctcactctatccagccctccacgttggacattactgacactctgtcagccccaggattccgaaaacatttacatccctgggagcaggaggaagaatggggagaaaaacccaggaaaaatggaaaaccttagaaaacccacacatggctaaggccatgacctaacaaaagaacttccttagtagaacaaaagtcagaattaaaaaaaaaawtttttttcaacttactttggtttttccaatttggaaaatcctgtacaacatcctggtatttggggaaccacaggactttttttttttttttttttttttaatgtccaagagaggagtgaaggggtgaaaaaaaggagtgaaaatagaaaaacaaggaaagtttaaaaggcacctaggaaatcaggacaatgaatttgaagggagctgggctcggagcaggagcttt

SEQ ID NO: 45783 - DNA, 518 bp, Homo sapiens
tggtcccaacaggtacaatgacctctggggaccaagttcagttcttggtgagttctccagtgcctctcgatgtaggatgaaccgttggcatgctccactgacgctggctccttctgttgtttctcttggctccaggacccccgcagcaaacacaagtttaagatccacacgtactccagccccacgttttgtgaccactgtgggtcactgctgtatggactcatccaccaggggatgaaatgtgacagtaagtactttttctctctgggggcatctgctgatggcagaagcaatgggaagggctgcttccacttggtttggggtccaggtctgccatacattcccccctgtcctsgttggggctggtgtaccagttatctgttgctgcataatgatcctcccaccccaaaacactgtgactgaagacaataaacatttttttagctcatgactctgcaaggcagttctttgaatctgggctggcctcagctgatgtcacgcatgttcataaagcatga

SEQ ID NO: 45784 - DNA, 518 bp, Homo sapiens
tggtcccaacaggtacaatgacctctggggaccaagttcagttcttggtgagttctccagtgcctctcgatgtaggatgaaccgttggcatgctccactgacgctggctccttctgttgtttctcttggctccaggacccccgcagcaaacacaagtttaagatccacacgtactccagccccacgttttgtgaccactgtgggtcactgctgtatggactcatccaccaggggatgaaatgtgacagtaagtactttttctctctgggggcatctgctgatggcagaagcaatgggaagggctgcttccacttggtttggggtccaggtctgccatacattcccccctgtcctcgttggggctggtgtaccagttatctgttgctgcataatgatcctcccaccccaaaacactgtgactgaagacaataaacatttttttagctcatgactctgcaaggcagtyctttgaatctgggctggcctcagctgatgtcacgcatgttcataaagcatga

SEQ ID NO: 45785 - DNA, 600 bp, Homo sapiens
tgcaaaaaaatgagaaaactggatagtctcaaaagaatttcaaaattctacattccttttaatgataatgacagtaacaacaatggcaagagcagctatcagatactttaaacacattgtttctaattcccacaataatcttggaagttttgtttgtttgtttttcagataatgatgcaaaagtttgctcaatagcataccwatagcaagtggcaaagccaggattgaaactcaagttagtccaacccctgcaattaccccaagattctgattatccaagctagacaatagtgtcatagatatgcacataggttttagactcagacatctgggtttaaaaactcagttttaccactttctagccatgtgaccttgagcaaattgtttaaactgtctctaaggattgctaaactgtgaggcgggcaaaatcacagctacatcataaagttggtgaggataaatgcacaaaaaacataaagtacgaaatgtgaaagtgtgaaacaaatggtagctttggcctctgctgcttatttatcatcattatgtctaggaaaagaggcctaacatgaagatagatatagtttcattatgtcaatatat

SEQ ID NO: 45786 - DNA, 545 bp, Homo sapiens
tgactccttaaataacgattgcttaaaagtgatgttattattgtagttttaatgtcactaatacatactccaaattggtgctagtaaaaaactttctttttttattattattatactttaagttttagggtacatgtgcacaatgtgcaggtttgttacatatgtatacatgtgccatgttggtgtgctgcacccattgactcttcatttagcattaggtatatctcctaatgctatccctcccccctacccccaccccacaacagtcccaggtgtgtgatgytcctcttcctgtgtccatgtgttctcatttttcaattcccacatatgagtgagaacatgcggtgtttgtttttttgtccttgcgatagtttgctgagaatgatggtttccagctccatccatgtccctacaaaggacatgaactcatcattttttatggctgcatagtattccacggtgtatatgtgccacattttcttaatccagtctatcattgttggacatttgggttggttccaagtctttgctattgtgaatagtgc

SEQ ID NO: 45787 - DNA, 545 bp, Homo sapiens
tgactccttaaataacgattgcttaaaagtgatgttattattgtagttttaatgtcactaatacatactccaaattggtgctagtaaaaaactttctttttttattattattatactttaagttttagggtacatgtgcacaatgtgcaggtttgttacatatgtatacatgtgccatgttggtgtgctgcacccattgactcttcatttagcattaggtatatctcctaatgctatccctcccccctacccccaccccacaacagtcccaggtgtgtgatgttcctcttcctgtgtccatgtgttctcatttttcaattcccacatatgagtgagaacatgcggtgtttgtttttttgtccttgcgatagtttgctgagaatgatggtttccagctccatccatgtccctacaaaggacatgaactcatcattttttatggctgcatagtattccacggtgtatatgtgycacattttcttaatccagtctatcattgttggacatttgggttggttccaagtctttgctattgtgaatagtgc

SEQ ID NO: 45788 - DNA, 556 bp, Homo sapiens
gcacattgtgcacatgtaccctaaaacttaaagtataataaaaaaaacaaamaaaaaaaagaaatgcagcctgctgacactttggttttagcccagtgaaatcccttttggacatcttatctccataactgtatgacaataaatttgtgatgctttgggccactatgtttgttttaatttgttacattagccataggaaatgaatgtagcctccaaatattttgttgatgattaataccaaaaatattaaagtctcttgaaagagaaggctctccaacagaggattaaagttatcctctaaaaaatcacaccagaatgcaataaaataaatataattttaaacaagataaagacagcaatctaatatgattttccccctttaaattatttaccatctcatctattcttacagaattttctcaaaaataattgaccatttaaaacaaaaaaaaataaaaattatttagatttattgtgtatgtcctagaaatctggctttcctcccttctggtatggtaatagggtttactatgggaaatttacaaactcttcaact

SEQ ID NO: 45789 - DNA, 569 bp, Homo sapiens
gaaataattaacatttgtccataagatgcaatgcaacatccatgctcctttgtttttggaatcaagtggctaaaatggaccaacatacatagataccacatttcacacaacatccctcatccaactctgaaaatttaaggagaaatccaaaatgtttgggtataaagaggtgggaggccactcacaacatgcgaactcataaatagttcaatgaggtgtgttatggtgctgaagattttgggttactgtgcctttcattcagtaatgcaaggtgtatctatatatctcaataatccaaaacaaaacatacttccacaatatcctcaatattcccagataacctggagggatctgaagcaggatagtactctatttttacaaagatttttatggcaattcggccctactattcatttgttcaactattatttaacamatattaagttactatcatgggccatgcactggcttattcagtcccttcttcatggatgcacagatagaaggactttttatttttctttatttaacttgattattttcatagaagagtcttgcatcctactgaa

SEQ ID NO: 45790 - DNA, 1789 bp, Homo sapiens
aagtaggcatggtccaagacaggaagggatatttaagctgtgttctaaaagtttggctcttatcttgcaggtaatggggaaccatcaaatgattttaagctaaggaatgatacgaccattgatatgatttggcactgtgtccccacccaaatctcatctgaattttcatccccacatgtcaagggaggaacctggtgagaggtgattgaatcatggaggcagtttcccacatggtgttctcatgatagtgagttctcacaacatctgatggtttaaaagtgtaacacttttttcctcactctctttcacctgccaccacgtaaggcatgccttgcttccccttcaccttccgccatgattgtaagtttactgaggtctccccagccacgtggaactgtgagccaattaaacccctttgctttataaattacccagtcttgagtcttgagtagtatctttctagcagtgtgaaaatggacaaatacaaccacatatatatatatatatataaaatattacttattaaaacttatgtgacatttatatattttagaaaggtgattgcagatataatacagaagatgaaccaacagagaataagggaagagatgcatttgaatatattttagtgattgaggctggaatttaagatgagctggaatttaagattatttgaactaagatagtagaggtaagaatgtaaataagcagatgaattcaggatgtatgtaagcagtaccattaacatgaaccaaggtgagaattcaagaatagcacttaattttctggcttgggcaattgaacgtgatcatgctctagatgaagagcaatggagaaaaacattggggttgaggaaggcaaatgtaaatagcccatctttttgatatatcaaatttgaggtgtttatggggtattcaactgtcatatttaatgataatttgaatatacagtcccagaatgtaatgctagaatatacacagatcttgaaaccaagagctagatgaaagtgtctagtgttagattacagaataagaagatatggacataggacaaaatgctaaggtgtttcagtatttgagaggtaaggggaaagaactcttaaagacaactagaagagagtgaggaaaaaggtagagaaatactatatacatgttctatgagagaagctaagaaaacagaacattccaagcagatttaaacagccaagagcttgagtagatcattttaacacaagttctaaaagagtctgtatgagtgaatggcaaattaagataaaataacagaaatgaatgcgatgttcaaaattttaagaagtatagataaataccctattaaatgacaaatatttcattaccaaaatccaattatatgctatgtgtcaaaaaacaactcaaattttgaaaataaagaatatgcaaaatatggtaggcaatgacaaaaaataaaattggcaatgttatgcaatataaaatagaattaaaggtcaaatttaataaagataaatattttacattgttaaaaattataaatcttcaggacaattatactacaatgaactttaacacacactgtagcattatatgtgcaatgtaaatgatgtatttgaaaaacactgtcatagtaggacaattggcaagcctttcttagcaactaaaaattcatacaagaaaatacacaaaataaacggcttcatttaatagaataatatagacaactgaagatacagaaaaraatgttatgatttttcaagttctccataaatatttgtaaaggaagcatgttttagctc

SEQ ID NO: 45791 - DNA, 561 bp, Homo sapiens
gagtgggagtggggggcacccattgccaggaggagctatcgggccggttccaactcttccacctggcccggtatttcctaagtcaggasccccgtgtgggccagacatccccagaggctgcacaagctctgcggggcctgcgtctcggagtcctgggggatgattttcctcatcataagcacttcccaggtcataggagacgagacggcatttaatcaacttctgcgtgtgtttcaaccacgtgtgacatttgatctttgtgacagctctcacagtagtgcccacttctgctgtgcaatcctcccattggtgaacgggctggttctgcctgaggacacttggacgtgggggcctcttccggatgagtgggtggggtgggctgtgaagggaagcgtcccaggcctgggacacgcctgcagctgtgggcagctcatccaccacgtggcagctctgaaactgtccagcacccacttcccgggcctccaaagacatcaagaggggacctggggtgtcaggagcagagctgattctccagctcttgagacagccttcgcgtggggt

SEQ ID NO: 45792 - DNA, 580 bp, Homo sapiens
tgtaatacacatatataatayatataacaaaaatagagatataaaaaaactgaaacaactggacattgaaagtgtcttttatgataatgtccctaaattattctgaatgcttagagctcttactggaaatgtgaaatcatgtgtaaatacatactgtgttttgttgtaggtttagttgacttctgaaacatgaatgtaaagttaaattacaagactggaaatgcacatcagtcaatcaaatcacatgaatagaactacacatcaatgtataaaagacatcagaaatttttcaatattgagttattggctccataaatatgtcttgagtgttcattttatgttaggcactattctaaatcctgggggaaaaaacaacaaaaatacctgtcttcctggagcttatcttccagtgggaggagtcagaccatgaaataaaatgtctattatgttacaaagggatgaatgctatgaagaaacataatacagtgaaaggagatagagacccctaacagggcttgaaattgtcaataagttgctggagactcttccactgaagtggagatgttgcatttcttgaaga

SEQ ID NO: 45793 - DNA, 610 bp, Homo sapiens
attttcctctacttttaaacctttctcagaagagtgaagctcagtctcatcacctgttttatgcatacaatcacctttatatttatgtttcacagacaatttgtcttccgatggagttttctctctttcaggcttctccttggaggatttcacctctttcttaagtaggcttttcaaatgtggtgtttcagaatcatctttctttagatgcttttcgtttttaagtgtgcttttctgtttctggggctcttcggtgcaaatttctgagcgttctacttgcctttttacatctcttgtgtcagtctcttcctgtaccccctccatgataacaggggtagatgtccgtcttttatgttctctttctawtttggattcatttttgttttcgtcaactacatgcaaagactctgaaagtctccgggcaggtttacttggttcactttttgcatgaacatgcttcagctcctttgaagaagaaattttttccttttcacaatgctgaaagaaaacaaaggttaaaatatgagaaataccaaaatcaatttttagattaaaacataacatttgggtggatttaatatgttgagtgctgtcacatatgtaacatctc

SEQ ID NO: 45794 - DNA, 526 bp, Homo sapiens
tcttacctctgattaactctccatagattactgtggtttatccagactgattttctataagttccctggataggctgtgccattcctttcatccaggactttcacatataattctggctstctagaatagtcatccctttctattcttcaggtctcagcttaaccctcatttactctggtttttttttttccctaattattcagaagcccatagttctctttattttccttatcacatctcttaacaattctgttttgtagttgcctgttcagtctgtcttccctgatagaacataagcctcttgaaagcaaggactgcatttctcacttttaaatcatcggcatctagcaccatgactgcagtatagtaagagcttggtaaataattgttaactctttagggtaatagaaaagaaaagttctcagcttcacagcaaaaatccctctcattaatcaatggaactacctaatattaattcattaattcatgttcactcaataaatattttgaacagcttataaatat

SEQ ID NO: 45795 - DNA, 526 bp, Homo sapiens
tcttacctctgattaactctccatagattactgtggtttatccagactgattttctataagttccctggataggctgtgccattcctttcatccaggactttcacatataattctggctctctagaatagtcatccctttctattcttcaggtctcagcttaaccctcatttactctggtttttttttttccctaattattcagaagcycatagttctctttattttccttatcacatctcttaacaattctgttttgtagttgcctgttcagtctgtcttccctgatagaacataagcctcttgaaagcaaggactgcatttctcacttttaaatcatcggcatctagcaccatgactgcagtatagtaagagcttggtaaataattgttaactctttagggtaatagaaaagaaaagttctcagcttcacagcaaaaatccctctcattaatcaatggaactacctaatattaattcattaattcatgttcactcaataaatattttgaacagcttataaatat

SEQ ID NO: 45796 - DNA, 565 bp, Homo sapiens
aatcaagtaattttaagagtgtttaatagagaaagtgccttcaaagatataggaaaccacaaagaatagagagaaataaccagggactatkaatgtgggggtgggcagcacacattaacatttctaggaataaaggagcagagagagagaacagttactggaagcaaagggaaaaatataaggtgaagataggccctttcatcttctaatgagaatatagccagtcaagcacaatgacttaatgaggagagtgaggaaaactacacgatttcttctttttccctttccttggtttctagccagtgctccccattggttgactctaacaggaagccaaagattctgggagtccattgatgagacttttatagattagcctcccaaaacaaagaacaagatgtgggagagagaagtgagcagatctagagagaaaaagagataacctacaacacaatcaagccctctcgtccctgggcaaccattcttgttctgtaatatgtacagcccaaacaaagagacacacaaaaacattactattaaatatatcatagtgagggtgatgtca

SEQ ID NO: 45797 - DNA, 584 bp, Homo sapiens
gcattgcaattagctttaaaaagatggaacagcattgtaaggacagaccatgaatctaagcccttaggttgaatacttaggttgaataaaattgttggaggaagtggatatttgatgtacgtaatgaaagggattcttacttggcaggtattattagaagaaaaaaaaaagagagagagaaagttgaaggagaggggaaaactgccacagcaggttaagcaacttgctttaaaataattgggattagtaagtgtgcaaagatagaactggtgatgaaagagtgagactggaattaggaattaatytgtaacattaatgttgcaggttgggtcctggttatgagactgagcggatgctcattctttggagctataactctgaccagtgccacattaacagatttggaaaatatgagattaactatgaaggtacagaaaataaaggtgttaaaattatttctatattttagatctaattgttaataatatagtatatacacatacatactatattatatatatattacatatatataataacatatatatgcaaaaagctatggtaaatagaaaacattagctggg

SEQ ID NO: 45798 - DNA, 560 bp, Homo sapiens
cagctgagaagcagcccagaatttcacactgacacccacgctgttggttgtgttttttgaaccagattgaaattaatatctattgtatggttcaattgctatgaagttcaatgtcaagmaaatgtaatttataaagataaaagtaagaacagtggttgcctatagtaatgattggaggttcacaatagagactcctggattctagtaatactcaattcatattcatgtaggttgtgatgacattctaaaaatgtttaaagctatatgcttaagatctgtgtctttcacatgtgcatatcatatttcatattccaattaataaatcagtaaaaaaagttccagttcaggatacaatactgtagaacaatccaaattattaatttattcctaaagtttttaaaatattagaataaatacacagcattttgttaaaacaatatggtaaacctaaatgtaaaaaaaaaaaattaaattgagttaggagtttcaaaaagacatttcatatgccttttcaactttcaatttcatatgaaagttgaaaaaacttgtaatcagtaagt

SEQ ID NO: 45799 - DNA, 606 bp, Homo sapiens
cagaacccaggtgctattccatgagaagcacaaggcacaggcagaggccatgaagacagccaagctaagatcatggtctagtcatagctacgtgctcagtgattgccagcacaaattgacagtcatgtgaatgagtcattttggttgtccagctcgtcaaggactcagatgactccagccttctctggcatgtaattccaactacatgaggggccctaagcaaatacttattagttgatcctatccaactccaaagatgtaaaacataataggaagagttaatttgtaaatttggggaatgatttaatytgcagcaaaacataactaggatgggcatctttagagctacttactttcatgggtgtcttctcagggctccaatatttaattttatattcataattttatattgtttccatgaggaagtcccctccagttgtataagcttcaggtacccaggatttgcccacgctctacttcctctaatctcttttctctcctactttctagtttgcttttcccattctctctttacccaaccctctacccaccttttgagtagaacttgctaatttagaaaatgccagcactgtgcagttttaaaat

SEQ ID NO: 45800 - DNA, 577 bp, Homo sapiens
attgtcatgttgtgcattcagggggaagtgagcagtggtcctgctagtactgacctccaaggaacggtgtgttttctctgcagccagaggttgcactaacagctgggaatcctgccgtgatggtcagcagcggagggagcacaggaaatagggtcttctcgtggggacatctggccaggtgtccacagcagctgtcacaaaagataggaagttcccatctaatgtggccttgtccctgatcttgtgggagccctggccccttaagagcactatgagattgataacaatgtcctcacaggtgttgtaggacctaaggaagcgcygttaaatgcacgagacgtttaattagtagcattattacctatggcttgatcctttcctggtcactggtcagggttacatagaaatctctggccttcattggccatgggagattgttgccctagatcccaccggtctaagcttgcttaaactcctctacctgtctactccagtcaccaactggtactaatgctttaactgtgcccattgtccccattcccctttgagaaaaaatgtcaaattctttttacaaaat

SEQ ID NO: 45801 - DNA, 614 bp, Homo sapiens
gcatgggcaatgttcagaatctgttggtttcagcccaggattgatagttgcagtgcaatttcagccattatgcgcaagcagtgtcacatccattcagctgacaggggcgagacactaatctcagtgggcatccagcaactgaaactgcagctggccttgggamgtttctgccaactctttaaatctttacaggtacagagttgctgcgggtgaccaaactttgtagccagtaagatcatgagaaagttaagcagtctgttactttgagggaatttccttagaaaagaagagaaaccgatttttttctcctttctggtgagaatgactcacttggcagagctgattgctttagggcccacttgacatgacaccttccccctgcaaatgactctggatattataacataccttcgttttcattgatttactttactatctttaaaaacaaccctctaggccagaaacatgtagctgcactgctatgtgtgtgtgtgtgtgtgtatgtgtgcactgatttttacacaatttcacaatgtcctggaagtttgtggccccctaggttgacattcggatcgctcgagccagttgaatagttatatgacaatacatgatct

SEQ ID NO: 45802 - DNA, 1843 bp, Homo sapiens
atgaaacatatacttaacatgtattttactttcaataataatagcattaagcctgggcaacatagggagacctcacctctacaaaaaaaaaaaaaaaaaaattcaaccgggcatggtgttgcatgcctgtagtcccagctactcatgaggctgaggtgggaggttgcttgaacctgggaagttgaggctgcagtgagccatgatcattgtgctactgcactccagcctgggygaaagagcatgactttatctcaaaaaaaaaaaaaaaaagaaaaagaaaaaagtgttacctgttccagaatctgattgttgtttttttcaggctttatttacttccctgttcatgacccttgctggcatggatggcattgtggccaagcaggattgggagatgctggagggagtacagttggtataaaaggggtacatggaataaaacatgtatttcttcttaagtctactgatttaatgtaaatacagatgtatgagaattttcagagtctcaaagtcaccatggttttttgatattatttataggtactaacattttaaaaaatgcagtttttttgagatcaaattttcacttttcctatttgggtggctatttaaagatgcatccgggcacaattcagacatacaagatacttcagttcagtggtttcttgaattacacctaaaatccaaaggaacgtgtttctgaaagtggctgccaattttttttttaagaggacaatcagcaccatctagtggacacaagtatctcctcttctagaattcggacccctgaggagatggagggcaggctttggaacctaggttggaatcccggtgccagttagttccccaacgaccttgggacaattacttaccctttaggtgctctgcttctcaactctaaatccaggtaatactagtgccgactcatagaatgttatgaatgaagtgaaatgatgcttggaaggcaagtctgaaacactttgtaaatgcagtttttcaataacactaagcatagattcacaggacatgggaactatccagtggtaaacactattatctgctctccagtaggaatggctattatacacaaaatccagtgtgtagaatctacgatatgaggcttaatgagatccctctcctaccatattgttacattcggttgaagtttatggtgaggaaagggcaaccggggcaacaaggctgaaatggtagttggtgcccagatggcaaacaatgctcttgctcgctttcattcattcaaatctgactccactcggaaggaggatgtcaagagtagggagagactgcaaacaaaaacaaaagctaactccgaaactaacactgccactgccatatgtcaccaacctggaatgagaccagggaaattttagcttcaaatatcttgactctagaagaaatttttatgaatgactttgaagggcacaacactttccaggatgtgtttgcgatttttgaaaatggaactgcagaaaacacagtatagacatttggtgctctcggacttatatccccgtgctgttttgagggtgtcacctgcaatagctgacacagaagtatctggggaaattaaaaacaaatacacaacaaatgcaatttattaaagctggcccttaaggcacacacagcctctcagcagtttacaaaatggaagcagcaggaggtaaataaacacgtgagagtgacacagagacaaaacaattcaaaatgagataaatagttttatgcaaatatagtcaatagggacttagtctggaaaggttacaaacagtgaagagacacaaagtttacgtggaacccgaattttattttcacttgctttatatgc

SEQ ID NO: 45803 - DNA, 568 bp, Homo sapiens
ccatgggccagatgtcctcccgtgccatgagcacaccagctgtggcagcctcggggccmcttacctaggcctttctgcggggctggggagcggaactccatgaggtaactcaggtagggcttctcagtgctgatctcgtagtaccggatgtttccatcaccctggggtcaggagagatggagttgaggaaggtggcaggtagggagggcagagcagggcctggtcccaggagccagctgaagacagctctcccctgtgcctcatgggcagttaaaaaaaccaaggaaacctggcttctaggctcctagtgggtgcaccacaggggactcactgcgggtggagaggtggaggtggatgggctgatgtgagtgtgtgtgtgtagacagcctttctgacaaacaaggctgtattcaccaaggatctcctggcgggtatctcaaattccatcattcatcactgactacactgcaggctctgatctttattccaatgtaaaagcccgctccagctcacctttgaaggaattcttggtagcagacacttgagtaagaatgggtgtcagacttga

SEQ ID NO: 45804 - DNA, 705 bp, Homo sapiens
agttcctggggtccatgcccagagattataattcactagatctggggtggggctgggcatctctgtttttttttttcttttcttttctttttattttctttgagatagagtctcgctctgtcacccaggctggagtgcaatgkcatgatctcggctcactgcaacctccatctcctgattctcttgcctcagcctcctgagtagctgggattacgggtgcctaccaccacgcccagcaaatttttgtattttcagtaaagatagggttttgccatgttggccaggctggtctcgaactcctgacctcatgatacacccaccttggcctcccaaagtgctgagattacaggcatgagccactgcacccagccatgtctctgtttttaactccagtgctagtggtcgaagaccactcctgcccagagtcaaggacactgcaggacaagtgactgtatgcccagggtcccttcctctgcaccacactcggctgttcctgagcctccttgcaatgggcggtccgagcatgccgctgtatgctggaaggaccccgtcttctcaggtgccacgcagggtttaggaatctctaaacttgaagcttttccacagtttattttatgcaactttctctatctagaatggagacaaacgtgtcttcagctaatttttttttttaactcgggttcttcgaggtataatttacatgca

SEQ ID NO: 45805 - DNA, 664 bp, Homo sapiens
gcatgctaatttagagttatttatagatatgcctatctttcttactgaattttaatctccttatataaatgtctctctgtgtgtttgtgtgtgtgtatttctttatttattattttaccctaggacctctcacagtttcaagatctyatagctagaagatggcagagtgacatgatgcctgcattgaagtgctcctccaggtttatgactactcctgacccatagaatactcaatgtataggcctttagtaaatattttcattaacagcagaaaaccaccatttacagtacatttcatttcccattcttgtcacaggagacctgctttactaagctctttcacatccatcaccactcagaataaaatagtataaagaattgtgacaacattagaagagagaaaaataaaagcagagttgataagaaaaacacttcaagacacctctgggtacaacagaattggaaaataaacttagaccttaccatgtatgattcatctccaacagagtatgattaaacatattcaactgacaagaaaagtatttaaaagtaataaacccccccttttttaacagctgtaagggtttctagaacatattatcttttcttttgggtattttaagaaatgtttcttttcaggtcagaaaaacctgattacttagat

SEQ ID NO: 45806 - DNA, 664 bp, Homo sapiens
gcatgctaatttagagttatttatagatatgcctatctttcttactgaattttaatctccttatataaatgtctctctgtgtgtttgtgtgtgtgtatttctttatttattattttaccctaggacctctcacagtttcaagatctcatagctagaagatggcagagtgacatgatgcctgcattgaagtgctcctccaggtttatgactactcctgacccatagaatactcaatgtataggcctttagtaaatattttcattaacagcagaaaaccaccatttacagtacatttcatttcccattcttgtcacaggagacctgctttactaagctctttcacatccatcaccactcagaataaaatagtataaagaattgtgacaacaytagaagagagaaaaataaaagcagagttgataagaaaaacacttcaagacacctctgggtacaacagaattggaaaataaacttagaccttaccatgtatgattcatctccaacagagtatgattaaacatattcaactgacaagaaaagtatttaaaagtaataaacccccccttttttaacagctgtaagggtttctagaacatattatcttttcttttgggtattttaagaaatgtttcttttcaggtcagaaaaacctgattacttagat

SEQ ID NO: 45807 - DNA, 664 bp, Homo sapiens
gcatgctaatttagagttatttatagatatgcctatctttcttactgaattttaatctccttatataaatgtctctctgtgtgtttgtgtgtgtgtatttctttatttattattttaccctaggacctctcacagtttcaagatctcatagctagaagatggcagagtgacatgatgcctgcattgaagtgctcctccaggtttatgactactcctgacccatagaatactcaatgtataggcctttagtaaatattttcattaacagcagaaaaccaccatttacagtacatttcatttcccattcttgtcacaggagacctgctttactaagctctttcacatccatcaccactcagaataaaatagtataaagaattgtgacaacattagaagagagaaaaataaaagcagagttgataagaaaaacacttcaagacacctctgggtacaacagaattggaaaataaacttagaccttaccatgtatgattcatctccaacagagtatgattaaacatattcaactgacaagaaaartatttaaaagtaataaacccccccttttttaacagctgtaagggtttctagaacatattatcttttcttttgggtattttaagaaatgtttcttttcaggtcagaaaaacctgattacttagat

SEQ ID NO: 45808 - DNA, 579 bp, Homo sapiens
catgtgtatttagtttcacagttaaatgtacacaacagaagcaaccccccaccccttgcattcccatttctctctcctttcttttcctttgcctctccctttctcagactgcgctgagctgggtggatctggctctgtcccaagttccactgaacatctggaacaatttttctattgttcttgatctgagtttgaaaaaccacaaataactttgytaagcaccatttctccttcatttttaatacctagattttaggccaggcatagtggctcatgtctgtaatcccagcactttgggaagccgaggctggtggatcgcttgaggtcaggagtttgagaccggcctgaccaacatggtgaaaccccatctctactaaaaatacaaaaattacccaggcatggtagcacatgcctgtaatcccagctactcgggaggctgcggcccaagaatggcttgaacccggaagggggaggctgcagtgagccaagattgtgccactgcactccagcctgggtgacagagcaggactccgtctcaaaaaaaaacaacaacaaaaaaaaaaaacacaaaaacaaaaa

SEQ ID NO: 45809 - DNA, 579 bp, Homo sapiens
catgtgtatttagtttcacagttaaatgtacacaacagaagcaaccccccaccccttgcattcccatttctctctcctttcttttcctttgcctctccctttctcagactgcgctgagctgggtggatctggctctgtcccaagttccactgaacatctggaacaatttttctattgttcttgatctgagtttgaaaaaccacaaataactttgctaagcaccatttctccttcatttttaatacctagattttaggccaggcatagtggctcatgtctgtaatcccagcactttgggaagccgaggctggtggatcgcttgaggtcaggagtttgagaccggcctgaccaacatggtgaaaccccatctctactaaaaatacaaaaattacccaggcatggtagcacatgcctgtaatcccagctactcgggaggctgcggcccaagaatggcttgaacccggaagggggaggctgcagtgagccaagattgtgccactgcactccagcctgggtgacagagcaggactccgtctcaaaaaaaaamaacaacaaaaaaaaaaaacacaaaaacaaaaa

SEQ ID NO: 45810 - DNA, 538 bp, Homo sapiens
gtctacattcggtgacacggtgtgtgtgttgatgcaggaacccgtgggtatgtgtggacgtggacacttgtgtgaggggtgtggtgtgtgtgcaaagaccctgggacattaggtatttgcctgtgtggctgttcctaggcataggtagtgggaggtgtgtgcatggcatgggtagatagggtatgtcctcggtgatgtggggacgtgagaagcctgtcacctggacgccgatgaagaccatctcgatgacagrgaagacaaggtccagctgtgacttgcagcggatgtggctcacatcgtagcccactcggaagatgttgaggcagaaggtgcagctgccgaagagcactagggaacctggccggacatgtgggcgggcgttggcacctgcgcggaaccggctctccctccccacccctgcccagccccccagcaacctgacactcaccccgcacccagaggggcccgcgtggggatcttggtagagcacggcgtgtggtcggcgggtggtgcttgccacatagtagagaagccaaag

SEQ ID NO: 45811 - DNA, 575 bp, Homo sapiens
tcccattccagttacatccttcacaaaccggtggaaagctttcttcagcagtttcccttgagtaaccccttctgggattcaagggrgccccaggatgaacacttctctctcccatctgagttctgatgcatttgagaaatccacagaagtaggacagatgaaggtcaaaggatgatctttattctgatatgactgatgctggagaaagtggcaagtgagatgtgaaatgtataatccagaatcagaaaggcatgtccatctcttcacaggcagagctgcccccagcaagaacctggccctgccaaacctagagtggagtgtgtgtttttgttgagcaggtggctccctcccaagagaaggaggaagtgacagagctatgcagatccacttccacatcccagactcatcaattaagaaggaggttgtgggtggagagaggctaggagggttttgcaagtgggcatcccctacatggaaaaacaagaaacttctggagtggggtaagtactatgtctccaaatgcacccccatttaaaaatttttcttcaggggcttcttctatgatgtcatatttt

SEQ ID NO: 45812 - DNA, 554 bp, Homo sapiens
tgcactccagcctggrcgacagagcgagacaccttcaaaaacacaaacaaaaaacaaaacaaacaaaaaacggatcaaaatctgttttgagcagcacaaatcctgaatgaataaaaacatgtgcctaggtccctgccctggaaaagatcagagggccagtgtggagggtggaggaaaagtgcctcggtccttaacaccgataaagatgactttaatgcacccaggctcatgaactaggacagtgatccggaggacggggcgaggaggtagatggaggggctgcatttacatcgtcagagggggctgggccctctgctaagggctttaggtaccctgtcttgttcaaactcttcagtgaccctgggagatgagtgcatttctttttaccagttcacagaggaggcactgaggtgagtttgttaagcaacgggcccaagatcacacaagcaaaaaatggtggggcttgtcctggaatccagctctatcagattagtacccagccctaaccactctgcctgctgccttcctggaggtccgttgatgtggcatgaggg

SEQ ID NO: 45813 - DNA, 554 bp, Homo sapiens
tgcactccagcctggacgacagagcgagacamcttcaaaaacacaaacaaaaaacaaaacaaacaaaaaacggatcaaaatctgttttgagcagcacaaatcctgaatgaataaaaacatgtgcctaggtccctgccctggaaaagatcagagggccagtgtggagggtggaggaaaagtgcctcggtccttaacaccgataaagatgactttaatgcacccaggctcatgaactaggacagtgatccggaggacggggcgaggaggtagatggaggggctgcatttacatcgtcagagggggctgggccctctgctaagggctttaggtaccctgtcttgttcaaactcttcagtgaccctgggagatgagtgcatttctttttaccagttcacagaggaggcactgaggtgagtttgttaagcaacgggcccaagatcacacaagcaaaaaatggtggggcttgtcctggaatccagctctatcagattagtacccagccctaaccactctgcctgctgccttcctggaggtccgttgatgtggcatgaggg
